(19) United States
(12) Patent Application Publication
(10) Pub. No.: US 2015/0175980 A1
(43) Pub. Date: Jun. 25, 2015

(54) NOVEL CELL WALL DECONSTRUCTION ENZYMES OF SCYTALIDIUM THERMOPHILUM, MYRIOCOCCUM THERMOPHILUM, AND AUREOBASIDIUM PULLULANS, AND USES THEREOF

(71) Applicant: CONCORDIA UNIVERSITY, MONTREAL (CA)

(72) Inventors: Adrian Tsang, Montreal (CA); Justin Powlowski, Montreal (CA); Gregory Butler, Montreal (CA)

(21) Appl. No.: 14/405,602

(22) PCT Filed: Jun. 7, 2013
(86) PCT No.: PCT/CA2013/050434

§ 371 Date: Dec. 4, 2014

Related U.S. Application Data
(60) Provisional application No. 61/657,075, filed on Jun. 8, 2012.
(60) Provisional application No. 61/657,078, filed on Jun. 8, 2012.
(60) Provisional application No. 61/657,082, filed on Jun. 8, 2012.

(51) Int. Cl. C12N 9/18; C12N 9/24; A23K 1/165; C12N 9/90; C12N 9/88; A23L 1/30; C07K 16/40; C12N 9/42

(52) U.S. Cl. CPC C12N 9/18; C07K 16/40; C12N 9/248; C12N 9/2402; C12N 9/2437; C12N 9/2482; C12N 9/24; C12N 9/90; C12N 9/88; A23L 1/3014; A23K 1/1653; C12Y 302/01; C12Y 302/01055; C12Y 302/01004; C12Y 302/01037; C12Y 301/01072; C12Y 501/03003; A23V 2002/00

(57) ABSTRACT

The present invention relates to novel polypeptides and enzymes (e.g., thermostable proteins and enzymes) having activities relating to biomass processing and/or degradation (e.g., cell wall deconstruction), as well as polynucleotides, vectors, cells, compositions and tools relating to same, or functional variants thereof. More particularly, the present invention relates to secreted enzymes that may be isolated from the fungi, Scytalidium thermophilum strain CBS 625.91, Myriococcum thermophilum strain CBS 389.93, and Aureobasidium pullulans strain ATCC 62921. Uses thereof in various industrial processes such as in biofuels, food preparation, animal feed, pulp and paper, textiles, detergents, waste treatment and others are also disclosed.

### FIELD OF THE INVENTION

[0001] The present invention relates to novel polypeptides and enzymes having activities relating to biomass processing and/or degradation (e.g., cell wall deconstruction), as well as polynucleotides, vectors, cells, compositions and tools relating to same, or functional variants thereof. More particularly, the present invention relates to secreted enzymes that may be isolated from the fungi, Scytalidium thermophilum strain CBS 625.91, Myriococcum thermophilum strain CBS 389.93, and Aureobasidium pullulans strain ATCC 62921. Uses thereof in various industrial processes such as in biofuels, food preparation, animal feed, pulp and paper, textiles, detergents, waste treatment and others are also disclosed.

### SEQUENCE LISTING

[0002] This application contains a Sequence Listing in computer readable form entitled “Seq_Listing_SCYTH_MYRTH_AURPU.txt”, created Jun. 6, 2013 having a size of about 7.78 MB. The computer readable form is incorporated herein by reference.

### BACKGROUND OF THE INVENTION

[0003] Biomass-processing enzymes have a number of industrial applications such as in: the biofuel industry (e.g., improving ethanol yield and/or increasing the efficiency and economy of ethanol production); the food industry (e.g., production of cereal-based food products; the feed-enzyme industry (e.g., increasing the digestibility/absorption of nutrients); the pulp and paper industry (e.g., enhancing bleachability of pulp); the textile industry (e.g., treatment of cellulose-based fabrics); the waste treatment industry (e.g., de-colorization of synthetic dyes); the detergent industry (e.g., providing eco-friendly cleaning products); and the rubber industry (e.g., catalyzing the conversion of latex into foam rubber).

[0004] In particular, driven by the limited availability of fossil fuels, there is a growing interest in the biofuel industry for improving the conversion of biomass into second-generation biofuels. This process is heavily dependent on inexpensive and effective enzymes for the conversion of lignocellulose to ethanol. Cellulase enzyme cocktails involve the concerted action of endoglucanases, cellobiohydrolases (also known as exoglucanases), and beta-glucosidases. The current cost of cellulose-degrading enzymes is too high for bioethanol to compete economically with fossil fuels. Cost reduction may result from the discovery of cellulase enzymes with, for example, higher specific activity, lower production costs, and/or greater compatibility with processing conditions including temperature, pH and the presence of inhibitors in the biomass, or produced as the result of biomass pre-treatment.

[0005] Conversion of plant biomass to glucose may also be enhanced by supplementing cellulose cocktails with enzymes that degrade the other components of biomass, including hemicelluloses, pectins and lignins, and their linkages, thereby improving the accessibility of cellulose to the cellulase enzymes. Such enzymes include, without being limiting, to: xylanases, mannanases, arabinanases, esterases, glucuronidases, xyloglucanases and arabinofuranosidases for hemicelluloses; lignin peroxidases, manganese-dependent peroxidases, versatile peroxidases, and laccases for lignin; and pectate lyase, pectin lyase, polygalacturonase, pectin acetyl esterase, alpha-arabinofuranosidase, beta-galactosidase, galactanase, arabinanase, rhamnogalacturonase, rhamnogalacturonan lyase, and rhamnogalacturonan acetyl esterase, xylogalacturonosidase, xylogalacturonase, and rhamnogalacturonan lyase. Additionally, glycoside hydrolase family 61 (GH61) proteins have been shown to stimulate the activity of cellulase preparations.

[0006] These enzymes may also be useful for other purposes in processing biomass. For example, the lignin modifying enzymes may be used to alter the structure of lignin to produce novel materials, and hemicellulases may be employed to produce 5-carbon sugars from hemicelluloses, which may then be further converted to chemical products.

[0007] There is also a growing need for improved enzymes for food processing and feed applications. Cereal-based food products such as pasta, noodles and bread can be prepared from dough which is usually made from the basic ingredients (cereal) flour, water and optionally salt. As a result of a consumer-driven need to replace the chemical additives by more natural products, several enzymes have been developed with dough and/or cereal-based food product-improving properties, which are used in all possible combinations depending on the specific application conditions. Suitable enzymes include, for example, xylanase, starch degrading enzymes, oxidizing enzymes, fatty material splitting enzymes, protein degrading, and modifying or crosslinking enzymes. Many of these enzymes are also used for treating animal feed or animal feed additives, to make them more digestible or to improve their nutritional quality. Amylases are used for the conversion of plant starches to glucose. Pectin-active enzymes are used in fruit processing, for example to increase the yield of juices, and in fruit juice clarification, as well as in other food processing steps.

[0008] There is also a growing need for improved enzymes in other industries. In the pulp and paper industry, enzymes are used to make the bleaching process more effective and to reduce the use of oxidative chemicals. In the textile industry, enzymatic treatment is often used in place of (or in addition to) a bleaching treatment to achieve a “used” look of jeans, and can also improve the softness/feel of fabrics. When used in detergent compositions, enzymes can enhance cleaning ability or act as a softening agent. In the waste treatment industry, enzymes play an important role in changing the characteristics of the waste, for example, to become more amenable to further treatment and/or for bio-conversion to value-added products.

[0009] There is also a growing need for industrial enzymes and proteins that are “thermostable” in that they retain a level of their function or protein activity at temperatures about 50° C. These thermostable enzymes are highly desirable, for example, to be able to perform reactions at elevated temperatures to avoid or reduce contamination by microorganisms (e.g., bacteria).

[0010] There thus remains a need in the above-mentioned industries and others for biomass-processing enzymes, polynucleotides encoding same, and recombinant vectors and strains for expressing same.

[0011] The present description refers to a number of documents, the content of which is herein incorporated by reference in their entirety.

### SUMMARY OF THE INVENTION

[0012] In general, the present invention relates to soluble, secreted proteins relating to biomass processing and/or degradation (e.g., cell wall deconstruction) that may be isolated from the fungi, Scytalidium thermophilum strain CBS 625.91, Myriococcum thermophilum strain CBS 389.93, and Aureobasidium pullulans strain ATCC 62921, as well as polynucleotides, vectors, compositions, cells, antibodies, kits, products and uses associated with same. Briefly, these fungal strains were cultured in vitro and genomic DNA along with total RNA were isolated therefrom. These nucleic acids were then used to determine/assemble fungal genomic sequences and generate cDNA libraries. Bioinformatic tools were used to predict genes in the assembled genomic sequences, and those genes encoding proteins relating to biomass-degradation (e.g., cell wall deconstruction) were identified based on bioinformatics (e.g., the presence of conserved domains). Sequences predicted to encode proteins which are targeted to the mitochondria or bound to the cell wall were removed. cDNA clones comprising full-length sequences predicted to encode soluble, secreted proteins relating to biomass-degradation were fully sequenced and cloned into appropriate expression vectors for protein production and characterization. The full-length genomic, exonic, intronic, coding and polypeptide sequences are disclosed herein, along with corresponding putative (biological) functions and/or protein activities, where available.

[0013] The soluble, secreted, biomass degradation proteins of the present invention comprise a proteome which is referred to herein as the SSBD proteome of Scytalidium thermophilum strain CBS 625.91, Myriococcum thermophilum, or Aureobasidium pullulans.

[0014] Accordingly, in some aspects the present invention relates to an isolated polypeptide which is:
[0015] (a) a polypeptide comprising the amino acid sequence of any one of SEQ ID NOs: 571-855, 1468-1773, or 2548-2934
[0016] (b) a polypeptide comprising an amino acid sequence having at least 60%, at least 65%, at least 70%, at least 75%, at least 80%, at least 85%, at least 90%, at least 91%, at least 92%, at least 93%, at least 94%, at least 95%, at least 96%, at least 97%, at least 98%, or at least 99% amino acid sequence identity to the polypeptide defined in (a);
[0017] (c) a polypeptide comprising an amino acid sequence encoded by the nucleic acid sequence of any one of SEQ ID NOs: 286-570, 1162-1467, or 2161-2547;
[0018] (d) a polypeptide comprising an amino acid sequence encoded by any one the exonic nucleic acid sequences corresponding to the positions as defined in Tables 2A-2C;
[0019] (e) a polypeptide comprising an amino acid sequence encoded by a polynucleotide molecule that hybridizes under medium-high stringency conditions, high stringency conditions, or very high stringency conditions with the full-length complement of a polynucleotide molecule comprising the nucleic acid sequence defined in (c) or (d);
[0020] (f) a polypeptide comprising an amino acid sequence encoded by a polynucleotide molecule having at least 60%, at least 65% at least 70%, at least 75%, at least 80%, at least 85%, at least 90%, at least 91%, at least 92%, at least 93%, at least 94%, at least 95%, at least 96%, at least 97%, at least 98%, or at least 99% nucleic acid sequence identity to a polynucleotide molecule comprising the nucleic acid sequence defined in (c) or (d);
[0021] (g) a functional variant of the polypeptide defined in (a) comprising a substitution, deletion, and/or insertion at one or more residues; or
[0022] (h) a functional fragment of the polypeptide of any one of (a) to (g).

[0023] In some embodiments, the above mentioned polypeptide has a corresponding function and/or protein activity according to Tables 1A-1C.

[0024] In some embodiments, the above mentioned polypeptide comprises or consists of the amino acid sequence of any one of SEQ ID NOs: 571-855, 1468-1773, or 2548-2934.

[0025] In some embodiments, the above mentioned polypeptide is a recombinant polypeptide.

[0026] In some embodiments, above mentioned polypeptide is obtainable from a fungus. In some embodiments, the fungus is from the genus Scytalidium, Myriococcum, or Aureobasidium. In some embodiments, the fungus is Scytalidium thermophilum, Myriococcum thermophilum, or Aureobasidium pullulans.

[0027] In some aspects, the present invention relates to an antibody that specifically binds to any one of the above mentioned polypeptides.

[0028] In some aspects, the present invention relates to an isolated polynucleotide molecule encoding any one of the above mentioned polypeptides.

[0029] In some aspects, the present invention relates to an isolated polynucleotide molecule which is:
[0030] (a) a polynucleotide molecule comprising a nucleic acid sequence encoding the polypeptide of any one of SEQ ID NOs: 571-855, 1468-1773, or 2548-2934;
[0031] (b) a polynucleotide molecule comprising the nucleic acid sequence of any one of SEQ ID NOs: 1-285, 856-1161, or 1774-2160;
[0032] (c) a polynucleotide molecule comprising the nucleic acid sequence of any one of SEQ ID NOs: SEQ ID NOs: 286-570, 1162-1467, or 2161-2547;
[0033] (d) a polynucleotide molecule comprising any one of the exonic nucleic acid sequences corresponding to the positions as defined in Tables 2A-2C;
[0034] (e) a polynucleotide molecule comprising a nucleic acid sequence having at least 60%, at least 65%, at least 70%, at least 75%, at least 80%, at least 85%, at least 90%, at least 91%, at least 92%, at least 93%, at least 94%, at least 95%, at least 96%, at least 97%, at least 98%, or at least 99% nucleic acid sequence identity to any one of the polynucleotide molecules defined in (a) to (d); or
[0035] (f) a polynucleotide molecule that hybridizes under medium-high stringency conditions, high stringency conditions, or very high stringency conditions with the full-length complement of any one of the polynucleotide molecules defined in (a) to (e).

[0036] In some embodiments, the above mentioned polynucleotide molecule is obtainable from a fungus. In some embodiments, the fungus is from the genus Scytalidium, Myriococcum, or Aureobasidium. In some embodiments, the fungus is Scytalidium thermophilum, Myriococcum thermophilum, or Aureobasidium pullulans.

[0037] In some aspects, the present invention relates to a vector comprising any one of the above mentioned polynucleotide molecules. In some embodiments, the vector comprises a regulatory sequence operatively linked to the polynucleotide molecule for expression of same in a suitable host cell. In some embodiments, the suitable host cell is a bacterial cell; a fungal cell; or a filamentous fungal cell.

[0038] In some embodiments, the present invention relates to a recombinant host cell comprising any one of the above mentioned polynucleotide molecules or vectors. In some embodiments, the present invention relates to a polypeptide obtainable by expressing the above mentioned polynucleotide or vector in a suitable host cell. In some embodiments, the suitable host cell is a bacterial cell; a fungal cell; or a filamentous fungal cell.

[0039] In some aspects, the present invention relates to a composition comprising any one of the above mentioned polypeptides or the recombinant host cells. In some embodiments, the composition further comprising a suitable carrier. In some embodiments, the composition further comprises a substrate of the polypeptide. In some embodiments, the substrate is biomass.

[0040] In some aspects, the present invention relates to a method for producing any one of the above mentioned polypeptides, the method comprising: (a) culturing a strain comprising the above mentioned polynucleotide molecule or vector under conditions conducive for the production of the polypeptide; and (b) recovering the polypeptide. In some embodiments, the strain is a bacterial strain; a fungal strain; or a filamentous fungal strain.

[0041] In some aspects, the present invention relates to a method for producing any one of the above mentioned polypeptides, the method comprising: (a) culturing the above mentioned recombinant host cell under conditions conducive for the production of the polypeptide; and (b) recovering the polypeptide.

[0042] In some aspects, the present invention relates to a method for preparing a food product, the method comprising incorporating any one of the above mentioned polypeptides during preparation of the food product. In some embodiments, the food product is a bakery product.

[0043] In some aspects, the present invention relates to the use of the above mentioned polypeptide for the preparation or processing of a food product. In some embodiments, the food product is a bakery product.

[0044] In some aspects, the present invention relates to the use of any one of the above mentioned polypeptides for the preparation or processing of a food product. In some embodiments, the food product is a bakery product.

[0045] In some aspects, the present invention relates to the above mentioned polypeptide for use in the preparation or processing of a food product. In some embodiments, the food product is a bakery product.

[0046] In some aspects the present invention relates to the use of any one of the above mentioned polypeptides for the preparation of animal feed. In some aspects the present invention relates to the use of any one of the above mentioned polypeptides for increasing digestion or absorption of animal feed. In some aspects, the present invention relates to any one of the above mentioned polypeptides for use in the preparation of animal feed, or for increasing digestion or absorption of animal feed. In some embodiment, the animal feed is a cereal-based feed.

[0047] In some aspects the present invention relates to the use of any one of the above mentioned polypeptides for the production or processing of kraft pulp or paper. In some aspects the present invention relates to any one of the above mentioned polypeptides for the production or processing of kraft pulp or paper. In some embodiments, the processing comprises prebleaching and/or de-inking.

[0048] In some aspects the present invention relates to the use of any one of the above mentioned polypeptides for processing lignin. In some aspects the present invention relates to any one of the above mentioned polypeptides for processing lignin.

[0049] In some aspects the present invention relates to the use of any one of the above mentioned polypeptides for producing ethanol. In some aspects the present invention relates to any one of the above mentioned polypeptides for producing ethanol.

[0050] In some embodiments, the above mentioned uses are in conjunction with cellulose or a cellulase.

[0051] In some aspects the present invention relates to the use of any one of the above mentioned polypeptides for treating textiles or dyed textiles. In some aspects the present invention relates to any one of the above mentioned polypeptides for treating textiles or dyed textiles.

[0052] In some aspects the present invention relates to the use of any one of the above mentioned polypeptides for degrading biomass or pretreated biomass. In some aspects the present invention relates to any one of the above mentioned polypeptides for degrading biomass or pretreated biomass.

[0053] In some embodiments, the present invention relates to proteins and/or enzymes that are thermostable. In some embodiments, a polypeptide of the present invention retains a level of its function and/or protein activity at about 50° C., about 55° C., about 60° C., about 65° C., about 70° C., about 75° C., about 80° C., or about 95° C. In some embodiments, a polypeptide of the present invention retains a level of its function and/or protein activity between about 50° C. and about 95° C., between about 50° C. and about 90° C., between about 50° C. and about 85° C., between about 50° C. and about 80° C., between about 50° C. and about 75° C., between about 50° C. and about 70° C., or between about 50° C. and about 65° C. In some embodiments, a polypeptide of the present invention has optimal or maximal function and/or protein activity greater than 50° C., greater than 55° C., greater than 60° C., greater than 65° C., or greater than 70° C. In some embodiments, a polypeptide of the present invention has optimal or maximal function and/or protein activity between about 50° C. and about 95° C., between about 50° C. and about 90° C., between about 50° C. and about 85° C., between about 50° C. and about 80° C., between about 50° C. and about 75° C., between about 50° C. and about 70° C., or between about 50° C. and about 65° C.

[0054] Unless defined otherwise, the scientific and technological terms and nomenclature used herein have the same meaning as commonly understood by a person of ordinary skill to which this invention pertains. Commonly understood definitions of molecular biology terms can be found for example in Dictionary of Microbiology and Molecular Biology, 2nd ed. (Singleton et al., 1994, John Wiley & Sons, New York, N.Y.) or The Harper Collins Dictionary of Biology (Hale & Marham, 1991, Harper Perennial, New York, N.Y.), Rieger et al., Glossary of genetics: Classical and molecular, 5th edition, Springer-Verlag, New-York, 1991; Alberts et al., Molecular Biology of the Cell, 4th edition, Garland science, New-York, 2002; and, Lewin, Genes VII, Oxford University Press, New-York, 2000. Generally, the procedures of molecular biology methods and the like are common methods used in the art. Such standard techniques can be found in reference manuals such as for example Sambrook et al., (2000, Molecular Cloning—A Laboratory Manual, Third Edition, Cold Spring Harbor Laboratories); and Ausubel et al., (1994, Current Protocols in Molecular Biology, John Wiley & Sons, New-York).

[0055] Further objects and advantages of the present invention will be clear from the description that follows.

### DEFINITIONS

[0056] Headings, and other identifiers, e.g., (a), (b), (i), (ii), etc., are presented merely for ease of reading the specification and claims. The use of headings or other identifiers in the specification or claims does not necessarily require the steps or elements be performed in alphabetical or numerical order or the order in which they are presented.

[0057] In the present description, a number of terms are extensively utilized. In order to provide a clear and consistent understanding of the specification and claims, including the scope to be given such terms, the following definitions are provided.

[0058] Nucleotide sequences are presented herein by single strand, in the 5′ to 3′ direction, from left to right, using the one-letter nucleotide symbols as commonly used in the art and in accordance with the recommendations of the IUPAC-IUB Biochemical Nomenclature Commission.

[0059] The use of the word “a” or “an” when used in conjunction with the term “comprising” in the claims and/or the specification may mean “one” but it is also consistent with the meaning of “one or more”, “at least one”, and “one or more than one”.

[0060] As used in the specification and claims, the words “comprising” (and any form of comprising, such as “comprise” and “comprises”), “having” (and any form of having, such as “have” and “has”), “including” (and any form of including, such as “includes” and “include”) or “containing” (and any form of containing, such as “contains” and “contain”) are inclusive or open-ended and do not exclude additional, un-recited elements or method steps.

[0061] The term “about” is used to indicate that a value includes the standard deviation of error for the device or method being employed to determine the value. In general, the terminology “about” is meant to designate a possible variation of up to 10%. Therefore, a variation of 1, 2, 3, 4, 5, 6, 7, 8, 9 and 10% of a value is included in the term “about”.

[0062] The term “DNA” or “RNA” molecule or sequence (as well as sometimes the term “oligonucleotide”) refers to a molecule comprised generally of the deoxyribonucleotides adenine (A), guanine (G), thymine (T) and/or cytosine (C). In “RNA”, T is replaced by uracil (U).

[0063] The present description refers to a number of routinely used recombinant DNA (rDNA) technology terms. Nevertheless, definitions of selected examples of such rDNA terms are provided for clarity and consistency.

[0064] As used herein, “polynucleotide” or “nucleic acid molecule” refers to a polymer of nucleotides and includes DNA (e.g., genomic DNA, cDNA), RNA molecules (e.g., mRNA), and chimeras thereof. The nucleic acid molecule can be obtained by cloning techniques or synthesized. DNA can be double-stranded or single-stranded (coding strand or non-coding strand [antisense]). Conventional deoxyribonucleic acid (DNA) and ribonucleic acid (RNA) are included in the terms “nucleic acid molecule” and “polynucleotide” as are analogs thereof (e.g., generated using nucleotide analogs, e.g., inosine or phosphorothioate nucleotides). Such nucleotide analogs can be used, for example, to prepare polynucleotides that have altered base-pairing abilities or increased resistance to nucleases. A nucleic acid backbone may comprise a variety of linkages known in the art, including one or more of sugar-phosphodiester linkages, peptide-nucleic acid bonds (referred to as “peptide nucleic acids” (PNA); Hydig-Hielsen et al., PCT Intl Pub. No. WO 95/32305), phosphorothioate linkages, methylphosphonate linkages or combinations thereof. Sugar moieties of the nucleic acid may be ribose or deoxyribose, or similar compounds having known substitutions, e.g., 2′ methoxy substitutions (containing a 2′-O-methylribofuranosyl moiety; see PCT No. WO 98/02582) and/or 2′ halide substitutions. Nitrogenous bases may be conventional bases (A, G, C, T, U), known analogs thereof (e.g., inosine or others; see “The Biochemistry of the Nucleic Acids 5-36”, Adams et al., ed., 11th ed., 1992), or known derivatives of purine or pyrimidine bases (see, Cook, PCT Intl Pub. No. WO 93/13121) or “abasic” residues in which the backbone includes no nitrogenous base for one or more residues (Arnold et al., U.S. Pat. No. 5,585,481). A nucleic acid may comprise only conventional sugars, bases and linkages, as found in RNA and DNA, or may include both conventional components and substitutions (e.g., conventional bases linked via a methoxy backbone, or a nucleic acid including conventional bases and one or more base analogs).

[0065] An “isolated nucleic acid molecule”, as is generally understood and used herein, refers to a polymer of nucleotides, and includes, but should not limited to DNA and RNA. The “isolated” nucleic acid molecule is purified from its natural in vivo state, obtained by cloning or chemically synthesized.

[0066] As used herein, the terms “gene” and “recombinant gene” refer to nucleic acid molecules which may be isolated from chromosomal DNA, and very often include an open reading frame encoding a protein, e.g., polypeptides of the present invention. A gene may include coding sequences, non-coding sequences, introns and regulatory sequences, as well known.

[0067] “Amplification” refers to any in vitro procedure for obtaining multiple copies (“amplicons”) of a target nucleic acid sequence or its complement or fragments thereof. In vitro amplification refers to production of an amplified nucleic acid that may contain less than the complete target region sequence or its complement. In vitro amplification methods include, e.g., transcription-mediated amplification, replicase-mediated amplification, polymerase chain reaction (PCR) amplification, ligase chain reaction (LCR) amplification and strand-displacement amplification (SDA including multiple strand-displacement amplification method (MSDA)). Replicase-mediated amplification uses self-replicating RNA molecules, and a replicase such as Qβ-replicase (e.g., Kramer et al., U.S. Pat. No. 4,786,600). PCR amplification is well known and uses DNA polymerase, primers and thermal cycling to synthesize multiple copies of the two complementary strands of DNA or cDNA (e.g., Mullis et al., U.S. Pat. Nos. 4,683,195, 4,683,202, and 4,800,159). LCR amplification uses at least four separate oligonucleotides to amplify a target and its complementary strand by using multiple cycles of hybridization, ligation, and denaturation (e.g., EP Pat. App. Pub. No. 0320308). SDA is a method in which a primer contains a recognition site for a restriction endonuclease that permits the endonuclease to nick one strand of a hemimodified DNA duplex that includes the target sequence, followed by amplification in a series of primer extension and strand displacement steps (e.g., Walker et al., U.S. Pat. No. 5,422,252). Two other known strand-displacement amplification methods do not require endonuclease nicking (Dattagupta et al., U.S. Pat. No. 6,087,133 and U.S. Pat. No. 6,124,120 (MSDA)). Those skilled in the art will understand that the oligonucleotide primer sequences of the present invention may be readily used in any in vitro amplification method based on primer extension by a polymerase (e.g., see Kwoh et al., 1990, Am. Biotechnol. Lab. 8:14 25 and Kwoh et al., 1989, Proc. Natl. Acad. Sci. USA 86, 1173 1177; Lizardi et al., 1988, BioTechnology 6:1197 1202; Malek et al., 1994, Methods Mol. Biol., 28:253 260; and Sambrook et al., 2000, Molecular Cloning—A Laboratory Manual, Third Edition, CSH Laboratories). As commonly known in the art, the oligos are designed to bind to a complementary sequence under selected conditions. The terminology “amplification pair” or “primer pair” refers herein to a pair of oligonucleotides (oligos) of the present invention, which are selected to be used together in amplifying a selected nucleic acid sequence by one of a number of types of amplification processes.

[0068] As used herein, the terms “hybridizing” and “hybridizes” are intended to describe conditions for hybridization and washing under which nucleotide sequences at least about 60%, at least about 70%, at least about 80%, more preferably at least about 85%, even more preferably at least about 90%, more preferably at least 95%, more preferably at least 98% or more preferably at least 99% homologous to each other typically remain hybridized to each other. A preferred, non-limiting example of such hybridization conditions are hybridization in 6× sodium chloride/sodium citrate (SSC) at about 45° C., followed by one or more washes in 1×SSC, 0.1% SDS at 50° C., preferably at 55° C., preferably at 60° C. and even more preferably at 65° C. Highly stringent conditions include, for example, hybridizing at 68° C. in 5×SSC/5×Denhardt's solution/1.0% SDS and washing in 0.2×SSC/0.1% SDS at room temperature. Alternatively, washing may be performed at 42° C. The skilled artisan will know which conditions to apply for stringent and highly stringent hybridization conditions. Additional guidance regarding such conditions is readily available in the art, for example, in Sambrook et al., supra; and Ausubel et al., supra (eds.), 1995, Current Protocols in Molecular Biology, (John Wiley & Sons, N.Y.). Of course, a polynucleotide which hybridizes only to a poly (A) sequence (such as the 3′ terminal poly(A) tract of mRNAs), or to a complementary stretch of T (or U) residues, would not be included in a polynucleotide of the invention used to specifically hybridize to a portion of a nucleic acid of the invention, since such a polynucleotide would hybridize to any nucleic acid molecule containing a poly (A) stretch or the complement thereof (e.g., practically any double-stranded cDNA clone).

[0069] The terms “identity” and “percent identity” are used interchangeably herein. For the purpose of this invention, it is defined here that in order to determine the percent identity of two amino acid sequences or of two nucleic acid sequences, the sequences are aligned for optimal comparison purposes (e.g., gaps can be introduced in the sequence of a first amino acid or nucleic acid sequence for optimal alignment with a second amino or nucleic acid sequence). The amino acid residues or nucleotides at corresponding amino acid positions or nucleotide positions are then compared. When a position in the first sequence is occupied by the same amino acid residue or nucleotide as the corresponding position in the second sequence, then the molecules are identical at that position. The percent identity between the two sequences is a function of the number of identical positions shared by the sequences (i.e., % identity=number of identical positions/total number of positions (i.e., overlapping positions)×100). Preferably, the two sequences are the same length. Thus, In accordance with the present invention, the term “identical” or “percent identity” in the context of two or more nucleic acid or amino acid sequences, refers to two or more sequences or subsequences that are the same, or that have a specified percentage of amino acid residues or nucleotides that are the same (e.g., 60% or 65% identity, preferably, 70-95% identity, more preferably at least 95% identity), when compared and aligned for maximum correspondence over a window of comparison, or over a designated region as measured using a sequence comparison algorithm as known in the art, or by manual alignment and visual inspection. Sequences having, for example, 60% to 95% or greater sequence identity are considered to be substantially identical. Such a definition also applies to the complement of a test sequence. Preferably, the described identity exists over a region that is at least about 15 to 25 amino acids or nucleotides in length, more preferably, over a region that is about 50 to 100 amino acids or nucleotides in length. Those having skill in the art will know how to determine percent identity between/among sequences using, for example, algorithms such as those based on CLUSTALW computer program (Thompson Nucl. Acids Res. 2 (1994), 4673-4680) or FASTDB (Brutlag Comp. App. Biosci. 6 (1990), 237-245), as known in the art. Although the FASTDB algorithm typically does not consider internal non-matching deletions or additions in sequences, i.e., gaps, in its calculation, this can be corrected manually to avoid an overestimation of the % identity. CLUSTALW, however, does take sequence gaps into account in its identity calculations. Also available to those having skill in this art are the BLAST and BLAST 2.0 algorithms (Altschul Nucl. Acids Res. 25 (1977), 3389-3402). The BLASTN program for nucleic acid sequences uses as defaults a word length (W) of 11, an expectation (E) of 10, M=5, N=4, and a comparison of both strands. For amino acid sequences, the BLASTP program uses as defaults a wordlength (W) of 3, and an expectation (E) of 10. The BLOSUM62 scoring matrix (Henikoff Proc. Natl. Acad. Sci., USA, 89, (1989), 10915) uses alignments (B) of 50, expectation (E) of 10, M=5, N=4, and a comparison of both strands. Moreover, the present invention also relates to nucleic acid molecules the sequence of which is degenerate in comparison with the sequence of an above-described hybridizing molecule. When used in accordance with the present invention the term “being degenerate as a result of the genetic code” means that due to the redundancy of the genetic code different nucleotide sequences code for the same amino acid. The present invention also relates to nucleic acid molecules which comprise one or more mutations or deletions, and to nucleic acid molecules which hybridize to one of the herein described nucleic acid molecules, which show (a) mutation(s) or (a) deletion(s). The skilled person will appreciate that all these different algorithms or programs will yield slightly different results but that the overall percentage identity of two sequences is not significantly altered when using different algorithms.

[0070] In a related manner, the terms “homology” or “percent homology”, refer to a similarity between two polypeptide sequences, but take into account changes between amino acids (whether conservative or not). As well known in the art, amino acids can be classified by charge, hydrophobicity, size, etc. It is also well known in the art that amino acid changes can be conservative (e.g., they do not significantly affect, or not at all, the function of the protein). A multitude of conservative changes are known in the art, Serine for threonine, isoleucine for leucine, arginine for lysine etc., Thus the term homology introduces evolutionistic notions (e.g., pressure from evolution to a retain function of essential or important regions of a sequence, while enabling a certain drift of less important regions).

[0071] The skilled person will be aware of the fact that several different computer programs are available to determine the homology between two sequences. For instance, a comparison of sequences and determination of percent identity between two sequences can be accomplished using a mathematical algorithm. In a preferred embodiment, the percent identity between two amino acid sequences is determined using the Needleman and Wunsch (J. Mol. Biol. (48): 444-453 (1970)) algorithm which has been incorporated into the GAP program in the Accelrys GCG software package (available at http://www.accelrys.com/products/gcg/), using either a Blossom 62 matrix or a PAM250 matrix, and a gap weight of 16, 14, 12, 10, 8, 6, or 4 and a length weight of 1, 2, 3, 4, 5, or 6. The skilled person will appreciate that all these different parameters will yield slightly different results but that the overall percentage identity of two sequences is not significantly altered when using different algorithms.

[0072] In yet another embodiment, the percent identity between two nucleotide sequences is determined using the GAP program in the Accelrys GCG software package (available at http://www.accelrys.com/products/gcg/), using a NWSgapdna.CMP matrix and a gap weight of 40, 50, 60, 70, or 80 and a length weight of 1, 2, 3, 4, 5, or 6. In another embodiment, the percent identity two amino acid or nucleotide sequence is determined using the algorithm of E. Meyers and W. Miller (CABIOS, 4:11-17 (1989) which has been incorporated into the ALIGN program (version 2.0) (available at the ALIGN Query using sequence data of the Genestream server IGH Montpellier France http://vega.igh.cnrs.fr/bin/align-guess.cgi) using a PAM120 weight residue table, a gap length penalty of 12 and a gap penalty of 4.

[0073] The nucleic acid and protein sequences of the present invention can further be used as a “query sequence” to perform a search against public databases to, for example, identify other family members or related sequences. Such searches can be performed using the NBLAST and XBLAST programs (version 2.0) of Altschul et al., (1990) J. Mol. Biol. 215:403-10. BLAST nucleotide searches can be performed with the NBLAST program, score=100, wordlength=12 to obtain nucleotide sequences homologous to nucleic acid molecules of the invention. BLAST protein searches can be performed with the XBLAST program, score=50, wordlength=3 to obtain amino acid sequences homologous to protein molecules of the invention. To obtain gapped alignments for comparison purposes, Gapped BLAST can be utilized as described in Altschul et al., (1997) Nucleic Acids Res. 25(17): 3389-3402. When utilizing BLAST and Gapped BLAST programs, the default parameters of the respective programs (e.g., XBLAST and NBLAST) can be used. See the homepage of the National Center for Biotechnology Information at http://www.ncbi.nlm.nih.qov/.

[0074] By “sufficiently complementary” is meant a contiguous nucleic acid base sequence that is capable of hybridizing to another sequence by hydrogen bonding between a series of complementary bases. Complementary base sequences may be complementary at each position in sequence by using standard base pairing (e.g., G:C, A:T or A:U pairing) or may contain one or more residues (including abasic residues) that are not complementary by using standard base pairing, but which allow the entire sequence to specifically hybridize with another base sequence in appropriate hybridization conditions. Contiguous bases of an oligomer are preferably at least about 80% (81, 82, 83, 84, 85, 86, 87, 88, 89, 90, 91, 92, 93, 94, 95, 96, 97, 98, 99, 100%), more preferably at least about 90% complementary to the sequence to which the oligomer specifically hybridizes. Appropriate hybridization conditions are well known to those skilled in the art, can be predicted readily based on sequence composition and conditions, or can be determined empirically by using routine testing (see Sambrook et al, Molecular Cloning, A Laboratory Manual, 2^{nd} ed. (Cold Spring Harbor Laboratory Press, Cold Spring Harbor, N.Y., 1989) at §§1.90-1.91, 7.37-7.57, 9.47-9.51 and 11.47-11.57, particularly at §§9.50-9.51, 11.12-11.13, 11.45-11.47 and 11.55-11.57).

[0075] The present invention refers to a number of units or percentages that are often listed in sequences. For example, when referring to “at least 80%, at least 85%, at least 90% . . . ”, or “at least about 80%, at least about 85%, at least about 90% . . . ”, every single unit is not listed, for the sake of brevity. For example, some units (e.g., 81, 82, 83, 84, 85, . . . 91, 92% . . . ) may not have been specifically recited but are considered encompassed by the present invention. The non-listing of such specific units should thus be considered as within the scope of the present invention.

[0076] Nucleic acid sequences may be detected by using hybridization with a complementary sequence (e.g., oligonucleotide probes) (see U.S. Pat. No. 5,503,980 (Cantor), U.S. Pat. No. 5,202,231 (Drmanac et al.), U.S. Pat. No. 5,149,625 (Church et al.), U.S. Pat. No. 5,112,736 (Caldwell et al.), U.S. Pat. No. 5,068,176 (Vijg et al.), and U.S. Pat. No. 5,002,867 (Macevicz)). Hybridization detection methods may use an array of probes (e.g., on a DNA chip) to provide sequence information about the target nucleic acid which selectively hybridizes to an exactly complementary probe sequence in a set of four related probe sequences that differ one nucleotide (see U.S. Pat. Nos. 5,837,832 and 5,861,242 (Chee et al.)).

[0077] A detection step may use any of a variety of known methods to detect the presence of nucleic acid by hybridization to an oligonucleotide probe. The types of detection methods in which probes can be used include Southern blots (DNA detection), dot or slot blots (DNA, RNA), and Northern blots (RNA detection). Labeled proteins could also be used to detect a particular nucleic acid sequence to which it binds (e.g., protein detection by far western technology: Guichet et al., 1997, Nature 385(6616): 548-552; and Schwartz et al., 2001, EMBO 20(3): 510-519). Other detection methods include kits containing reagents of the present invention on a dipstick setup and the like. Of course, it might be preferable to use a detection method which is amenable to automation. A non-limiting example thereof includes a chip or other support comprising one or more (e.g., an array) of different probes.

[0078] A “label” refers to a molecular moiety or compound that can be detected or can lead to a detectable signal. A label is joined, directly or indirectly, to a nucleic acid probe or the nucleic acid to be detected (e.g., an amplified sequence) or to a polypeptide to be detected. Direct labeling can occur through bonds or interactions that link the label to the polynucleotide or polypeptide (e.g., covalent bonds or non-covalent interactions), whereas indirect labeling can occur through the use of a “linker” or bridging moiety, such as additional nucleotides, amino acids or other chemical groups, which are either directly or indirectly labeled. Bridging moieties may amplify a detectable signal. Labels can include any detectable moiety (e.g., a radionuclide, ligand such as biotin or avidin, enzyme or enzyme substrate, reactive group, chromophore such as a dye or colored particle, luminescent compound including a bioluminescent, phosphorescent or chemiluminescent compound, and fluorescent compound).

[0079] As used herein, “expression” is meant the process by which a gene or otherwise nucleic acid sequence eventually produces a polypeptide. It involves transcription of the gene into mRNA, and the translation of such mRNA into polypeptide(s).

[0080] The terms “peptide” and “oligopeptide” are considered synonymous (as is commonly recognized) and each term can be used interchangeably as the context required to indicate a chain of at least two amino acids coupled by peptidyl linkages. The word “polypeptide” is used herein for chains containing more than seven amino acid residues. All oligopeptide and polypeptide formulas or sequences herein are written from left to right and in the direction from amino terminus to carboxyl terminus. The one-letter code of amino acids used herein is commonly known in the art and can be found in Sambrook, et al., supra. Sequence Listings programs can convert easily this one-letter code of amino acids sequence into a three-letter code.

[0081] The phrase “mature polypeptide” is defined herein as a polypeptide having biological activity a polypeptide of the present invention that is in its final form, following translation and any post-translational modifications, such as N-terminal processing, C-terminal truncation, removal of signal sequences, glycosylation, phosphorylation, etc. In one embodiment, polypeptides of the present invention comprise mature of polypeptides of any one of the polypeptides disclosed herein. Mature polypeptides of the present invention can be predicted using programs such as SignalP. The phrase “mature polypeptide coding sequence” is defined herein as a nucleotide sequence that encodes a mature polypeptide as defined above. As well known, some nucleotide sequences are non-coding.

[0082] As used herein, the term “purified” or “isolated” refers to a molecule (e.g., polynucleotide or polypeptide) having been separated from a component of the composition in which it was originally present. Thus, for example, an “isolated polynucleotide” or “isolated polypeptide” has been purified to a level not found in nature. A “substantially pure” molecule is a molecule that is lacking in most other components (e.g., 30, 40, 50, 60, 70, 75, 80, 85, 90, 95, 96, 97, 98, 99, 100% free of contaminants). By opposition, the term “crude” means molecules that have not been separated from the components of the original composition in which it was present. For the sake of brevity, the units (e.g., 66, 67 . . . 81, 82, 83, 84, 85, . . . 91, 92% . . . ) have not been specifically recited but are considered nevertheless within the scope of the present invention.

[0083] An “isolated polynucleotide” or “isolated nucleic acid molecule” is a nucleic acid molecule (DNA or RNA) that is not immediately contiguous with both of the coding sequences with which it is immediately contiguous (one on the 5′ end and one on the 3′ end) in the naturally occurring genome of the organism from which it is derived. Thus, in one embodiment, an isolated nucleic acid includes some or all of the 5′ non-coding (e.g., promoter) sequences that are immediately contiguous to the coding sequence. The term therefore includes, for example, a recombinant DNA that is incorporated into a vector, into an autonomously replicating plasmid or virus, or into the genomic DNA of a prokaryote or eukaryote, or which exists as a separate molecule (e.g., a cDNA or a genomic DNA fragment produced by PCR or restriction endonuclease treatment) independent of other sequences. It also includes a recombinant DNA that is part of a hybrid gene encoding an additional polypeptide that is substantially free of cellular material, viral material, or culture medium (when produced by recombinant DNA techniques), or chemical precursors or other chemicals (when chemically synthesized). Moreover, an “isolated nucleic acid fragment” is a nucleic acid fragment that is not naturally occurring as a fragment and would not be found in the natural state.

[0084] As used herein, an “isolated polypeptide” or “isolated protein” is intended to include a polypeptide or protein removed from its native environment. For example, recombinantly produced polypeptides and proteins expressed in host cells are considered isolated for the purpose of the invention, as are native or recombinant polypeptides which have been substantially purified by any suitable technique such as, for example, the single-step purification method disclosed in Smith and Johnson, Gene 67:31-40 (1988).

[0085] The term “variant” refers herein to a polypeptide, which is substantially similar in structure (e.g., amino acid sequence) to a polypeptide disclosed herein or encoded by a nucleic acid sequence disclosed herein without being identical thereto. Thus, two molecules can be considered as variants even though their primary, secondary, tertiary or quaternary structures are not identical. A variant can comprise an insertion, substitution, or deletion of one or more amino acids as compared to its corresponding native protein. A variant can comprise additional modifications (e.g., post-translational modifications such as acetylation, phosphorylation, glycosylation, sulfatation, sumoylation, prenylation, ubiquitination, etc). As used herein, the term “functional variant” is intended to include a variant which is sufficiently similar in both structure and function to a polypeptide disclosed herein or encoded by a nucleic acid sequence disclosed herein, to maintain at least one of its native biological activities.

[0086] As used herein, the term “biomass” refers to any cellulosic or lignocellulosic material and includes materials comprising cellulose, and optionally further comprising hemicellulose, lignin, starch, oligosaccharides and/or monosaccharides. Biomass may also comprise additional components, such as protein and/or lipid. Biomass may be derived from a single source, or biomass can comprise a mixture derived from more than one source; for example, biomass could comprise a mixture of corn cobs and corn stover, or a mixture of grass and leaves. Biomass includes, but is not limited to, bioenergy crops, agricultural residues, municipal solid waste, industrial solid waste, sludge from paper manufacture, yard waste, wood and forestry waste or a combination thereof. Examples of biomass include, but are not limited to, corn grain, corn cobs, crop residues such as corn husks, corn stover, grasses, wheat, wheat straw, barley, barley straw, hay, rice straw, switchgrass, waste paper, sugar cane bagasse, sorghum, soy, components obtained from milling of grains, trees, branches, roots, leaves, wood chips, sawdust, shrubs and bushes, vegetables, fruits, flowers, and animal manure or a combination thereof. Biomass that is useful for the invention may include biomass that has a relatively high carbohydrate value, is relatively dense, and/or is relatively easy to collect, transport, store and/or handle. In one embodiment of the present invention, biomass that is useful includes corn cobs, corn stover, sawdust, and sugar cane bagasse.

[0087] As used herein, the terms “cellulosic” or “cellulose-containing material” refers to a composition comprising cellulose. As used herein, the term “lignocellulosic” refers to a composition comprising both lignin and cellulose. Lignocellulosic material may also comprise hemicellulose. The predominant polysaccharide in the primary cell wall of biomass is cellulose, the second most abundant is hemi-cellulose, and the third is pectin. The secondary cell wall, produced after the cell has stopped growing, also contains polysaccharides and is strengthened by polymeric lignin covalently cross-linked to hemicellulose. Cellulose is a homopolymer of anhydrocellobiose and thus a linear beta-(1-4)-D-glucan, while hemicelluloses include a variety of compounds, such as xylans, xyloglucans, arabinoxylans, and mannans in complex branched structures with a spectrum of substituents. Although generally polymorphous, cellulose is found in plant tissue primarily as an insoluble crystalline matrix of parallel glucan chains. Hemicelluloses usually hydrogen bond to cellulose, as well as to other hemicelluloses, which help stabilize the cell wall matrix.

[0088] Cellulose is generally found, for example, in the stems, leaves, hulls, husks, and cobs of plants or leaves, branches, and wood of trees. The cellulose-containing material can be, but is not limited to, herbaceous material, agricultural residues, forestry residues, municipal solid wastes, waste paper, and pulp and paper mill residues. The cellulose-containing material can be any type of biomass including, but not limited to, wood resources, municipal solid waste, wastepaper, crops, and crop residues (e.g., see Wiselogel et al., 1995, in Handbook on Bioethanol (Charles E. Wyman, editor), pp. 105-118, Taylor & Francis, Washington D.C.; Wyman. 1994. Bioresource Technology 50: 3-16; Lynd. 1990. Applied Biochemistry and Biotechnology 24/25: 695-719; Mosier et al., 1999, Recent Progress in Bioconversion of Lignocellulosics, in Advances in Biochemical Engineering/Biotechnology, T. Scheper, managing editor, Volume 65. pp. 23-40. Springer-Verlag, New York). It is understood herein that the cellulose may be in the form of lignocellulose, a plant cell wall material containing lignin, cellulose, and hemicellulose in a mixed matrix.

[0089] The phrase “cellulolytic enhancing activity” is defined herein as a biological activity which enhances the hydrolysis of a cellulose-containing material by proteins having cellulolytic activity. The term “cellulolytic activity” is defined herein as a biological activity which hydrolyzes a cellulose-containing material.

[0090] The term “thermostable”, as used herein, refers to an enzyme that retains its function or protein activity at a temperature greater than 50° C.; thus, a thermostable cellulose-degrading or cellulase-enhacing enzyme/protein retains the ability to degrade or enhance the degradation of cellulose at this elevated temperature. A protein or enzyme may have more than one enzymatic activity. For example, some polypeptide of the present invention exhibit bifunctional activities such as xylosidase/arabinosidase activity. Such bifunctional enzymes may exhibit thermostability with regard to one activity, but not another, and still be considered as “thermostable”.

### BRIEF DESCRIPTION OF DRAWINGS

[0091] In the appended drawings:

[0092] FIG. 1 is a schematic map of the pGBFIN-49 expression plasmid.

[0093] FIG. 2 shows the endoxylanase activity of various secreted proteins from Scytalidium thermophilum (panel A), Myriococcum thermophilum (panel B), and Aureobasidium pullulans (panel C).

[0094] FIG. 3 shows the xyloglucanase activity of two secreted proteins from Aureobasidium pullulans on Tamarind xyloglucan.

[0095] FIGS. 4 and 5 show enzyme activity-temperature profiles of various secreted proteins from Scytalidium thermophilum.

[0096] FIGS. 6-11 show enzyme activity-temperature profiles of various secreted proteins from Myriococcum thermophilum.

[0097] FIGS. 12-16 show enzyme activity-temperature profiles of various secreted proteins from Aureobasidium pullulans.

[0098] In the appended Sequence Listing, SEQ ID NOs: 1-855 relate to sequences from Scytalidium thermophilum; SEQ ID NOs: 856-1773 relate to sequences from Myriococcum thermophilum; and SEQ ID NOs: 1774-2934 relate to sequences from Aureobasidium pullulans.

### DESCRIPTION OF ILLUSTRATIVE EMBODIMENTS

### Polypeptides of the Invention

[0099] In one aspect, the present invention relates to isolated polypeptides secreted by Scytalidium thermophilum, Myriococcum thermophilum, or Aureobasidium pullulans, (e.g., Scytalidium thermophilum strain CBS 625.91, Myriococcum thermophilum strain CBS 389.93, or Aureobasidium pullulans strain ATCC 62921) having an activity relating to the processing or degradation of biomass (e.g., cell wall deconstruction).

[0100] In another aspect, the present invention relates to isolated polypeptides comprising the amino acid sequences shown in any one of SEQ ID NOs: 571-855, 1468-1773, or 2548-2934.

[0101] In another aspect, the present invention relates to isolated polypeptides sharing a minimum threshold of amino acid sequence identity with any one of the above-mentioned polypeptides. In specific embodiments, the present invention relates to isolated polypeptides having at least 60%, 65%, 70%, 71%, 72, 73%, 74%, 75%, 76%, 77%, 78%, 79, 80%, 81%, 82%, 83%, 84%, 85%, 86%, 87%, 88%, 89%, 90%, 91%, 92%, 93%, 94%, 95%, 96%, 97%, 98% or 99% amino acid sequence identity to any one of the above-mentioned polypeptides. Other specific percentage units that have not been specifically recited here for brevity are nevertheless considered within the scope of the present invention.

[0102] In another aspect, the present invention relates to a polypeptide encoded by a polynucleotide of the present invention, which includes genomic (e.g., SEQ ID NOs: 1-285, 856-1161, or 1774-2160), and coding (e.g., SEQ ID NOs: 286-570, 1162-1467, or 2161-2547) nucleic acid sequences disclosed herein, polynucleotides hybridizing under medium-high, high, or very high stringency conditions with a full-length complement thereof, as well as polynucleotides sharing a certain degree of nucleic acid sequence identity therewith.

[0103] In another aspect, the present invention relates to a polypeptide comprising an amino acid sequence encoded by at least one exonic nucleic acid sequence of any one of the genomic sequences corresponding to SEQ ID NOs: 1-285, 856-1161, or 1774-2160 (e.g., the intron or exon segments defined by the exon boundaries listed in Tables 2A-2C) or a functional part thereof.

[0104] In another aspect, the present invention relates to functional variants of any one of the above-mentioned polypeptides. In another embodiment, the term “functional” or “biologically active” relates to the native enzymatic (e.g., catalytic) activity of a polypeptide of the present invention. In some embodiments, the present invention relates to a polypeptide comprising a biological activity of any one of the enzymes described below, or a polynucleotide encoding same.

[0105] “Carbohydrase” refers to any protein that catalyzes the hydrolysis of carbohydrates. “Glycoside hydrolase”, “glycosyl hydrolase” or “glycosidase” refers to a protein that catalyzes the hydrolysis of the glycosidic bonds between carbohydrates or between a carbohydrate and a non-carbohydrate residue. Endoglucanases, cellobiohydrolases, beta-glucosidases, a-glucosidases, xylanases, beta-xylosidases, alpha-xylosidases, galactanases, a-galactosidases, beta-galactosidases, a-amylases, glucoamylases, endo-arabinases, arabinofuranosidases, mannanases, beta-mannosidases, pectinases, acetyl xylan esterases, acetyl mannan esterases, femlic acid esterases, coumaric acid esterases, pectin methyl esterases, and chitosanases are examples of glycosidases.

[0106] “Cellulase” refers to a protein that catalyzes the hydrolysis of 1,4-D-glycosidic linkages in cellulose (such as bacterial cellulose, cotton, filter paper, phosphoric acid swollen cellulose, Avicel®); cellulose derivatives (such as carboxymethylcellulose and hydroxyethylcellulose); plant lignocellulosic materials, beta-D-glucans or xyloglucans. Cellulose is a linear beta-(1-4) glucan consisting of anhydrocellobiose units. Endoglucanases, cellobiohydrolases, and beta-glucosidases are examples of cellulases.

[0107] “Endoglucanase” refers to a protein that catalyzes the hydrolysis of cellulose to oligosaccharide chains at random locations by means of an endoglucanase activity.

[0108] “Cellobiohydrolase” refers to a protein that catalyzes the hydrolysis of cellulose to cellobiose via an exoglucanase activity, sequentially releasing molecules of cellobiose from the reducing or non-reducing ends of cellulose or cello-oligosaccharides. “beta-glucosidase” refers to an enzyme that catalyzes the conversion of cellobiose and oligosaccharides to glucose.

[0109] “Hemicellulase” refers to a protein that catalyzes the hydrolysis of hemicellulose, such as that found in lignocellulosic materials. Hemicelluloses are complex polymers, and their composition often varies widely from organism to organism, and from one tissue type to another. Hemicelluloses include a variety of compounds, such as xylans, arabinoxylans, xyloglucans, mamians, glucomannans, and galacto(gluco)mannans. Hemicellulose can also contain glucan, which is a general term for beta-linked glucose residues. In general, a main component of hemicellulose is beta-1,4-linked xylose, a five carbon sugar. However, this xylose is often branched as beta-1,3 linkages or beta-1,2 linkages, and can be substituted with linkages to arabinose, galactose, mannose, glucuronic acid, or by esterification to acetic acid. Hemicellulolytic enzymes, i.e., hemicellulases, include both endo-acting and exo-acting enzymes, such as xylanases, beta-xylosidases. alpha-xylosidases, galactanases, a-galactosidases, beta-galactosidases, endo-arabinases, arabinofuranosidases, mannanases, and beta-mannosidases. Hemicellulases also include the accessory enzymes, such as acetylesterases, ferulic acid esterases, and coumaric acid esterases. Among these, xylanases and acetyl xylan esterases cleave the xylan and acetyl side chains of xylan and the remaining xylo-oligomers are unsubstituted and can thus be hydrolysed with beta-xylosidase only. In addition, several less known side activities have been found in enzyme preparations which hydrolyze hemicellulose. Accordingly, xylanases, acetylesterases and beta-xylosidases are examples of hemicellulases.

[0110] “Xylanase” specifically refers to an enzyme that hydrolyzes the beta-1,4 bond in the xylan backbone, producing short xylooligosaccharides.

[0111] “Beta-mannanase” or “endo-1,4-beta-mannosidase” refers to a protein that hydrolyzes mannan-based hemicelluloses (mannan, glucomannan, galacto(gluco)mannan) and produces short beta-1,4-mannooligosaccharides.

[0112] “Mannan endo-1,6-alpha-mannosidase” refers to a protein that hydrolyzes 1,6-alpha-mannosidic linkages in unbranched 1,6-mannans.

[0113] “Beta-mannosidase” (beta-1,4-mannoside mannohydrolase; EC 3.2.1.25) refers to a protein that catalyzes the removal of beta-D-mannose residues from the non-reducing ends of oligosaccharides.

[0114] “Galactanase”, “endo-beta-1,6-galactanse” or “arabinogalactan endo-1,4-beta-galactosidase” refers to a protein that catalyzes the hydrolysis of endo-1,4-beta-D-galactosidic linkages in arabinogalactans.

[0115] “Glucoamylase” refers to a protein that catalyzes the hydrolysis of terminal 1,4-linked-D-glucose residues successively from non-reducing ends of the glycosyl chains in starch with the release of beta-D-glucose.

[0116] “Beta-hexosaminidase” or “beta-N-acetylglucosaminidase” refers to a protein that catalyzes the hydrolysis of terminal N-acetyl-D-hexosamine residues in N-acetyl-beta-D-hexosamines.

[0117] “Alpha-L-arabinofuranosidase”, “alpha-N-arabmofuranosidase”, “alpha-arabinofuranosidase”, “arabinosidase” or “arabinofuranosidase” refers to a protein that hydrolyzes arabinofuranosyl-containing hemicelluloses or pectins. Some of these enzymes remove arabinofuranoside residues from 0-2 or 0-3 single substituted xylose residues, as well as from 0-2 and/or 0-3 double substituted xylose residues. Some of these enzymes remove arabinose residues from arabinan oligomers.

[0118] “Endo-arabinase” refers to a protein that catalyzes the hydrolysis of 1,5-alpha-arabinofuranosidic linkages in 1,5-arabinans.

[0119] “Exo-arabinase” refers to a protein that catalyzes the hydrolysis of 1,5-alpha-linkages in 1,5-arabinans or 1,5-alpha-L arabino-oligosaccharides, releasing mainly arabinobiose, although a small amount of arabinotriose can also be liberated.

[0120] “Beta-xylosidase” refers to a protein that hydrolyzes short 1,4-beta-D-xylooligomers into xylose.

[0121] “Cellobiose dehydrogenase” refers to a protein that oxidizes cellobiose to cellobionolactone.

[0122] “Chitosanase” refers to a protein that catalyzes the endohydrolysis of beta-1,4-linkages between D-glucosamine residues in acetylated chitosan (i.e., deacetylated chitin).

[0123] “Exo-polygalacturonase” refers to a protein that catalyzes the hydrolysis of terminal alpha 1,4-linked galacturonic acid residues from non-reducing ends thus converting polygalacturonides to galacturonic acid.

[0124] “Acetyl xylan esterase” refers to a protein that catalyzes the removal of the acetyl groups from xylose residues. “Acetyl mannan esterase” refers to a protein that catalyzes the removal of the acetyl groups from mannose residues, “ferulic esterase” or “ferulic acid esterase” refers to a protein that hydrolyzes the ester bond between the arabinose substituent group and ferulic acid. “Coumaric acid esterase” refers to a protein that hydrolyzes the ester bond between the arabinose substituent group and coumaric acid. Acetyl xylan esterases, ferulic acid esterases and pectin methyl esterases are examples of carbohydrate esterases.

[0125] “Pectate lyase” and “pectin lyases” refer to proteins that catalyze the cleavage of 1,4-alpha-D-galacturonan by beta-elimination acting on polymeric and/or oligosaccharide substrates (pectates and pectins, respectively).

[0126] “Endo-1,3-beta-glucanase” or “laminarinase” refers to a protein that catalyzes the cleavage of 1,3-linkages in beta-D-glucans such as laminarin or lichenin. Laminarin is a linear polysaccharide made up of beta-1,3-glucan with beta-1,6-linkages.

[0127] “Lichenase” refers to a protein that catalyzes the hydrolysis of lichenan, a linear, 1,3-1,4-beta-D glucan.

[0128] Rhamnogalacturonan is composed of alternating alpha-1,4-rhamnose and alpha-1,2-linked galacturonic acid, with side chains linked 1,4 to rhamnose. The side chains include Type I galactan, which is beta-1,4-linked galactose with alpha-1,3-linked arabinose substituents; Type II galactan, which is beta-1,3-1,6-linked galactoses (very branched) with arabinose substituents; and arabinan, which is alpha-1,5-linked arabinose with alpha-1,3-linked arabinose branches. The galacturonic acid substituents may be acetylated and/or methylated.

[0129] “Exo-rhamnogalacturonanase” refers to a protein that catalyzes the degradation of the rhamnogalacturonan backbone of pectin from the non-reducing end.

[0130] “Rhamnogalacturonan acetylesterase” refers to a protein that catalyzes the removal of the acetyl groups ester-linked to the highly branched rhamnogalacturonan (hairy) regions of pectin.

[0131] “Rhamnogalacturonan lyase” refers to a protein that catalyzes the degradation of the rhamnogalacturonan backbone of pectin via a beta-elimination mechanism (e.g., see Pages et al., J. Bacteria, 185:4727-4733 (2003)).

[0132] “Alpha-rhamnosidase” refers to a protein that catalyzes the hydrolysis of terminal non-reducing alpha-L-rhamnose residues in alpha-L-rhamnosides.

[0133] Certain proteins of the present invention may be classified as “Family 61 glycosidases” based on homology of the polypeptides to CAZy Family GH61. Family 61 glycosidases may exhibit cellulolytic enhancing activity or endoglucanase activity. Additional information on the properties of Family 61 glycosidases may be found in U.S. Patent Application Publication Nos. 2005/0191736, 2006/0005279, 2007/0077630, and in PCT Publication No. WO 2004/031378.

[0134] “Esterases” represent a category of various enzymes including lipases, phospholipases, cutinases, and phytases that catalyze the hydrolysis and synthesis of ester bonds in compounds.

[0135] The International Union of Biochemistry and Molecular Biology have developed a nomenclature for enzymes where each enzyme is described by a sequence of four numbers preceded by “EC”. The first number broadly classifies the enzyme based on its mechanism. According to the naming conventions, enzymes are generally classified into six main family classes and many sub-family classes: EC 1 Oxidoreductases: catalyze oxidation/reduction reactions; EC 2 Transferases: transfer a functional group (e.g. a methyl or phosphate group); EC 3 Hydrolases: catalyze the hydrolysis of various bonds; EC 4 Lyases: cleave various bonds by means other than hydrolysis and oxidation; EC 5 Isomerases: catalyze isomerization changes within a single molecule; and EC 6 Ligases: join two molecules with covalent bonds. A number of bioinformatic tools are available to the skilled person to predict which main family class and sub-family class an enzyme molecule belongs to according to its sequence information. In some instances, certain enzymes (or family of enzymes) can be re-classified, for example, to take into account newly discovered enzyme functions or properties. Accordingly, the polypeptides/enzymes of the present invention are not meant to be limited to specific enzyme classes as they currently exist. The skilled person would know how to appropriately reclassify (and assign the appropriate functions) to the enzymes of the present invention based on the amino acid sequence information provided herein. Such reclassifications are thus within the scope of the present invention.

[0136] In some embodiments, the present invention relates to a polypeptide comprising a biological activity of any one of the enzymes (or sub-classes thereof), or a polynucleotide encoding same.
[0137] Cellulose-hydrolyzing enzymes, including: endoglucanases (EC 3.2.1.4), which hydrolyze the beta-1,4-linkages between glucose units; exoglucanases (also known as cellobiohydrolases 1 and 2) (EC 3.2.1.91), which hydrolyze cellobiose, a glucose disaccharide, from the reducing and non-reducing ends of cellulose; and beta-glucosidases (EC 3.2.1.21), which hydrolyze the beta-1,4 glycoside bond of cellobiose to glucose;
[0138] Proteins that enhance or accelerate the action of cellulose-degrading enzymes, including: glycoside hydrolase family 61 (GH61) proteins (e.g., polysaccharide monooxygenases), which enhance the action of cellulose enzymes on lignocellulose substrates;
[0139] Enzymes that degrade or modify xylan and/or xylan-lignin complexes, including: xylanases, such as endo-1,4-beta-xylanase (EC 3.2.1.8), which catalyze the endohydrolysis of 1-4-beta-D-xylosidic linkages in xylans (or xyloglucans); xylosidases, such as xylan 1,4-beta-xylosidases (EC 3.2.1.37), which catalyze hydrolysis of 1,4-beta-D-xylans to remove successive D-xylose residues from the non-reducing terminals, and also cleaves xylobiose; arabinosidases, such as alpha-arabinofuranosidases (EC 3.2.1.55), which hydrolyze terminal non-reducing alpha-L-arabinofuranoside residues in alpha-L-arabinosides (including arabinoxylans and arabinogalactans); alpha-glucuronidases (EC 3.2.1.139), which hydrolyze an alpha-D-glucuronoside to the corresponding alcohol and D-glucuronate; feruloyl esterases (EC 3.1.1.73), which catalyzes hydrolysis of the 4-hydroxy-3-methoxycinnamoyl (feruloyl) group from an esterified sugar (which is usually arabinose in natural substrates); and acetylxylan esterases (EC 3.1.1.72), which catalyze deacetylation of xylans and xylo-oligosaccharides;
[0140] Enzymes that degrade or modify mannan, including: mannanases, such as mannan endo-1,4-beta-mannosidase (EC 3.2.1.78), which catalyze random hydrolysis of 1,4-beta-D-mannosidic linkages in mannans, galactomannans and glucomannans;
[0141] mannosidases (EC 3.2.1.25), which hydrolyze terminal, non-reducing beta-D-mannose residues in beta-D-mannosides; alpha-galactosidases (EC 3.2.1.22), which hydrolyzes terminal, non-reducing alpha-D-galactose residues in alpha-D-galactosides (including galactose oligosaccharides, galactomannans and galactohydrolase); and mannan acetyl esterases;
[0142] Enzymes that degrade or modify xyloglucans, including: xyloglucanases such as xyloglucan-specific endo-beta-1,4-glucanase (EC 3.2.1.151), which involves endohydrolysis of 1,4-beta-D-glucosidic linkages in xyloglucan; and xyloglucan-specific exo-beta-1,4-glucanase (EC 3.2.1.155), which catalyzes exohydrolysis of 1,4-beta-D-glucosidic linkages in xyloglucan; endoglucanases/cellulases;
[0143] Enzymes that degrade or modify glucans, including: Enzymes that degrade beta-1,4-glucan, such as endoglucanases; cellobiohydrolases; and beta-glucosidases;
[0144] Enzymes that degrade beta-1,3-1,4-glucan, such as endo-beta-1,3(4)-glucanases (EC 3.2.1.6), which catalyzes endohydrolysis of 1,3- or 1,4-linkages in beta-D-glucans when the glucose residue whose reducing group is involved in the linkage to be hydrolyzed is itself substituted at C-3; endoglucanases (beta-glucanase, cellulase), and beta-glucosidases;
[0145] Enzymes that degrade or modify galactans, including: galactanases (EC 3.2.1.23), which hydrolyze terminal non-reducing beta-D-galactose residues in beta-D-galactosides;
[0146] Enzymes that degrade or modify arabinans, including: arabinanases (EC 3.2.1.99), which catalyze endohydrolysis of 1,5-alpha-arabinofuranosidic linkages in 1,5-arabinans;
[0147] Enzymes that degrade or modify starch, including: amylases, such as alpha-amylases (EC 3.2.1.1), which catalyze endohydrolysis of 1,4-alpha-D-glucosidic linkages in polysaccharides containing three or more 1,4-alpha-linked D-glucose units; and glucosidases, such as alpha-glucosidases (EC 3.2.1.20), which hydrolyze terminal, non-reducing 1,4-linked alpha-D-glucose residues with release of alpha-D-glucose;
[0148] Enzymes that degrade or modify pectin, including: pectate lyases (EC 4.2.2.2), which carry out eliminative cleavage of pectate to give oligosaccharides with 4-deoxy-alpha-D-gluc-4-enuronosyl groups at their non-reducing ends; pectin lyases (EC 4.2.2.10), which catalyze eliminative cleavage of (1-4)-alpha-D-galacturonan methyl ester to give oligosaccharides with 4-deoxy-6-O-methyl-alpha-D-galact-4-enuronosyl groups at their non-reducing ends; polygalacturonases (EC 3.2.1.15), which carry out random hydrolysis of 1,4-alpha-D-galactosiduronic linkages in pectate and other galacturonans; pectin esterases, such as pectin acetyl esterase (EC 3.1.1.11), which hydrolyzes acetate from pectin acetyl esters; alpha-arabi nofuranosidases; beta-galactosidases; galactanases; arabinanases; rhamnogalacturonases (EC 3.2.1.-), which hydrolyze alpha-D-galacturonopyranosyl-(1,2)-alpha-L-rhamnopyranosyl linkages in the backbone of the hairy regions of pectins; rhamnogalacturonan lyases (EC 4.2.2.-), which degrade type I rhamnogalacturonan from plant cell walls and releases disaccharide products; rhamnogalacturonan acetyl esterases (EC 3.1.1.-), which hydrolyze acetate from rhamnogalacturonan; and xylogalacturonosidases and xylogalacturonases (EC 3.2.1.-), which hydrolyze xylogalacturonan (xga), a galacturonan backbone heavily substituted with xylose, and which is one important component of the hairy regions of pectin;
[0149] Enzymes that degrade or modify lignin, including: lignin peroxidases (EC 1.11.1.14), which oxidize lignin and lignin model compounds using hydrogen peroxide; manganese-dependent peroxidases (EC 1.11.1.13), which oxidizes lignin and lignin model compounds using Mn²⁺ and hydrogen peroxide; versatile peroxidases (EC 1.11.1.16), which oxidize lignin and lignin model compounds using an electron donor and hydrogen peroxide and combines the substrate-specificity characteristics of the two other ligninolytic peroxidases: manganese peroxidase (EC 1.11.1.13) and lignin peroxidase (EC 1.11.1.14); and laccases (EC 1.10.3.2), a group of multi-copper proteins of low specificity acting on both o- and p-quinols, and often acting also on lignin; and
[0150] Enzymes acting on chitin, including: chitinases (EC 3.2.1.14), which catalyze random hydrolysis of N-acetyl-beta-D-glucosaminide 1,4-beta-linkages in chitin and chitodextrins; and hexosaminidases, such as beta-N-acetylhexosaminidase (EC 3.2.1.52), which hydrolyzes terminal non-reducing N-acetyl-D-hexosamine residues in N-acetyl-beta-D-hexosaminides.

[0151] In another embodiment, the present invention includes the polypeptides and their corresponding activities as defined in Tables 1A-1C, as well as functional variants thereof.

[0152] As alluded to above, the term “functional variant” as used herein is intended to include a polypeptide which is sufficiently similar in structure and function to any one of the above-mentioned polypeptides (without being identical thereto) to maintain at least one of its native biological activities. In another embodiment, a functional variant can comprise an insertion, substitution, or deletion of one or more amino acids as compared to its corresponding native protein. In another embodiment, a functional variant can comprise additional modifications (e.g., post-translational modifications such as acetylation, phosphorylation, glycosylation, sulfatation, sumoylation, prenylation, ubiquitination, etc).

[0153] In another embodiment, functional variants of the present invention can contain one or more conservative substitutions of a polypeptide sequence disclosed herein. Such modifications can be carried out routinely using site-specific mutagenesis. The term “conservative substitution” is intended to indicate a substitution in which the amino acid residue is replaced with an amino acid residue having a similar side chain. Families of amino acids having similar side chains are known in the art and include amino acids with basic side chains (e.g., lysine, arginine and hystidine), acidic side chains (e.g., aspartic acid, glutamic acid), uncharged polar side chains (e.g., glycine, asparagines, glutamine, serine, threonine, tyrosine, cysteine), non-polar side chains (e.g., alanine, valine, leucine, isoleucine, proline, phenylalanine, methionine, tryptophan), beta-branched side chains (e.g., threonine, valine, isoleucine) and aromatic side chains (e.g., tyrosine, phenylalanine tryptophan, histidine).

[0154] In another embodiment, functional variants of the present invention can contain one or more insertions, deletions or truncations of non-essential amino acids. As used herein, a “non-essential amino acid” is a residue that can be altered in a polypeptide of the present invention without substantially altering its (biological) function or protein activity. For example, amino acid residues that are conserved among the proteins of the present invention having similar biological activities (and their orthologs) are predicted to be particularly unamenable to alteration.

[0155] In another embodiment, functional variants can include functional fragments (i.e., biologically active fragments) of any one of the polypeptide sequences disclosed herein. Such fragments include fewer amino acids than the full length protein from which they are derived, but exhibit at least one biological activity of the corresponding full-length protein. Typically, biologically active fragments comprise a domain or motif with at least one activity of the full-length protein. A biologically active fragment of a protein of the invention can be a polypeptide which is, for example, 10, 25, 50, 100 or more amino acids in length. Moreover, other biologically active portions, in which other regions of the protein are deleted, can be prepared by recombinant techniques and evaluated for one or more of the biological activities of the native form of a polypeptide of the present invention.

[0156] In another embodiment, the present invention includes other functional variants of the polypeptides disclosed herein, which can be identified by techniques known in the art. For example, functional variants can be identified by screening combinatorial libraries of mutants (e.g., truncation mutants), of polypeptides of the present invention for biological activity. In another embodiment, a variegated library of variants can be generated by combinatorial mutagenesis at the nucleic acid level. A variegated library of variants can be produced by, for example, enzymatically ligating a mixture of synthetic oligonucleotides into gene sequences such that a degenerate set of potential protein sequences is expressible as individual polypeptides, or alternatively, as a set of larger fusion proteins (e.g., for phage display). There are a variety of methods that can be used to produce libraries of potential variants of the polypeptides of the present invention from a degenerate oligonucleotide sequence. Methods for synthesizing degenerate oligonucleotides are known in the art (e.g., see Narang (1983) Tetrahedron 39:3; Itakura et al., (1984) Annu. Rev. Biochem. 53:323; Itakura et al., (1984) Science 198:1056; Ike et al., (1983) Nucleic Acid Res. 11:477).

[0157] In addition, libraries of fragments of the coding sequence of a polypeptide of the present invention can be used to generate a variegated population of polypeptides for screening a subsequent selection of variants. For example, a library of coding sequence fragments can be generated by treating a double stranded PCR fragment of the coding sequence of interest with a nuclease under conditions wherein nicking occurs only about once per molecule, denaturing the double stranded DNA, renaturing the DNA to form double stranded DNA which can include sense/antisense pairs from different nicked products, removing single stranded portions from reformed duplexes by treatment with S1 nuclease, and ligating the resulting fragment library into an expression vector. By this method, an expression library can be derived which encodes N-terminal and internal fragments of various sizes of the protein of interest.

[0158] Several techniques are known in the art for screening gene products of combinatorial libraries made by point mutations of truncation, and for screening cDNA libraries for gene products having a selected property. The most widely used techniques, which are amenable to high through-put analysis, for screening large gene libraries typically include cloning the gene library into replicable expression vectors, transforming appropriate cells with the resulting library of vectors, and expressing the combinatorial genes under conditions in which detection of a desired activity facilitates isolation of the vector encoding the gene whose product was detected. Recursive ensemble mutagenesis (REM), a technique which enhances the frequency of functional mutants in the libraries, can be used in combination with the screening assays to identify variants of polypeptides of the present invention (Arkin and Yourvan (1992) Proc. Natl. Acad. Sci. USA 89:7811-7815; Delgrave et al., (1993) Protein Engineering 6(3): 327-331).

[0159] In another embodiment, functional variants of the present invention can encompasses orthologs of the genes and polypeptides disclosed herein. Orthologs of the polypeptides disclosed herein include proteins that can be isolated from other strains or species and possess a similar or identical biological activity. Such orthologs can be identified as comprising an amino acid sequence that is substantially homologous (shares a certain degree of amino acid sequence identity) with the polypeptides disclosed herein. As used herein, the expression “substantially homologous” refers to a first amino acid or nucleotide sequence which contains a sufficient or minimum number of identical or equivalent (e.g., with similar side chain) amino acids or nucleotides to a second amino acid or nucleotide sequence such that the first and the second amino acid or nucleotide sequences have a common domain. For example, amino acid or nucleotide sequences which contain a common domain having at least 70%, 71%, 72%, 73% 74%, 75%, 76%, 77%, 78%, 79%, 80%, 81%, 82%, 83%, 84%, 85%, 86%, 87%, 88%, 89%, 90%, 91% 92%, 93%, 94%, 95%, 96%, 97%, 98% or 99% sequence identity are defined herein as sufficiently identical.

[0160] In another embodiment, the present invention includes improved proteins derived from the polypeptides of the present invention. Improved proteins are proteins wherein at least one biological activity is improved. Such proteins may be obtained by randomly introducing mutations along all or part of the coding sequences of the polypeptides of the present invention such as by saturation mutagenesis, and the resulting mutants can be expressed recombinantly and screened for biological activity. For instance, the art provides for standard assays for measuring the enzymatic activity of the resulting protein and thus improved proteins may be selected.

### Recovery and Purification

[0161] In another aspect, polypeptides of the present invention may be present alone (e.g., in an isolated or purified form), within a composition (e.g., an enzymatic composition for carrying out an industrial process), or in an appropriate host. In one embodiment, polypeptides of the present invention can be recovered and purified from cell cultures (e.g., recombinant cell cultures) by methods known in the art. In another embodiment, high performance liquid chromatography (“HPLC”) can be employed for the purification.

[0162] In another aspect, polypeptides of the present invention include naturally purified products, products of chemical synthetic procedures, and products produced by recombinant techniques from a prokaryotic or eukaryotic host, including, for example, bacterial, yeast, higher plant, insect and mammalian cells. Depending on the host employed in a recombinant production procedure, the polypeptides of the present invention may be glycosylated or may be non-glycosylated. In addition, polypeptides of the invention may also include an initial modified methionine residue, in some cases as a result of host-mediated processes.

### Fusion Proteins

[0163] In another aspect, the present invention includes fusion proteins comprising a polypeptide of the present invention or a functional variant thereof, which is operatively linked to one or more unrelated polypeptide (e.g., heterologous amino acid sequences). “Unrelated polypeptides” or “heterologous polypeptides” or “heterologous sequences” refer to polypeptides or sequences which are usually not present close to or fused to one of the polypeptides of the present invention. Such “unrelated polypeptides” or “heterologous polypeptides” having amino acid sequences corresponding to proteins which are not substantially homologous to the polypeptide sequences disclosed herein. Such “unrelated polypeptides” can be derived from the same or a different organism. In one embodiment, a fusion protein of the present invention comprises at least two biologically active portions or domains of polypeptide sequences disclosed herein. In the context of fusion proteins, the term “operatively linked” is intended to indicate that all of the different polypeptides are fused in-frame to each other. In another embodiment, an unrelated polypeptide can be fused to the N terminus or C terminus of a polypeptide of the present invention.

[0164] In another embodiment, a polypeptide of the present invention can be fused to a protein which enables or facilitates recombinant protein purification and/or detection. For example, a polypeptide of the present invention can be fused to a protein such as glutathione S-transferase (GST), and the resulting fusion protein can then be purified/detected through the high affinity of GST for glutathione.

[0165] Fusion proteins of the present invention can be produced by standard recombinant DNA techniques. For example, DNA fragments encoding different polypeptide sequences can be ligated together in frame in accordance with conventional techniques, for example by employing blunt-ended or stagger-ended termini for ligation, restriction enzyme digestion to provide for appropriate termini, filling-in of cohesive ends as appropriate, alkaline phosphatase treatment to avoid undesirable joining, and enzymatic ligation. In another embodiment, the fusion gene can be synthesized by conventional techniques including automated DNA synthesizers. Alternatively, PCR amplification of gene fragments can be carried out using anchor primers, which give rise to complementary overhangs between two consecutive gene fragments which can subsequently be annealed and re-amplified to generate a chimeric gene sequence (e.g., see Current Protocols in Molecular Biology, eds. Ausubel et al., John Wiley & Sons: 1992). Moreover, many expression vectors are commercially available that already encode a fusion moiety (e.g., a GST polypeptide). A nucleic acid encoding a polypeptide of the present invention can be cloned into such an expression vector so that the fusion moiety is linked in-frame to the polypeptide of interest.

### Signal Sequences

[0166] In another embodiment, a polypeptide of the present invention can be fused to a heterologous signal sequence (e.g., at its N terminus) to facilitate its isolation, expression and/or secretion from certain host cells (e.g., mammalian and yeast host cells). Signal sequences are typically characterized by a core of hydrophobic amino acids, which are generally cleaved from the mature protein during secretion in one or more cleavage events. Such signal peptides may contain processing sites that allow cleavage of the signal sequence from the mature proteins as they pass through the secretory pathway.

[0167] For example, the gp67 secretory sequence of the baculovirus envelope protein can be used as a heterologous signal sequence (Current Protocols in Molecular Biology, Ausubel et al., eds., John Wiley & Sons, 1992). Other examples of eukaryotic heterologous signal sequences include the secretory sequences of melittin and human placental alkaline phosphatase (Stratagene; La Jolla, Calif.). In yet another example, useful prokaryotic heterologous signal sequences include the phoA secretory signal (Sambrook et al., supra) and the protein A secretory signal (Pharmacia Biotech; Piscataway, N.J.).

[0168] The signal sequence can direct secretion of the protein, such as from a eukaryotic host into which the expression vector is transformed, and the signal sequence is subsequently or concurrently cleaved. The protein can then be readily purified from the extracellular medium by known methods. In another embodiment, a signal sequence can be linked to a fusion protein of the present invention to facilitate detection, purification, and/or recovery thereof. For example, the sequence encoding a fusion protein of the present invention may be fused to a marker sequence, such as a sequence encoding a peptide, which facilitates purification of the fused polypeptide. In another embodiment, the marker sequence can be a hexa-histidine peptide, such as the tag provided in a pQE vector (Qiagen, Inc.), among others, many of which are commercially available. As described in Gentz et al., Proc. Natl. Acad. Sci. USA 86:821-824 (1989), for instance, hexa-histidine provides for convenient purification of the fusion protein. In another embodiment, the HA tag is another peptide useful for purification, which corresponds to an epitope derived of influenza hemaglutinin protein, which has been described by Wilson et al., Cell 37:767 (1984), for instance.

### Polynucleotides

[0169] The nucleic acid sequences of the genes disclosed herein were determined by sequencing cDNA clones, mRNA transcripts, or genomic DNA obtained from Scytalidium thermophilum strain CBS 625.9, Myriococcum thermophilum strain CBS 389.93, or Aureobasidium pullulans strain ATCC 62921.

[0170] In another aspect, the present invention relates to polynucleotides encoding a polypeptide of the present invention, including functional variants thereof. In one embodiment, polynucleotides of the present invention comprise the coding nucleic acid sequence of any one of SEQ ID NOs: 286-570, 1162-1467, or 2161-2547, or as set forth in Tables 1A-1C.

[0171] In another aspect, the present invention relates to genomic DNA sequences corresponding to the above mentioned coding sequences. In one embodiment, polynucleotides of the present invention comprise the genomic nucleic acid sequence of any one of SEQ ID NOs: 1-285, 856-1161, or 1774-2160; or as set forth in Tables 1A-1C.

[0172] In another aspect, the present invention relates to a polynucleotide comprising at least one intronic or exonic nucleic acid sequence of any one of the genomic sequences corresponding to SEQ ID NOs: 1-285, 856-1161, or 1774-2160 (e.g., the intron or exon segments defined by the exon boundaries listed in Tables 2A-2C). Although only the positions of the exons are defined in Tables 2A-2C, a person of skill in the art would readily be able to determine the positions of the corresponding introns in view of this information. In some embodiments, polynucleotides comprising at least one these intronic segments are within the scope of the present invention.

[0173] In yet another aspect, the present invention relates to a polynucleotide comprising at least one exonic nucleic acid sequence comprised within SEQ ID NOs: 1-285, 856-1161, or 1774-2160 or as set forth in Tables 2A-2C.

[0174] In another aspect, the present invention relates to isolated polynucleotides sharing a minimum threshold of nucleic acid sequence identity with any one of the above-mentioned polynucleotides. In specific embodiments, the present invention relates to isolated polynucleotides having at least 60%, 65%, 70%, 71%, 72, 73%, 74%, 75%, 76%, 77%, 78%, 79%, 80%, 81%, 82%, 83%, 84%, 85%, 86%, 87%, 88%, 89%, 90%, 91%, 92%, 93%, 94%, 95%, 96%, 97%, 98% or 99% nucleic acid sequence identity to any one of the above-mentioned polynucleotides. Other specific percentage units that have not been specifically recited here for brevity are nevertheless considered within the scope of the present invention. Polynucleotides having the aforementioned thresholds of nucleic acid sequence identity can be created by introducing one or more nucleotide substitutions, additions or deletions into the coding nucleotide sequences of the present invention such that one or more amino acid substitutions, deletions or insertions are introduced into the encoded polypeptide. Such mutations may be introduced by standard techniques, such as site-directed mutagenesis and PCR-mediated mutagenesis.

[0175] In another aspect, the present invention relates to a polynucleotide that hybridizes (or is hybridizable) under medium-high stringency conditions, high stringency conditions, or very high stringency conditions with the full-length complement of any one of the polynucleotides defined above.

[0176] As used herein, “very low stringency conditions” means for probes of at least 100 nucleotides in length, prehybridization and hybridization at 42° C. in 5×SSPE, 0.3% SDS, 200 micrograms/mL sheared and denatured salmon sperm DNA, and 25% formamide, following standard Southern blotting procedures for 12 to 24 hours. The carrier material is finally washed three times each for 15 minutes using 2×SSC, 0.2% SDS at 45° C.

[0177] As used herein, “low stringency conditions” means for probes of at least 100 nucleotides in length, prehybridization and hybridization at 42° C. in 5×SSPE, 0.3% SDS, 200 micrograms/mL sheared and denatured salmon sperm DNA, and 25% formamide, following standard Southern blotting procedures for 12 to 24 hours. The carrier material is finally washed three times each for 15 minutes using 2×SSC, 0.2% SDS at 50° C.

[0178] As used herein, “medium stringency conditions” means for probes of at least 100 nucleotides in length, prehybridization and hybridization at 42° C. in 5×SSPE, 0.3% SOS, 200 micrograms/mL sheared and denatured salmon sperm DNA, and 35% formamide, following standard Southern blotting procedures for 12 to 24 hours. The carrier material is finally washed three times each for 15 minutes using 2×SSC, 0.2% SOS at 55° C.

[0179] As used herein, “medium-high stringency conditions” means for probes of at least 100 nucleotides in length, prehybridization and hybridization at 42° C. in 5×SSPE, 0.3% SDS, 200 micrograms/mL sheared and denatured salmon sperm DNA, and 35% formamide, following standard Southern blotting procedures for 12 to 24 hours. The carrier material is finally washed three times each for 15 minutes using 2×SSC, 0.2% SDS at 60° C.

[0180] As used herein, “high stringency conditions” means for probes of at least 100 nucleotides in length, prehybridization and hybridization at 42° C. in 5×SSPE, 0.3% SDS, 200 micrograms/mL sheared and denatured salmon sperm DNA, and 50% formamide, following standard Southern blotting procedures for 12 to 24 hours. The carrier material is finally washed three times each for 15 minutes using 2×SSC, 0.2% SDS at 65° C.

[0181] As used herein, “very high stringency conditions” means for probes of at least 100 nucleotides in length, prehybridization and hybridization at 42° C. in 5×SSPE, 0.3% SDS, 200 micrograms/mL sheared and denatured salmon sperm DNA, and 50% formamide, following standard Southern blotting procedures for 12 to 24 hours. The carrier material is finally washed three times each for 15 minutes using 2×SSC, 0.2% SDS at 70° C.

[0182] In one embodiment, a polynucleotide of the present invention (or a fragment thereof) can be isolated using the sequence information provided herein in conjunction with standard molecular biology techniques (e.g., as described in Sambrook et al., supra. For example, suitable hybridization oligonucleotides (e.g., probes or primers) can be designed using all or a portion of the nucleic acid sequences disclosed herein and prepared by standard synthetic techniques (e.g., using an automated DNA synthesizer). The oligonucleotides can be employed in hybridization and/or amplification reactions, for example, to amplify a template of cDNA, mRNA or genomic DNA, according to standard PCR techniques. A polynucleotide so amplified can be cloned into an appropriate vector and characterized by DNA sequence analysis.

[0183] In another aspect, the present invention relates to polynucleotides encoding functional variants of any one of the polypeptides of the present invention, including a biologically active fragment or domain thereof.

[0184] In another aspect, the present invention can include nucleic acid molecules (e.g., oligonucleotides) sufficient for use as primers and/or hybridization probes to amplify, sequence and/or identify nucleic acid molecules encoding a polypeptide of the present invention or fragments thereof. In some embodiments, the present invention relates to polynucleotides (e.g., oligonucleotides) that comprise, span, or hybridize specifically to exon-exon or exon-intron junctions of the genomic sequences identified herein, such as those defined in Tables 2A-2C. Designing such polynucleotides/oligonucleotides would be within the grasp of a person of skill in the art in view of the target sequence information disclosed herein and are thus encompassed by the present invention.

[0185] In another aspect, the present invention relates to polynucleotides comprising silent mutations or mutations that do not significantly alter the (biological) function or protein activity of the encoded polypeptide. Guidance concerning how to make phenotypically silent amino acid substitutions is provided for example in Bowie et al., Science 247:1306-1310 (1990) and in the references cited therein. Furthermore, it will be apparent for the skilled person that DNA sequence polymorphisms of the genes disclosed herein may exist within a given population, which may differ from the sequences disclosed herein. Such genetic polymorphisms may exist in cells from different populations or within a population due to natural allelic variation. Accordingly, in one embodiment, the present invention can include natural allelic variants and homologs of polynucleotides disclosed herein.

[0186] In another aspect, polynucleotides of the present invention can comprise only a portion or a fragment of the nucleic acid sequences disclosed herein. Although such polynucleotides may not encode a functional polypeptide of the present invention, they are useful for example as probes or primers in hybridization or amplification reactions. Exemplary uses of such polynucleotides include: (1) isolating a gene (as allelic variant thereof) from cDNA library; (2) in situ hybridization (e.g., FISH) to metaphase chromosomal spreads to provide precise chromosomal location of the gene as described in Verma et al., Human Chromosomes: a Manual of Basic Techniques, Pergamon Press, New York (1988); (3) Northern blot analysis for detecting expression of mRNA corresponding to a polypeptide disclosed herein, or a homolog, ortholog or variant thereof, in specific tissues and/or cells; and (4) probes and primers that can be used as a diagnostic tool to analyze the presence of a nucleic acid hybridizable to a polynucleotide disclosed herein in a given biological (e.g., tissue) sample. It would be within the grasp of a skilled person to design specific oligonucleotides in view of the nucleic acid sequences disclosed herein. Oligonucleotides typically comprise a region of nucleotide sequence that hybridizes (preferably under highly stringent conditions) to at least 10, 11, 12, 13, 14, 15, 16, 17, 18, 19, 20, 21, 22, 23, 24, 25, 26, 27, 28, 29, 30, 31, 32, 33, 34, 35, 36, 37, 37, 39, 40, 50, 60, 70, 80, 90 or 100 contiguous nucleotides of a polynucleotide of the present invention. In one embodiment, such oligonucleotides can be used for identifying and/or cloning other family members, as well as orthologs from other species. In another embodiment, the oligonucleotide can be attached to a detectable label (e.g., a radioisotope, a fluorescent compound, an enzyme, or an enzyme cofactor). Such oligonucleotides can also be used as part of a diagnostic method or kit for identifying cells which express a polypeptide of the present invention.

[0187] As would be understood by the skilled person, full-length complements of any one of the polynucleotides of the present invention are also encompassed. In one embodiment, the full-length complements are antisense molecules with respect to the coding strands of polynucleotides of the present invention, which hybridize (preferably under highly stringent conditions) to at least 10, 11, 12, 13, 14, 15, 16, 17, 18, 19, 20, 21, 22, 23, 24, 25, 26, 27, 28, 29, 30, 31, 32, 33, 34, 35, 36, 37, 37, 39, 40, 50, 60, 70, 80, 90 or 100 contiguous nucleotides to a polynucleotide of the present invention.

### Sequencing Errors

[0188] The sequence information as provided herein should not be so narrowly construed as to require inclusion of erroneously identified bases. The specific sequences disclosed herein can be readily used to isolate the corresponding complete genes from the organism sequenced herein, which in turn can easily be subjected to further sequence analyses thereby identifying sequencing errors.

[0189] Unless otherwise indicated, all nucleotide sequences disclosed herein were determined by sequencing using an automated DNA sequencer, and all amino acid sequences of polypeptides disclosed herein were predicted by translation based on the genetic code. Therefore, as is known in the art for any DNA sequence determined by this automated approach, any nucleotide sequence determined herein may contain some errors. Nucleotide sequences determined by automation are typically at least about 90% identical, more typically at least about 95% to at least about 99.9% identical to the actual nucleotide sequence of the sequenced DNA molecule. The actual sequence can be more precisely determined by other approaches including manual DNA sequencing methods well known in the art. As is also known in the art, a single insertion or deletion in a determined nucleotide sequence compared to the actual sequence will cause a frame shift in translation of the nucleotide sequence such that the predicted amino acid sequence encoded by a determined nucleotide sequence will be completely different from the amino acid sequence actually encoded by the sequenced DNA molecule, beginning at the point of such an insertion or deletion.

[0190] The person skilled in the art is capable of identifying such erroneously identified bases and knows how to correct such errors.

### Vectors

[0191] Another aspect of the invention pertains to vectors (e.g., expression vectors), containing a polynucleotide encoding a polypeptide of the present invention.

[0192] As used herein, the term “vector” includes a nucleic acid molecule capable of transporting another nucleic acid molecule to which it has been linked. One type of vector is a “plasmid”, which refers to a circular double stranded DNA loop into which additional DNA segments can be ligated. Another type of vector is a viral vector, wherein additional DNA segments can be ligated into the viral genome. Certain vectors are capable of autonomous replication in a host cell into which they are introduced (e.g., bacterial vectors having a bacterial origin of replication and episomal mammalian vectors). Other vectors (e.g., non-episomal mammalian vectors) are integrated into the genome of a host cell upon introduction into the host cell, and thereby are replicated along with the host genome. Moreover, certain vectors are capable of directing the expression of genes to which they are operatively linked. Such vectors are referred to herein as “expression vectors”. In general, expression vectors useful in recombinant DNA techniques are often in the form of plasmids. The terms “plasmid” and “vector” can be used interchangeably herein as the plasmid is the most commonly used form of vector. However, the invention is intended to include such other forms of expression vectors, such as viral vectors (e.g., replication defective retroviruses, adenoviruses and adeno-associated viruses), which serve equivalent functions.

[0193] In one embodiment, recombinant expression vectors of the invention can comprise a polynucleotide of the present invention in a form suitable for expression of the polynucleotide in a host cell, which means that the recombinant expression vector includes one or more regulatory sequences, selected on the basis of the host cells to be used for expression, which is operatively linked to the nucleic acid sequence to be expressed. Within a recombinant expression vector, “operatively linked” is intended to mean that the nucleotide sequence of interest is linked to the regulatory sequence(s) in a manner which allows for expression of the nucleotide sequence (e.g., in an in vitro transcription/translation system or in a host cell when the vector is introduced into the host cell). The term “regulatory sequence” is intended to include promoters, enhancers and other expression control elements (e.g., polyadenylation signal). Such regulatory sequences are described, for example, in Goeddel, Gene Expression Technology: Methods in Enzymology 185, Academic Press, San Diego, Calif. (1990). Regulatory sequences include those which direct constitutive expression of a nucleotide sequence in many types of host cells and those which direct expression of the nucleotide sequence only in a certain host cell (e.g., tissue-specific regulatory sequences). It will be appreciated by those skilled in the art that the design of the expression vector can depend on such factors as the choice of the host cell to be transformed, the level of expression of protein desired, etc. The expression vectors of the present invention can be introduced into host cells to thereby produce proteins or peptides, encoded by polynucleotides as described herein (e.g., polypeptides of the present invention).

[0194] In another embodiment, recombinant expression vectors of the present invention can be designed for expression of polypeptides of the present invention in prokaryotic or eukaryotic cells. For example, these polypeptides can be expressed in bacterial cells such as E. coli, insect cells (using baculovirus expression vectors), yeast cells or mammalian cells. Suitable host cells are discussed further in Goeddel supra). In another embodiment, recombinant expression vectors of the present invention can be transcribed and translated in vitro, for example using T7 promoter regulatory sequences and T7 polymerase.

[0195] In another embodiment, expression vectors of the present invention can include chromosomal-, episomal- and virus-derived vectors, e.g., vectors derived from bacterial plasmids, bacteriophage, yeast episome, yeast chromosomal elements, viruses such as baculoviruses, papova viruses, vaccinia viruses, adenoviruses, fowl pox viruses, pseudorabies viruses and retroviruses, and vectors derived from combinations thereof, such as those derived from plasmid and bacteriophage genetic elements, such as cosmids and phagemids.

[0196] For expression, a DNA insert should be operatively linked to an appropriate promoter, such as the phage lambda PL promoter, the E. coli lac, trp and tac promoters, the SV40 early and late promoters and promoters of retroviral LTRs, to name a few. Other suitable promoters will be known to the skilled person. In a specific embodiment, promoters are preferred that are capable of directing a high expression level of biologically active polypeptides of the present invention (e.g., lignocellulose active proteins) from fungi. Such promoters are known in the art. The expression constructs may contain sites for transcription initiation, termination, and, in the transcribed region, a ribosome binding site for translation. The coding portion of the mature transcripts expressed by the constructs will include a translation initiating AUG at the beginning and a termination codon appropriately positioned at the end of the polypeptide to be translated.

[0197] Vector DNA can be introduced into prokaryotic or eukaryotic cells via conventional transformation or transfection techniques. As used herein, the terms “transformation” and “transfection” are intended to refer to a variety of art-recognized techniques for introducing foreign nucleic acid (e.g., DNA) into a host cell, including calcium phosphate or calcium chloride co-precipitation, DEAE-dextran-mediated transfection, transduction, infection, lipofection, cationic lipid-mediated transfection or electroporation. Suitable methods for transforming or transfecting host cells can be found in Sambrook, et al., (Molecular Cloning: A Laboratory Manual, 2nd ed. Cold Spring Harbor Laboratory, Cold Spring Harbor Laboratory Press, Cold Spring Harbor, N.Y., 1989), Davis et al., Basic Methods in Molecular Biology (1986) and other laboratory manuals.

[0198] For stable transfection of mammalian cells, it is known that, depending upon the expression vector and transfection technique used, only a small fraction of cells may integrate the foreign DNA into their genome. In order to identify and select these integrants, a gene that encodes a selectable marker (e.g., resistance to antibiotics) is generally introduced into the host cells along with the gene of interest. Preferred selectable markers include those which confer resistance to drugs, such as G418, hygromycin and methatrexate. A polynucleotide encoding a selectable marker can be introduced into a host cell on the same vector as that encoding a polypeptide of the present invention, or on a separate vector. Cells stably transfected with a polynucleotide of the present invention can be identified by drug selection (e.g., cells that have incorporated the selectable marker gene will survive, while the other cells die).

[0199] Expression of proteins in prokaryotes is often carried out in E. coli with vectors containing constitutive or inducible promoters directing the expression of either fusion or non-fusion proteins. Fusion vectors add a number of amino acids to a protein encoded therein, e.g., to the amino terminus of the recombinant protein. Such fusion vectors typically serve three purposes: (1) to increase expression of recombinant protein; (2) to increase the solubility of the recombinant protein; and (3) to aid in the purification of the recombinant protein by acting as a ligand in affinity purification. Often, in fusion expression vectors, a proteolytic cleavage site is introduced at the junction of the fusion moiety and the recombinant protein to enable separation of the recombinant protein from the fusion moiety subsequent to purification of the fusion protein.

[0200] Vectors preferred for use in bacteria are for example disclosed in WO-A1-2004/074468. Other suitable vectors will be readily apparent to the skilled artisan. Known bacterial promoters suitable for use in the present invention include the promoters disclosed in WO-A1-2004/074468.

[0201] As indicated, the expression vectors will preferably contain selectable markers. Such markers include dihydrofolate reductase or neomycin resistance for eukaryotic cell culture and antibiotic resistance (e.g., tetracyline or ampicillin) for culturing in E. coli and other bacteria. Representative examples of appropriate host include bacterial cells, such as E. coli, Streptomyces, Salmonella typhimurium and certain Bacillus species; fungal cells such as Aspergillus species, for example A. niger, A. oryzae and A. nidulans, yeast cells such as Kluyveromyces, for example K. lactis and/or Pichia, for example P. pastoris; insect cells such as Drosophila S2 and Spodoptera Sf9; animal cells such as CHO, COS and Bowes melanoma; and plant cells. Appropriate culture mediums and conditions for the above-described host cells are known in the art.

[0202] Transcription of the DNA encoding the polypeptides of the present invention by higher eukaryotes may be increased by inserting an enhancer sequence into the vector. Enhancers are cis-acting elements of DNA, usually about from 10 to 300 by that act to increase transcriptional activity of a promoter in a given host cell-type. Examples of enhancers include the SV40 enhancer, which is located on the late side of the replication origin at by 100 to 270, the cytomegalovirus early promoter enhancer, the polyoma enhancer on the late side of the replication origin, and adenovirus enhancers.

[0203] For secretion of the translated protein into the lumen of the endoplasmic reticulum, into the periplasmic space or into the extracellular environment, appropriate secretion signal may be incorporated into the expressed polypeptide. The signals may be endogenous to the polypeptide or they may be heterologous signals. In an embodiment, a polypeptide of the present invention may be expressed in a modified form, such as a fusion protein, and may include not only secretion signals but also additional heterologous functional regions. Thus, for instance, a region of additional amino acids, particularly charged amino acids, may be added to the N terminus of the polypeptide to improve stability and persistence in the host cell, during purification or during subsequent handling and storage. Also, peptide moieties may be added to the polypeptide to facilitate purification and/or detection.

### Host Cells

[0204] In another aspect, the present invention features cells, e.g., transformed host cells or recombinant host cells that contain a polynucleotide or vector of the present invention. A “transformed cell” or “recombinant cell” is a cell into which (or into an ancestor of which) has been introduced a polynucleotide or vector of the invention by means of recombinant DNA techniques. Both prokaryotic and eukaryotic cells are included, e.g., bacteria, fungi, yeast, and the like, especially preferred are cells from filamentous fungi, in particular the strain from which the polynucleotide and polypeptide sequences disclosed herein were derived.

[0205] In one embodiment, a cell of the present invention is typically not a wild-type strain or a naturally-occurring cell. Host cells of the present invention can include, but are not limited to: fungi (e.g., Aspergillus niger, Trichoderma reesii, Myceliophthora thermophila and Talaromyces emersonii); yeasts (e.g., Saccharomyces cerevisiae, Yarrowia lipolytica and Pichia pastoris); bacteria (e.g., Escherichia coli and Bacillus sp.); and plants (e.g., Nicotiana benthamiana, Nicotiana tabacum and Medicago sativa).

[0206] In another embodiment, a polynucleotide (or a polynucleotide which is comprised within a vector) may be homologous or heterologous with respect to the cell into which it is introduced. In this context, a polynucleotide is homologous to a cell if the polynucleotide naturally occurs in that cell. A polynucleotide is heterologous to a cell if the polynucleotide does not naturally occur in that cell. Accordingly, in an embodiment, the present invention relates to a cell which comprises a heterologous or a homologous sequence corresponding to any one of the polynucleotides or polypeptides disclosed herein.

[0207] In another embodiment, a host cell can be chosen that modulates the expression of the inserted sequences, or modifies and processes the gene product in a specific, desired fashion. Such modifications (e.g., glycosylation) and processing (e.g., cleavage) of protein products may facilitate optimal functioning of the protein. Various host cells have characteristic and specific mechanisms for post-translational processing and modification of proteins and gene products. Appropriate cell lines or host systems familiar to those of skill in the art can be chosen to ensure the desired and correct modification and processing of the foreign protein expressed. To this end, eukaryotic host cells that possess the cellular machinery for proper processing of the primary transcript, glycosylation, and phosphorylation of the gene product can be used. Such host cells are well known in the art.

[0208] In another embodiment, host cells can also include, but are not limited to, mammalian cell lines such as CHO, VERO, BHK, HeLa, COS, MDCK, 293, 3T3, WI38, and choroid plexus cell lines. If desired, a stably transfected cell line can produce the polypeptides of the present invention. A number of vectors suitable for stable transfection of mammalian cells are available to the public, methods for constructing such cell lines are also publicly known, e.g., in Ausubel et al., (supra).

[0209] In another embodiment, the present invention relates to methods of inhibiting the expression of a polypeptide of the present invention in a host cell, comprising administering to the cell or expressing in the cell a double-stranded RNA (dsRNA) molecule (or a molecule comprising region of double-strandedness), wherein the dsRNA comprises a subsequence of a polynucleotide of the present invention. In a preferred aspect, the dsRNA is about 15, 16, 17, 18, 19, 20, 21, 22, 23, 24, 25 or more duplex nucleotides in length. The dsRNA is preferably a small interfering RNA (siRNA) or a micro RNA (miRNA). In a preferred aspect, the dsRNA is small interfering RNA (siRNAs) for inhibiting transcription. In another preferred aspect, the dsRNA is micro RNA (miRNAs) for inhibiting translation. The present invention also relates to such double-stranded RNA (dsRNA) molecules, comprising a portion of the mature polypeptide coding sequence of any one of the coding sequences of the polypeptides disclosed herein of inhibiting expression of that polypeptide in a cell. While the present invention is not limited by any particular mechanism of action, the dsRNA can enter a cell and cause the degradation of a single-stranded RNA (ssRNA) of similar or identical sequences, including endogenous mRNAs. When a cell is exposed to dsRNA, mRNA from the homologous gene is selectively degraded by a process called RNA interference (RNAi). The dsRNAs of the present invention can be used in gene-silencing methods. In one aspect, the invention relates to methods to selectively degrade RNA using the dsRNAi's of the present invention. The process may be practiced in vitro, ex vivo or in vivo. In one aspect, the dsRNA molecules can be used to generate a loss-of-function mutation in a cell, an organ or an organism. Methods for making and using dsRNA molecules to selectively degrade RNA are well known in the art, see, for example, U.S. Pat. No. 6,506,559; U.S. Pat. No. 6,511,824; U.S. Pat. No. 6,515,109; and U.S. Pat. No. 6,489,127. In some instances, new phylogenic analyses of fungal species have resulted in taxonomic reclassifications. For example, following their phylogenic studies reported in van den Brink et al., (“Phylogeny of the industrial relevant, thermophilic genera Myceliophthora and Corynascus”, Fungal Diversity (2012), 52:197-207), the authors proposed renaming all existing Corynascus species to Myceliophthora. Such changes in taxonomic classification are within the scope of the present invention and, regardless of future reclassifications, a person of skill in the art would be able to identify the organism used to determine the sequences disclosed herein for example based on the strain's accession number (CBS 389.93; ATCC 62921; or CBS 625.91).

[0210] It should be understood herein that the level of expression of polypeptides of the present invention could be modified by adapting the codon usage ratio of a sequence of the present invention to that of the host or hosts in which it is meant to be expressed. This adaptation and the concept of codon usage ratio are all well known in the art.

### Antibodies

[0211] In another aspect, the present invention relates to an isolated binding agent capable of selectively binding to a polypeptide of the present invention. Suitable binding agents may be selected from an antibody, an antigen binding fragment, or a binding partner. In one embodiment, the binding agent selectively binds to an amino acid sequence selected from Tables 1A-1C, including to any fragment of any of the above sequences comprising at least one antibody binding epitope.

[0212] According to the present invention, the phrase “selectively binds to” refers to the ability of an antibody, antigen binding fragment or binding partner of the present invention to preferentially bind to specified proteins. More specifically, the phrase “selectively binds” refers to the specific binding of one protein to another (e.g., an antibody, fragment thereof, or binding partner to an antigen), wherein the level of binding, as measured by any standard assay (e.g., an immunoassay), is statistically significantly higher than the background control for the assay. For example, when performing an immunoassay, controls typically include a reaction well/tube that contain antibody or antigen binding fragment alone (i.e., in the absence of antigen), wherein an amount of reactivity (e.g., non-specific binding to the well) by the antibody or antigen binding fragment thereof in the absence of the antigen is considered to be background. Binding can be measured using a variety of methods standard in the art including enzyme immunoassays (e.g., ELISA, immunoblot assays, etc.).

[0213] Antibodies are characterized in that they comprise immunoglobulin domains and as such, they are members of the immunoglobulin superfamily of proteins. An antibody of the invention includes polyclonal and monoclonal antibodies, divalent and monovalent antibodies, bi- or multi-specific antibodies, serum containing such antibodies, antibodies that have been purified to varying degrees, and any functional equivalents of whole antibodies. Isolated antibodies of the present invention can include serum containing such antibodies, or antibodies that have been purified to varying degrees. Whole antibodies of the present invention can be polyclonal or monoclonal. Alternatively, functional equivalents of whole antibodies, such as antigen binding fragments in which one or more antibody domains are truncated or absent (e.g., Fv, Fab, Fab′, or F(ab)₂ fragments), as well as genetically-engineered antibodies or antigen binding fragments thereof, including single chain antibodies or antibodies that can bind to more than one epitope (e.g., bi-specific antibodies), or antibodies that can bind to one or more different antigens (e.g., bi- or multi-specific antibodies), may also be employed in the invention. Methods for the generation and production of antibodies are well known in the art.

[0214] Monoclonal antibodies may be produced according to the methodology of Kohler and Milstein (Nature 256:495-497, 1975). Non-antibody polypeptides, sometimes referred to as binding partners, may be designed to bind specifically to a protein of the invention. Examples of the design of such polypeptides, which possess a prescribed ligand specificity are given in Beste et al., (Proc. Nat'l Acad. Sci. 96:1898-1903, 1999). In one embodiment, a binding agent of the invention is immobilized on a substrate such as: artificial membranes, organic supports, biopolymer supports and inorganic supports such as for use in a screening assay.

[0215] In some embodiment, antibodies and binding agents specifically binding to polypeptides of the present invention may be produced and used even in absence of knowledge of the precise biological function and/or protein activity of the polypeptide. Such antibodies and binding agent may be useful, for example, as diagnostic, classification, and/or research tools.

### Compositions and Uses

[0216] In another aspect, the present invention relates to composition comprising one or more polypeptides or polynucleotides of the present invention. In one embodiment, the compositions are enriched in such a polypeptide. The term “enriched” indicates that the biological activity (e.g., biomass degradation or processing) of the composition has been increased, e.g., with an enrichment factor of at least 1.1. The composition may comprise a polypeptide of the present invention as the major component, e.g., a mono-component composition. Alternatively, the composition may comprise multiple enzymatic activities (e.g., those described herein).

[0217] The polypeptide compositions may be prepared in accordance with methods known in the art and may be in the form of a liquid or a dry composition. For instance, the polypeptide composition may be in the form of a granulate or a microgranulate. The polypeptide to be included in the composition may be stabilized in accordance with methods known in the art. Examples are given below of preferred uses of the polypeptide compositions of the present invention. The dosage of the polypeptide composition of the invention and other conditions under which the composition is used may be determined on the basis of methods known in the art.

[0218] In another aspect, the present invention relates to the use of the polypeptides (e.g., enzymes) of the present invention a number of industrial and other processes. Despite the long term experience obtained with these processes, there remains a need for improved polypeptides and enzymes featuring one or more significant advantages over those presently used. Depending on the specific application, these advantages can include aspects such as lower production costs, higher specificity towards the substrate, greater synergies with existing enzymes, less antigenic effect, less undesirable side activities, higher yields when produced in a suitable microorganism, more suitable pH and temperature ranges, better properties of the final product, and food grade or kosher aspects. In various embodiments, the present invention seeks to provide one or more of these advantages, or others.

### Biomass Processing or Degradation

[0219] In another aspect, the polypeptides of the present invention may be used in new or improved methods for enzymatically degrading or converting plant cell wall polysaccharides from biomass into various useful products. In addition to cellulose and hemicellulose, plant cell walls contain associated pectins and lignins, the removal of which by enzymes of the current invention can improve accessibility to cellulases and hemicellulases, or which can themselves be converted to useful products. Therefore the polypeptides of the present invention may be used to degrade biomass or pretreated biomass to sugars. These sugars may be used as such or may be, for example, fermented into ethanol.

[0220] Usually, biomass must be subjected to pre-treatment in order to make the cellulose more accessible. Accordingly, in one embodiment, polypeptides of the present invention may be used in improved methods for the processing of pretreated biomass. Pretreatment technologies may involve chemical, physical, or biological treatments. Examples of pre-treatment technologies include but are not limited to: steam explosion; ammonia; acid hydrolysis; alkaline hydrolysis; solvent extraction; crushing; milling; etc.

[0221] One example of a product produced from biomass is bioethanol. Bioethanol is usually produced by the fermentation of glucose to ethanol by yeasts such as Saccharomyces cerevisiae: in addition to ethanol, other chemicals may be synthesized starting from glucose. Ethanol, today, is produced mostly from sugars or starches, obtained from sugar cane, fruits and grains. In contrast, cellulosic ethanol is obtained from cellulose, the main component of wood, straw and much of the plants. Sources of biomass for cellulosic ethanol production comprise agricultural residues (e.g., leftover crop materials from stalks, leaves, and husks of corn plants), forestry wastes (e.g., chips and sawdust from lumber mills, dead trees, and tree branches), energy crops (e.g., dedicated fast-growing trees and grasses such as switch grass), municipal solid waste (e.g., household garbage and paper products), food processing and other industrial wastes (e.g., black liquor, paper manufacturing by-products, etc.).

[0222] Plant biomass is a mixture of plant polysaccharides, including cellulose, hemicelluloses, and pectin, together with the structural polymer, lignin. Glucose is released from cellulose by the action of mixtures of enzymes, including: endoglucanases, exoglucanases (cellobiohydrolases 1 and 2) and beta-glucosidases. Efficient large-scale conversion of cellulosic materials by such mixtures may require the full complement of enzymes, and can be enhanced by the addition of enzymes that attack the other plant cell wall components (e.g., hemicelluloses, pectins, and lignins), as well as chemical linkages between these components. Hence, polypeptides of the present invention that are highly expressed, or have high specific activity, stability, or resistance to inhibitors may improve the efficiency of the process, and lower enzyme costs. It would be an advantage to the art to improve the degradation and conversion of plant cell wall polysaccharides by composing cellulase mixtures using cellulase enzymes with such properties. Furthermore, polypeptides of the present invention that are able to function at extremes of pH and temperature are desirable, both since improved enzyme robustness decreases costs, and because enzymes that function at high temperature will allow high processing temperatures under high substrate consistency conditions that decrease viscosity and thus improve yields.

[0223] Glycoside hydrolases from the family GH61 are known to stimulate the activity of cellulose cocktails on lignocellulosic substrates and are thus considered to exhibit cellulose-enhancing activity (Harris et al., Biochemistry 49, 3305 (2010)). They have no known enzymatic activities of their own. Enhancement of cellulase cocktail efficiency by GH61 proteins of the present invention may contribute to lowering the costs of cellulase enzymes used for the production of glucose from plant cell biomass, as described above. GH61 (glycoside hydrolase family 61 or sometimes referred to as EGIV) proteins are oxygen-dependent polysaccharide monooxygenases (PMO's) according to the latest literature. Often in the literature, these proteins are mentioned as enhancing the action of cellulases on lignocellulose substrates. GH61 was originally classified as an endogluconase, based on the measurement of very weak endo-1,4-β-d-glucanase activity in one family member. The term “GH61” as used herein, is to be understood as a family of enzymes, which share common conserved sequence portions and foldings to be classified in family 61 of the well-established CAZY GH classification system (http://www.cazy.org/GH61.html). The glycoside hydrolase family 61 is a member of the family of glycoside hydrolases EC 3.2.1. GH61 is used herein as being part of the cellulases.

[0224] Enzymatic hydrolysis of plant hemicellulose yields 5-carbon sugars that either may be fermented to ethanol by some species of yeast, or converted to other types of chemical products. Enzymatic deconstruction of hemicellulose is also known to improve the accessibility of plant cell wall cellulose to cellulase enzymes for the production of glucose from lignocellulosic materials. Hemicellulase enzymes of the present invention that enhance glucose production from lignocellulose would find utility in the bioethanol industry and in other process that rely on glucose or pentose streams from lignocellulose.

[0225] Lignin is composed of methoxylated phenyl-propane units linked by ether linkages and carbon-carbon bonds. The chemical composition of lignin may, depending on species, include guaiacyl, 4-hydroxyphenyl, and syringyl groups. Enzymatic modification of lignin by the polypeptides of the present invention can be used for the production of structural materials from plant biomass, or alternatively improve the accessibility of plant cellulose and hemicelluloses to cellulase enzymes for the release of glucose from biomass as described above. Enzymes that degrade the lignin component of lignocellulose include lignin peroxidases, manganese-dependent peroxidases, versatile peroxidases, and laccases (Vicuna et al., 2000, Molecular Biotechnology 14: 173-176; Broda et al., 1996, Molecular Microbiology 19: 923-932). In some embodiments, polypeptides of the present invention may also, in certain instances, be active in the decolorization of industrial dyes, and thus useful for the treatment and detoxification of chemical wastes.

[0226] In another embodiment, pectin-degrading polypeptides of the present invention can also enhance the action of cellulases on plant biomass by improving the accessibilty of cellulase to the cellulose component of lignocellulose.

[0227] In another embodiment, polypeptides of the present invention may also be useful in other applications for hydrolyzing non-starch polysaccharide (NSP).

[0228] In another embodiment, esterases of the present invention can be useful in the bioenergy industry such as for the production of biodiesel and hydrolysis of hemicellulose.

[0229] In another embodiment, the present invention relates to methods for degrading or converting a cellulose-containing material, comprising: treating the cellulose-containing material with an effective amount of a cellulolytic enzyme composition in the presence of an effective amount of a polypeptide having cellulolytic enhancing activity of the present invention, wherein the presence of the polypeptide having cellulolytic enhancing activity increases the degradation of cellulose-containing material compared to the absence of the polypeptide having cellulolytic enhancing activity.

[0230] In another embodiment, the present invention relates to methods for producing a fermentation product, comprising: (a) saccharifying a cellulose-containing material with an effective amount of a cellulolytic enzyme composition in the presence of an effective amount of a polypeptide having cellulolytic enhancing activity of the present invention, wherein the presence of the polypeptide having cellulolytic enhancing activity increases the degradation of cellulose-containing material compared to the absence of the polypeptide having cellulolytic enhancing activity; (b) fermenting the saccharified cellulose-containing material of step (a) with one or more fermenting microorganisms to produce the fermentation product; and (c) recovering the fermentation product from the fermentation.

### Food Product Industry

[0231] In one embodiment, the present invention relates to methods for preparing a food product comprising incorporating into the food product an effective amount of a polypeptide of the present invention. This can improve one or more properties of the food product relative to a food product in which the polypeptide is not incorporated. The phrase “incorporated into the food product” is defined herein as adding a polypeptide of the present invention to the food product, to any ingredient from which the food product is to be made, and/or to any mixture of food ingredients from which the food product is to be made. In other words, a polypeptide of the present invention may be added in any step of the food product preparation and may be added in one, two or more steps. The polypeptide of the present invention is added to the ingredients of a food product which can then be treated by methods including cooking, boiling, drying, frying, steaming or baking as is known in the art.

[0232] At least in the context of food products, the term “effective amount” is defined herein as an amount of the polypeptide (e.g., enzyme) of the present invention that is sufficient for providing a measurable effect on at least one property of interest of the food product. The term “improved property” is defined herein as any property of a food product which is improved by the action of a polypeptide (e.g., enzyme) of the present invention relative to a food product in which the polypeptide is not incorporated. The improved property may be determined by comparison of a food product prepared with and without addition of a polypeptide of the present invention. Organoleptic qualities may be evaluated using procedures well established in the food industry, and may include, for example, the use of a panel of trained taste-testers.

[0233] The polypeptides of the present invention may be prepared in any form suitable for the use in question, e.g., in the form of a dry powder, agglomerated powder, or granulate, in particular a non-dusting granulate, liquid, in particular a stabilized liquid, or protected enzyme such as described in WO01/11974 and WO02/26044. Granulates and agglomerated powders may be prepared by conventional methods, e.g., by spraying the enzyme according to the invention onto a carrier in a fluid-bed granulator. The carrier may consist of particulate cores having a suitable particle size. The carrier may be soluble or insoluble, e.g., a salt (such as NaCl or sodium sulphate), sugar (such as sucrose or lactose), sugar alcohol (such as sorbitol), starch, rice, corn grits, or soy. In an embodiment, the polypeptide of the present invention (and/or additional polypeptides/enzymes) may be contained in slow-release formulations. Methods for preparing slow-release formulations are well known in the art. Adding nutritionally acceptable stabilizers such as sugar, sugar alcohol, or another polyol, and/or lactic acid or another organic acid according to established methods may for instance, stabilize liquid enzyme preparations.

[0234] In another embodiment, polypeptides of the present invention may also be incorporated in yeast-comprising compositions such as disclosed in EP-A-0619947, EP-A-0659344 and WO02/49441.

[0235] In another embodiment, one or more additional polypeptides/enzymes may be incorporated into a food product of the present invention. The additional enzyme may be of any origin, including mammalian and plant, and preferably of microbial (bacterial, yeast or fungal) origin and may be obtained by techniques conventionally used in the art. Enzymes may conveniently be produced in microorganisms. Microbial enzymes are available from a variety of sources; Bacillus species are a common source of bacterial enzymes, whereas fungal enzymes are commonly produced in Aspergillus species.

[0236] In specific embodiments, additional polypeptides/enzymes include starch degrading enzymes, xylanases, oxidizing enzymes, fatty material splitting enzymes, or protein-degrading, modifying or crosslinking enzymes. Starch degrading enzymes include endo-acting enzymes such as alpha-amylase, maltogenic amylase, pullulanase or other debranching enzymes, and exo-acting enzymes that cleave off glucose (amyloglucosidase), maltose (beta-amylase), maltotriose, maltotetraose and higher oligosaccharides. Suitable xylanases are for instance xylanases, pentosanases, hemicellulase, arabinofuranosidase, glucanase, cellulase, cellobiohydrolase, beta-glucosidase, and others. Oxidizing enzymes are for instance glucose oxidase, hexose oxidase, pyranose oxidase, sulfhydryl oxidase, lipoxygenase, laccase, polyphenol oxidases and others. Fatty material splitting enzymes are for instance triacylglycerol lipases, phospholipases (such as A1, A2, B, C and D) and galactolipases. Protein degrading, modifying or crosslinking enzymes are for instance endo-acting proteases (serine proteases, metalloproteases, aspartyl proteases, thiol proteases), exo-acting peptidases that cleave off one amino acid, or dipeptide, tripeptide etceteras from the N-terminal (aminopeptidases) or C-terminal (carboxypeptidases) ends of the polypeptide chain, asparagines or glutamine deamidating enzymes such as deamidase and peptidoglutaminase or crosslinking enzymes such as transglutaminase.

[0237] In others embodiments, additional polypeptides/enzymes can include: amylases, such as alpha-amylase (which can be useful for providing sugars that are fermentable by yeast) or beta-amylase; cyclodextrin glucanotransferase; peptidase (e.g., an exopeptidase, which can be useful in flavour enhancement); transglutaminase; lipase, which can be useful for the modification of lipids present in the food or food constituents), phospholipase, cellulase, hemicellulase, protein disulfide isomerase, peroxidase, laccase, or an oxidase (e.g., glucose oxidase, hexose oxidase, aldose oxidase, pyranose oxidase, lipoxygenase or L-amino acid oxidase).

[0238] In other embodiment, esterases of the present invention have a number of applications in the food industry including, but not limited to, degumming vegetable oils; improving the production of bread (e.g., in situ production of emulsifiers); producing crackers, noodles, and pasta; enhancing flavor development of cheese, butter, and margarine; ripening cheese; removing wax; trans-esterification of flavors and cocoa butter substitutes; synthesizing structured lipids for infant formula and nutraceuticals; improving the polyunsaturated fatty acid content in fish oil; and aiding in digestion and releasing minerals in food processing.

[0239] When one or more additional enzyme activities are to be added in accordance with the methods of the present invention, these activities may be added separately or together with the polypeptide according to the invention.

### Detergent Industry

[0240] In another aspect, polypeptides of the present invention can be useful in the detergent industry, e.g., for removal of carbohydrate-based stains from soiled laundry. Enzymes are used in detergents in order to improve its efficacy to remove most types of dirt. In some embodiments, esterases such as lipases of the present invention are particularly useful for removing fats and lipids.

### Feed Industry

[0241] In another aspect, polypeptides of the present invention can be useful in the feed enzyme industry, e.g., for increasing nutritional quality, digestibility and/or absorption of animal feed.

[0242] Feed enzymes have an important role to play in current farming systems, as they can increase the digestibility of nutrients, leading to greater efficiency in the production of animal products such as meat and eggs. At the same time, they can play a role in minimizing the environmental impact of increased animal production.

[0243] Non-starch polysaccharides (NSP) can increase the viscosity of the digesta which can, in turn, decrease nutrient availability and animal performance.

[0244] Endoxylanases and phytases are the best-known feed-enzyme products. Phytase enzymes hydrolyse phytic acid and release inorganic phosphate, thereby avoiding the need to add inorganic phosphates to the diet and reducing phosphorus excretion. Addition of xylanases to feed has also been shown to have positive effects on animal growth. Adding specific nutrients to feed improves animal digestion and thereby reduces feed costs. A lot of feed additives are being currently used and new concepts are continuously developed. Use of specific enzymes like non-starch carbohydrate degrading enzymes could breakdown fiber, releasing energy as well as increasing the protein digestibility due to better accessibility of the protein when fiber gets broken down. In this way the feed cost could come down, as well as the protein levels in the feed also could be reduced.

[0245] Non-starch polysaccharides (NSPs) are also present in virtually all feed ingredients of plant origin. NSPs are poorly utilized and can, when solubilized, exert adverse effects on digestion. Exogenous enzymes can contribute to a better utilization of these NSPs and as a consequence reduce any anti-nutritional effects. Accordingly, in a particular embodiment, hemicellulases and other polysaccharide-active polypeptides/enzymes of the present invention can be used for this purpose in cereal-based diets for poultry and, to a lesser extent, for pigs and other species.

[0246] In some embodiments, esterases of the present invention are useful in the feed industry such as for reducing the amount of phosphate in feed.

### Pulp and Paper

[0247] In another embodiment, xylanases of the present invention can be useful in the pulp and paper industry, e.g., for prebleaching of kraft pulp. Xylanases have been found to be most effective for that purpose. Xylanases attract increasing scientific and commercial attention due to applications in the pulp and paper industry for removal of hemicellulose from dissolving pulps or for enhancement of the bleachability of pulp and, thus, reduction of the use of environmentally harmful bleaching chemicals. A similar application of xylanases for pulp prebleaching is an already well-established technology and has greatly stimulated research on hemicellulases in the past decade. Although lignin-active peroxidases of the present invention may also be active in modification of lignin and hence have bleaching properties, such enzymes are generally less attractive for bleaching due to the need to use and recycle expensive redox mediators.

[0248] In a related embodiment, polypeptides such as xylanases of the present invention can be used to pre-bleach pulp to reduce the amount of bleaching chemicals to obtain a given brightness. It is suggested that xylanase depolymerises xylan blocks and increases accessibility or helps liberation of residual lignin by releasing xylan-chromophore fragments. In addition to brownstock prior to bleaching, polypeptides such as xylanases of the present invention can save on bleaching chemicals. The enzymes hydrolyze surface xylans and are able to break linkages between hemicellulose and lignin. Other polypeptides (e.g., hemicellulase active enzymes) of the present invention which can break these linkages can function effectively in bleaching or pre-bleaching of pulp, and thus such uses are also within the scope of the present invention.

[0249] In some embodiments, esterases of the present invention are useful for the removal of triglycerides, steryl esters, resin acids, free fatty acids, and sterols (e.g., lipophilic wood extractives).

### Other Uses

[0250] In another embodiment, polypeptides such as xylanases of the present invention can be used in antibacterial formulations, as well as in pharmaceutical products such as throat lozenges, toothpastes, and mouthwash.

[0251] Chitin is a beta-(1,4)-linked polymer of N-acetyl D-glucosamine (GlcNAc), found as a structural polysaccharide in fungal cell walls as well as in the exoskeleton of arthropods and the outer shell of crustaceans. Approximately 75% the total weight of shellfish, is considered waste, and a large proportion of the material making up the waste is chitin. Accordingly, in one embodiment, polypeptides such as chitin-degrading enzymes of the present invention are useful in the modification and degradation of chitin, allowing the production of chitin-derived material, such as chitooligosaccharides and N-acetyl D-glucosamine, from chitin waste. In another embodiment, polypeptides such as chitinase enzymes of the present invention can be useful as antifungal agents.

[0252] In another embodiment, polypeptides of the present invention can be used in the textile industry (e.g., for the treatment of textile substrates). More particularly, cellulases (e.g., endo-, exocellulases and cellobiohydrolases) have gained importance in the treatment of cellulose-containing fibers. During the washing of indigo-dyed denim textiles, enzymatic treatment by a polypeptide of the present invention is can be used in place of (or in addition to) a bleaching treatment to achieve a “used” look of jeans or other suitable fabrics. Polypeptides of the present invention can also improve the softness/feel of such fabrics. When used in textile detergent compositions, enzymes of the present invention can enhance cleaning ability or act as a softening agent. In another embodiment, polypeptides such as cellulases of the present invention can be used in combination with polymeric agents in processes for providing a localized variation in the color density of fibers.

[0253] In another embodiment, polypeptides of the present invention can be used in the waste treatment industry (e.g., for changing the characteristics of the waste to become more amenable to further treatment and/or for bio-conversion to value-added products). Polypeptides such as lipases, cellulases, amylases, and proteases of the present invention can be used in addition to microorganisms to break down polymeric substances like proteins, polysaccharides and lipids, thereby facilitating this process.

[0254] In another embodiment, polypeptides of the present invention can be used in industries such as biocatalysis; sewage treatment; cleaning up oil pollution; the synthesis of fragrances; and enhancing the recovery of oil (e.g., during drilling).

[0255] Other uses of the polynucleotides and polypeptides of the present invention would be apparent to a person of skill in the art in view of the sequences and biological activities disclosed herein. These other uses, even though not explicitly mentioned here, are nevertheless within the scope of the present invention.

### Diagnostic, Classification and Research Tools

[0256] In another embodiment, the polynucleotides, polypeptides and antibodies of the present invention can be useful for diagnostic and classification tools. In this regard, it would be within the capacities of a person of skill in the art to search existing sequence databases and perform a phylogenic analysis based on the nucleic acid and amino acid sequences disclosed herein. Furthermore, designing hybridization probes or primers that are specific for a particular genus, species or strain (e.g., the genus, species, or strain from which the sequences disclosed herein were derived) would be within the grasp of a skilled person, in view of the sequence information disclosed herein. Similarly, a skilled person would be able to select an epitope of a polypeptide of the present invention which is specific for a particular genus, species or strain (e.g., the genus, species, or strain from which the sequences disclosed herein were derived) and generate an antibody or binding agent that binds specifically thereto.

[0257] Such tools are useful, for example, in diagnostic methods for detecting the presence or absence of a particular organism (e.g., the organism from which the sequences disclosed herein were derived) in a sample; as research tools (e.g., for designing and producing microarrays for studying fungal gene expression); for rapidly classifying an organism of interest based the detection of a sequence or polypeptide specific for that organism. The skilled person would recognize that knowledge of the precise (biological) function or protein activity of a polypeptide of the present invention is not absolutely necessary for the aforementioned tools to be useful for diagnostic, research, or classification purposes. Sequences that are particularly useful in this regard are the genomic, coding and amino acid sequences corresponding to the polypeptides of the present invention annotated as “unknown” in Tables 1A-1C (as well as their corresponding exons and introns defined in Tables 2A-2C, where available). These sequences show little sequence identity with those in the art and thus can be useful as markers for identifying the organisms from which the sequences of the present invention were derived. The skilled person would know how to search various sequence databases to design specific hybridization oligonucleotides (e.g., probes and primers), as well as produce antibodies specifically binds to the aforementioned sequences.

[0258] In some embodiments, the present invention relates to a method for identifying and/or classifying an organism (e.g., a fungal species) based on a biological sample, the method comprising detecting the presence or absence of any one of the polynucleotides or polypeptides of the present invention (e.g., those recited in the preceding paragraph) and determining that said organism is present or classifying said organism based on the presence of the polynucleotide or polypeptide. In some embodiments, the detecting step can be carried out using one or more oligonucleotides or antibodies of the present invention. In some embodiments, the detecting step can be carried out by performing an amplification and/or hybridization reaction.

[0259] In Tables 1A-1C below, the skilled person will recognize that although the precise protein activity of a polypeptide of the present invention may not be known (e.g., in the case of “unknown” proteins), the polypeptide may be nevertheless useful for carrying out an industrial process (e.g., cellulase-enhancing, cellulose-degrading, hemicellulose-degrading, etc.).

TABLE 1A
Biomass degrading genes and polypeptides of Scytalidium thermophilum

| | | | | | | | | Provisional | | | PCT | | |
|---|---|---|---|---|---|---|---|---|---|---|---|---|---|
| Gene ID in | | Annotation in | | | | | | application | | | application | | |
| Provisional | | Provisional | | | | | CBM | SEQ ID NO: | | | SEQ ID NO: | | |
| Application No. | | Application No. | | | | CAZy | of in- | Ge- | Cod- | Amino | Ge- | Cod- | Amino |
| 61/657,082 | Target ID | 61/657,082 | Updated annotation | Function | Protein activity | family | terest | nomic | ing | acid | nomic | ing | acid |
| Scyth2p4_000006 | SCYTH_1_03938 | xylanase | xylanase GH10 | hemicellulose- | xylanase | GH10 | | 1 | 2 | 3 | 1 | 286 | 571 |
| | | | | degrading | | | | | | | | | |
| Scyth2p4_000010 | Scyth2p4_000010 | unknown | Acid phosphatase | dephosphorylation | Acid phosphatase | | | 4 | 5 | 6 | 2 | 287 | 572 |
| Scyth2p4_000016 | | Leucine | Leucine | protein | protease | | | 7 | 8 | 9 | 3 | 288 | 573 |
| | | aminopeptidase 2 | aminopeptidase 2 | hydrolysis | | | | | | | | | |
| Scyth2p4_000019 | SCYTH_2_02709 | unknown | unknown | | uncharacterized | | | 10 | 11 | 12 | 4 | 289 | 574 |
| | | | | | lignocellulose-induced | | | | | | | | |
| | | | | | protein | | | | | | | | |
| Scyth2p4_000123 | | Putative beta- | arabinoxylan | hemicellulose- | arabinofuranosidase | GH43 | | 13 | 14 | 15 | 5 | 290 | 575 |
| | | xylosidase | arabinofuranohydrolase | degrading | | | | | | | | | |
| | | | GH43 | | | | | | | | | | |
| Scyth2p4_000124 | SCYTH_2_06066 | unknown | unknown | | uncharacterized | | | 16 | 17 | 18 | 6 | 291 | 576 |
| | | | | | lignocellulose-induced | | | | | | | | |
| | | | | | protein | | | | | | | | |
| Scyth2p4_000141 | | Probable aspartic- | Candidapepsin-3 | protein | protease | | | 19 | 20 | 21 | 7 | 292 | 577 |
| | | type endopeptidase | | hydrolysis | | | | | | | | | |
| | | OPSB | | | | | | | | | | | |
| Scyth2p4_000168 | | unknown | unknown | | unknown | | | 22 | 23 | 24 | 8 | 293 | 578 |
| Scyth2p4_000230 | Scyth2p4_000230 | unknown | galactanase GH5 | hemicellulose- | galactanase | GH5 | | 25 | 26 | 27 | 9 | 294 | 579 |
| | | | | degrading | | | | | | | | | |
| Scyth2p4_000277 | | Putative lipase | Putative lipase | lipid-modifying | lipase | | | 28 | 29 | 30 | 10 | 295 | 580 |
| | | atg15 | atg15 | | | | | | | | | | |
| Scyth2p4_000610 | Scyth2p4_000610 | unknown | xylanase GH30 | hemicellulose- | xylanase | GH30 | | 31 | 32 | 33 | 11 | 296 | 581 |
| | | | | degrading | | | | | | | | | |
| Scyth2p4_000863 | SCYTH_1_00740 | hexosaminidase | hexosaminidase GH20 | chitin- | hexosaminidase | GH20 | | 34 | 35 | 36 | 12 | 297 | 582 |
| | | | | degrading | | | | | | | | | |
| Scyth2p4_000904 | Scyth2p4_000904 | Probable feruloyl | Probable feruloyl | hemicellulose- | feruloyl esterase | | | 37 | 38 | 39 | 13 | 298 | 583 |
| | | esterase A | esterase A | modifying | | | | | | | | | |
| Scyth2p4_001035 | Scyth2p4_001035 | Tyrosinase | Tyrosinase | pigment- | Tyrosinase | | | 40 | 41 | 42 | 14 | 299 | 584 |
| | | | | generating | | | | | | | | | |
| Scyth2p4_001183 | | Carboxypeptidase Y | Carboxypeptidase Y | protein | protease | | | 43 | 44 | 45 | 15 | 300 | 585 |
| | | | homolog A | hydrolysis | | | | | | | | | |
| Scyth2p4_001259 | Scyth2p4_001259 | unknown | unknown | | uncharacterized | | | 46 | 47 | 48 | 16 | 301 | 586 |
| | | | | | lignocellulose-induced | | | | | | | | |
| | | | | | protein | | | | | | | | |
| Scyth2p4_001262 | Scyth2p4_001262 | endoglucanase | endoglucanase GH5 | cellulose- | endoglucanase | GH5 | CBM | 49 | 50 | 51 | 17 | 302 | 587 |
| | | | | degrading | | | 1 | | | | | | |
| Scyth2p4_001326 | | Aspergillopepsin-2 | Aspergillopepsin-2 | protein | protease | | | 52 | 53 | 54 | 18 | 303 | 588 |
| | | | | hydrolysis | | | | | | | | | |
| Scyth2p4_001371 | Scyth2p4_001371 | Probable exo-1,4- | Beta-xylosidase GH3 | hemicellulose- | beta-xylosidase | GH3 | | 55 | 56 | 57 | 19 | 304 | 589 |
| | | beta-xylosidase | | degrading | | | | | | | | | |
| | | bxlB | | | | | | | | | | | |
| Scyth2p4_001379 | | Mannan endo-1,4- | beta-mannanase GH26 | hemicellulose- | beta-mannanase | GH26 | CBM | 58 | 59 | 60 | 20 | 305 | 590 |
| | | beta-mannosidase | | degrading | | | 35 | | | | | | |
| Scyth2p4_001450 | | Carbohydrate- | possible carbohydrate- | carbohydrate- | carbohydrate-binding | | | 61 | 62 | 63 | 21 | 306 | 591 |
| | | binding cytochrome | binding cytochrome | oxidizing | cytochrome | | | | | | | | |
| | | b562 (Fragment) | | | | | | | | | | | |
| Scyth2p4_001460 | Scyth2p4_001460 | chitinase | chitinase GH18 | chitin- | chitinase | GH18 | | 64 | 65 | 66 | 22 | 307 | 592 |
| | | | | degrading | | | | | | | | | |
| Scyth2p4_001513 | | Glucan 1,3-beta- | Glucan 1,3-beta- | cellulose- | glucan 1,3-beta- | GH55 | | 67 | 68 | 69 | 23 | 308 | 593 |
| | | glucosidase | glucosidase | degrading | glucosidase | | | | | | | | |
| Scyth2p4_001745 | Scyth2p4_001745 | Endoglucanase E1 | Endoglucanase | cellulose- | endoglucanase | GH5 | | 70 | 71 | 72 | 24 | 309 | 594 |
| | | | | degrading | | | | | | | | | |
| Scyth2p4_001867 | SCYTH_1_00384 | Probable beta- | Probable beta- | hemicellulose- | beta-mannosidase B | GH2 | | 73 | 74 | 75 | 25 | 310 | 595 |
| | | mannosidase B | mannosidase B | degrading | | | | | | | | | |
| Scyth2p4_001875 | | Metallocarboxypeptidase | Metallocarboxypeptidase | protein | protease | | | 76 | 77 | 78 | 26 | 311 | 596 |
| | | A-like protein | A-like protein | hydrolysis | | | | | | | | | |
| | | ARB_03789 | MCYG_01475 | | | | | | | | | | |
| Scyth2p4_001878 | Scyth2p4_001878 | unknown | unknown | | uncharacterized | | | 79 | 80 | 81 | 27 | 312 | 597 |
| | | | | | lignocellulose-induced | | | | | | | | |
| | | | | | protein | | | | | | | | |
| Scyth2p4_001887 | Scyth2p4_001887 | O- | O- | | oxidoreductase | | | 82 | 83 | 84 | 28 | 313 | 598 |
| | | methylsterigmatocystin | methylsterigmatocystin | | | | | | | | | | |
| | | oxidoreductase | oxidoreductase | | | | | | | | | | |
| Scyth2p4_001903 | | Probable leucine | Leucine | protein | protease | | | 85 | 86 | 87 | 29 | 314 | 599 |
| | | aminopeptidase | aminopeptidase 1 | hydrolysis | | | | | | | | | |
| | | MCYG_04170 | | | | | | | | | | | |
| Scyth2p4_001974 | | Endothiapepsin | Endothiapepsin | protein | protease | | | 88 | 89 | 90 | 30 | 315 | 600 |
| | | | | hydrolysis | | | | | | | | | |
| Scyth2p4_001995 | SCYTH_1_09959 | cellulase-enhancing | polysaccharide | cellulose- | polysaccharide | GH61 | | 91 | 92 | 93 | 31 | 316 | 601 |
| | | protein | monooxygenase | degrading | monooxygenase | | | | | | | | |
| Scyth2p4_001998 | Scyth2p4_001998 | Probable feruloyl | feruloyl esterase CE1 | hemicellulose- | feruloyl esterase | CE1 | | 94 | 95 | 96 | 32 | 317 | 602 |
| | | esterase C | | degrading | | | | | | | | | |
| Scyth2p4_002014 | Scyth2p4_002014 | unknown | unknown | | uncharacterized | | | 97 | 98 | 99 | 33 | 318 | 603 |
| | | | | | lignocellulose-induced | | | | | | | | |
| | | | | | protein | | | | | | | | |
| Scyth2p4_002032 | | unknown | unknown | | unknown | | | 100 | 101 | 102 | 34 | 319 | 604 |
| Scyth2p4_002058 | | Tripeptidyl- | Tripeptidyl- | peptide | protease | | | 103 | 104 | 105 | 35 | 320 | 605 |
| | | peptidase sed1 | peptidase sed1 | hydrolysis | | | | | | | | | |
| Scyth2p4_002089 | SCYTH_1_01777 | endo-1,5-alpha- | endo-1,5-alpha- | hemicellulose- | endo-1,5-alpha- | GH43 | | 106 | 107 | 108 | 36 | 321 | 606 |
| | | arabinanase | arabinanase GH43 | degrading | arabinanase | | | | | | | | |
| Scyth2p4_002099 | | endoglucanase | Endoglucanase GH12 | cellulose- | endoglucanase | GH12 | | 109 | 110 | 111 | 37 | 322 | 607 |
| | | | | degrading | | | | | | | | | |
| Scyth2p4_002112 | | unknown | unknown | | unknown CBM18 | | CBM | 112 | 113 | 114 | 38 | 323 | 608 |
| | | | | | | | 18 | | | | | | |
| Scyth2p4_002143 | | Glucan 1,3-beta- | exo-1,3-beta- | cellulose- | exo-1,3-beta- | GH55 | | 115 | 116 | 117 | 39 | 324 | 609 |
| | | glucosidase | glucanase GH55 | degrading | glucanase | | | | | | | | |
| Scyth2p4_002153 | Scyth2p4_002153 | Adhesin, putative | possible adhesin | | adhesin | | | 118 | 119 | 120 | 40 | 325 | 610 |
| Scyth2p4_002186 | SCYTH_2_02011 | Rhamnogalacturonan | rhamnogalacturonan | pectin- | rhamnogalacturonan | CE12 | | 121 | 122 | 123 | 41 | 326 | 611 |
| | | acetylesterase | acetylesterase CE12 | degrading | acetylesterase | | | | | | | | |
| Scyth2p4_002220 | Scyth2p4_002220 | cellulase- | polysaccharide | cellulose- | polysaccharide | GH61 | CBM | 124 | 125 | 126 | 42 | 327 | 612 |
| | | enhancing protein | monooxygenase | degrading | monooxygenase | | 1 | | | | | | |
| Scyth2p4_002225 | Scyth2p4_002225 | Cellobiose | Cellobiose | lignin- | cellobiose | | | 127 | 128 | 129 | 43 | 328 | 613 |
| | | dehydrogenase | dehydrogenase | degrading | dehydrogenase | | | | | | | | |
| Scyth2p4_002425 | | Uncharacterized | Uncharacterized | | oxidoreductase | | | 130 | 131 | 132 | 44 | 329 | 614 |
| | | oxidoreductase | oxidoreductase | | | | | | | | | | |
| | | C30D10.05c | C30D10.05c | | | | | | | | | | |
| Scyth2p4_002446 | Scyth2p4_002446 | Adhesin protein | possible adhesin | | adhesin | | | 133 | 134 | 135 | 45 | 330 | 615 |
| | | Mad1 | | | | | | | | | | | |
| Scyth2p4_002491 | | Adhesin protein | possible adhesin | | adhesin | GH18 | | 136 | 137 | 138 | 46 | 331 | 616 |
| | | Mad1 | | | | | | | | | | | |
| Scyth2p4_002582 | | Adhesin protein | possible adhesin | | adhesin | | | 139 | 140 | 141 | 47 | 332 | 617 |
| | | Mad1 | | | | | | | | | | | |
| Scyth2p4_002596 | | Subtilisin-like | Subtilisin-like | protein | protease | | | 142 | 143 | 144 | 48 | 333 | 618 |
| | | proteinase Spm1 | proteinase Spm1 | hydrolysis | | | | | | | | | |
| Scyth2p4_002639 | SCYTH_2_05416 | unknown | unknown | | uncharacterized | | | 145 | 146 | 147 | 49 | 334 | 619 |
| | | | | | lignocellulose-induced | | | | | | | | |
| | | | | | protein | | | | | | | | |
| Scyth2p4_002689 | Scyth2p4_002689 | cellulase- | polysaccharide | cellulose- | polysaccharide | GH61 | | 148 | 149 | 150 | 50 | 335 | 620 |
| | | enhancing protein | monooxygenase | degrading | monooxygenase | | | | | | | | |
| Scyth2p4_002854 | SCYTH_1_03782 | arabinogalactanase | arabinogalactanase GH53 | hemicellulose- | arabinogalactanase | GH53 | | 151 | 152 | 153 | 51 | 336 | 621 |
| | | | | degrading | | | | | | | | | |
| Scyth2p4_002859 | | Nucleotide exchange | Nucleotide exchange | | nucleotide exchange | | | 154 | 155 | 156 | 52 | 337 | 622 |
| | | factor SIL1 | factor SIL1 | | factor | | | | | | | | |
| Scyth2p4_003064 | Scyth2p4_003064 | alpha-amylase | Alpha-amylase GH13 | starch- | alpha-amylase | GH13 | | 157 | 158 | 159 | 53 | 338 | 623 |
| | | | | degrading | | | | | | | | | |
| Scyth2p4_003098 | Scyth2p4_003098 | Killer toxin subunits | Killer toxin subunits | chitin- | chitinase | GH18 | CBM | 160 | 161 | 162 | 54 | 339 | 624 |
| | | alpha/beta | alpha/beta | degrading | | | 18 | | | | | | |
| Scyth2p4_003108 | | Probable beta- | Probable beta- | cellulose- | beta-glucosidase | GH17 | | 163 | 164 | 165 | 55 | 340 | 625 |
| | | glucosidase btgE | glucosidase btgE | degrading | | | | | | | | | |
| Scyth2p4_003124 | | Probable endo-1,3(4)- | mixed-link glucanase | glucan- | mixed-link glucanase | GH16 | | 166 | 167 | 168 | 56 | 341 | 626 |
| | | beta-glucanase | GH16 | degrading | | | | | | | | | |
| | | AFUB_029980 | | | | | | | | | | | |
| Scyth2p4_003222 | Scyth2p4_003222 | Endoglucanase-5 | endoglucanase GH45 | cellulose- | endoglucanase | GH45 | | 169 | 170 | 171 | 57 | 342 | 627 |
| | | | | degrading | | | | | | | | | |
| Scyth2p4_003248 | | Lysophospholipase | Lysophospholipase | phospholipid- | lipase | | | 172 | 173 | 174 | 58 | 343 | 628 |
| | | | | modifying | | | | | | | | | |
| Scyth2p4_003738 | | Probable aspartic- | Probable aspartic- | protein | protease | | | 175 | 176 | 177 | 59 | 344 | 629 |
| | | type endopeptidase | type endopeptidase | hydrolysis | | | | | | | | | |
| | | opsB | OPSB | | | | | | | | | | |
| Scyth2p4_003766 | Scyth2p4_003766 | unknown | unknown | | unknown GH16 | GH16 | | 178 | 179 | 180 | 60 | 345 | 630 |
| Scyth2p4_003836 | Scyth2p4_003836 | Cellobiose | Cellobiose | cellulose- | cellobiose | | CBM | 181 | 182 | 183 | 61 | 346 | 631 |
| | | dehydrogenase | dehydrogenase | degrading | dehydrogenase | | 1 | | | | | | |
| Scyth2p4_003875 | SCYTH_1_01865 | cellulase-enhancing | polysaccharide | cellulose- | polysaccharide | GH61 | CBM | 184 | 185 | 186 | 62 | 347 | 632 |
| | | protein | monooxygenase | degrading | monooxygenase | | 1 | | | | | | |
| Scyth2p4_003882 | SCYTH_1_09023 | beta-glucosidase | beta-glucosidase GH3 | cellulose- | beta-glucosidase | GH3 | | 187 | 188 | 189 | 63 | 348 | 633 |
| | | | | degrading | | | | | | | | | |
| Scyth2p4_003909 | Scyth2p4_003909 | cellulase-enhancing | polysaccharide | cellulose- | polysaccharide | GH61 | | 190 | 191 | 192 | 64 | 349 | 634 |
| | | protein | monooxygenase | degrading | monooxygenase | | | | | | | | |
| Scyth2p4_003923 | Scyth2p4_003923 | unknown | xylan alpha-1,2- | hemicellulose- | xylan alpha-1,2- | GH115 | | 193 | 194 | 195 | 65 | 350 | 635 |
| | | | glucuronidase GH115 | modifying | glucuronidase | | | | | | | | |
| Scyth2p4_003925 | | cellulase-enhancing | polysaccharide | cellulose- | polysaccharide | GH61 | CBM | 196 | 197 | 198 | 66 | 351 | 636 |
| | | protein | monooxygenase | degrading | monooxygenase | | 1 | | | | | | |
| Scyth2p4_003929 | | unknown | unknown | | unknown | | | 199 | 200 | 201 | 67 | 352 | 637 |
| Scyth2p4_003943 | | exo-1,3-beta- | exo-1,3-beta- | glucan- | exo-1,3-beta- | GH55 | | 202 | 203 | 204 | 68 | 353 | 638 |
| | | glucanase | glucanase GH55 | degrading | glucanase | | | | | | | | |
| Scyth2p4_004010 | | Endo-1,4-beta- | xylanase GH10 | hemicellulose- | xylanase | GH10 | | 205 | 206 | 207 | 69 | 354 | 639 |
| | | xylanase | | degrading | | | | | | | | | |
| Scyth2p4_004018 | Scyth2p4_004018 | unknown | unknown | | uncharacterized | | | 208 | 209 | 210 | 70 | 355 | 640 |
| | | | | | lignocellulose-induced | | | | | | | | |
| | | | | | protein | | | | | | | | |
| Scyth2p4_004025 | Scyth2p4_004025 | alpha- | arabinoxylan | hemicellulose- | arabinofuranosidase | GH62 | | 211 | 212 | 213 | 71 | 356 | 641 |
| | | arabinofuranosidase | arabinofuranohydrolase | degrading | | | | | | | | | |
| | | | GH62 | | | | | | | | | | |
| Scyth2p4_004026 | SCYTH_1_04528 | Alpha-N- | Alpha-N- | hemicellulose- | arabinofuranosidase | GH43 | | 214 | 215 | 216 | 72 | 357 | 642 |
| | | arabinofuranosidase | arabinofuranosidase | degrading | | | | | | | | | |
| | | 2 | 2 | | | | | | | | | | |
| Scyth2p4_004049 | Scyth2p4_004049 | cellulase-enhancing | polysaccharide | cellulose- | polysaccharide | GH61 | | 217 | 218 | 219 | 73 | 358 | 643 |
| | | protein | monooxygenase | degrading | monooxygenase | | | | | | | | |
| Scyth2p4_004099 | Scyth2p4_004099 | cellulase-enhancing | polysaccharide | cellulose- | polysaccharide | GH61 | | 220 | 221 | 222 | 74 | 359 | 644 |
| | | protein | monooxygenase | degrading | monooxygenase | | | | | | | | |
| Scyth2p4_004162 | Scyth2p4_004162 | Probable | Acetylxylan esterase 1 | hemicellulose- | acetylxylan esterase | CE1 | | 223 | 224 | 225 | 75 | 360 | 645 |
| | | acetylxylan esterase | CE1 | modifying | | | | | | | | | |
| | | A | | | | | | | | | | | |
| Scyth2p4_004197 | Scyth2p4_004197 | unknown | exo-1,3-beta- | galactan- | exo-1,3-beta- | GH43 | CBM | 226 | 227 | 228 | 76 | 361 | 646 |
| | | | galactanase GH43 | degrading | galactanase | | 35 | | | | | | |
| Scyth2p4_004205 | SCYTH_1_00248 | endoglucanase | endoglucanase GH6 | cellulose- | endoglucanase | GH6 | CBM | 229 | 230 | 231 | 77 | 362 | 647 |
| | | | | degrading | | | 1 | | | | | | |
| Scyth2p4_004235 | | Aspergillopepsin A | Aspartic protease PEP3 | protein | protease | | | 232 | 233 | 234 | 78 | 363 | 648 |
| | | | | hydrolysis | | | | | | | | | |
| Scyth2p4_004237 | SCYTH_1_01221 | beta-glucosidase | beta-glucosidase GH3 | cellulose- | beta-glucosidase | GH3 | | 235 | 236 | 237 | 79 | 364 | 649 |
| | | | | degrading | | | | | | | | | |
| Scyth2p4_004263 | | Non-Catalytic | xylanase GH10 | Hemicellulose- | xylanase | GH10 | CBM | 238 | 239 | 240 | 80 | 365 | 650 |
| | | module family | | degrading | | | 1 | | | | | | |
| | | expansin | | | | | | | | | | | |
| Scyth2p4_004293 | SCYTH_1_08979 | cellobiohydrolase | cellobiohydrolase GH7 | cellulose- | cellobiohydrolase | GH7 | CBM | 241 | 242 | 243 | 81 | 366 | 651 |
| | | | | degrading | | | 1 | | | | | | |
| Scyth2p4_004317 | Scyth2p4_004317 | unknown | unknown | | uncharacterized | | | 244 | 245 | 246 | 82 | 367 | 652 |
| | | | | | lignocellulose-induced | | | | | | | | |
| | | | | | protein | | | | | | | | |
| Scyth2p4_004650 | Scyth2p4_004650 | unknown | Uncharacterized protein | | uncharacterized | | | 247 | 248 | 249 | 83 | 368 | 653 |
| | | | SAOUHSC_02143 | | lignocellulose-induced | | | | | | | | |
| | | | | | protein | | | | | | | | |
| Scyth2p4_004945 | Scyth2p4_004945 | cellulase-enhancing | polysaccharide | cellulose- | polysaccharide | GH61 | | 250 | 251 | 252 | 84 | 369 | 654 |
| | | protein | monooxygenase | degrading | monooxygenase | | | | | | | | |
| Scyth2p4_004976 | | N-acyl- | phospholipase | phospholipid- | lipase | | | 253 | 254 | 255 | 85 | 370 | 655 |
| | | phosphatidylethanol | | modifying | | | | | | | | | |
| | | amine-hydrolyzing | | | | | | | | | | | |
| | | phospholipase D | | | | | | | | | | | |
| Scyth2p4_005037 | Scyth2p4_005037 | Pectate lyase plyB | Pectate lyase plyB | pectin- | pectate lyase | PL1 | | 256 | 257 | 258 | 86 | 371 | 656 |
| | | | | degrading | | | | | | | | | |
| Scyth2p4_005092 | | unknown | unknown | | unknown CE3 | CE3 | | 259 | 260 | 261 | 87 | 372 | 657 |
| Scyth2p4_005093 | Scyth2p4_005093 | Cutinase | Cutinase CE5 | cutin-degrading | cutinase | CE5 | | 262 | 263 | 264 | 88 | 373 | 658 |
| Scyth2p4_005094 | Scyth2p4_005094 | Cutinase | Cutinase CE5 | cutin-degrading | cutinase | CE5 | | 265 | 266 | 267 | 89 | 374 | 659 |
| Scyth2p4_005146 | | Leucine | Leucine | protein | protease | | | 268 | 269 | 270 | 90 | 375 | 660 |
| | | aminopeptidase 1 | aminopeptidase 1 | hydrolysis | | | | | | | | | |
| Scyth2p4_005307 | | unknown | unknown | | unknown CBM18 | | CBM | 271 | 272 | 273 | 91 | 376 | 661 |
| | | | | | | | 18 | | | | | | |
| Scyth2p4_005334 | Scyth2p4_005334 | Pectinesterase | pectin methylesterase | pectin- | pectinesterase | CE8 | | 274 | 275 | 276 | 92 | 377 | 662 |
| | | | CE8 | modifying | | | | | | | | | |
| Scyth2p4_005335 | Scyth2p4_005335 | unknown | Beta-glucanase | glucan- | beta-glucanase | GH16 | | 277 | 278 | 279 | 93 | 378 | 663 |
| | | | | degrading | | | | | | | | | |
| Scyth2p4_005384 | | unknown | unknown | | unknown | | | 280 | 281 | 282 | 94 | 379 | 664 |
| Scyth2p4_005465 | Scyth2p4_005465 | unknown | unknown | | unknown CE16 | CE16 | | 283 | 284 | 285 | 95 | 380 | 665 |
| Scyth2p4_005588 | Scyth2p4_005588 | unknown | unknown | | uncharacterized | | | 286 | 287 | 288 | 96 | 381 | 666 |
| | | | | | lignocellulose-induced | | | | | | | | |
| | | | | | protein | | | | | | | | |
| Scyth2p4_005596 | | unknown | unknown | | unknown CE4 | CE4 | | 289 | 290 | 291 | 97 | 382 | 667 |
| Scyth2p4_005646 | SCYTH_2_00017 | unknown | unknown | | uncharacterized | | | 292 | 293 | 294 | 98 | 383 | 668 |
| | | | | | lignocellulose-induced | | | | | | | | |
| | | | | | protein | | | | | | | | |
| Scyth2p4_005692 | | Bifunctional | acetylxylan esterase CE4 | hemicellulose- | acetylxylan esterase | CE4 | | 295 | 296 | 297 | 99 | 384 | 669 |
| | | xylanase/deacetylase | | degrading | | | | | | | | | |
| Scyth2p4_005696 | Scyth2p4_005696 | unknown | unknown | | uncharacterized | | | 298 | 299 | 300 | 100 | 385 | 670 |
| | | | | | lignocellulose-induced | | | | | | | | |
| | | | | | protein | | | | | | | | |
| Scyth2p4_005712 | SCYTH_2_07654 | Probable 1,4-beta- | carbohydrate esterase | hemicellulose- | unknown CE16 | CE16 | CBM | 301 | 302 | 303 | 101 | 386 | 671 |
| | | D-glucan | | modifying | | | 1 | | | | | | |
| | | cellobiohydrolase C | | | | | | | | | | | |
| Scyth2p4_005714 | SCYTH_2_02004 | Acetylxylan | acetylxylan esterase CE1 | hemicellulose- | acetylxylan esterase | CE1 | CBM | 304 | 305 | 306 | 102 | 387 | 672 |
| | | esterase A | | modifying | | | 1 | | | | | | |
| Scyth2p4_005722 | Scyth2p4_005722 | Aldose 1-epimerase | Aldose 1-epimerase | | aldose epimerase | | | 307 | 308 | 309 | 103 | 388 | 673 |
| Scyth2p4_005760 | SCYTH_1_00672 | cellulase- | polysaccharide | cellulose- | polysaccharide | GH61 | | 310 | 311 | 312 | 104 | 389 | 674 |
| | | enhancing protein | monooxygenase | degrading | monooxygenase | | | | | | | | |
| Scyth2p4_005775 | Scyth2p4_005775 | Expansin-like | possible expansin | cellulase- | expansin | | | 313 | 314 | 315 | 105 | 390 | 675 |
| | | protein | | enhancing | | | | | | | | | |
| Scyth2p4_005777 | Scyth2p4_005777 | non-catalytic | possible expansin | cellulase- | expansin | | | 316 | 317 | 318 | 106 | 391 | 676 |
| | | module family | | enhancing | | | | | | | | | |
| | | expansin | | | | | | | | | | | |
| Scyth2p4_005792 | SCYTH_1_00771 | alpha-glucuronidase | alpha-glucuronidase | hemicellulose- | alpha-glucuronidase | GH67 | | 319 | 320 | 321 | 107 | 392 | 677 |
| | | | GH67 | modifying | GH67 | | | | | | | | |
| Scyth2p4_005865 | SCYTH_1_09242 | cellulase-enhancing | polysaccharide | cellulose- | polysaccharide | GH61 | CBM | 322 | 323 | 324 | 108 | 393 | 678 |
| | | protein | monooxygenase | degrading | monooxygenase | | 1 | | | | | | |
| Scyth2p4_005894 | | Uncharacterized | Uncharacterized | | unknown CE4 | CE4 | | 325 | 326 | 327 | 109 | 394 | 679 |
| | | protein yjeA | protein yjeA | | | | | | | | | | |
| Scyth2p4_006005 | Scyth2p4_006005 | unknown | exo-arabinanase GH93 | hemicellulose- | exo-arabinanase | GH93 | | 328 | 329 | 330 | 110 | 395 | 680 |
| | | | | degrading | GH93 | | | | | | | | |
| Scyth2p4_006013 | Scyth2p4_006013 | Probable 1,4-beta- | Exoglucanase 1 | cellulose- | Exoglucanase | GH7 | | 331 | 332 | 333 | 111 | 396 | 681 |
| | | D-glucan | | degrading | | | | | | | | | |
| | | cellobiohydrolase B | | | | | | | | | | | |
| Scyth2p4_006014 | Scyth2p4_006014 | Beta-galactosidase | Beta-glucuronidase | hemicellulose- | Beta-glucuronidase | GH2 | | 334 | 335 | 336 | 112 | 397 | 682 |
| | | | | degrading | | | | | | | | | |
| Scyth2p4_006016 | | cellulase-enhancing | polysaccharide | cellulose- | polysaccharide | GH61 | CBM | 337 | 338 | 339 | 113 | 398 | 683 |
| | | protein | monooxygenase | degrading | monooxygenase | | 1 | | | | | | |
| Scyth2p4_006040 | Scyth2p4_006040 | unknown | unknown | | uncharacterized | | | 340 | 341 | 342 | 114 | 399 | 684 |
| | | | | | lignocellulose-induced | | | | | | | | |
| | | | | | protein | | | | | | | | |
| Scyth2p4_006061 | | Putative | Putative | protein | protease | | | 343 | 344 | 345 | 115 | 400 | 685 |
| | | metallocarboxypeptidase | metallocarboxypeptidase | hydrolysis | | | | | | | | | |
| | | MCYG_04493 | ecm14 | | | | | | | | | | |
| Scyth2p4_006263 | | Lipase | Lipase | lipid-degrading | lipase | CE5 | | 346 | 347 | 348 | 116 | 401 | 686 |
| Scyth2p4_006265 | Scyth2p4_006265 | beta-glucosidase | beta-glucosidase GH3 | cellulose- | beta-glucosidase GH3 | GH3 | | 349 | 350 | 351 | 117 | 402 | 687 |
| | | | | degrading | | | | | | | | | |
| Scyth2p4_006499 | | Neutral alpha- | Glucosidase 2 subunit | glucoside- | glucosidase | GH31 | | 352 | 353 | 354 | 118 | 403 | 688 |
| | | glucosidase AB | alpha | degrading | | | | | | | | | |
| Scyth2p4_006556 | | Probable | Probable glycosidase crf1 | glucoside- | glycosidase | GH16 | | 355 | 356 | 357 | 119 | 404 | 689 |
| | | glycosidase crf1 | | degrading | | | | | | | | | |
| Scyth2p4_006566 | SCYTH_2_05810 | unknown | unknown | | uncharacterized | GH43 | | 358 | 359 | 360 | 120 | 405 | 690 |
| | | | | | lignocellulose-induced | | | | | | | | |
| | | | | | protein | | | | | | | | |
| Scyth2p4_006586 | | cellulase-enhancing | polysaccharide | cellulose- | polysaccharide | GH61 | | 361 | 362 | 363 | 121 | 406 | 691 |
| | | protein | monooxygenase | degrading | monooxygenase | | | | | | | | |
| Scyth2p4_006591 | Scyth2p4_006591 | endoglucanase | xyloglucanase GH74 | xyloglucan- | xyloglucanase | GH74 | CBM | 364 | 365 | 366 | 122 | 407 | 692 |
| | | | | degrading | | | 1 | | | | | | |
| Scyth2p4_006628 | Scyth2p4_006628 | Carbohydrate- | possible carbohydrate- | carbohydrate- | carbohydrate-binding | | | 367 | 368 | 369 | 123 | 408 | 693 |
| | | binding cytochrome | binding cytochrome | oxidizing | cytochrome | | | | | | | | |
| | | b562 | | | | | | | | | | | |
| Scyth2p4_006768 | | exo-1,3-beta- | exo-1,3-beta- | cellulose- | exo-1,3-beta- | GH55 | | 370 | 371 | 372 | 124 | 409 | 694 |
| | | glucanase | glucanase GH55 | degrading | glucanase | | | | | | | | |
| Scyth2p4_006914 | SCYTH_2_07965 | Putative | rhamnogalacturonan lyase | pectin- | rhamnogalacturonase | PL4 | | 373 | 374 | 375 | 125 | 410 | 695 |
| | | rhamnogalacturonase | PL4 | degrading | | | | | | | | | |
| Scyth2p4_006916 | Scyth2p4_006916 | Carbohydrate- | Cellobiose dehydrogenase | cellulose- | carbohydrate-binding | | | 376 | 377 | 378 | 126 | 411 | 696 |
| | | binding cytochrome | | degrading | cytochrome | | | | | | | | |
| | | b562 (Fragment) | | | | | | | | | | | |
| Scyth2p4_006920 | SCYTH_2_04020 | Exoglucanase-6A | possible expansin | cellulase- | expansin | CE3 | CBM | 379 | 380 | 381 | 127 | 412 | 697 |
| | | | | enhancing | | | 1 | | | | | | |
| Scyth2p4_006931 | | Aspergillopepsin-2 | Aspergillopepsin-2 | protein | protease | | | 382 | 383 | 384 | 128 | 413 | 698 |
| | | | | hydrolysis | | | | | | | | | |
| Scyth2p4_006993 | SCYTH_1_03721 | cellobiohydrolase | cellobiohydrolase GH6 | cellulose- | cellobiohydrolase¹ | GH6 | CBM | 385 | 386 | 387 | 129 | 414 | 699 |
| | | | | degrading | | | 1 | | | | | | |
| Scyth2p4_007002 | Scyth2p4_007002 | Swollenin | possible swollenin | cellulase- | swollenin | CE15 | CBM | 388 | 389 | 390 | 130 | 415 | 700 |
| | | | | enhancing | | | 1 | | | | | | |
| Scyth2p4_007064 | | Vacuolar protease A | Vacuolar protease A | protein | protease | | | 391 | 392 | 393 | 131 | 416 | 701 |
| | | | | hydrolysis | | | | | | | | | |
| Scyth2p4_007097 | SCYTH_1_03940 | cellulase-enhancing | polysaccharide | cellulose- | polysaccharide | GH61 | CBM | 394 | 395 | 396 | 132 | 417 | 702 |
| | | protein | monooxygenase | degrading | monooxygenase | | 1 | | | | | | |
| Scyth2p4_007200 | Scyth2p4_007200 | Carbohydrate- | possible carbohydrate- | carbohydrate- | carbohydrate-binding | | | 397 | 398 | 399 | 133 | 418 | 703 |
| | | binding cytochrome | binding cytochrome | oxidizing | cytochrome | | | | | | | | |
| | | b562 | | | | | | | | | | | |
| Scyth2p4_007231 | Scyth2p4_007231 | cellulase-enhancing | polysaccharide | cellulose- | polysaccharide | GH61 | | 400 | 401 | 402 | 134 | 419 | 704 |
| | | protein | monooxygenase | degrading | monooxygenase | | | | | | | | |
| Scyth2p4_007246 | | unknown | unknown | | unknown CBM18 | | CBM | 403 | 404 | 405 | 135 | 420 | 705 |
| | | | | | | | 18 | | | | | | |
| Scyth2p4_007249 | Scyth2p4_007249 | unknown | unknown | | unknown CE15 | CE15 | | 406 | 407 | 408 | 136 | 421 | 706 |
| Scyth2p4_007259 | Scyth2p4_007259 | arabinoxylan | arabinoxylan | hemicellulose- | arabinofuranosidase | GH62 | | 409 | 410 | 411 | 137 | 422 | 707 |
| | | arabinofuranohydrolase | arabinofuranosidase | modifying | | | | | | | | | |
| | | | GH62 | | | | | | | | | | |
| Scyth2p4_007263 | | Adhesin protein, | possible adhesin | | adhesin | | | 412 | 413 | 414 | 138 | 423 | 708 |
| | | putative | | | | | | | | | | | |
| Scyth2p4_007266 | Scyth2p4_007266 | unknown | xylan alpha-1,2- | hemicellulose- | xylan alpha-1,2- | GH115 | | 415 | 416 | 417 | 139 | 424 | 709 |
| | | | glucuronidase GH115 | modifying | glucuronidase | | | | | | | | |
| Scyth2p4_007287 | Scyth2p4_007287 | unknown | unknown | | uncharacterized | | | 418 | 419 | 420 | 140 | 425 | 710 |
| | | | | | lignocellulose-induced | | | | | | | | |
| | | | | | protein | | | | | | | | |
| Scyth2p4_007304 | Scyth2p4_007304 | unknown | unknown | | uncharacterized | | | 421 | 422 | 423 | 141 | 426 | 711 |
| | | | | | lignocellulose-induced | | | | | | | | |
| | | | | | protein | | | | | | | | |
| Scyth2p4_007313 | | Probable exo-1,4- | Beta-xylosidase GH3 | hemicellulose- | beta-xylosidase | GH3 | | 424 | 425 | 426 | 142 | 427 | 712 |
| | | beta-xylosidase | | degrading | | | | | | | | | |
| | | bxlB | | | | | | | | | | | |
| Scyth2p4_007314 | Scyth2p4_007314 | Probable feruloyl | feruloyl esterase CE1 | hemicellulose- | feruloyl esterase | CE1 | | 427 | 428 | 429 | 143 | 428 | 713 |
| | | esterase C | | degrading | | | | | | | | | |
| Scyth2p4_007531 | | unknown | unknown | | unknown CE2 | CE2 | | 430 | 431 | 432 | 144 | 429 | 714 |
| Scyth2p4_007556 | SCYTH_1_05275 | cellulase-enhancing | polysaccharide | cellulose- | polysaccharide | GH61 | CBM | 433 | 434 | 435 | 145 | 430 | 715 |
| | | protein | monooxygenase | degrading | monooxygenase | | 1 | | | | | | |
| Scyth2p4_007557 | Scyth2p4_007557 | cellulase-enhancing | polysaccharide | cellulose- | polysaccharide | GH61 | | 436 | 437 | 438 | 146 | 431 | 716 |
| | | protein | monooxygenase | degrading | monooxygenase | | | | | | | | |
| Scyth2p4_007647 | Scyth2p4_007647 | Probable beta- | Beta-galactosidase GH35 | hemicellulose- | beta-galactosidase | GH35 | | 439 | 440 | 441 | 147 | 432 | 717 |
| | | galactosidase B | | degrading | | | | | | | | | |
| Scyth2p4_007651 | SCYTH_1_05320 | cellulase-enhancing | polysaccharide | cellulose- | polysaccharide | GH61 | | 442 | 443 | 444 | 148 | 433 | 718 |
| | | protein | monooxygenase | degrading | monooxygenase | | | | | | | | |
| Scyth2p4_007699 | Scyth2p4_007699 | Endo-1,4-beta- | xylanase GH10 | hemicellulose- | xylanase | GH10 | | 445 | 446 | 447 | 149 | 434 | 719 |
| | | xylanase | | degrading | | | | | | | | | |
| Scyth2p4_007856 | Scyth2p4_007856 | Endo-1,4-beta- | xylanase GH10 | hemicellulose- | xylanase | GH10 | | 448 | 449 | 450 | 150 | 435 | 720 |
| | | xylanase | | degrading | | | | | | | | | |
| Scyth2p4_007921 | | Serine-type | Serine-type | protein | protease | | | 451 | 452 | 453 | 151 | 436 | 721 |
| | | carboxypeptidase F | carboxypeptidase F | hydrolysis | | | | | | | | | |
| Scyth2p4_008285 | Scyth2p4_008285 | unknown | unknown | | uncharacterized | | | 454 | 455 | 456 | 152 | 437 | 722 |
| | | | | | lignocellulose-induced | | | | | | | | |
| | | | | | protein | | | | | | | | |
| Scyth2p4_008294 | Scyth2p4_008294 | unknown | unknown | cellulase- | uncharacterized | | | 457 | 458 | 459 | 153 | 438 | 723 |
| | | | | enhancing | lignocellulose- | | | | | | | | |
| | | | | | induced protein² | | | | | | | | |
| Scyth2p4_008312 | Scyth2p4_008312 | unknown | unknown | | uncharacterized | | | 460 | 461 | 462 | 154 | 439 | 724 |
| | | | | | lignocellulose-induced | | | | | | | | |
| | | | | | protein | | | | | | | | |
| Scyth2p4_008328 | SCYTH_1_09441 | xylanase | xylanase GH11 | hemicellulose- | xylanase³ | GH11 | CBM | 463 | 464 | 465 | 155 | 440 | 725 |
| | | | | degrading | | | 1 | | | | | | |
| Scyth2p4_008336 | | Cuticle-degrading | Proteinase R | protein | protease | | | 466 | 467 | 468 | 156 | 441 | 726 |
| | | protease | | hydrolysis | | | | | | | | | |
| Scyth2p4_008341 | SCYTH_1_05851 | cellulase- | polysaccharide | cellulose- | polysaccharide | GH61 | | 469 | 470 | 471 | 157 | 442 | 727 |
| | | enhancing protein | monooxygenase | degrading | monooxygenase | | | | | | | | |
| Scyth2p4_008344 | | unknown | unknown | cellulose- | unknown CBM1 | | CBM | 472 | 473 | 474 | 158 | 443 | 728 |
| | | | | binding | | | 1 | | | | | | |
| Scyth2p4_008363 | SCYTH_1_00589 | endoglucanase | endoglucanase GH6 | cellulose- | endoglucanase | GH6 | | 475 | 476 | 477 | 159 | 444 | 729 |
| | | | | degrading | | | | | | | | | |
| Scyth2p4_008372 | SCYTH_1_01623 | cellobiohydrolase | cellobiohydrolase GH7 | cellulose- | cellobiohydrolase | GH7 | | 478 | 479 | 480 | 160 | 445 | 730 |
| | | | | degrading | | | | | | | | | |
| Scyth2p4_008392 | Scyth2p4_008392 | unknown | unknown | | uncharacterized | | | 481 | 482 | 483 | 161 | 446 | 731 |
| | | | | | lignocellulose-induced | | | | | | | | |
| | | | | | protein | | | | | | | | |
| Scyth2p4_008399 | Scyth2p4_008399 | Cellobiose | Cellobiose | Icellulose- | cellobiose | | | 484 | 485 | 486 | 162 | 447 | 732 |
| | | dehydrogenase | dehydrogenase | degrading | dehydrogenase | | | | | | | | |
| Scyth2p4_008411 | | Podosporapepsin | Podosporapepsin | protein | protease | | | 487 | 488 | 489 | 163 | 448 | 733 |
| | | | | hydrolysis | | | | | | | | | |
| Scyth2p4_008417 | | cellulase-enhancing | polysaccharide | cellulose- | polysaccharide | GH61 | | 490 | 491 | 492 | 164 | 449 | 734 |
| | | protein | monooxygenase | degrading | monooxygenase | | | | | | | | |
| Scyth2p4_008418 | Scyth2p4_008418 | cellulase-enhancing | polysaccharide | cellulose- | polysaccharide | GH61 | | 493 | 494 | 495 | 165 | 450 | 735 |
| | | protein | monooxygenase | degrading | monooxygenase | | | | | | | | |
| Scyth2p4_008663 | Scyth2p4_008663 | Putative | Putative | | oxidoreductase | | | 496 | 497 | 498 | 166 | 451 | 736 |
| | | uncharacterized | uncharacterized | | | | | | | | | | |
| | | oxidoreductase | oxidoreductase | | | | | | | | | | |
| | | YDR541C | YDR541C | | | | | | | | | | |
| Scyth2p4_008755 | Scyth2p4_008755 | glucoamylase | glucoamylase GH15 | starch- | glucoamylase | GH15 | | 499 | 500 | 501 | 167 | 452 | 737 |
| | | | | degrading | | | | | | | | | |
| Scyth2p4_008830 | | Phospholipase D | Alkaline phosphatase D | phospholipid- | lipase | | | 502 | 503 | 504 | 168 | 453 | 738 |
| | | | | modifying | | | | | | | | | |
| Scyth2p4_008896 | SCYTH_1_01504 | cellulase-enhancing | polysaccharide | cellulose- | polysaccharide | GH61 | | 505 | 506 | 507 | 169 | 454 | 739 |
| | | protein | monooxygenase | degrading | monooxygenase | | | | | | | | |
| Scyth2p4_009014 | | Gamma- | Gamma- | peptide- | protease | | | 508 | 509 | 510 | 170 | 455 | 740 |
| | | glutamyltranspeptidase 2 | glutamyltranspeptidase 1 | modifying | | | | | | | | | |
| Scyth2p4_009047 | Scyth2p4_009047 | Aldose 1-epimerase | Aldose 1-epimerase | | aldose epimerase | | | 511 | 512 | 513 | 171 | 456 | 741 |
| Scyth2p4_009244 | | Aspartic-type | Aspartic-type | protein | protease | | | 514 | 515 | 516 | 172 | 457 | 742 |
| | | endopeptidase ctsD | endopeptidase ctsD | hydrolysis | | | | | | | | | |
| Scyth2p4_009303 | Scyth2p4_009303 | Probable alpha-N- | alpha-arabinofuranosidase | hemicellulose- | arabinofuranosidase | GH51 | | 517 | 518 | 519 | 173 | 458 | 743 |
| | | arabinofuranosidase | GH51 | degrading | | | | | | | | | |
| | | A | | | | | | | | | | | |
| Scyth2p4_009308 | SCYTH_2_07268 | Feruloyl esterase B | feruloyl esterase CE1 | hemicellulose- | feruloyl esterase | CE1 | | 520 | 521 | 522 | 174 | 459 | 744 |
| | | | | degrading | | | | | | | | | |
| Scyth2p4_009393 | | Probable acetylxylan | Probable acetylxylan | hemicellulose- | acetylxylan esterase | CE1 | | 523 | 524 | 525 | 175 | 460 | 745 |
| | | esterase | esterase A | degrading | | | | | | | | | |
| Scyth2p4_009418 | | Endothiapepsin | Aspartic protease pep1 | protein | protease | | | 526 | 527 | 528 | 176 | 461 | 746 |
| | | | | hydrolysis | | | | | | | | | |
| Scyth2p4_009426 | Scyth2p4_009426 | Probable acetylxylan | Probable acetylxylan | hemicellulose- | acetylxylan esterase | CE1 | | 529 | 530 | 531 | 177 | 462 | 747 |
| | | esterase A | esterase A | modifying | | | | | | | | | |
| Scyth2p4_009442 | Scyth2p4_009442 | unknown | unknown | | uncharacterized | | CBM | 532 | 533 | 534 | 178 | 463 | 748 |
| | | | | | lignocellulose- | | 1 | | | | | | |
| | | | | | induced protein | | | | | | | | |
| Scyth2p4_009463 | | Probable leucine | Leucine aminopeptidase 2 | protein | protease | | | 535 | 536 | 537 | 179 | 464 | 749 |
| | | aminopeptidase 2 | | hydrolysis | | | | | | | | | |
| Scyth2p4_009475 | | Tripeptidyl- | Tripeptidyl-peptidase sed2 | peptide | protease | | | 538 | 539 | 540 | 180 | 465 | 750 |
| | | peptidase sed3 | | hydrolysis | | | | | | | | | |
| Scyth2p4_009509 | Scyth2p4_009509 | beta-mannanase | Beta-mannanase GH5 | hemicellulose- | beta-mannanase | GH5 | | 541 | 542 | 543 | 181 | 466 | 751 |
| | | | | degrading | | | | | | | | | |
| Scyth2p4_009510 | Scyth2p4_009510 | Glucoamylase | Glucoamylase | starch- | glucoamylase | GH119 | | 544 | 545 | 546 | 182 | 467 | 752 |
| | | | | degrading | | | | | | | | | |
| Scyth2p4_009516 | | unknown | unknown | | unknown PL20 | PL20 | | 547 | 548 | 549 | 183 | 468 | 753 |
| Scyth2p4_009525 | Scyth2p4_009525 | unknown | unknown | | uncharacterized | | | 550 | 551 | 552 | 184 | 469 | 754 |
| | | | | | lignocellulose-induced | | | | | | | | |
| | | | | | protein | | | | | | | | |
| Scyth2p4_009550 | | Cuticle-degrading | Cuticle-degrading | protein | protease | | | 553 | 554 | 555 | 185 | 470 | 755 |
| | | protease | protease | hydrolysis | | | | | | | | | |
| Scyth2p4_009554 | | unknown | unknown | | unknown CE3 | CE3 | | 556 | 557 | 558 | 186 | 471 | 756 |
| Scyth2p4_009565 | SCYTH_1_00574 | endoglucanase | endoglucanase GH7 | cellulose- | endoglucanase | GH7 | | 559 | 560 | 561 | 187 | 472 | 757 |
| | | | | degrading | | | | | | | | | |
| Scyth2p4_009569 | | Putative serine | Putative serine | protein | protease | | | 562 | 563 | 564 | 188 | 473 | 758 |
| | | protease K12H4.7 | protease K12H4.7 | hydrolysis | | | | | | | | | |
| Scyth2p4_009610 | | unknown | Beta-glucanase | glucan- | beta-glucanase | GH16 | | 565 | 566 | 567 | 189 | 474 | 759 |
| | | | | degrading | | | | | | | | | |
| Scyth2p4_009620 | SCYTH_1_08974 | endoglucanase | endoglucanase GH45 | cellulose- | endoglucanase | GH45 | CBM | 568 | 569 | 570 | 190 | 475 | 760 |
| | | | | degrading | | | 1 | | | | | | |
| Scyth2p4_009626 | SCYTH_1_01831 | arabinoxylan | arabinoxylan | hemicellulose- | arabinofuranosidase⁴ | GH62 | CBM | 571 | 572 | 573 | 191 | 476 | 761 |
| | | arabinofuranosidase | arabinofuranosidase | degrading | | | 1 | | | | | | |
| | | | GH62 | | | | | | | | | | |
| Scyth2p4_009629 | Scyth2p4_009629 | unknown | unknown | | uncharacterized | | | 574 | 575 | 576 | 192 | 477 | 762 |
| | | | | | lignocellulose-induced | | | | | | | | |
| | | | | | protein | | | | | | | | |
| Scyth2p4_009651 | Scyth2p4_009651 | unknown | Endo-1,4-beta- | hemicellulose- | endo-1,4-beta- | CE1 | | 577 | 578 | 579 | 193 | 478 | 763 |
| | | | xylanase Z | degrading | xylanase | | | | | | | | |
| Scyth2p4_009653 | Scyth2p4_009653 | xylanase | xylanase GH10 | hemicellulose- | xylanase | GH10 | | 580 | 581 | 582 | 194 | 479 | 764 |
| | | | | degrading | | | | | | | | | |
| Scyth2p4_009700 | Scyth2p4_009700 | cellobiohydrolase | cellobiohydrolase GH6 | cellulose- | cellobiohydrolase | GH6 | | 583 | 584 | 585 | 195 | 480 | 765 |
| | | | | degrading | | | | | | | | | |
| Scyth2p4_009707 | Scyth2p4_009707 | Cellobiose | Cellobiose | cellulose- | cellobiose | | | 586 | 587 | 588 | 196 | 481 | 766 |
| | | dehydrogenase | dehydrogenase | degrading | dehydrogenase | | | | | | | | |
| Scyth2p4_009711 | | unknown | unknown | | unknown | | | 589 | 590 | 591 | 197 | 482 | 767 |
| Scyth2p4_009720 | Scyth2p4_009720 | unknown | unknown | | uncharacterized | | | 592 | 593 | 594 | 198 | 483 | 768 |
| | | | | | lignocellulose-induced | | | | | | | | |
| | | | | | protein | | | | | | | | |
| Scyth2p4_009765 | | Adhesin protein | possible adhesin | | adhesin | | | 595 | 596 | 597 | 199 | 484 | 769 |
| | | Mad1 | | | | | | | | | | | |
| Scyth2p4_009796 | SCYTH_1_00755 | alpha-glucosidase | Alpha-glucosidase GH31 | starch- | alpha-glucosidase | GH31 | | 598 | 599 | 600 | 200 | 485 | 770 |
| | | | | degrading | | | | | | | | | |
| Scyth2p4_009823 | Scyth2p4_009823 | Expansin family | possible expansin | cellulase- | expansin | | | 601 | 602 | 603 | 201 | 486 | 771 |
| | | protein | | enhancing | | | | | | | | | |
| Scyth2p4_009929 | Scyth2p4_009929 | Chitinase 3 | Chitinase-like protein | chitin- | chitinase | GH18 | | 604 | 605 | 606 | 202 | 487 | 772 |
| | | | PB1E7.04c | degrading | | | | | | | | | |
| Scyth2p4_010021 | SCYTH_1_01020 | cellulase-enhancing | polysaccharide | cellulose- | polysaccharide | GH61 | | 607 | 608 | 609 | 203 | 488 | 773 |
| | | protein | monooxygenase | degrading | monooxygenase | | | | | | | | |
| Scyth2p4_010034 | | Adhesin protein | possible adhesin | | adhesion | | | 610 | 611 | 612 | 204 | 489 | 774 |
| | | Mad1 | | | | | | | | | | | |
| Scyth2p4_010146 | | unknown | unknown | | unknown CE1 | CE1 | | 613 | 614 | 615 | 205 | 490 | 775 |
| Scyth2p4_010149 | Scyth2p4_010149 | Exoglucanase 1 | Cellobiohydrolase GH7 | cellulose- | cellobiohydrolase | GH7 | | 616 | 617 | 618 | 206 | 491 | 776 |
| | | | | degrading | | | | | | | | | |
| Scyth2p4_010269 | Scyth2p4_010269 | Probable feruloyl | feruloyl esterase CE1 | hemicellulose- | feruloyl esterase | CE1 | CBM | 619 | 620 | 621 | 207 | 492 | 777 |
| | | esterase C | | modifying | | | 1 | | | | | | |
| Scyth2p4_010278 | Scyth2p4_010278 | Endochitinase | Killer toxin subunits | chitin- | chitinase | GH18 | CBM | 622 | 623 | 624 | 208 | 493 | 778 |
| | | | alpha/beta | degrading | | | 18 | | | | | | |
| Scyth2p4_010280 | | unknown | unknown | | unknown | | | 625 | 626 | 627 | 209 | 494 | 779 |
| Scyth2p4_010281 | | unknown | unknown | | unknown | | | 628 | 629 | 630 | 210 | 495 | 780 |
| Scyth2p4_010291 | | probable aspartic- | probable aspartic- | protein | protease | | | 631 | 632 | 633 | 211 | 496 | 781 |
| | | type endopeptidase | type endopeptidase | hydrolysis | | | | | | | | | |
| | | opsB | opsB | | | | | | | | | | |
| Scyth2p4_010295 | Scyth2p4_010295 | cutinase | cutinase CE5 | cutin-degrading | cutinase | CE5 | | 634 | 635 | 636 | 212 | 497 | 782 |
| Scyth2p4_010361 | | choline | possible pyranose | sugar | pyranose | | | 637 | 638 | 639 | 213 | 498 | 783 |
| | | dehydrogenase | dehydrogenase | modifying | dehydrogenase | | | | | | | | |
| Scyth2p4_010373 | Scyth2p4_010373 | carbohydrate- | possible carbohydrate- | carbohydrate- | carbohydrate-binding | | | 640 | 641 | 642 | 214 | 499 | 784 |
| | | binding cytochrome | binding cytochrome | oxidizing | cytochrome | | | | | | | | |
| | | b562 | | | | | | | | | | | |
| Scyth2p4_010387 | | exo-1,3-beta- | exo-1,3-beta- | cellulose- | exo-1,3-beta- | GH55 | | 643 | 644 | 645 | 215 | 500 | 785 |
| | | glucanase | glucanase GH55 | degrading | glucanase | | | | | | | | |
| Scyth2p4_010416 | | Choline | Choline | | Choline | | | 646 | 647 | 648 | 216 | 501 | 786 |
| | | dehydrogenase | dehydrogenase | | dehydrogenase | | | | | | | | |
| Scyth2p4_010423 | Scyth2p4_010423 | unknown | Uncharacterized | | uncharacterized | | | 649 | 650 | 651 | 217 | 502 | 787 |
| | | | protein YkgB | | lignocellulose-induced | | | | | | | | |
| | | | | | protein | | | | | | | | |
| Scyth2p4_010457 | SCYTH_1_01114 | xylanase | xylanase GH11 | hemicellulose- | xylanase⁵ | GH11 | | 652 | 653 | 654 | 218 | 503 | 788 |
| | | | | degrading | | | | | | | | | |
| Scyth2p4_010462 | Scyth2p4_010462 | Probable endo-1,4- | Probable endo-1,4- | hemicellulose- | endo-1,4-beta- | GH11 | | 655 | 656 | 657 | 219 | 504 | 789 |
| | | beta-xylanase B | beta-xylanase B | degrading | xylanase B | | | | | | | | |
| Scyth2p4_010469 | | choline | possible pyranose | sugar- | pyranose | | | 658 | 659 | 660 | 220 | 505 | 790 |
| | | dehydrogenase | dehydrogenase | modifying | dehydrogenase | | | | | | | | |
| Scyth2p4_010519 | | Peptidase M20 | Peptidase M20 domain- | protein | protease | | | 661 | 662 | 663 | 221 | 506 | 791 |
| | | domain-containing | containing protein | hydrolysis | | | | | | | | | |
| | | protein C757.05c | SMAC_03666.2 | | | | | | | | | | |
| Scyth2p4_010552 | | choline | possible pyranose | sugar- | pyranose | | | 664 | 665 | 666 | 222 | 507 | 792 |
| | | dehydrogenase | dehydrogenase | modifying | dehydrogenase | | | | | | | | |
| Scyth2p4_010553 | | chitinase A1 | chitinase GH18 | chitin- | chitinase | GH18 | | 667 | 668 | 669 | 223 | 508 | 793 |
| | | | | degrading | | | | | | | | | |
| Scyth2p4_010743 | | cellulase-enhancing | polysaccharide | cellulose- | polysaccharide | GH61 | | 670 | 671 | 672 | 224 | 509 | 794 |
| | | protein | monooxygenase | degrading | monooxygenase | | | | | | | | |
| Scyth2p4_010756 | Scyth2p4_010756 | unknown | unknown | | uncharacterized | | | 673 | 674 | 675 | 225 | 510 | 795 |
| | | | | | lignocellulose-induced | | | | | | | | |
| | | | | | protein | | | | | | | | |
| Scyth2p4_010779 | SCYTH_1_01186 | probable chitinase 3 | acidic mammalian | chitin- | chitinase | GH18 | CBM | 676 | 677 | 678 | 226 | 511 | 796 |
| | | | chitinase | degrading | | | 18 | | | | | | |
| Scyth2p4_010780 | | unknown | unknown | | unknown | | | 679 | 680 | 681 | 227 | 512 | 797 |
| Scyth2p4_010784 | | exo-beta-D- | exo-glucosaminidase GH2 | chitin- | exo-glucosaminidase | GH2 | | 682 | 683 | 684 | 228 | 513 | 798 |
| | | glucosaminidase | | degrading | | | | | | | | | |
| Scyth2p4_010822 | Scyth2p4_010822 | Probable pectate | pectate lyase PL3 | pectin- | pectate lyase | PL3 | | 685 | 686 | 687 | 229 | 514 | 799 |
| | | lyase D | | degrading | | | | | | | | | |
| Scyth2p4_010823 | | laminarinase | laminarinase GH55 | glucan- | laminarinase | GH55 | | 688 | 689 | 690 | 230 | 515 | 800 |
| | | | | degrading | | | | | | | | | |
| Scyth2p4_010825 | Scyth2p4_010825 | cellulase-GH5 | galactanase GH5 | hemicellulose- | galactanase | GH5 | | 691 | 692 | 693 | 231 | 516 | 801 |
| | | | | degrading | | | | | | | | | |
| Scyth2p4_010857 | Scyth2p4_010857 | endo-1,4-beta- | xylanase GH11 | hemicellulose- | xylanase | GH11 | | 694 | 695 | 696 | 232 | 517 | 802 |
| | | xylanase A | | degrading | | | | | | | | | |
| Scyth2p4_010865 | SCYTH_1_04962 | cellulase-enhancing | polysaccharide | cellulose- | polysaccharide | GH61 | | 697 | 698 | 699 | 233 | 518 | 803 |
| | | protein | monooxygenase | degrading | monooxygenase | | | | | | | | |
| Scyth2p4_010870 | | unknown | unknown | | unknown | | | 700 | 701 | 702 | 234 | 519 | 804 |
| Scyth2p4_010884 | Scyth2p4_010884 | unknown | unknown | | uncharacterized | | | 703 | 704 | 705 | 235 | 520 | 805 |
| | | | | | lignocellulose-induced | | | | | | | | |
| | | | | | protein | | | | | | | | |
| Scyth2p4_010894 | Scyth2p4_010894 | Acetylxylan esterase | acetylxylan esterase CE5 | hemicellulose- | acetylxylan esterase | CE5 | CBM | 706 | 707 | 708 | 236 | 521 | 806 |
| | | | | modifying | | | 1 | | | | | | |
| Scyth2p4_010898 | SCYTH_1_00286 | endo-1,4-beta- | xylanase GH10 | hemicellulose- | xylanase | GH10 | CBM | 709 | 710 | 711 | 237 | 522 | 807 |
| | | xylanase | | degrading | | | 1 | | | | | | |
| Scyth2p4_010899 | | aminopeptidase Y | aminopeptidase Y | protein | protease | | | 712 | 713 | 714 | 238 | 523 | 808 |
| | | | | hydrolysis | | | | | | | | | |
| | Scyth2p4_001141 | | Probable glycosidase crf1 | carbohydrate- | glycosidase | GH16 | | | | | 239 | 524 | 809 |
| | | | | modifying | | | | | | | | | |
| | Scyth2p4_001257 | | unknown | | uncharacterized | | | | | | 240 | 525 | 810 |
| | | | | | lignocellulose-induced | | | | | | | | |
| | | | | | protein | | | | | | | | |
| | Scyth2p4_001442 | | unknown | | uncharacterized | | | | | | 241 | 526 | 811 |
| | | | | | lignocellulose-induced | | | | | | | | |
| | | | | | protein | | | | | | | | |
| | Scyth2p4_001768 | | trehalase | starch- | trehalase | GH37 | | | | | 242 | 527 | 812 |
| | | | | degrading | | | | | | | | | |
| | Scyth2p4_002054 | | alpha-amylase GH13 | starch- | alpha-amylase | GH13 | | | | | 243 | 528 | 813 |
| | | | | degrading | | | | | | | | | |
| | Scyth2p4_003709 | | unknown | | uncharacterized | | | | | | 244 | 529 | 814 |
| | | | | | lignocellulose-induced | | | | | | | | |
| | | | | | protein | | | | | | | | |
| | Scyth2p4_003954 | | unknown | | uncharacterized | | CBM | | | | 245 | 530 | 815 |
| | | | | | lignocellulose-induced | | 1 | | | | | | |
| | | | | | protein | | | | | | | | |
| | Scyth2p4_004342 | | unknown | | uncharacterized | | | | | | 246 | 531 | 816 |
| | | | | | lignocellulose-induced | | | | | | | | |
| | | | | | protein | | | | | | | | |
| | Scyth2p4_004817 | | unknown | | uncharacterized | | | | | | 247 | 532 | 817 |
| | | | | | lignocellulose-induced | | | | | | | | |
| | | | | | protein | | | | | | | | |
| | Scyth2p4_005217 | | unknown | | uncharacterized | | | | | | 248 | 533 | 818 |
| | | | | | lignocellulose-induced | | | | | | | | |
| | | | | | protein | | | | | | | | |
| | Scyth2p4_007345 | | tyrosinase | pigment- | tyrosinase | | | | | | 249 | 534 | 819 |
| | | | | producing | | | | | | | | | |
| | Scyth2p4_007869 | | unknown | | uncharacterized | | | | | | 250 | 535 | 820 |
| | | | | | lignocellulose-induced | | | | | | | | |
| | | | | | protein | | | | | | | | |
| | Scyth2p4_009477 | | unknown | | uncharacterized | | | | | | 251 | 536 | 821 |
| | | | | | lignocellulose-induced | | | | | | | | |
| | | | | | protein | | | | | | | | |
| | Scyth2p4_009552 | | unknown | | uncharacterized | | | | | | 252 | 537 | 822 |
| | | | | | lignocellulose-induced | | | | | | | | |
| | | | | | protein | | | | | | | | |
| | Scyth2p4_009704 | | Uncharacterized | | uncharacterized | | | | | | 253 | 538 | 823 |
| | | | protein L662 | | lignocellulose-induced | | | | | | | | |
| | | | | | protein | | | | | | | | |
| | Scyth2p4_010302 | | unknown | | uncharacterized | | | | | | 254 | 539 | 824 |
| | | | | | lignocellulose-induced | | | | | | | | |
| | | | | | protein | | | | | | | | |
| | Scyth2p4_010820 | | unknown | | uncharacterized | | | | | | 255 | 540 | 825 |
| | | | | | lignocellulose-induced | | | | | | | | |
| | | | | | protein | | | | | | | | |
| | SCYTH_1_00385 | | Probable beta- | hemicellulose- | beta-mannosidase B | GH2 | | | | | 256 | 541 | 826 |
| | | | mannosidase B | degrading | | | | | | | | | |
| | SCYTH_1_00739 | | hexosaminidase GH20 | chitin- | hexosaminidase | GH20 | | | | | 257 | 542 | 827 |
| | | | | degrading | | | | | | | | | |
| [Scyth2p4_006265]⁶ | SCYTH_1_02579 | | beta-glucosidase GH3 | cellulose- | beta-glucosidase | GH3 | | | | | 258 | 543 | 828 |
| | | | | degrading | | | | | | | | | |
| | SCYTH_1_03688 | | arabinoxylan | hemicellulose- | arabinoxylan | GH62 | | | | | 259 | 544 | 829 |
| | | | arabinofuranohydrolase | degrading | arabinofurano- | | | | | | | | |
| | | | GH62 | | hydrolase | | | | | | | | |
| | SCYTH_1_09019 | | xylanase GH10 | hemicellulose- | xylanase⁷ | GH10 | | | | | 260 | 545 | 830 |
| | | | | degrading | | | | | | | | | |
| | SCYTH_2_05417 | | unknown | | uncharacterized | | | | | | 261 | 546 | 831 |
| | | | | | lignocellulose-induced | | | | | | | | |
| | | | | | protein | | | | | | | | |
| | SCYTH_2_07393 | | Acetylxylan esterase 1 | hemicellulose- | acetylxylan esterase 1 | CE1 | CBM | | | | 262 | 547 | 832 |
| | | | CE1 | modifying | | | 1 | | | | | | |
| | Scyth2p4_000071 | | Dipeptidyl peptidase 1 | protein | protease | | | | | | 263 | 548 | 833 |
| | | | (Fragment) | hydrolysis | | | | | | | | | |
| | Scyth2p4_000786 | | unknown | | unknown CE1 | CE1 | | | | | 264 | 549 | 834 |
| | Scyth2p4_000879 | | unknown | | unknown CE3 | CE3 | | | | | 265 | 550 | 835 |
| | Scyth2p4_001265 | | Putative sterigmatocystin | lignin- | peroxidase | | | | | | 266 | 551 | 836 |
| | | | biosynthesis peroxidase | degrading | | | | | | | | | |
| | | | stcC | | | | | | | | | | |
| | Scyth2p4_001349 | | Probable serine protease | protein | protease | | | | | | 267 | 552 | 837 |
| | | | EDA2 | hydrolysis | | | | | | | | | |
| | Scyth2p4_002059 | | Aspartic proteinase | protein | protease | | | | | | 268 | 553 | 838 |
| | | | yapsin-3 | hydrolysis | | | | | | | | | |
| | Scyth2p4_002062 | | Lipase 4 | lipid-modifying | lipase | CE10 | | | | | 269 | 554 | 839 |
| | Scyth2p4_002618 | | possible pyranose | sugar- | pyranose | | | | | | 270 | 555 | 840 |
| | | | dehydrogenase | modifying | dehydrogenase | | | | | | | | |
| | Scyth2p4_002885 | | possible adhesin | | adhesin | | | | | | 271 | 556 | 841 |
| | Scyth2p4_003845 | | unknown | | unknown CBM18 | | CBM | | | | 272 | 557 | 842 |
| | | | | | | | 18 | | | | | | |
| | Scyth2p4_003921 | | Dipeptidyl peptidase 4 | protein | protease | CE1 | | | | | 273 | 558 | 843 |
| | | | | hydrolysis | | | | | | | | | |
| | Scyth2p4_003974 | | Lipase 2 | lipid-modifying | lipase | CE10 | | | | | 274 | 559 | 844 |
| | Scyth2p4_003996 | | Minor extracellular | protein | protease | | | | | | 275 | 560 | 845 |
| | | | protease vpr | hydrolysis | | | | | | | | | |
| | Scyth2p4_004891 | | possible adhesin | | adhesin | | | | | | 276 | 561 | 846 |
| | Scyth2p4_005785 | | Probable isoaspartyl | protein | protease | | | | | | 277 | 562 | 847 |
| | | | peptidase/L-asparaginase | hydrolysis | | | | | | | | | |
| | | | 3 | | | | | | | | | | |
| | Scyth2p4_006840 | | Aspergillopepsin-2 | protein | protease | | | | | | 278 | 563 | 848 |
| | | | | hydrolysis | | | | | | | | | |
| | Scyth2p4_007340 | | Alcohol dehydrogenase | sugar- | pyranose | | | | | | 279 | 564 | 849 |
| | | | [acceptor] | modifiying | dehydrogenase | | | | | | | | |
| | Scyth2p4_007698 | | Uncharacterized FAD- | | oxidoreductase | | | | | | 280 | 565 | 850 |
| | | | linked oxidoreductase | | | | | | | | | | |
| | | | yvdP | | | | | | | | | | |
| | Scyth2p4_008300 | | Extracellular | protein | protease | | | | | | 281 | 566 | 851 |
| | | | metalloprotease | hydrolysis | | | | | | | | | |
| | | | Pa_2_14170 | | | | | | | | | | |
| | Scyth2p4_009549 | | Uncharacterized FAD- | | oxidoreductase | | | | | | 282 | 567 | 852 |
| | | | linked oxidoreductase | | | | | | | | | | |
| | | | yvdP | | | | | | | | | | |
| | Scyth2p4_010449 | | Probable aspartic-type | protein | protease | GH109 | | | | | 283 | 568 | 853 |
| | | | endopeptidase | hydrolysis | | | | | | | | | |
| | | | AFUA_3G01220 | | | | | | | | | | |
| | Scyth2p4_010575 | | Subtilisin-like protease | protein | protease | | | | | | 284 | 569 | 854 |
| | | | CPC735_066880 | hydrolysis | | | | | | | | | |
| | Scyth2p4_010881 | | Uncharacterized FAD- | | oxidoreductase | | | | | | 285 | 570 | 855 |
| | | | linked oxidoreductase | | | | | | | | | | |
| | | | yvdP | | | | | | | | | | |

¹For example, exoglucanase-6A
²Simiar to aromatic ring-cleavage diooxygenases, upregulated by organism upon growth on biomass
³For example, endo-1,4-beta-xylanase B
⁴For example, alpha-L-arabinofuranosidase axhA-2.
⁵For example, endo-1,4-beta-xylanase 1
⁶Square brackets (“[” and “]”) used in this column in Tables 1A-1C are meant to indicate the possibility that the Gene IDs may have been modified from the provisional application.
⁷For example, Endo-1,4-beta-xylanase

TABLE 1B
Biomass degrading genes and polypeptides of Myriococcum thermophilum

| | | | | | | | | Provisional | | | PCT | | |
|---|---|---|---|---|---|---|---|---|---|---|---|---|---|
| Gene ID in | | Annotation in | | | | | | application | | | application | | |
| Provisional | | Provisional | | | | | CBM | SEQ ID NO: | | | SEQ ID NO: | | |
| Application No. | | Application No. | | | | CAZy | of in- | Ge- | Cod- | Amino | Ge- | Cod- | Amino |
| 61/657,075 | Target ID | 61/657,075 | Updated annotation | Function | Protein activity | family | terest | nomic | ing | acid | nomic | ing | acid |
| Myrth2p4_000015 | Myrth2p4_000015 | Putative beta- | arabinoxylan | hemicellulose- | arabinofuranosidase | GH43 | | 1 | 2 | 3 | 856 | 1162 | 1468 |
| | | xylosidase | arabinofuranohydrolase | degrading | | | | | | | | | |
| | | | GH43 | | | | | | | | | | |
| Myrth2p4_000358 | MYRTH_2_03236 | cellulase- | polysaccharide | cellulose- | polysaccharide | GH61 | | 4 | 5 | 6 | 857 | 1163 | 1469 |
| | | enhancing protein | monooxygenase | degrading | monooxygenase | | | | | | | | |
| Myrth2p4_000359 | Myrth2p4_000359 | Cellobiose | Cellobiose | lignin- | cellobiose | | | 7 | 8 | 9 | 858 | 1164 | 1470 |
| | | dehydrogenase | dehydrogenase | degrading | dehydrogenase | | | | | | | | |
| Myrth2p4_000363 | | Podosporapepsin | Podosporapepsin | protein | protease | | | 10 | 11 | 12 | 859 | 1165 | 1471 |
| | | | | hydrolysis | | | | | | | | | |
| Myrth2p4_000376 | Myrth2p4_000376 | unknown | unknown | | uncharacterized | | | 13 | 14 | 15 | 860 | 1166 | 1472 |
| | | | | | lignocellulose- | | | | | | | | |
| | | | | | induced protein | | | | | | | | |
| Myrth2p4_000388 | MYRTH_2_00256 | cellobiohydrolase | cellobiohydrolase GH7 | cellulose- | cellobiohydrolase | GH7 | | 16 | 17 | 18 | 861 | 1167 | 1473 |
| | | | | degrading | | | | | | | | | |
| Myrth2p4_000417 | Myrth2p4_000417 | Acid phosphatase | Acid phosphatase | dephosphorylating | Acid phosphatase | | | 19 | 20 | 21 | 862 | 1168 | 1474 |
| Myrth2p4_000486 | | Aspergillopepsin-2 | Aspergillopepsin-2 | protein | protease | | | 22 | 23 | 24 | 863 | 1169 | 1475 |
| | | | | hydrolysis | | | | | | | | | |
| Myrth2p4_000495 | Myrth2p4_000495 | unknown | arabinoxylan | hemicellulose- | arabinofuranosidase | GH43 | | 25 | 26 | 27 | 864 | 1170 | 1476 |
| | | | arabinofuranohydrolase | degrading | | | | | | | | | |
| | | | GH43 | | | | | | | | | | |
| Myrth2p4_000510 | MYRTH_2_02564 | unknown | unknown | | uncharacterized | | | 28 | 29 | 30 | 865 | 1171 | 1477 |
| | | | | | lignocellulose- | | | | | | | | |
| | | | | | induced protein | | | | | | | | |
| Myrth2p4_000524 | | unknown | unknown | | unknown | | | 31 | 32 | 33 | 866 | 1172 | 1478 |
| Myrth2p4_000531 | Myrth2p4_000531 | Uncharacterized | chitin deacetylase CE4 | chitin- | chitin deacetylase | CE4 | | 34 | 35 | 36 | 867 | 1173 | 1479 |
| | | protein yjeA | | degrading | | | | | | | | | |
| Myrth2p4_000543 | | Probable aspartic- | Candidapepsin-8 | protein | protease | | | 37 | 38 | 39 | 868 | 1174 | 1480 |
| | | type endopeptidase | | hydrolysis | | | | | | | | | |
| | | opsB | | | | | | | | | | | |
| Myrth2p4_000545 | | unknown | unknown | | unknown | | | 40 | 41 | 42 | 869 | 1175 | 1481 |
| Myrth2p4_000589 | | unknown | carbohydrate esterase | hemicellulose- | unknown CE15 | CE15 | | 43 | 44 | 45 | 870 | 1176 | 1482 |
| | | | | modifying | | | | | | | | | |
| Myrth2p4_000694 | | Putative lipase | Putative lipase | lipid- | lipase | | | 46 | 47 | 48 | 871 | 1177 | 1483 |
| | | atg15 | atg15 | degrading | | | | | | | | | |
| Myrth2p4_000867 | | unknown | xylanase GH30 | hemicellulose- | xylanase | GH30 | | 49 | 50 | 51 | 872 | 1178 | 1484 |
| | | | | degrading | | | | | | | | | |
| Myrth2p4_000999 | Myrth2p4_000999 | unknown | unknown | | uncharacterized | | | 52 | 53 | 54 | 873 | 1179 | 1485 |
| | | | | | lignocellulose- | | | | | | | | |
| | | | | | induced protein | | | | | | | | |
| Myrth2p4_001083 | | Carboxypeptidase Y | Carboxypeptidase Y | protein | protease | | | 55 | 56 | 57 | 874 | 1180 | 1486 |
| | | | homolog A | hydrolysis | | | | | | | | | |
| Myrth2p4_001208 | | Probable aspartic- | Probable aspartic- | protein | protease | | | 58 | 59 | 60 | 875 | 1181 | 1487 |
| | | type endopeptidase | type endopeptidase | hydrolysis | | | | | | | | | |
| | | OPSB | OPSB | | | | | | | | | | |
| Myrth2p4_001304 | Myrth2p4_001304 | Cellobiose | Cellobiose | lignin- | cellobiose | | CBM | 61 | 62 | 63 | 876 | 1182 | 1488 |
| | | dehydrogenase | dehydrogenase | degrading | dehydrogenase | | 1 | | | | | | |
| Myrth2p4_001319 | | unknown | endo-beta-1,3- | hemicellulose- | endo-beta-1,3- | GH16 | | 64 | 65 | 66 | 877 | 1183 | 1489 |
| | | | galactanase GH16 | degrading | galactanase | | | | | | | | |
| Myrth2p4_001328 | Myrth2p4_001328 | unknown | unknown | | uncharacterized | | | 67 | 68 | 69 | 878 | 1184 | 1490 |
| | | | | | lignocellulose- | | | | | | | | |
| | | | | | induced protein | | | | | | | | |
| Myrth2p4_001333 | MYRTH_3_00119 | cellulase-enhancing | polysaccharide | cellulose- | polysaccharide | GH61 | | 70 | 71 | 72 | 879 | 1185 | 1491 |
| | | protein | monooxygenase | degrading | monooxygenase | | | | | | | | |
| Myrth2p4_001339 | Myrth2p4_001339 | beta-glucosidase | beta-glucosidase GH3 | cellulose- | beta-glucosidase | GH3 | | 73 | 74 | 75 | 880 | 1186 | 1492 |
| | | | | degrading | | | | | | | | | |
| Myrth2p4_001354 | Myrth2p4_001354 | endoglucanase | Probable xyloglucan- | hemicellulose- | xyloglucan-specific | GH12 | | 76 | 77 | 78 | 881 | 1187 | 1493 |
| | | | specificendo-beta-1,4- | degrading | endo-beta-1,4- | | | | | | | | |
| | | | glucanase A | | glucanase A | | | | | | | | |
| Myrth2p4_001362 | MYRTH_3_00118 | cellulase-enhancing | polysaccharide | cellulose- | polysaccharide | GH61 | | 79 | 80 | 81 | 882 | 1188 | 1494 |
| | | protein | monooxygenase | degrading | monooxygenase | | | | | | | | |
| Myrth2p4_001366 | Myrth2p4_001366 | unknown | unknown | | uncharacterized | | | 82 | 83 | 84 | 883 | 1189 | 1495 |
| | | | | | lignocellulose- | | | | | | | | |
| | | | | | induced protein | | | | | | | | |
| Myrth2p4_001368 | | exo-1,3-beta- | exo-1,3-beta- | cellulose- | exo-1,3-beta- | GH55 | | 85 | 86 | 87 | 884 | 1190 | 1496 |
| | | glucanase | glucanase GH55 | degrading | glucanase | | | | | | | | |
| Myrth2p4_001374 | MYRTH_3_00100 | cellulase-enhancing | polysaccharide | cellulose- | polysaccharide | GH61 | | 88 | 89 | 90 | 885 | 1191 | 1497 |
| | | protein | monooxygenase | degrading | monooxygenase | | | | | | | | |
| Myrth2p4_001375 | MYRTH_2_03396 | xylanase | xylanase GH10 | hemicellulose- | xylanase | GH10 | | 91 | 92 | 93 | 886 | 1192 | 1498 |
| | | | | degrading | | | | | | | | | |
| Myrth2p4_001378 | Myrth2p4_001378 | unknown | unknown | | uncharacterized | | | 94 | 95 | 96 | 887 | 1193 | 1499 |
| | | | | | lignocellulose- | | | | | | | | |
| | | | | | induced protein | | | | | | | | |
| Myrth2p4_001403 | MYRTH_2_02621 | Probable | Acetylxylan esterase 1 | Hemicellulose- | acetylxylan esterase | CE1 | | 97 | 98 | 99 | 888 | 1194 | 1500 |
| | | acetylxylan esterase | CE1 | modifying | | | | | | | | | |
| | | A | | | | | | | | | | | |
| Myrth2p4_001451 | Myrth2p4_001451 | xylanase | xylanase GH11 | hemicellulose- | xylanase | GH11 | | 100 | 101 | 102 | 889 | 1195 | 1501 |
| | | | | degrading | | | | | | | | | |
| Myrth2p4_001463 | MYRTH_1_00071 | chitinase | Chitinase GH18 | chitin- | chitinase | GH18 | | 103 | 104 | 105 | 890 | 1196 | 1502 |
| | | | | degrading | | | | | | | | | |
| Myrth2p4_001467 | | unknown | exo-1,3-beta- | hemicellulose- | exo-1,3-beta- | GH43 | CBM | 106 | 107 | 108 | 891 | 1197 | 1503 |
| | | | galactanase GH43 | degrading | galactanase | | 35 | | | | | | |
| Myrth2p4_001469 | | Tripeptidyl- | Tripeptidyl- | peptide | protease | | | 109 | 110 | 111 | 892 | 1198 | 1504 |
| | | peptidase sed2 | peptidase sed3 | hydrolysis | | | | | | | | | |
| Myrth2p4_001494 | Myrth2p4_001494 | Probable beta- | beta-glucosidase GH3 | cellulose- | beta-glucosidase | GH3 | | 112 | 113 | 114 | 893 | 1199 | 1505 |
| | | glucosidase L | | degrading | | | | | | | | | |
| Myrth2p4_001496 | Myrth2p4_001496 | Probable exo-1,4- | beta-xylosidase GH3 | hemicellulose- | beta-xylosidase⁸ | GH3 | | 115 | 116 | 117 | 894 | 1200 | 1506 |
| | | beta-xylosidase | | degrading | | | | | | | | | |
| | | bxlB | | | | | | | | | | | |
| Myrth2p4_001537 | Myrth2p4_001537 | Acetylxylan | Acetylxylan | hemicellulose- | acetylxylan | CE5 | | 118 | 119 | 120 | 895 | 1201 | 1507 |
| | | esterase 2 | esterase 2 CE5 | modifying | esterase | | | | | | | | |
| Myrth2p4_001550 | Myrth2p4_001550 | unknown | unknown | | uncharacterized | | | 121 | 122 | 123 | 896 | 1202 | 1508 |
| | | | | | lignocellulose- | | | | | | | | |
| | | | | | induced protein | | | | | | | | |
| Myrth2p4_001581 | MYRTH_2_03760 | cellulase- | polysaccharide | cellulose- | polysaccharide | GH61 | | 124 | 125 | 126 | 897 | 1203 | 1509 |
| | | enhancing protein | monooxygenase | degrading | monooxygenase | | | | | | | | |
| Myrth2p4_001582 | MYRTH_1_00083 | Beta-galactosidase | Beta-galactosidase | hemicellulose- | Beta-galactosidase | GH2 | | 127 | 128 | 129 | 898 | 1204 | 1510 |
| | | | | degrading | | | | | | | | | |
| Myrth2p4_001589 | | Putative serine | Probable serine | protein | protease | | | 130 | 131 | 132 | 899 | 1205 | 1511 |
| | | protease F56F10.1 | protease EDA2 | hydrolysis | | | | | | | | | |
| Myrth2p4_001667 | | unknown | unknown | | unknown CE4 | CE4 | | 133 | 134 | 135 | 900 | 1206 | 1512 |
| Myrth2p4_001718 | Myrth2p4_001718 | unknown | unknown | | unknown CE15 | CE15 | | 136 | 137 | 138 | 901 | 1207 | 1513 |
| Myrth2p4_001719 | MYRTH_2_02768 | arabinogalactanase | arabinogalactanase | hemicellulose- | arabinogalactanase | GH53 | | 139 | 140 | 141 | 902 | 1208 | 1514 |
| | | | GH53 | degrading | | | | | | | | | |
| Myrth2p4_001916 | Myrth2p4_001916 | Probable beta- | Probable beta- | cellulose- | beta-glucosidase | GH17 | | 142 | 143 | 144 | 903 | 1209 | 1515 |
| | | glucosidase btgE | glucosidase btgE | degrading | | | | | | | | | |
| Myrth2p4_001926 | | Probable endo-1,3(4)- | mixed-link glucanase | glucan- | mixed-link | GH16 | | 145 | 146 | 147 | 904 | 1210 | 1516 |
| | | beta-glucanase | GH16 | degrading | glucanase | | | | | | | | |
| | | NFIA_089530 | | | | | | | | | | | |
| Myrth2p4_001996 | Myrth2p4_001996 | endoglucanase | endoglucanase GH45 | cellulose- | endoglucanase | GH45 | | 148 | 149 | 150 | 905 | 1211 | 1517 |
| | | | | degrading | | | | | | | | | |
| Myrth2p4_002010 | | Lysophospholipase | Lysophospholipase | lipid- | lipase | | | 151 | 152 | 153 | 906 | 1212 | 1518 |
| | | | | modifying | | | | | | | | | |
| Myrth2p4_002134 | | Putative | Aspartic protease pep1 | protein | protease | | | 154 | 155 | 156 | 907 | 1213 | 1519 |
| | | aspergillopepsin A- | | hydrolysis | | | | | | | | | |
| | | like aspartic | | | | | | | | | | | |
| | | endopeptidase | | | | | | | | | | | |
| | | AFUA_2G15950 | | | | | | | | | | | |
| Myrth2p4_002293 | Myrth2p4_002293 | endoglucanase | Endoglucanase GH5 | cellulose- | Endoglucanase | GH5 | CBM | 157 | 158 | 159 | 908 | 1214 | 1520 |
| | | | | degrading | | | 1 | | | | | | |
| Myrth2p4_002328 | | Aspergillopepsin-2 | Aspergillopepsin-2 | protein | protease | | | 160 | 161 | 162 | 909 | 1215 | 1521 |
| | | | | hydrolysis | | | | | | | | | |
| Myrth2p4_002394 | MYRTH_2_04289 | Mannanendo-1,4- | Beta-mannanase GH26 | hemicellulose- | Beta-mannanase | GH26 | CBM | 163 | 164 | 165 | 910 | 1216 | 1522 |
| | | beta-mannosidase | | degrading | | | 35 | | | | | | |
| Myrth2p4_002434 | MYRTH_1_00022 | alpha-glucosidase | alpha-glucosidase GH31 | starch- | alpha-glucosidase | GH31 | | 166 | 167 | 168 | 911 | 1217 | 1523 |
| | | | | degrading | | | | | | | | | |
| Myrth2p4_002456 | | Carbohydrate- | unknown | | Carbohydrate- | | | 169 | 170 | 171 | 912 | 1218 | 1524 |
| | | binding cytochrome | | | binding cytochrome | | | | | | | | |
| | | b562 | | | | | | | | | | | |
| Myrth2p4_002548 | | unknown | unknown | | unknown | | | 172 | 173 | 174 | 913 | 1219 | 1525 |
| Myrth2p4_002549 | Myrth2p4_002549 | cellobiohydrolase | cellobiohydrolase GH7 | cellulose- | cellobiohydrolase | GH7 | | 175 | 176 | 177 | 914 | 1220 | 1526 |
| | | | | degrading | | | | | | | | | |
| Myrth2p4_002563 | | Hybrid signal | Hybrid signal | | kinase | | | 178 | 179 | 180 | 915 | 1221 | 1527 |
| | | transduction | transduction | | | | | | | | | | |
| | | histidine kinase J | histidine kinase J | | | | | | | | | | |
| Myrth2p4_002601 | Myrth2p4_002601 | Probable feruloyl | Probable feruloyl | hemicellulose- | feruloyl esterase | | | 181 | 182 | 183 | 916 | 1222 | 1528 |
| | | esterase A | esterase A | degrading | | | | | | | | | |
| Myrth2p4_002632 | | unknown | Protoporphyrinogen | | oxidoreductase | | | 184 | 185 | 186 | 917 | 1223 | 1529 |
| | | | oxidase | | | | | | | | | | |
| Myrth2p4_002634 | MYRTH_2_04579 | hexosaminidase | Hexosaminidase GH20 | chitin- | Hexosaminidase | GH20 | | 187 | 188 | 189 | 918 | 1224 | 1530 |
| | | | | degrading | | | | | | | | | |
| Myrth2p4_002638 | Myrth2p4_002638 | Probable | Probable glycosidase | carbohydrate- | glycosidase | GH16 | | 190 | 191 | 192 | 919 | 1225 | 1531 |
| | | glycosidase CRH1 | crf1 | modifying | | | | | | | | | |
| Myrth2p4_002915 | | Uncharacterized | Uncharacterized | | oxidoreductase | | | 193 | 194 | 195 | 920 | 1226 | 1532 |
| | | oxidoreductase | oxidoreductase yusZ | | | | | | | | | | |
| | | C977.08/C1348.09 | | | | | | | | | | | |
| Myrth2p4_002916 | | Uncharacterized | Uncharacterized | | oxidoreductase | | | 196 | 197 | 198 | 921 | 1227 | 1533 |
| | | oxidoreductase dltE | oxidoreductase dltE | | | | | | | | | | |
| Myrth2p4_002917 | | Glutaminyl-peptide | Glutaminyl-peptide | peptide- | Glutaminyl-peptide | | | 199 | 200 | 201 | 922 | 1228 | 1534 |
| | | cyclotransferase | cyclotransferase-like | modifying | cyclotransferase- | | | | | | | | |
| | | | protein | | like protein | | | | | | | | |
| Myrth2p4_002930 | Myrth2p4_002930 | beta-glucuronidase | beta-glucuronidase | hemicellulose- | beta-glucuronidase | GH79 | | 202 | 203 | 204 | 923 | 1229 | 1535 |
| | | | GH79 | degrading | | | | | | | | | |
| Myrth2p4_003005 | Myrth2p4_003005 | Non-Catalytic | unknown | | expansin | | | 205 | 206 | 207 | 924 | 1230 | 1536 |
| | | module family | | | | | | | | | | | |
| | | expansin | | | | | | | | | | | |
| Myrth2p4_003034 | Myrth2p4_003034 | unknown | Uncharacterized protein | | Uncharacterized | | | 208 | 209 | 210 | 925 | 1231 | 1537 |
| | | | YkgB | | lignocellulose- | | | | | | | | |
| | | | | | induced protein | | | | | | | | |
| Myrth2p4_003051 | Myrth2p4_003051 | unknown | unknown | | uncharacterized | | | 211 | 212 | 213 | 926 | 1232 | 1538 |
| | | | | | lignocellulose- | | | | | | | | |
| | | | | | induced protein | | | | | | | | |
| Myrth2p4_003065 | Myrth2p4_003065 | unknown | unknown | | uncharacterized | | | 214 | 215 | 216 | 927 | 1233 | 1539 |
| | | | | | lignocellulose- | | | | | | | | |
| | | | | | induced protein | | | | | | | | |
| Myrth2p4_003070 | Myrth2p4_003070 | exo-1,3-beta- | exo-1,3-beta- | cellulose- | exo-1,3-beta- | GH55 | | 217 | 218 | 219 | 928 | 1234 | 1540 |
| | | glucanase | glucanase GH55 | degrading | glucanase | | | | | | | | |
| Myrth2p4_003103 | MYRTH_3_00121 | cellulase-enhancing | polysaccharide | cellulose- | polysaccharide | GH61 | | 220 | 221 | 222 | 929 | 1235 | 1541 |
| | | protein | monooxygenase | degrading | monooxygenase | | | | | | | | |
| Myrth2p4_003203 | Myrth2p4_003203 | endoglucanase | cellobiohydrolase GH7 | cellulose- | cellobiohydrolase | GH7 | CBM | 223 | 224 | 225 | 930 | 1236 | 1542 |
| | | | | degrading | | | 1 | | | | | | |
| Myrth2p4_003274 | Myrth2p4_003274 | Probable rhamno- | Probable rhamno- | pectin- | rhamno- | | | 226 | 227 | 228 | 931 | 1237 | 1543 |
| | | galacturonate | galacturonate | degrading | galacturonase | | | | | | | | |
| | | lyase C | lyase C | | | | | | | | | | |
| Myrth2p4_003333 | | unknown | exo-1,3-beta- | hemicellulose- | exo-1,3-beta- | GH43 | | 229 | 230 | 231 | 932 | 1238 | 1544 |
| | | | galactanase GH43 | degrading | galactanase | | | | | | | | |
| Myrth2p4_003368 | MYRTH_1_00068 | xylanase | Xylanase GH11 | hemicellulose- | Xylanase | GH11 | | 232 | 233 | 234 | 933 | 1239 | 1545 |
| | | | | degrading | | | | | | | | | |
| Myrth2p4_003495 | Myrth2p4_003495 | unknown | Uncharacterized protein | | uncharacterized | | | 235 | 236 | 237 | 934 | 1240 | 1546 |
| | | | SAOUHSC_02143 | | lignocellulose- | | | | | | | | |
| | | | | | induced protein | | | | | | | | |
| Myrth2p4_003633 | MYRTH_2_01655 | cellulase-enhancing | polysaccharide | cellulose- | polysaccharide | GH61 | | 238 | 239 | 240 | 935 | 1241 | 1547 |
| | | protein | monooxygenase | degrading | monooxygenase | | | | | | | | |
| Myrth2p4_003679 | | Lipase 1 | Lipase 1 | lipid- | lipase | | | 241 | 242 | 243 | 936 | 1242 | 1548 |
| | | | | degrading | | | | | | | | | |
| Myrth2p4_003685 | Myrth2p4_003685 | unknown | xylanase GH30 | hemicellulose- | xylanase | GH30 | | 244 | 245 | 246 | 937 | 1243 | 1549 |
| | | | | degrading | | | | | | | | | |
| Myrth2p4_003686 | | N-acyl- | N-acyl- | phospholipid- | lipase | | | 247 | 248 | 249 | 938 | 1244 | 1550 |
| | | phosphatidylethanol- | phosphatidylethanol- | modifying | | | | | | | | | |
| | | amine-hydrolyzing | amine-hydrolyzing | | | | | | | | | | |
| | | phospholipase D | phospholipase D | | | | | | | | | | |
| Myrth2p4_003747 | | unknown | unknown | | unknown | | | 250 | 251 | 252 | 939 | 1245 | 1551 |
| Myrth2p4_003793 | | Probable leucine | Leucine aminopeptidase | protein | protease | | | 253 | 254 | 255 | 940 | 1246 | 1552 |
| | | aminopeptidase 1 | 1 | hydrolysis | | | | | | | | | |
| Myrth2p4_003921 | | unknown | unknown | | unknown CBM18 | | CBM | 256 | 257 | 258 | 941 | 1247 | 1553 |
| | | | | | | | 18 | | | | | | |
| Myrth2p4_003927 | MYRTH_3_00104 | cellulase-enhancing | polysaccharide | cellulose- | polysaccharide | GH61 | | 259 | 260 | 261 | 942 | 1248 | 1554 |
| | | protein | monooxygenase | degrading | monooxygenase | | | | | | | | |
| Myrth2p4_003941 | MYRTH_1_00024 | unknown | Beta-glucanase | glucan- | Beta-glucanase | GH16 | | 262 | 263 | 264 | 943 | 1249 | 1555 |
| | | | | degrading | | | | | | | | | |
| Myrth2p4_003942 | Myrth2p4_003942 | Pectinesterase A | pectin methylesterase | pectin- | pectinesterase | CE8 | | 265 | 266 | 267 | 944 | 1250 | 1556 |
| | | | CE8 | degrading | | | | | | | | | |
| Myrth2p4_003966 | | unknown | unknown | | unknown CBM18 | | CBM | 268 | 269 | 270 | 945 | 1251 | 1557 |
| | | | | | | | 18 | | | | | | |
| Myrth2p4_004088 | | Lipase | Lipase | lipid- | lipase | | | 271 | 272 | 273 | 946 | 1252 | 1558 |
| | | | | degrading | | | | | | | | | |
| Myrth2p4_004089 | Myrth2p4_004089 | beta-glucosidase | beta-glucosidase GH3 | cellulose- | beta-glucosidase | GH3 | | 274 | 275 | 276 | 947 | 1253 | 1559 |
| | | | | degrading | | | | | | | | | |
| Myrth2p4_004201 | | Putative | Putative | protein | protease | | | 277 | 278 | 279 | 948 | 1254 | 1560 |
| | | metallocarboxypeptidase | metallocarboxypeptidase | hydrolysis | | | | | | | | | |
| | | MCYG_04493 | ecm14 | | | | | | | | | | |
| Myrth2p4_004260 | MYRTH_2_04381 | cellulase-enhancing | polysaccharide | cellulose- | polysaccharide | GH61 | CBM | 280 | 281 | 282 | 949 | 1255 | 1561 |
| | | protein | monooxygenase | degrading | monooxygenase | | 1 | | | | | | |
| Myrth2p4_004335 | MYRTH_2_03391 | cellulase- | polysaccharide | cellulose- | polysaccharide | GH61 | | 283 | 284 | 285 | 950 | 1256 | 1562 |
| | | enhancing protein | monooxygenase | degrading | monooxygenase | | | | | | | | |
| Myrth2p4_004336 | Myrth2p4_004336 | endoglucanase | endoglucanase GH5 | cellulose- | endoglucanase | GH5 | | 286 | 287 | 288 | 951 | 1257 | 1563 |
| | | | | degrading | | | | | | | | | |
| Myrth2p4_004345 | | tripeptidyl-peptidase | tripeptidyl-peptidase | peptide | protease | | | 289 | 290 | 291 | 952 | 1258 | 1564 |
| | | sed2 | sed2 | hydrolysis | | | | | | | | | |
| Myrth2p4_004391 | MYRTH_201413 | cellulase- | polysaccharide | cellulose- | polysaccharide | GH61 | CBM | 292 | 293 | 294 | 953 | 1259 | 1565 |
| | | enhancing protein | monooxygenase | degrading | monooxygenase | | 1 | | | | | | |
| Myrth2p4_004393 | Myrth2p4_004393 | unknown | uncharacterized protein | | uncharacterized | | | 295 | 296 | 297 | 954 | 1260 | 1566 |
| | | | R656 | | lignocellulose- | | | | | | | | |
| | | | | | induced protein | | | | | | | | |
| Myrth2p4_004397 | MYRTH_300116 | cellulase-enhancing | polysaccharide | cellulose- | polysaccharide | GH61 | | 298 | 299 | 300 | 955 | 1261 | 1567 |
| | | protein | monooxygenase | degrading | monooxygenase | | | | | | | | |
| Myrth2p4_004415 | MYRTH_100074 | chitinase | Killer toxin subunits | chitin- | chitinase | GH18 | CBM | 301 | 302 | 303 | 956 | 1262 | 1568 |
| | | | alpha/beta | degrading | | | 18 | | | | | | |
| Myrth2p4_004442 | | Metallocarboxy- | Metallocarboxy- | protein | protease | | | 304 | 305 | 306 | 957 | 1263 | 1569 |
| | | peptidase A-like | peptidase A-like | hydrolysis | | | | | | | | | |
| | | protein | protein | | | | | | | | | | |
| | | MCYG_01475 | MCYG_01475 | | | | | | | | | | |
| Myrth2p4_004455 | | galactanase | galactanase GH5 | hemicellulose- | galactanase | GH30 | | 307 | 308 | 309 | 958 | 1264 | 1570 |
| | | | | degrading | | | | | | | | | |
| Myrth2p4_004476 | Myrth2p4_004476 | unknown | unknown | | uncharacterized | | | 310 | 311 | 312 | 959 | 1265 | 1571 |
| | | | | | lignocellulose- | | | | | | | | |
| | | | | | induced protein | | | | | | | | |
| Myrth2p4_004487 | MYRTH_406966 | cellulase-enhancing | polysaccharide | cellulose- | polysaccharide | GH61 | | 313 | 314 | 315 | 960 | 1266 | 1572 |
| | | protein | monooxygenase | degrading | monooxygenase | | | | | | | | |
| Myrth2p4_004497 | Myrth2p4_004497 | Probable beta- | Beta-galactosidase | hemicellulose- | Beta-galactosidase | GH35 | | 316 | 317 | 318 | 961 | 1267 | 1573 |
| | | galactosidase B | GH35 | degrading | | | | | | | | | |
| Myrth2p4_004508 | MYRTH_200518 | cellulase-enhancing | polysaccharide | cellulose- | polysaccharide | GH61 | | 319 | 320 | 321 | 962 | 1268 | 1574 |
| | | protein | monooxygenase | degrading | monooxygenase | | | | | | | | |
| Myrth2p4_004535 | Myrth2p4_004535 | Xylosidase/arabinosidase | Xylosidase/arabinosidase | Hemicellulose- | Xylosidase/arabinosidase | GH43 | | 322 | 323 | 324 | 963 | 1269 | 1575 |
| | | | | modifying | | | | | | | | | |
| Myrth2p4_004704 | Myrth2p4_004704 | Putative galacturan | exo- | pectin- | rhamno- | GH28 | | 325 | 326 | 327 | 964 | 1270 | 1576 |
| | | 1,4-alpha- | rhamnogalacturonase | degrading | galacturonase | | | | | | | | |
| | | galacturonidase B | GH28 | | | | | | | | | | |
| Myrth2p4_004725 | | Carboxypeptidase | Carboxypeptidase | protein | protease | | | 328 | 329 | 330 | 965 | 1271 | 1577 |
| | | cpdS | cpdS | hydrolysis | | | | | | | | | |
| Myrth2p4_004787 | | beta-glucosidase | beta-glucosidase GH3 | cellulose- | beta-glucosidase | GH3 | | 331 | 332 | 333 | 966 | 1272 | 1578 |
| | | | | degrading | | | | | | | | | |
| Myrth2p4_004788 | MYRTH_1_00011 | Endo-1,4-beta- | xylanase GH10 | hemicellulose- | xylanase | GH10 | | 334 | 335 | 336 | 967 | 1273 | 1579 |
| | | xylanase | | degrading | | | | | | | | | |
| Myrth2p4_004953 | Myrth2p4_004953 | unknown | unknown | | uncharacterized | | | 337 | 338 | 339 | 968 | 1274 | 1580 |
| | | | | | lignocellulose- | | | | | | | | |
| | | | | | induced protein | | | | | | | | |
| Myrth2p4_004960 | Myrth2p4_004960 | unknown | unknown | | uncharacterized | | | 340 | 341 | 342 | 969 | 1275 | 1581 |
| | | | | | lignocellulose- | | | | | | | | |
| | | | | | induced protein | | | | | | | | |
| Myrth2p4_004965 | Myrth2p4_004965 | Probable feruloyl | feruloyl esterase CE1 | hemicellulose- | feruloyl esterase | CE1 | | 343 | 344 | 345 | 970 | 1276 | 1582 |
| | | esterase C | | modifying | | | | | | | | | |
| Myrth2p4_004966 | Myrth2p4_004966 | Feruloyl esterase B | feruloyl esterase CE1 | Hemicellulose- | feruloyl esterase | CE1 | | 346 | 347 | 348 | 971 | 1277 | 1583 |
| | | | | modifyin | | | | | | | | | |
| Myrth2p4_004986 | MYRTH_2_01976 | xylanase | xylanase GH11 | hemicellulose- | xylanase | GH11 | CBM | 349 | 350 | 351 | 972 | 1278 | 1584 |
| | | | | degrading | | | 1 | | | | | | |
| Myrth2p4_004993 | | Cuticle-degrading | Cuticle-degrading | protein | protease | | | 352 | 353 | 354 | 973 | 1279 | 1585 |
| | | protease | protease | hydrolysis | | | | | | | | | |
| Myrth2p4_005017 | MYRTH_3_00097 | endoglucanase | endoglucanase GH6 | cellulose- | endoglucanase | GH6 | | 355 | 356 | 357 | 974 | 1280 | 1586 |
| | | | | degrading | | | | | | | | | |
| Myrth2p4_005025 | | Glucan 1,3-beta- | Glucan 1,3-beta- | cellulose- | Glucan 1,3-beta- | GH55 | | 358 | 359 | 360 | 975 | 1281 | 1587 |
| | | glucosidase | glucosidase | degrading | glucosidase | | | | | | | | |
| Myrth2p4_005037 | Myrth2p4_005037 | Carbohydrate- | Cellobiose | cellulose- | Carbohydrate- | | | 361 | 362 | 363 | 976 | 1282 | 1588 |
| | | binding cytochrome | dehydrogenase | degrading | binding cytochrome | | | | | | | | |
| | | b562 (Fragment) | | | | | | | | | | | |
| Myrth2p4_005039 | | unknown | unknown | | unknown CE15 | CE15 | | 364 | 365 | 366 | 977 | 1283 | 1589 |
| Myrth2p4_005084 | MYRTH_1_00077 | xylanase | xylanase GH11 | hemicellulose- | xylanase | GH11 | | 367 | 368 | 369 | 978 | 1284 | 1590 |
| | | | | degrading | | | | | | | | | |
| Myrth2p4_005133 | Myrth2p4_005133 | unknown | unknown | | uncharacterized | | | 370 | 371 | 372 | 979 | 1285 | 1591 |
| | | | | | lignocellulose- | | | | | | | | |
| | | | | | induced protein | | | | | | | | |
| Myrth2p4_005148 | MYRTH_2_01934 | unknown | carbohydrate esterase | hemicellulose- | unknown CE16 | CE16 | | 373 | 374 | 375 | 980 | 1286 | 1592 |
| | | | | modifying | | | | | | | | | |
| Myrth2p4_005149 | Myrth2p4_005149 | Acetylxylan | acetylxylan esterase CE1 | hemicellulose- | acetylxylan esterase | CE1 | | 376 | 377 | 378 | 981 | 1287 | 1593 |
| | | esterase A | | modifying | | | | | | | | | |
| Myrth2p4_005155 | Myrth2p4_005155 | Aldose 1-epimerase | Aldose 1-epimerase | | Aldose epimerase | | | 379 | 380 | 381 | 982 | 1288 | 1594 |
| Myrth2p4_005177 | Myrth2p4_005177 | unknown | unknown | | uncharacterized | | | 382 | 383 | 384 | 983 | 1289 | 1595 |
| | | | | | lignocellulose- | | | | | | | | |
| | | | | | induced protein | | | | | | | | |
| Myrth2p4_005191 | Myrth2p4_005191 | Pectate lyase A | pectate lyase PL1 | pectin- | pectate lyase | PL1 | | 385 | 386 | 387 | 984 | 1290 | 1596 |
| | | | | degrading | | | | | | | | | |
| Myrth2p4_005222 | MYRTH_2_03793 | alpha-glucuronidase | alpha-glucuronidase | hemicellulose- | alpha-glucuronidase | GH67 | | 388 | 389 | 390 | 985 | 1291 | 1597 |
| | | | GH67 | modifyinging | | | | | | | | | |
| Myrth2p4_005269 | Myrth2p4_005269 | unknown | unknown | | uncharacterized | | | 391 | 392 | 393 | 986 | 1292 | 1598 |
| | | | | | lignocellulose- | | | | | | | | |
| | | | | | induced protein | | | | | | | | |
| Myrth2p4_005317 | Myrth2p4_005317 | unknown | xylan alpha-1,2- | hemicellulose- | xylan alpha-1,2- | GH11 | | 394 | 395 | 396 | 987 | 1293 | 1599 |
| | | | glucuronidase GH115 | modifying | glucuronidase | 5 | | | | | | | |
| | | | | | GH115 | | | | | | | | |
| Myrth2p4_005320 | MYRTH_2_00848 | arabinoxylan | arabinoxylan | hemicellulose- | arabinofuranosidase | GH62 | | 397 | 398 | 399 | 988 | 1294 | 1600 |
| | | arabinofuranohydrolase | arabinofuranosidase | degrading | | | | | | | | | |
| | | | GH62 | | | | | | | | | | |
| Myrth2p4_005321 | | Adhesin protein, | Major allergen Asp f 2 | | adhesin | | | 400 | 401 | 402 | 989 | 1295 | 1601 |
| | | putative | | | | | | | | | | | |
| Myrth2p4_005328 | Myrth2p4_005328 | unknown | carbohydrate esterase | hemicellulose- | unknown CE15 | CE15 | | 403 | 404 | 405 | 990 | 1296 | 1602 |
| | | | | modfiying | | | | | | | | | |
| Myrth2p4_005329 | Myrth2p4_005329 | cellulase-enhancing | polysaccharide | cellulose- | polysaccharide | GH61 | | 406 | 407 | 408 | 991 | 1297 | 1603 |
| | | protein | monooxygenase | degrading | monooxygenase | | | | | | | | |
| Myrth2p4_005340 | Myrth2p4_005340 | exo- | exo- | pectin- | exo- | GH28 | | 409 | 410 | 411 | 992 | 1298 | 1604 |
| | | polygalacturonase | polygalacturonase GH28 | degrading | polygalacturonase | | | | | | | | |
| Myrth2p4_005343 | MYRTH_2_04093 | cellulase-enhancing | polysaccharide | cellulose- | polysaccharide | GH61 | | 412 | 413 | 414 | 993 | 1299 | 1605 |
| | | protein | monooxygenase | degrading | monooxygenase | | | | | | | | |
| Myrth2p4_005368 | Myrth2p4_005368 | Carbohydrate- | unknown | | Carbohydrate- | | | 415 | 416 | 417 | 994 | 1300 | 1606 |
| | | binding cytochrome | | | binding cytochrome | | | | | | | | |
| | | b562 | | | | | | | | | | | |
| Myrth2p4_005452 | Myrth2p4_005452 | beta-glucosidase | Beta-glucosidase GH3 | cellulose- | Beta-glucosidase | GH3 | | 418 | 419 | 420 | 995 | 1301 | 1607 |
| | | | | degrading | | | | | | | | | |
| Myrth2p4_005454 | MYRTH_3_00103 | cellulase-enhancing | polysaccharide | cellulose- | polysaccharide | GH61 | | 421 | 422 | 423 | 996 | 1302 | 1608 |
| | | protein | monooxygenase | degrading | monooxygenase | | | | | | | | |
| Myrth2p4_005463 | | Carboxypeptidase | Carboxypeptidase | protein | protease | | | 424 | 425 | 426 | 997 | 1303 | 1609 |
| | | S1 homolog A | S1 homolog B | hydrolysis | | | | | | | | | |
| Myrth2p4_005484 | | Vacuolar protease A | Vacuolar protease A | protein | protease | | | 427 | 428 | 429 | 998 | 1304 | 1610 |
| | | | | hydrolysis | | | | | | | | | |
| Myrth2p4_005539 | Myrth2p4_005539 | Laccase-2 | Laccase-2 | lignin- | laccase | | | 430 | 431 | 432 | 999 | 1305 | 1611 |
| | | | | degrading | | | | | | | | | |
| Myrth2p4_005561 | Myrth2p4_005561 | Probable feruloyl | Probable feruloyl | hemicellulose- | feruloyl esterase | | | 433 | 434 | 435 | 1000 | 1306 | 1612 |
| | | esterase B-1 | esterase B-2 | modifying | | | | | | | | | |
| Myrth2p4_005590 | | Peptidase M20 | Peptidase M20 domain- | protein | protease | | | 436 | 437 | 438 | 1001 | 1307 | 1613 |
| | | domain-containing | containing protein | hydrolysis | | | | | | | | | |
| | | protein C757.05c | SMAC_03666.2 | | | | | | | | | | |
| Myrth2p4_005626 | | Oryzin (protease) | Subtilisin-like protease 6 | protein | protease | | | 439 | 440 | 441 | 1002 | 1308 | 1614 |
| | | | | hydrolysis | | | | | | | | | |
| Myrth2p4_005639 | | chitinase | chitinase GH18 | chitin- | chitinase | GH18 | | 442 | 443 | 444 | 1003 | 1309 | 1615 |
| | | | | degrading | | | | | | | | | |
| Myrth2p4_005750 | MYRTH_2_03494 | cellulase-enhancing | polysaccharide | cellulose- | polysaccharide | GH61 | | 445 | 446 | 447 | 1004 | 1310 | 1616 |
| | | protein | monooxygenase | degrading | monooxygenase | | | | | | | | |
| Myrth2p4_005752 | MYRTH_2_01610 | unknown | unknown | | uncharacterized | | CBM | 448 | 449 | 450 | 1005 | 1311 | 1617 |
| | | | | | lignocellulose- | | 1 | | | | | | |
| | | | | | induced protein | | | | | | | | |
| Myrth2p4_005753 | Myrth2p4_005753 | unknown | unknown | | uncharacterized | | | 451 | 452 | 453 | 1006 | 1312 | 1618 |
| | | | | | lignocellulose- | | | | | | | | |
| | | | | | induced protein | | | | | | | | |
| Myrth2p4_005819 | | laminarinase | Laminarinase GH55 | Glucan- | Laminarinase | GH55 | | 454 | 455 | 456 | 1007 | 1313 | 1619 |
| | | | | degrading | | | | | | | | | |
| Myrth2p4_005822 | Myrth2p4_005822 | unknown | unknown | | uncharacterized | | | 457 | 458 | 459 | 1008 | 1314 | 1620 |
| | | | | | lignocellulose- | | | | | | | | |
| | | | | | induced protein | | | | | | | | |
| Myrth2p4_005854 | MYRTH_1_00070 | Probable endo-1,4- | Xylanase GH11 | hemicellulose- | Xylanase | GH11 | | 460 | 461 | 462 | 1009 | 1315 | 1621 |
| | | beta-xylanase A | | degrading | | | | | | | | | |
| Myrth2p4_005856 | MYRTH_1_00073 | unknown | Beta-glucanase | glucan- | Beta-glucanase | GH16 | | 463 | 464 | 465 | 1010 | 1316 | 1622 |
| | | | | degrading | | | | | | | | | |
| Myrth2p4_005886 | Myrth2p4_005886 | unknown | unknown | | uncharacterized | | | 466 | 467 | 468 | 1011 | 1317 | 1623 |
| | | | | | lignocellulose- | | | | | | | | |
| | | | | | induced protein | | | | | | | | |
| Myrth2p4_005920 | | Leucine | Aminopeptidase Y | protein | protease | | | 469 | 470 | 471 | 1012 | 1318 | 1624 |
| | | aminopeptidase 2 | | hydrolysis | | | | | | | | | |
| Myrth2p4_005923 | Myrth2p4_005923 | Acetylxylan esterase | acetylxylan esterase CE5 | hemicellulose- | acetylxylan esterase | CE5 | CBM | 472 | 473 | 474 | 1013 | 1319 | 1625 |
| | | | | degrading | | | 1 | | | | | | |
| Myrth2p4_005937 | | Aminopeptidase Y | Aminopeptidase Y | protein | protease | | | 475 | 476 | 477 | 1014 | 1320 | 1626 |
| | | | | hydrolysis | | | | | | | | | |
| Myrth2p4_005945 | MYRTH_1_00007 | endo-1,5-alpha- | endo-1,5-alpha- | hemicellulose- | endo-1,5-alpha- | GH43 | | 478 | 479 | 480 | 1015 | 1321 | 1627 |
| | | arabinanase | arabinanase GH43 | degrading | arabinanase | | | | | | | | |
| Myrth2p4_005946 | Myrth2p4_005946 | Alpha-N- | Alpha-N- | hemicellulose- | arabinofuranosidase | GH43 | | 481 | 482 | 483 | 1016 | 1322 | 1628 |
| | | arabinofuranosidase | arabinofuranosidase | degrading | | | | | | | | | |
| | | 2 | 2 | | | | | | | | | | |
| Myrth2p4_005976 | Myrth2p4_005976 | endoglucanase | endoglucanase GH5 | cellulose- | endoglucanase | GH5 | | 484 | 485 | 486 | 1017 | 1323 | 1629 |
| | | | | degrading | | | | | | | | | |
| Myrth2p4_006001 | Myrth2p4_006001 | Laccase-1 | Laccase-1 | lignin- | laccase | | | 487 | 488 | 489 | 1018 | 1324 | 1630 |
| | | | | degrading | | | | | | | | | |
| Myrth2p4_006022 | Myrth2p4_006022 | Probable pectin | pectin lyase PL1 | pectin- | pectin lyase | PL1 | | 490 | 491 | 492 | 1019 | 1325 | 1631 |
| | | lyase A | | degrading | | | | | | | | | |
| Myrth2p4_006028 | Myrth2p4_006028 | unknown | galactanase GH5 | hemicellulose- | galactanase | GH5 | | 493 | 494 | 495 | 1020 | 1326 | 1632 |
| | | | | degrading | | | | | | | | | |
| Myrth2p4_006058 | | Bifunctional | chitin deacetylase CE4 | chitin- | chitin deacetylase | CE4 | | 496 | 497 | 498 | 1021 | 1327 | 1633 |
| | | xylanase/deacetylase | | modifying | | | | | | | | | |
| Myrth2p4_006119 | MYRTH_203560 | endo-1,4-beta- | xylanase GH10 | hemicellulose- | xylanase | GH10 | | 499 | 500 | 501 | 1022 | 1328 | 1634 |
| | | xylanase | | degrading | | | | | | | | | |
| Myrth2p4_006140 | MYRTH_2_01176 | alpha-arabino- | arabinoxylan arabino- | hemicellulose- | arabino- | GH62 | | 502 | 503 | 504 | 1023 | 1329 | 1635 |
| | | furanosidase | furanohydrolase GH62 | degrading | furanosidase | | | | | | | | |
| Myrth2p4_006141 | Myrth2p4_006141 | Alpha-N- | Alpha-N- | hemicellulose- | arabinofuranosidase | GH43 | | 505 | 506 | 507 | 1024 | 1330 | 1636 |
| | | arabinofuranosidase | arabinofuranosidase | degrading | | | | | | | | | |
| | | 2 | 2 | | | | | | | | | | |
| Myrth2p4_006201 | Myrth2p4_006201 | Cutinase | Cutinase CE5 | cutin- | cutinase | CE5 | | 508 | 509 | 510 | 1025 | 1331 | 1637 |
| | | | | degrading | | | | | | | | | |
| Myrth2p4_006226 | Myrth2p4_006226 | Probable pectate | pectate lyase PL1 | pectin- | pectate lyase | PL1 | | 511 | 512 | 513 | 1026 | 1332 | 1638 |
| | | lyase B | | degrading | | | | | | | | | |
| Myrth2p4_006305 | Myrth2p4_006305 | cellobiohydrolase | Cellobiohydrolase GH7 | cellulose- | Cellobiohydrolase | GH7 | | 514 | 515 | 516 | 1027 | 1333 | 1639 |
| | | | | degrading | | | | | | | | | |
| Myrth2p4_006387 | | Probable | Probable | carbohydrate- | glycosidase | GH16 | | 517 | 518 | 519 | 1028 | 1334 | 1640 |
| | | glycosidase crf1 | glycosidase crf1 | modifying | | | | | | | | | |
| Myrth2p4_006397 | Myrth2p4_006397 | beta-xylosidase | xylosidase/ | hemicellulose- | xylosidase/ | GH43 | | 520 | 521 | 522 | 1029 | 1335 | 1641 |
| | | | arabinosidase | degrading | arabinosidase | | | | | | | | |
| Myrth2p4_006400 | Myrth2p4_006400 | unknown | unknown | | uncharacterized | GH43 | | 523 | 524 | 525 | 1030 | 1336 | 1642 |
| | | | | | lignocellulose- | | | | | | | | |
| | | | | | induced protein | | | | | | | | |
| Myrth2p4_006403 | MYRTH_2_04242 | cellulase-enhancing | polysaccharide | cellulose- | polysaccharide | GH61 | | 526 | 527 | 528 | 1031 | 1337 | 1643 |
| | | protein | monooxygenase | degrading | monooxygenase | | | | | | | | |
| Myrth2p4_006408 | Myrth2p4_006408 | endoglucanase | xyloglucanase GH74 | hemicellulose- | xyloglucanase | GH74 | | 529 | 530 | 531 | 1032 | 1338 | 1644 |
| | | | | degrading | GH74 | | | | | | | | |
| Myrth2p4_006434 | | Carbohydrate- | unknown | carbohydrate- | Carbohydrate- | | | 532 | 533 | 534 | 1033 | 1339 | 1645 |
| | | binding cytochrome | | oxidizing | binding cytochrome | | | | | | | | |
| | | b562 | | | | | | | | | | | |
| Myrth2p4_006514 | | Subtilisin-like | Subtilisin-like | protein | protease | | | 535 | 536 | 537 | 1034 | 1340 | 1646 |
| | | proteinase Spm1 | proteinase Spm1 | hydrolysis | | | | | | | | | |
| Myrth2p4_006524 | Myrth2p4_006524 | Adhesin protein | possible adhesin | | adhesin | | | 538 | 539 | 540 | 1035 | 1341 | 1647 |
| | | Mad1 | | | | | | | | | | | |
| Myrth2p4_006587 | MYRTH_1_00040 | Chitinase 3 | Endochitinase 2 | chitin- | chitinase | | | 541 | 542 | 543 | 1036 | 1342 | 1648 |
| | | | | degrading | | | | | | | | | |
| Myrth2p4_006646 | | Uncharacterized | Uncharacterized | | oxidoreductase | | | 544 | 545 | 546 | 1037 | 1343 | 1649 |
| | | oxidoreductase | oxidoreductase | | | | | | | | | | |
| | | C30D10.05c | C30D10.05c | | | | | | | | | | |
| Myrth2p4_006765 | Myrth2p4_006765 | Probable feruloyl | feruloyl esterase CE1 | hemicellulose- | feruloyl esterase | CE1 | | 547 | 548 | 549 | 1038 | 1344 | 1650 |
| | | esterase C | | modifying | | | | | | | | | |
| Myrth2p4_006772 | Myrth2p4_006772 | Cellobiose | Cellobiose | cellulose- | cellobiose | | | 550 | 551 | 552 | 1039 | 1345 | 1651 |
| | | dehydrogenase | dehydrogenase | degrading | dehydrogenase | | | | | | | | |
| Myrth2p4_006795 | MYRTH_2_04272 | cellulase- | polysaccharide | cellulose- | polysaccharide | GH61 | CBM | 553 | 554 | 555 | 1040 | 1346 | 1652 |
| | | enhancing protein | monooxygenase | degrading | monooxygenase | | 1 | | | | | | |
| Myrth2p4_006807 | MYRTH_2_02340 | Rhamnogalacturonan | rhamnogalacturonan | pectin- | rhamnogalacturonan | CE12 | | 556 | 557 | 558 | 1041 | 1347 | 1653 |
| | | acetylesterase | acetylesterase CE12 | degrading | acetylesterase | | | | | | | | |
| Myrth2p4_006821 | Myrth2p4_006821 | Rhamnogalacturonan | Rhamnogalacturonan | pectin- | rhamnogalacturonan | CE12 | | 559 | 560 | 561 | 1042 | 1348 | 1654 |
| | | acetylesterase rhgT | acetylesterase rhgT | degrading | acetylesterase rhgT | | | | | | | | |
| Myrth2p4_006837 | Myrth2p4_006837 | Laccase-1 | Laccase-1 | lignin- | laccase | | | 562 | 563 | 564 | 1043 | 1349 | 1655 |
| | | | | degrading | | | | | | | | | |
| Myrth2p4_007013 | | unknown | unknown | | unknown | | | 565 | 566 | 567 | 1044 | 1350 | 1656 |
| Myrth2p4_007061 | Myrth2p4_007061 | Aldose 1-epimerase | Aldose 1-epimerase | | Aldose epimerase | | | 568 | 569 | 570 | 1045 | 1351 | 1657 |
| Myrth2p4_007109 | | unknown | unknown | | unknown | | | 571 | 572 | 573 | 1046 | 1352 | 1658 |
| Myrth2p4_007127 | | Beta- | Beta- | chitin- | Beta- | GH3 | | 574 | 575 | 576 | 1047 | 1353 | 1659 |
| | | hexosaminidase | hexosaminidase | degrading | hexosaminidase | | | | | | | | |
| Myrth2p4_007150 | Myrth2p4_007150 | Probable | Probable | hemicellulose- | acetylxylan esterase | CE1 | | 577 | 578 | 579 | 1048 | 1354 | 1660 |
| | | acetylxylan | acetylxylan | modifying | | | | | | | | | |
| | | esterase A | esterase A | | | | | | | | | | |
| Myrth2p4_007367 | MYRTH_2_02197 | Feruloyl esterase B | feruloyl esterase CE1 | hemicellulose- | feruloyl esterase | CE1 | | 580 | 581 | 582 | 1049 | 1355 | 1661 |
| | | | | modifying | | | | | | | | | |
| Myrth2p4_007409 | Myrth2p4_007409 | xylanase | xylanase GH11 | hemicellulose- | xylanase | GH11 | | 583 | 584 | 585 | 1050 | 1356 | 1662 |
| | | | | degrading | | | | | | | | | |
| Myrth2p4_007425 | Myrth2p4_007425 | unknown | unknown | | uncharacterized | | CBM | 586 | 587 | 588 | 1051 | 1357 | 1663 |
| | | | | | lignocellulose- | | 1 | | | | | | |
| | | | | | induced protein | | | | | | | | |
| Myrth2p4_007444 | Myrth2p4_007444 | Cellobiose | Cellobiose | cellulose- | cellobiose | | | 589 | 590 | 591 | 1052 | 1358 | 1664 |
| | | dehydrogenase | dehydrogenase | degrading | dehydrogenase | | | | | | | | |
| Myrth2p4_007447 | | Carbohydrate- | Cellobiose | cellulose- | Carbohydrate- | | | 592 | 593 | 594 | 1053 | 1359 | 1665 |
| | | binding cytochrome | dehydrogenase | degrading | binding cytochrome | | | | | | | | |
| | | b562 (Fragment) | | | | | | | | | | | |
| Myrth2p4_007461 | MYRTH_3_00099 | cellobiohydrolase | cellobiohydrolase GH6 | cellulose- | cellobiohydrolase | GH6 | | 595 | 596 | 597 | 1054 | 1360 | 1666 |
| | | | | degrading | | | | | | | | | |
| Myrth2p4_007538 | MYRTH_2_00570 | Putative rhamno- | rhamnogalacturonan | pectin- | rhamno- | PL4 | | 598 | 599 | 600 | 1055 | 1361 | 1667 |
| | | galacturonase | lyase PL4 | degrading | galacturonate lyase | | | | | | | | |
| Myrth2p4_007539 | | Probable leucine | Leucine aminopeptidase | protein | protease | | | 601 | 602 | 603 | 1056 | 1362 | 1668 |
| | | aminopeptidase | 1 | hydrolysis | | | | | | | | | |
| | | MCYG_04170 | | | | | | | | | | | |
| Myrth2p4_007540 | | Carbohydrate- | unknown | carbohydrate- | Carbohydrate- | | | 604 | 605 | 606 | 1057 | 1363 | 1669 |
| | | binding cytochrome | | oxidizing | binding cytochrome | | | | | | | | |
| | | b562 (Fragment) | | | | | | | | | | | |
| Myrth2p4_007556 | | Aspergillopepsin-2 | Aspergillopepsin-2 | protein | protease | | | 607 | 608 | 609 | 1058 | 1364 | 1670 |
| | | | | hydrolysis | | | | | | | | | |
| Myrth2p4_007648 | | exo-1,3-beta- | exo-1,3-beta- | cellulose- | exo-1,3-beta- | GH55 | | 610 | 611 | 612 | 1059 | 1365 | 1671 |
| | | glucanase | glucanase GH55 | degrading | glucanase | | | | | | | | |
| Myrth2p4_007688 | Myrth2p4_007688 | Manganese | Manganese | lignin- | manganese | | | 613 | 614 | 615 | 1060 | 1366 | 1672 |
| | | peroxidase 3 | peroxidase 3 | degrading | peroxidase | | | | | | | | |
| Myrth2p4_007726 | Myrth2p4_007726 | GLEYA adhesin | possible adhesin | | adhesin | | | 616 | 617 | 618 | 1061 | 1367 | 1673 |
| | | domain | | | | | | | | | | | |
| Myrth2p4_007729 | MYRTH_1_00035 | beta-mannanase | Beta-mannanase GH5 | hemicellulose- | Beta-mannanase | GH5 | | 619 | 620 | 621 | 1062 | 1368 | 1674 |
| | | | | degrading | | | | | | | | | |
| Myrth2p4_007771 | | Alpha-galactosidase | alpha-galactosidase | hemicellulose- | alpha-galactosidase | GH27 | | 622 | 623 | 624 | 1063 | 1369 | 1675 |
| | | A | GH27 | degrading | | | | | | | | | |
| Myrth2p4_007781 | | Probable leucine | Probable leucine | protein | protease | | | 625 | 626 | 627 | 1064 | 1370 | 1676 |
| | | aminopeptidase 2 | aminopeptidase 2 | hydrolysis | | | | | | | | | |
| Myrth2p4_007801 | Myrth2p4_007801 | unknown | unknown | | unknown | | | 628 | 629 | 630 | 1065 | 1371 | 1677 |
| Myrth2p4_007815 | Myrth2p4_007815 | xylanase | Xylanase GH10 | hemicellulose- | Xylanase | GH10 | | 631 | 632 | 633 | 1066 | 1372 | 1678 |
| | | | | degrading | | | | | | | | | |
| Myrth2p4_007838 | Myrth2p4_007838 | Pectate lyase H | pectate lyase PL3 | pectin- | pectate lyase | PL3 | | 634 | 635 | 636 | 1067 | 1373 | 1679 |
| | | | | degrading | | | | | | | | | |
| Myrth2p4_007849 | Myrth2p4_007849 | unknown | unknown | | uncharacterized | | | 637 | 638 | 639 | 1068 | 1374 | 1680 |
| | | | | | lignocellulose- | | | | | | | | |
| | | | | | induced protein | | | | | | | | |
| Myrth2p4_007850 | Myrth2p4_007850 | unknown | unknown | | uncharacterized | | | 640 | 641 | 642 | 1069 | 1375 | 1681 |
| | | | | | lignocellulose- | | | | | | | | |
| | | | | | induced protein | | | | | | | | |
| Myrth2p4_007861 | | Putative serine | Putative serine | protein | protease | | | 643 | 644 | 645 | 1070 | 1376 | 1682 |
| | | protease K12H4.7 | protease K12H4.7 | hydrolysis | | | | | | | | | |
| Myrth2p4_007867 | MYRTH_4_06111 | endoglucanase | endoglucanase GH7 | cellulose- | endoglucanase | GH7 | | 646 | 647 | 648 | 1071 | 1377 | 1683 |
| | | | | degrading | | | | | | | | | |
| Myrth2p4_007877 | MYRTH_2_00938 | unknown | unknown | | uncharacterized | CE3 | | 649 | 650 | 651 | 1072 | 1378 | 1684 |
| | | | | | lignocellulose- | | | | | | | | |
| | | | | | induced protein | | | | | | | | |
| Myrth2p4_007915 | MYRTH_2_03335 | unknown | Glucan endo-1,3-beta- | glucan- | Glucan endo-1,3- | GH16 | | 652 | 653 | 654 | 1073 | 1379 | 1685 |
| | | | glucosidase A1 | degrading | beta-glucosidase | | | | | | | | |
| Myrth2p4_007920 | | Subtilisin-like | Proteinase R | protein | protease | | | 655 | 656 | 657 | 1074 | 1380 | 1686 |
| | | protease 7 | | hydrolysis | | | | | | | | | |
| Myrth2p4_007924 | MYRTH_1_00018 | Beta-glucuronidase | Beta-galactosidase | hemicellulose- | Beta-galactosidase | GH2 | | 658 | 659 | 660 | 1075 | 1381 | 1687 |
| | | | | degrading | | | | | | | | | |
| Myrth2p4_007956 | | unknown | unknown | | unknown PL20 | PL20 | | 661 | 662 | 663 | 1076 | 1382 | 1688 |
| Myrth2p4_007996 | | Probable endo- | Probable endo- | glucan- | endo-1,3(4)-beta- | GH16 | | 664 | 665 | 666 | 1077 | 1383 | 1689 |
| | | 1,3(4)-beta- | 1,3(4)- beta- | degrading | glucanase | | | | | | | | |
| | | glucanase | glucanase | | | | | | | | | | |
| | | AFUB_029980 | AFUA_2G14360 | | | | | | | | | | |
| Myrth2p4_008028 | MYRTH_2_00811 | cellulase-enhancing | polysaccharide | cellulose- | polysaccharide | GH61 | | 667 | 668 | 669 | 1078 | 1384 | 1690 |
| | | protein | monooxygenase | degrading | monooxygenase | | | | | | | | |
| Myrth2p4_008123 | MYRTH_3_00077 | unknown | unknown | | unknown GH43 | GH43 | | 670 | 671 | 672 | 1079 | 1385 | 1691 |
| Myrth2p4_008179 | Myrth2p4_008179 | unknown | unknown | | unknown CE16 | CE16 | | 673 | 674 | 675 | 1080 | 1386 | 1692 |
| Myrth2p4_008220 | Myrth2p4_008220 | unknown | unknown | | uncharacterized | | | 676 | 677 | 678 | 1081 | 1387 | 1693 |
| | | | | | lignocellulose- | | | | | | | | |
| | | | | | induced protein | | | | | | | | |
| Myrth2p4_008285 | Myrth2p4_008285 | unknown | unknown | | unknown CE4 | CE4 | | 679 | 680 | 681 | 1082 | 1388 | 1694 |
| Myrth2p4_008298 | | | endoglucanase GH12 | cellulose- | endoglucanase | GH12 | | 682 | 683 | 684 | 1083 | 1389 | 1695 |
| | | | | degrading | | | | | | | | | |
| Myrth2p4_008299 | Myrth2p4_008299 | Probable exo-1,4- | Beta-xylosidase GH3 | hemicellulose- | Beta-xylosidase | GH3 | | 685 | 686 | 687 | 1084 | 1390 | 1696 |
| | | beta-xylosidase | | degrading | | | | | | | | | |
| | | xlnD | | | | | | | | | | | |
| Myrth2p4_008353 | Myrth2p4_008353 | Periplasmic beta- | Periplasmic beta- | cellulose- | beta-glucosidase | GH3 | | 688 | 689 | 690 | 1085 | 1391 | 1697 |
| | | glucosidase | glucosidase | degrading | | | | | | | | | |
| Myrth2p4_008360 | | Alpha-L-fucosidase | Alpha-L-fucosidase | carbohydrate- | Alpha-L-fucosidase | GH95 | | 691 | 692 | 693 | 1086 | 1392 | 1698 |
| | | 2 | 2 | modifying | | | | | | | | | |
| Myrth2p4_008429 | | Putative | Putative | | hydrolase | | | 694 | 695 | 696 | 1087 | 1393 | 1699 |
| | | uncharacterized | uncharacterized | | | | | | | | | | |
| | | hydrolase | hydrolase | | | | | | | | | | |
| | | YOR131C | YOR131C | | | | | | | | | | |
| Myrth2p4_008437 | Myrth2p4_008437 | Non-Catalytic | Allergen Asp f 7 | cellulase- | expansin | | | 697 | 698 | 699 | 1088 | 1394 | 1700 |
| | | module family | | enhancing | | | | | | | | | |
| | | expansin | | | | | | | | | | | |
| Myrth2p4_008501 | Myrth2p4_008501 | Carbohydrate- | unknown | carbohydrate- | Carbohydrate- | | | 700 | 701 | 702 | 1089 | 1395 | 1701 |
| | | binding cytochrome | | oxidizing | binding cytochrome | | | | | | | | |
| | | b562 | | | | | | | | | | | |
| Myrth2p4_008515 | MYRTH_4_03993 | cellobiohydrolase | cellobiohydrolase GH6 | cellulose- | cellobiohydrolase | GH6 | CBM | 703 | 704 | 705 | 1090 | 1396 | 1702 |
| | | | | degrading | | | 1 | | | | | | |
| Myrth2p4_008522 | Myrth2p4_008522 | Probable 1,4-beta- | possible swollenin | cellulase- | swollenin | CE15 | CBM | 706 | 707 | 708 | 1091 | 1397 | 1703 |
| | | D-glucan | | enhancing | | | 1 | | | | | | |
| | | cellobiohydrolase C | | | | | | | | | | | |
| Myrth2p4_008530 | Myrth2p4_008530 | cellulase-enhancing | polysaccharide | cellulose- | polysaccharide | GH61 | | 709 | 710 | 711 | 1092 | 1398 | 1704 |
| | | protein | monooxygenase | degrading | monooxygenase | | | | | | | | |
| Myrth2p4_008541 | | unknown | unknown | | unknown CBM18 | | CBM | 712 | 713 | 714 | 1093 | 1399 | 1705 |
| | | | | | | | 18 | | | | | | |
| Myrth2p4_008564 | MYRTH_2_04212 | unknown | unknown | | uncharacterized | | | 715 | 716 | 717 | 1094 | 1400 | 1706 |
| | | | | | lignocellulose- | | | | | | | | |
| | | | | | induced protein | | | | | | | | |
| Myrth2p4_008615 | | exo- | exo-glucosaminidase | chitin- | exo- | GH2 | | 718 | 719 | 720 | 1095 | 1401 | 1707 |
| | | glucosaminidase | GH2 | degrading | glucosaminidase | | | | | | | | |
| Myrth2p4_008650 | | unknown | unknown | | unknown | | | 721 | 722 | 723 | 1096 | 1402 | 1708 |
| Myrth2p4_008756 | Myrth2p4_008756 | unknown | Endoglucanase | cellulose- | Endoglucanase | GH5 | | 724 | 725 | 726 | 1097 | 1403 | 1709 |
| | | | | degrading | | | | | | | | | |
| | Myrth2p4_000413 | | Cytochrome P450-DIT2 | | Cytochrome P450 | | | | | | 1098 | 1404 | 1710 |
| | Myrth2p4_000624 | | unknown | | uncharacterized | | | | | | 1099 | 1405 | 1711 |
| | | | | | lignocellulose- | | | | | | | | |
| | | | | | induced protein | | | | | | | | |
| | Myrth2p4_001189 | | Carboxylesterase 5A | carbohydrate- | carboxylesterase | CE10 | | | | | 1100 | 1406 | 1712 |
| | | | | modifiying | | | | | | | | | |
| | Myrth2p4_001457 | | Cytochrome P450 52A12 | | Cytochrome P450 | | | | | | 1101 | 1407 | 1713 |
| | Myrth2p4_001536 | | O- | | oxidoreductase | | | | | | 1102 | 1408 | 1714 |
| | | | methylsterigmatocystin | | | | | | | | | | |
| | | | oxidoreductase | | | | | | | | | | |
| | Myrth2p4_001740 | | possible adhesin | | adhesin | | | | | | 1103 | 1409 | 1715 |
| | Myrth2p4_003589 | | possible adhesin | | adhesin | | | | | | 1104 | 1410 | 1716 |
| | Myrth2p4_003938 | | Tyrosinase | pigment- | Tyrosinase | | | | | | 1105 | 1411 | 1717 |
| | | | | producing | | | | | | | | | |
| | Myrth2p4_006092 | | unknown | | uncharacterized | | | | | | 1106 | 1412 | 1718 |
| | | | | | lignocellulose- | | | | | | | | |
| | | | | | induced protein | | | | | | | | |
| | Myrth2p4_006213 | | Tyrosinase | pigment- | Tyrosinase | | | | | | 1107 | 1413 | 1719 |
| | | | | producing | | | | | | | | | |
| | Myrth2p4_008350 | | O- | | oxidoreductase | | | | | | 1108 | 1414 | 1720 |
| | | | methylsterigmatocystin | | | | | | | | | | |
| | | | oxidoreductase | | | | | | | | | | |
| | MYRTH_1_00002 | | Alpha-L-arabino- | hemicellulose- | Alpha-L-arabino- | GH62 | | | | | 1109 | 1415 | 1721 |
| | | | furanosidase | degrading | furanosidase | | | | | | | | |
| | | | (arabinoxylan | | (arabinoxylan | | | | | | | | |
| | | | arabinofuranosidase) | | arabino- | | | | | | | | |
| | | | GH62 | | furanosidase) | | | | | | | | |
| [Myrth2p4_008299] | MYRTH_1_00003 | | Probable exo-1,4-beta- | hemicellulose- | exo-1,4-beta- | GH3 | | | | | 1110 | 1416 | 1722 |
| | | | xylosidase xlnD | degrading | xylosidase | | | | | | | | |
| | MYRTH_1_00009 | | exo-polygalacturonase | pectin- | exo- | GH28 | | | | | 1111 | 1417 | 1723 |
| | | | GH28 | degrading | polygalacturonase | | | | | | | | |
| | MYRTH_1_00020 | | exo-1,3-beta- | hemicellulose- | exo-1,3-beta- | GH43 | | | | | 1112 | 1418 | 1724 |
| | | | galactanase GH43 | degrading | galactanase | | | | | | | | |
| [Myrth2p4_001494] | MYRTH_1_00021 | | Probable beta- | cellulose- | beta-glucosidase | GH3 | | | | | 1113 | 1419 | 1725 |
| | | | glucosidase L | degrading | | | | | | | | | |
| | MYRTH_1_00025 | | Endo-1,4-beta-xylanase | hemicellulose- | Endo-1,4-beta- | GH10 | | | | | 1114 | 1420 | 1726 |
| | | | A | degrading | xylanase | | | | | | | | |
| | MYRTH_1_00031 | | beta-galactosidase GH35 | hemicellulose- | beta-galactosidase | GH35 | | | | | 1115 | 1421 | 1727 |
| | | | | degrading | | | | | | | | | |
| | MYRTH_1_00032 | | beta-galactosidase GH35 | hemicellulose- | beta-galactosidase | GH35 | | | | | 1116 | 1422 | 1728 |
| | | | | degrading | | | | | | | | | |
| | MYRTH_1_00037 | | Alpha-N- | hemicellulose- | Alpha-N- | GH43 | | | | | 1117 | 1423 | 1729 |
| | | | arabinofuranosidase 2 | degrading | arabinofuranosidase | | | | | | | | |
| | MYRTH_1_00069 | | hexosaminidase GH20 | chitin- | hexosaminidase | GH20 | | | | | 1118 | 1424 | 1730 |
| | | | | degrading | | | | | | | | | |
| | MYRTH_1_00080 | | unknown | | unknown CE3 | CE3 | | | | | 1119 | 1425 | 1731 |
| | MYRTH_1_00084 | | xylanase GH30 | hemicellulose- | xylanase | GH30 | | | | | 1120 | 1426 | 1732 |
| | | | | degrading | | | | | | | | | |
| | MYRTH_1_00087 | | beta-glucosidase GH3 | cellulose- | beta-glucosidase | GH3 | | | | | 1121 | 1427 | 1733 |
| | | | | degrading | | | | | | | | | |
| | MYRTH_1_00098 | | Probable glycosidase | carbohydrate- | glycosidase | GH16 | | | | | 1122 | 1428 | 1734 |
| | | | crf1 | modifying | | | | | | | | | |
| | MYRTH_2_00218 | | endoglucanase GH12 | cellulose- | endoglucanase | GH12 | | | | | 1123 | 1429 | 1735 |
| | | | | degrading | | | | | | | | | |
| | MYRTH_2_00583 | | Chitinase 3 | chitin- | Chitinase 3 | | | | | | 1124 | 1430 | 1736 |
| | | | | degrading | | | | | | | | | |
| | MYRTH_2_00740 | | unknown | | unknown GH16 | GH16 | | | | | 1125 | 1431 | 1737 |
| [Myrth2p4_000495] | MYRTH_2_00959 | | arabinoxylan arabino- | hemicellulose- | arabinoxylan | GH43 | | | | | 1126 | 1432 | 1738 |
| | | | furanohydrolase GH43 | degrading | arabinofurano- | | | | | | | | |
| | | | | | hydrolase⁹ | | | | | | | | |
| | MYRTH_2_01076 | | Chitinase GH18 | chitin- | Chitinase | GH18 | | | | | 1127 | 1433 | 1739 |
| | | | | degrading | | | | | | | | | |
| | MYRTH_2_01077 | | Chitinase GH18 | chitin- | Chitinase | GH18 | | | | | 1128 | 1434 | 1740 |
| | | | | degrading | | | | | | | | | |
| | MYRTH_2_01097 | | cellobiohydrolase GH7 | cellulose- | cellobiohydrolase | GH7 | | | | | 1129 | 1435 | 1741 |
| | | | | degrading | | | | | | | | | |
| | MYRTH_2_01279 | | Beta-xylosidase GH3 | hemicellulose- | Beta-xylosidase | GH3 | | | | | 1130 | 1436 | 1742 |
| | | | | degrading | | | | | | | | | |
| | MYRTH_2_01280 | | Beta-xylosidase GH3 | hemicellulose- | Beta-xylosidase | GH3 | | | | | 1131 | 1437 | 1743 |
| | | | | degrading | | | | | | | | | |
| | MYRTH_2_02633 | | Periplasmic beta- | cellulose- | beta-glucosidase | GH3 | | | | | 1132 | 1438 | 1744 |
| | | | glucosidase | degrading | | | | | | | | | |
| | MYRTH_2_04091 | | xylanase GH10 | hemicellulose- | xylanase | GH10 | CBM | | | | 1133 | 1439 | 1745 |
| | | | | degrading | | | 1 | | | | | | |
| | MYRTH_2_04186 | | endoglucanase GH7 | cellulose- | endoglucanase | GH7 | | | | | 1134 | 1440 | 1746 |
| | | | | degrading | | | | | | | | | |
| | MYRTH_2_04244 | | endoglucanase GH6 | cellulose- | endoglucanase | GH6 | | | | | 1135 | 1441 | 1747 |
| | | | | degrading | | | | | | | | | |
| | MYRTH_2_04271 | | hexosaminidase GH20 | chitin- | hexosaminidase | GH20 | | | | | 1136 | 1442 | 1748 |
| | | | | degrading | | | | | | | | | |
| | MYRTH_2_04288 | | Mannan endo-1,4-beta- | hemicellulose- | Mannan endo-1,4- | GH26 | CBM | | | | 1137 | 1443 | 1749 |
| | | | mannosidase | degrading | beta-mannosidase | | 35 | | | | | | |
| | MYRTH_3_00003 | | Beta-mannanase GH5 | hemicellulose- | Beta-mannanase | GH5 | | | | | 1138 | 1444 | 1750 |
| | | | | degrading | | | | | | | | | |
| | MYRTH_3_00016 | | unknown | | unknown GH16 | GH16 | | | | | 1139 | 1445 | 1751 |
| | MYRTH_3_00086 | | exo-1,3-beta- | hemicellulose- | exo-1,3-beta- | GH43 | | | | | 1140 | 1446 | 1752 |
| | | | galactanase GH43 | degrading | galactanase | | | | | | | | |
| | MYRTH_3_00105 | | Polysaccharide | cellulose- | Polysaccharide | GH61 | | | | | 1141 | 1447 | 1753 |
| | | | monooxygenase | degrading | monooxygenase | | | | | | | | |
| | MYRTH_3_00120 | | Polysaccharide | cellulose- | Polysaccharide | GH61 | CBM | | | | 1142 | 1448 | 1754 |
| | | | monooxygenase GH61 | degrading | monooxygenase | | 1 | | | | | | |
| | MYRTH_3_00124 | | Polysaccharide | cellulose- | Polysaccharide | GH61 | | | | | 1143 | 1449 | 1755 |
| | | | monooxygenase GH61 | degrading | monooxygenase | | | | | | | | |
| | MYRTH_3_00127 | | Alpha-L- | hemicellulose- | Alpha-L-arabino- | GH62 | | | | | 1144 | 1450 | 1756 |
| | | | arabinofuranosidase C | degrading | furanosidase C | | | | | | | | |
| | | | (arabinoxylan arabino- | | (arabinoxylan | | | | | | | | |
| | | | furanohydrolase) GH62 | | arabino- | | | | | | | | |
| | | | | | furanohydrolase) | | | | | | | | |
| | MYRTH_4_05758 | | arabinoxylan | hemicellulose- | arabinoxylan | GH62 | | | | | 1145 | 1451 | 1757 |
| | | | arabinofuranohydrolase | degrading | arabinofurano- | | | | | | | | |
| | | | GH62 | | hydrolase | | | | | | | | |
| | MYRTH_4_09372 | | xylanase GH10 | hemicellulose- | xylanase | GH10 | CBM | | | | 1146 | 1452 | 1758 |
| | | | | degrading | | | 1 | | | | | | |
| | MYRTH_4_09820 | | endoglucanase GH12 | cellulose- | endoglucanase | GH12 | | | | | 1147 | 1453 | 1759 |
| | | | | degrading | | | | | | | | | |
| | Myrth2p4_000387 | | possible pyranose | sugar- | pyranose | | | | | | 1148 | 1454 | 1760 |
| | | | dehydrogenase | modifying | dehydrogenase | | | | | | | | |
| | Myrth2p4_000489 | | Lipase 1 | lipid- | lipase | CE10 | | | | | 1149 | 1455 | 1761 |
| | | | | degrading | | | | | | | | | |
| | Myrth2p4_001363 | | Probable dipeptidyl | protein | protease | CE10 | | | | | 1150 | 1456 | 1762 |
| | | | peptidase 4 | hydrolysis | | | | | | | | | |
| | Myrth2p4_001546 | | possible pyranose | sugar- | pyranose | | | | | | 1151 | 1457 | 1763 |
| | | | dehydrogenase | modifying | dehydrogenase | | | | | | | | |
| | Myrth2p4_002267 | | possible pyranose | sugar- | pyranose | | | | | | 1152 | 1458 | 1764 |
| | | | dehydrogenase | modifying | dehydrogenase | | | | | | | | |
| | Myrth2p4_002365 | | Probable serine protease | protein | protease | | | | | | 1153 | 1459 | 1765 |
| | | | EDA2 | hydrolysis | | | | | | | | | |
| | Myrth2p4_003086 | | possible pyranose | sugar- | pyranose | | | | | | 1154 | 1460 | 1766 |
| | | | dehydrogenase | modifying | dehydrogenase | | | | | | | | |
| | Myrth2p4_004152 | | unknown | | unknown GH61 | GH61 | | | | | 1155 | 1461 | 1767 |
| | Myrth2p4_004330 | | unknown | | unknown CE3 | CE3 | | | | | 1156 | 1462 | 1768 |
| | Myrth2p4_004961 | | Extracellular | protein | protease | | | | | | 1157 | 1463 | 1769 |
| | | | metalloprotease | hydrolysis | | | | | | | | | |
| | | | Pa_2_14170 | | | | | | | | | | |
| | Myrth2p4_005807 | | Uncharacterized | | oxidoreductase | | | | | | 1158 | 1464 | 1770 |
| | | | oxidoreductase dltE | | | | | | | | | | |
| | Myrth2p4_005966 | | Lipase 4 | lipid- | lipase | CE10 | | | | | 1159 | 1465 | 1771 |
| | | | | degrading | | | | | | | | | |
| | Myrth2p4_006645 | | Putative oxidoreductase | | oxidoreductase | | | | | | 1160 | 1466 | 1772 |
| | | | C1F5.03c | | | | | | | | | | |
| | Myrth2p4_008594 | | Uncharacterized FAD- | | oxidoreductase | | | | | | 1161 | 1467 | 1773 |
| | | | linked oxidoreductase | | | | | | | | | | |
| | | | yvdP | | | | | | | | | | |

⁸For example, xylan 1,4-beta-xylosidase
⁹A minor activity of xylan 1,4-beta-xylosidase was detected for this protein.

TABLE 1C
Biomass degrading genes and polypeptides of Aureobasidium pullulans

| | | | | | | | | Provisional | | | | | |
|---|---|---|---|---|---|---|---|---|---|---|---|---|---|
| Gene ID in | | Annotation in | | | | | | application | | | PCT application | | |
| prov. | | Provisional | | | | | | SEQ ID NO: | | | SEQ ID NO: | | |
| appn. | | application No. | | | | CAZy | CBM of | Ge- | | Amino | Ge- | | Amino |
| 61/657,078 | Target ID | 61/657,078 | Updated annotation | Function | Protein activity | family | interest | nomic | Coding | acid | nomic | Coding | acid |
| Aurpu2p4_000013 | Aurpu2p4_000013 | Beta-glucosidase | beta-glucosidase GH1 | cellulose- | beta-glucosidase | GH1 | | 1 | 2 | 3 | 1774 | 2161 | 2548 |
| | | 14 | | degrading | | | | | | | | | |
| Aurpu2p4_000017 | Aurpu2p4_000017 | Probable rhamno- | Endo-rhamno- | pectin- | rhamno- | GH28 | | 4 | 5 | 6 | 1775 | 2162 | 2549 |
| | | galacturonase A | galacturonase GH28 | degrading | galacturonase | | | | | | | | |
| Aurpu2p4_000070 | Aurpu2p4_000070 | endoglucanase | Endoglucanase GH5 | cellulose- | endoglucanase | GH5 | CBM1 | 7 | 8 | 9 | 1776 | 2163 | 2550 |
| | | | | degrading | | | | | | | | | |
| Aurpu2p4_000074 | AURPU_3_00185 | beta-glucosidase | avenacinase GH3 | | avenacinase | GH3 | | 10 | 11 | 12 | 1777 | 2164 | 2551 |
| Aurpu2p4_000163 | AURPU_3_00030 | xyloglucanase | xyloglucanase GH12 | hemicellulose- | xyloglucanase | GH12 | | 13 | 14 | 15 | 1778 | 2165 | 2552 |
| | | | | degrading | | | | | | | | | |
| Aurpu2p4_000184 | | N-acyl- | phospholipase | phospholipid- | lipase | | | 16 | 17 | 18 | 1779 | 2166 | 2553 |
| | | phosphatidylethanolamine- | | modifying | | | | | | | | | |
| | | hydrolyzing | | | | | | | | | | | |
| | | phospholipase D | | | | | | | | | | | |
| Aurpu2p4_000224 | Aurpu2p4_000224 | Acetylxylan | Acetylxylan esterase 1 | hemicellulose- | acetylxylan | CE1 | | 19 | 20 | 21 | 1780 | 2167 | 2554 |
| | | esterase A | CE1 | degrading | esterase | | | | | | | | |
| Aurpu2p4_000225 | Aurpu2p4_000225 | Putative Expansin- | Expansin-B5 | cellulase- | expansin | | | 22 | 23 | 24 | 1781 | 2168 | 2555 |
| | | like protein 1 | | enhancing | | | | | | | | | |
| Aurpu2p4_000232 | Aurpu2p4_000232 | unknown | unknown | | unknown CE1 | CE1 | | 25 | 26 | 27 | 1782 | 2169 | 2556 |
| Aurpu2p4_000354 | | unknown | unknown | | unknown GH79 | GH79 | | 28 | 29 | 30 | 1783 | 2170 | 2557 |
| Aurpu2p4_000408 | Aurpu2p4_000408 | Putative cell wall | possible adhesin | | adhesin | | | 31 | 32 | 33 | 1784 | 2171 | 2558 |
| | | adhesin | | | | | | | | | | | |
| Aurpu2p4_000459 | Aurpu2p4_000459 | exo-1,3-beta- | exo-1,3-beta- | cellulose- | exo-1,3-beta- | GH5 | | 34 | 35 | 36 | 1785 | 2172 | 2559 |
| | | glucanase | glucanase GH5 | degrading | glucanase | | | | | | | | |
| Aurpu2p4_000533 | | exo-1,3-beta- | Exo-1,3-beta- | cellulose- | Exo-1,3-beta- | GH55 | | 37 | 38 | 39 | 1786 | 2173 | 2560 |
| | | glucanase | glucanase GH55 | degrading | glucanase | | | | | | | | |
| Aurpu2p4_000568 | AURPU_3_00012 | xylanase | xylanase GH10 | hemicellulose- | xylanase | GH10 | CBM1 | 40 | 41 | 42 | 1787 | 2174 | 2561 |
| | | | | degrading | | | | | | | | | |
| Aurpu2p4_000586 | | unknown | unknown | | unknown | | | 43 | 44 | 45 | 1788 | 2175 | 2562 |
| Aurpu2p4_000590 | AURPU_3_00002 | Beta-glucosidase | beta-glucosidase GH1 | cellulose- | beta-glucosidase | GH1 | | 46 | 47 | 48 | 1789 | 2176 | 2563 |
| | | 40 | | degrading | | | | | | | | | |
| Aurpu2p4_000594 | | alpha- | alpha-galactosidase | hemicellulose- | alpha- | GH27 | | 49 | 50 | 51 | 1790 | 2177 | 2564 |
| | | galactosidase | GH27 | degrading | galactosidase | | | | | | | | |
| Aurpu2p4_000617 | Aurpu2p4_000617 | Carboxylesterase 8 | Para-nitrobenzyl | | carboxylesterase | CE10 | | 52 | 53 | 54 | 1791 | 2178 | 2565 |
| | | | esterase | | | | | | | | | | |
| Aurpu2p4_000662 | | Aspergillopepsin-F | Aspartic protease | protein | protease | | | 55 | 56 | 57 | 1792 | 2179 | 2566 |
| | | | pep1 | hydrolysis | | | | | | | | | |
| Aurpu2p4_000692 | | beta-glucosidase | beta-glucosidase GH1 | cellulose- | beta-glucosidase | GH1 | | 58 | 59 | 60 | 1793 | 2180 | 2567 |
| | | | | degrading | | | | | | | | | |
| Aurpu2p4_000730 | | Carboxypeptidase Y | Carboxypeptidase Y | protein | protease | | | 61 | 62 | 63 | 1794 | 2181 | 2568 |
| | | | homolog A | hydrolysis | | | | | | | | | |
| Aurpu2p4_000792 | Aurpu2p4_000792 | Probable pectin | pectin lyase PL1 | pectin-degrading | pectin lyase | PL1 | | 64 | 65 | 66 | 1795 | 2182 | 2569 |
| | | lyase D | | | | | | | | | | | |
| Aurpu2p4_000799 | | unknown | unknown | | unknown CE1 | CE1 | | 67 | 68 | 69 | 1796 | 2183 | 2570 |
| Aurpu2p4_000819 | | Putative serine | Putative serine | protein | protease | | | 70 | 71 | 72 | 1797 | 2184 | 2571 |
| | | protease K12H4.7 | protease K12H4.7 | hydrolysis | | | | | | | | | |
| Aurpu2p4_000860 | Aurpu2p4_000860 | Probable alpha-N- | alpha | hemicellulose- | arabinofuranosidase | GH51 | | 73 | 74 | 75 | 1798 | 2185 | 2572 |
| | | arabinofuranosidase A | arabinofuranosidase | degrading | | | | | | | | | |
| | | | GH51 | | | | | | | | | | |
| Aurpu2p4_000919 | AURPU_3_00164 | Putative | exo- | pectin-degrading | rhamno- | GH28 | | 76 | 77 | 78 | 1799 | 2186 | 2573 |
| | | galacturan 1,4- | rhamnogalacturonase | | galacturonase | | | | | | | | |
| | | alpha- | GH28 | | | | | | | | | | |
| | | galacturonidase B | | | | | | | | | | | |
| Aurpu2p4_000934 | AURPU_3_00165 | Putative | exo- | pectin-degrading | rhamno- | GH28 | | 79 | 80 | 81 | 1800 | 2187 | 2574 |
| | | galacturan 1,4- | rhamnogalacturonase | | galacturonase | | | | | | | | |
| | | alpha- | GH28 | | | | | | | | | | |
| | | galacturonidase B | | | | | | | | | | | |
| Aurpu2p4_000947 | AURPU_3_00284 | Inulinase | invertase GH32 | | invertase | GH32 | | 82 | 83 | 84 | 1801 | 2188 | 2575 |
| Aurpu2p4_000948 | AURPU_3_00288 | Invertase | exo-inulinase GH32 | | exo-inulinase | GH32 | | 85 | 86 | 87 | 1802 | 2189 | 2576 |
| Aurpu2p4_000984 | AURPU_3_00187 | beta-glucosidase | beta-glucosidase GH3 | cellulose- | beta-glucosidase | GH3 | | 88 | 89 | 90 | 1803 | 2190 | 2577 |
| | | | | degrading | | | | | | | | | |
| Aurpu2p4_000995 | AURPU_3_00068 | Probable endo- | mixed-link glucanase | glucan- | mixed-link | GH16 | | 91 | 92 | 93 | 1804 | 2191 | 2578 |
| | | 1,3(4)-beta- | GH16 | degrading | glucanase | | | | | | | | |
| | | glucanase | | | | | | | | | | | |
| | | ACLA_073210 | | | | | | | | | | | |
| Aurpu2p4_001037 | Aurpu2p4_001037 | Cellobiose | Cellobiose | lignin-degrading | cellobiose | | | 94 | 95 | 96 | 1805 | 2192 | 2579 |
| | | dehydrogenase | dehydrogenase | | dehydrogenase | | | | | | | | |
| Aurpu2p4_001097 | Aurpu2p4_001097 | Adhesin protein | possible adhesin | | adhesin | | | 97 | 98 | 99 | 1806 | 2193 | 2580 |
| | | Mad1 | | | | | | | | | | | |
| Aurpu2p4_001104 | | unknown | galactanase GH5 | hemicellulose- | galactanase | GH5 | | 100 | 101 | 102 | 1807 | 2194 | 2581 |
| | | | | degrading | | | | | | | | | |
| Aurpu2p4_001152 | | Glucan 1,3-beta- | Probable glucan 1,3- | cellulose- | glucan 1,3-beta- | GH5 | | 103 | 104 | 105 | 1808 | 2195 | 2582 |
| | | glucosidase 1 | beta-glucosidase A | degrading | glucosidase | | | | | | | | |
| Aurpu2p4_001194 | Aurpu2p4_001194 | Pectinesterase | Pectinesterase | pectin-degrading | pectinesterase | CE8 | | 106 | 107 | 108 | 1809 | 2196 | 2583 |
| Aurpu2p4_001195 | | Probable leucine | Leucine | protein | protease | | | 109 | 110 | 111 | 1810 | 2197 | 2584 |
| | | aminopeptidase 1 | aminopeptidase 1 | hydrolysis | | | | | | | | | |
| Aurpu2p4_001256 | AURPU_3_00017 | xylanase | xylanase GH11 | hemicellulose- | xylanase¹⁰ | GH11 | | 112 | 113 | 114 | 1811 | 2198 | 2585 |
| | | | | degrading | | | | | | | | | |
| Aurpu2p4_001441 | Aurpu2p4_001441 | Probable alpha-N- | alpha- | hemicellulose- | arabinofuranosidase | GH51 | | 115 | 116 | 117 | 1812 | 2199 | 2586 |
| | | arabinofuranosidase A | arabinofuranosidase | degrading | | | | | | | | | |
| | | | GH51 | | | | | | | | | | |
| Aurpu2p4_001503 | AURPU_3_00393 | cellobiohydrolase | cellobiohydrolase GH6 | cellulose- | cellobiohydrolase | GH6 | CBM1 | 118 | 119 | 120 | 1813 | 2200 | 2587 |
| | | | | degrading | | | | | | | | | |
| Aurpu2p4_001504 | AURPU_3_00429 | cellobiohydrolase | cellobiohydrolase | cellulose- | cellobio- | GH7 | | 121 | 122 | 123 | 1814 | 2201 | 2588 |
| | | | GH7 | degrading | hydrolase¹¹ | | | | | | | | |
| Aurpu2p4_001512 | Aurpu2p4_001512 | Rhamnogalacturonase B | rhamnogalacturonan | pectin-degrading | rhamno- | PL4 | | 124 | 125 | 126 | 1815 | 2202 | 2589 |
| | | | lyase PL4 | | galacturonase | | | | | | | | |
| Aurpu2p4_001553 | Aurpu2p4_001553 | Liver | Acetylcholinesterase 4 | | carboxylesterase | CE10 | | 127 | 128 | 129 | 1816 | 2203 | 2590 |
| | | carboxylesterase | | | | | | | | | | | |
| Aurpu2p4_001599 | Aurpu2p4_001599 | Tannase | Tannase | tannin- | tannase | | | 130 | 131 | 132 | 1817 | 2204 | 2591 |
| | | | | degrading | | | | | | | | | |
| Aurpu2p4_001600 | | Carboxypeptidase | Carboxypeptidase | protein | protease | | | 133 | 134 | 135 | 1818 | 2205 | 2592 |
| | | cpdS | cpdS | hydrolysis | | | | | | | | | |
| Aurpu2p4_001633 | Aurpu2p4_001633 | endoglucanase | Endoglucanase GH5 | cellulose- | Endoglucanase | GH5 | | 136 | 137 | 138 | 1819 | 2206 | 2593 |
| | | | | degrading | | | | | | | | | |
| Aurpu2p4_001665 | | Gamma- | Gamma- | protein | protease | | | 139 | 140 | 141 | 1820 | 2207 | 2594 |
| | | glutamyltranspeptidase 2 | glutamyltranspeptidase 1 | hydrolysis | | | | | | | | | |
| Aurpu2p4_001680 | | Peptidase M20 | Probable | protein | protease | | | 142 | 143 | 144 | 1821 | 2208 | 2595 |
| | | domain-containing | carboxypeptidase | hydrolysis | | | | | | | | | |
| | | protein C757.05c | AFLA_037450 | | | | | | | | | | |
| Aurpu2p4_001713 | Aurpu2p4_001713 | Versatile | Manganese | lignin-degrading | versatile | | | 145 | 146 | 147 | 1822 | 2209 | 2596 |
| | | peroxidase VPL1 | peroxidase 1 | | peroxidase | | | | | | | | |
| Aurpu2p4_001718 | Aurpu2p4_001718 | Endochitinase | chitinase GH18 | chitin-degrading | chitinase | GH18 | | 148 | 149 | 150 | 1823 | 2210 | 2597 |
| Aurpu2p4_001807 | AURPU_3_00342 | unknown | Alpha-N- | hemicellulose- | arabino- | GH43 | | 151 | 152 | 153 | 1824 | 2211 | 2598 |
| | | | arabinofuranosidase 2 | degrading | furanosidase¹² | | | | | | | | |
| Aurpu2p4_001825 | AURPU_3_00390 | Probable | arabinogalactanase | hemicellulose- | arabino- | GH53 | | 154 | 155 | 156 | 1825 | 2212 | 2599 |
| | | arabinogalactan | GH53 | degrading | galactanase | | | | | | | | |
| | | endo-1,4-beta- | | | | | | | | | | | |
| | | galactosidase A | | | | | | | | | | | |
| Aurpu2p4_001892 | AURPU_3_00112 | Probable | Probable glycosidase | carbohydrate- | glycosidase | GH16 | | 157 | 158 | 159 | 1826 | 2213 | 2600 |
| | | glycosidase CRH1 | crf1 | modifying | | | | | | | | | |
| Aurpu2p4_001986 | Aurpu2p4_001986 | unknown | alpha-rhamnosidase | hemicellulose- | alpha- | GH78 | | 160 | 161 | 162 | 1827 | 2214 | 2601 |
| | | | GH78 | degrading | rhamnosidase | | | | | | | | |
| Aurpu2p4_002000 | | Aspergillopepsin-2 | Aspergillopepsin-2 | protein | protease | | | 163 | 164 | 165 | 1828 | 2215 | 2602 |
| | | | | hydrolysis | | | | | | | | | |
| Aurpu2p4_002005 | | exo-arabinanase | exo-arabinanase | hemicellulose- | exo-arabinanase | GH93 | | 166 | 167 | 168 | 1829 | 2216 | 2603 |
| | | | GH93 | degrading | | | | | | | | | |
| Aurpu2p4_002047 | AURPU_3_00027 | xylanase | xylanase GH11 | hemicellulose- | xylanase | GH11 | | 169 | 170 | 171 | 1830 | 2217 | 2604 |
| | | | | degrading | | | | | | | | | |
| Aurpu2p4_002086 | | Carboxypeptidase S | Carboxypeptidase S | protein | protease | | | 172 | 173 | 174 | 1831 | 2218 | 2605 |
| | | | | hydrolysis | | | | | | | | | |
| Aurpu2p4_002155 | | unknown | unknown | | unknown | | | 175 | 176 | 177 | 1832 | 2219 | 2606 |
| Aurpu2p4_002166 | AURPU_3_00351 | unknown | unknown | | unknown | GH43 | | 178 | 179 | 180 | 1833 | 2220 | 2607 |
| Aurpu2p4_002167 | Aurpu2p4_002167 | Probable exo-1,4- | beta-xylosidase GH3 | hemicellulose | beta-xylosidase | GH3 | | 181 | 182 | 183 | 1834 | 2221 | 2608 |
| | | beta-xylosidase | | degrading | | | | | | | | | |
| | | bxlB | | | | | | | | | | | |
| Aurpu2p4_002190 | | Vacuolar protease A | Vacuolar protease A | protein | protease | | | 184 | 185 | 186 | 1835 | 2222 | 2609 |
| | | | | hydrolysis | | | | | | | | | |
| Aurpu2p4_002220 | Aurpu2p4_002220 | Aldose 1- | Aldose 1-epimerase | | aldose epimerase | | | 187 | 188 | 189 | 1836 | 2223 | 2610 |
| | | epimerase | | | | | | | | | | | |
| Aurpu2p4_002256 | AURPU_3_00237 | Periplasmic beta- | beta-glucosidase GH3 | cellulose- | beta-glucosidase | GH3 | | 190 | 191 | 192 | 1837 | 2224 | 2611 |
| | | glucosidase | | degrading | | | | | | | | | |
| Aurpu2p4_002267 | Aurpu2p4_002267 | Acetylxylan | Acetylxylan esterase 2 | hemicellulose- | acetylxylan | CE5 | | 193 | 194 | 195 | 1838 | 2225 | 2612 |
| | | esterase | | degrading | esterase | | | | | | | | |
| Aurpu2p4_002284 | Aurpu2p4_002284 | alpha-arabino- | alpha- | hemicellulose- | arabino- | GH54 | | 196 | 197 | 198 | 1839 | 2226 | 2613 |
| | | furanosidase | arabinofuranosidase | degrading | furanosidase | | | | | | | | |
| | | | GH54 | | | | | | | | | | |
| Aurpu2p4_002399 | | unknown | unknown | | unknown CBM18 | | CBM18 | 199 | 200 | 201 | 1840 | 2227 | 2614 |
| Aurpu2p4_002518 | | Probable aspartic- | Probable aspartic-type | protein | protease | | | 202 | 203 | 204 | 1841 | 2228 | 2615 |
| | | type | endopeptidase OPSB | hydrolysis | | | | | | | | | |
| | | endopeptidase | | | | | | | | | | | |
| | | opsB | | | | | | | | | | | |
| Aurpu2p4_002522 | Aurpu2p4_002522 | unknown | unknown | | unknown GH43 | GH43 | | 205 | 206 | 207 | 1842 | 2229 | 2616 |
| Aurpu2p4_002533 | Aurpu2p4_002533 | Laccase | Laccase-3 (Fragment) | lignin-degrading | laccase | | | 208 | 209 | 210 | 1843 | 2230 | 2617 |
| Aurpu2p4_002671 | AURPU_3_00176 | endo- | Endo- | pectin-degrading | Endo- | GH28 | | 211 | 212 | 213 | 1844 | 2231 | 2618 |
| | | polygalacturonase | polygalacturonase | | polygalacturonase | | | | | | | | |
| | | | GH28 | | | | | | | | | | |
| Aurpu2p4_002672 | AURPU_3_00239 | beta-glucosidase | avenacinase GH3 | | avenacinase | GH3 | | 214 | 215 | 216 | 1845 | 2232 | 2619 |
| Aurpu2p4_002750 | | unknown | unknown | | unknown CE16 | CE16 | | 217 | 218 | 219 | 1846 | 2233 | 2620 |
| Aurpu2p4_002860 | AURPU_3_00296 | unknown | invertase GH32 | | invertase GH32 | GH32 | | 220 | 221 | 222 | 1847 | 2234 | 2621 |
| Aurpu2p4_002907 | AURPU_3_00353 | unknown | unknown | cellulase - | unknown GH43¹³ | GH43 | | 223 | 224 | 225 | 1848 | 2235 | 2622 |
| | | | | enhacing | | | | | | | | | |
| Aurpu2p4_002940 | Aurpu2p4_002940 | Laccase-2 | Laccase-1 | lignin-degrading | laccase | | | 226 | 227 | 228 | 1849 | 2236 | 2623 |
| Aurpu2p4_002942 | | Aspergillopepsin-F | Aspartic protease | protein | protease | | | 229 | 230 | 231 | 1850 | 2237 | 2624 |
| | | | pepB | hydrolysis | | | | | | | | | |
| Aurpu2p4_002955 | | Putative | Putative | protein | protease | | | 232 | 233 | 234 | 1851 | 2238 | 2625 |
| | | metallocarboxypeptidase | metallocarboxypeptidase | hydrolysis | | | | | | | | | |
| | | MCYG_04493 | ECM14 | | | | | | | | | | |
| Aurpu2p4_002987 | | unknown | unknown | | unknown GH79 | GH79 | | 235 | 236 | 237 | 1852 | 2239 | 2626 |
| Aurpu2p4_003029 | Aurpu2p4_003029 | Pectinesterase | pectin methylesterase | pectin-degrading | pectinesterase | CE8 | | 238 | 239 | 240 | 1853 | 2240 | 2627 |
| | | | CE8 | | | | | | | | | | |
| Aurpu2p4_003104 | | Probable glucan | Probable glucan 1,3- | cellulose- | glucan 1,3-beta- | GH5 | | 241 | 242 | 243 | 1854 | 2241 | 2628 |
| | | 1,3-beta- | beta-glucosidase A | degrading | glucosidase | | | | | | | | |
| | | glucosidase D | | | | | | | | | | | |
| Aurpu2p4_003184 | AURPU_3_00468 | Cellulase 1 | Cellulase 1 | cellulose- | cellulase | GH9 | | 244 | 245 | 246 | 1855 | 2242 | 2629 |
| | | | | degrading | | | | | | | | | |
| Aurpu2p4_003313 | Aurpu2p4_003313 | Tannase | Tannase | Tannin- | tannase | | | 247 | 248 | 249 | 1856 | 2243 | 2630 |
| | | | | degrading | | | | | | | | | |
| Aurpu2p4_003364 | Aurpu2p4_003364 | unknown | unknown | | unknown CE1 | CE1 | | 250 | 251 | 252 | 1857 | 2244 | 2631 |
| Aurpu2p4_003555 | | Lipase B | Lipase B | Lipid-degrading | lipase | | | 253 | 254 | 255 | 1858 | 2245 | 2632 |
| Aurpu2p4_003594 | AURPU_3_00167 | endo- | endo- | pectin-degrading | endo- | GH28 | | 256 | 257 | 258 | 1859 | 2246 | 2633 |
| | | polygalacturonase | polygalacturonase | | polygalacturonase | | | | | | | | |
| | | | GH28 | | | | | | | | | | |
| Aurpu2p4_003606 | Aurpu2p4_003606 | Manganese | Manganese | lignin-degrading | manganese | | | 259 | 260 | 261 | 1860 | 2247 | 2634 |
| | | peroxidase 3 | peroxidase 1 | | peroxidase | | | | | | | | |
| Aurpu2p4_003607 | Aurpu2p4_003607 | Versatile | Ligninase LG5 | lignin-degrading | versatile | | | 262 | 263 | 264 | 1861 | 2248 | 2635 |
| | | peroxidase VPL1 | | | peroxidase | | | | | | | | |
| Aurpu2p4_003685 | | unknown | unknown | | unknown | | | 265 | 266 | 267 | 1862 | 2249 | 2636 |
| Aurpu2p4_003727 | | Putative | Putative | protein | protease | | | 268 | 269 | 270 | 1863 | 2250 | 2637 |
| | | aspergillopepsin A- | aspergillopepsin A-like | hydrolysis | | | | | | | | | |
| | | like aspartic | aspartic | | | | | | | | | | |
| | | endopeptidase | endopeptidase | | | | | | | | | | |
| | | AFUA_2G15950 | AFUA_2G15950 | | | | | | | | | | |
| Aurpu2p4_003747 | AURPU_3_00306 | beta-galactosidase | Beta-galactosidase | hemicellulose- | beta-galactosidase | GH35 | | 271 | 272 | 273 | 1864 | 2251 | 2638 |
| | | | GH35 | degrading | | | | | | | | | |
| Aurpu2p4_003884 | AURPU_3_00389 | arabinogalactanase | arabinogalactanase | hemicellulose- | arabino- | GH53 | | 274 | 275 | 276 | 1865 | 2252 | 2639 |
| | | | GH53 | degrading | galactanase | | | | | | | | |
| Aurpu2p4_003888 | Aurpu2p4_003888 | Cutinase 3 | Cutinase 2 | cutin-degrading | cutinase | CE5 | | 277 | 278 | 279 | 1866 | 2253 | 2640 |
| Aurpu2p4_003893 | Aurpu2p4_003893 | Expansin family | unknown | | expansin | | | 280 | 281 | 282 | 1867 | 2254 | 2641 |
| | | protein | | | | | | | | | | | |
| Aurpu2p4_003941 | Aurpu2p4_003941 | unknown | unknown | | unknown CE2 | CE2 | | 283 | 284 | 285 | 1868 | 2255 | 2642 |
| Aurpu2p4_004107 | | Carboxypeptidase | Carboxypeptidase S1 | protein | protease | | | 286 | 287 | 288 | 1869 | 2256 | 2643 |
| | | S1 homolog A | homolog A | hydrolysis | | | | | | | | | |
| Aurpu2p4_004115 | AURPU_3_00326 | endo-1,5-alpha- | endo-1,5-alpha- | hemicellulose- | endo-1,5-alpha- | GH43 | | 289 | 290 | 291 | 1870 | 2257 | 2644 |
| | | arabinanase | arabinanase GH43 | degrading | arabinanase | | | | | | | | |
| Aurpu2p4_004128 | AURPU_3_00242 | unknown | xylanase GH30 | hemicellulose | xylanase | GH30 | | 292 | 293 | 294 | 1871 | 2258 | 2645 |
| | | | | degrading | | | | | | | | | |
| Aurpu2p4_004186 | Aurpu2p4_004186 | unknown | unknown | | unknown CE5 | CE5 | | 295 | 296 | 297 | 1872 | 2259 | 2646 |
| Aurpu2p4_004265 | AURPU_3_00191 | beta-glucosidase | beta-glucosidase GH3 | cellulose- | beta-glucosidase | GH3 | | 298 | 299 | 300 | 1873 | 2260 | 2647 |
| | | | | degrading | | | | | | | | | |
| Aurpu2p4_004286 | | Glucan 1,3-beta- | Glucan 1,3-beta- | glucan- | glucan 1,3-beta- | | | 301 | 302 | 303 | 1874 | 2261 | 2648 |
| | | glucosidase | glucosidase I/II | degrading | glucosidase | | | | | | | | |
| Aurpu2p4_004297 | | GLEYA adhesin | possible adhesin | | adhesin | GH16 | | 304 | 305 | 306 | 1875 | 2262 | 2649 |
| | | domain | | | | | | | | | | | |
| Aurpu2p4_004347 | | Probable aspartic- | Probable aspartic-type | protein | protease | | | 307 | 308 | 309 | 1876 | 2263 | 2650 |
| | | type | endopeptidase opsB | hydrolysis | | | | | | | | | |
| | | endopeptidase | | | | | | | | | | | |
| | | opsB | | | | | | | | | | | |
| Aurpu2p4_004477 | | Glucan 1,3-beta- | exo-1,3-beta- | cellulose- | exo-1,3-beta- | GH55 | | 310 | 311 | 312 | 1877 | 2264 | 2651 |
| | | glucosidase | glucanase GH55 | degrading | glucanase | | | | | | | | |
| Aurpu2p4_004489 | | Carboxypeptidase | Carboxypeptidase | protein | protease | | | 313 | 314 | 315 | 1878 | 2265 | 2652 |
| | | cpdS | cpdS | hydrolysis | | | | | | | | | |
| Aurpu2p4_004524 | Aurpu2p4_004524 | Acetylxylan | unknown | hemicellulose- | acetylxylan | CE5 | | 316 | 317 | 318 | 1879 | 2266 | 2653 |
| | | esterase 2 | | degrading | esterase | | | | | | | | |
| Aurpu2p4_004527 | | Probable endo- | Probable endo-1,3(4)- | cellulose- | endo-1,3(4)-beta- | GH16 | | 319 | 320 | 321 | 1880 | 2267 | 2654 |
| | | 1,3(4)-beta- | beta-glucanase | degrading | glucanase | | | | | | | | |
| | | glucanase | NFIA_089530 | | | | | | | | | | |
| | | AFUB_029980 | | | | | | | | | | | |
| Aurpu2p4_004550 | AURPU_3_00396 | cellulase- | polysaccharide | cellulose- | polysaccharide | GH61 | | 322 | 323 | 324 | 1881 | 2268 | 2655 |
| | | enhancing protein | monooxygenase | degrading | monooxygenase | | | | | | | | |
| Aurpu2p4_004694 | Aurpu2p4_004694 | unknown | unknown | | unknown CE16 | CE16 | | 325 | 326 | 327 | 1882 | 2269 | 2656 |
| Aurpu2p4_004762 | | unknown | unknown | | unknown | | | 328 | 329 | 330 | 1883 | 2270 | 2657 |
| Aurpu2p4_004776 | Aurpu2p4_004776 | Expansin-like | Expansin-yoaJ | cellulose- | expansin | | | 331 | 332 | 333 | 1884 | 2271 | 2658 |
| | | protein 5 | | enhancing | | | | | | | | | |
| Aurpu2p4_004801 | | Carboxypeptidase Y | Carboxypeptidase S1 | protein | protease | | | 334 | 335 | 336 | 1885 | 2272 | 2659 |
| | | | homolog B | hydrolysis | | | | | | | | | |
| Aurpu2p4_004899 | AURPU_3_00009 | beta-glucosidase | beta-glucosidase GH1 | cellulose- | beta-glucosidase | GH1 | | 337 | 338 | 339 | 1886 | 2273 | 2660 |
| | | | | degrading | | | | | | | | | |
| Aurpu2p4_004916 | Aurpu2p4_004916 | GLEYA adhesin | possible adhesin | | adhesin | | | 340 | 341 | 342 | 1887 | 2274 | 2661 |
| | | domain | | | | | | | | | | | |
| Aurpu2p4_004926 | AURPU_3_00324 | Probable arabinan | endo-1,5-alpha- | hemicellulose- | endo-1,5-alpha- | GH43 | | 343 | 344 | 345 | 1888 | 2275 | 2662 |
| | | endo-1,5-alpha-L- | arabinanase GH43 | degrading | arabinanase | | | | | | | | |
| | | arabinosidase B | | | | | | | | | | | |
| Aurpu2p4_004937 | Aurpu2p4_004937 | Probable | rhamnogalacturonan | pectin-degrading | rhamno- | PL4 | | 346 | 347 | 348 | 1889 | 2276 | 2663 |
| | | rhamnogalacturonate | lyase PL4 | | galacturonase | | | | | | | | |
| | | lyase B | | | | | | | | | | | |
| Aurpu2p4_004986 | Aurpu2p4_004986 | Probable glucan | Probable glucan 1,3- | cellulose- | glucan 1,3-beta- | GH5 | | 349 | 350 | 351 | 1890 | 2277 | 2664 |
| | | 1,3-beta- | beta-glucosidase A | degrading | glucosidase A | | | | | | | | |
| | | glucosidase D | | | | | | | | | | | |
| Aurpu2p4_005056 | AURPU_3_00397 | cellulase- | polysaccharide | cellulose- | polysaccharide | GH61 | | 352 | 353 | 354 | 1891 | 2278 | 2665 |
| | | enhancing protein | monooxygenase | degrading | monooxygenase | | | | | | | | |
| Aurpu2p4_005097 | AURPU_3_00100 | Probable | Probable glycosidase | Carbohydrate- | glycosidase | GH16 | | 355 | 356 | 357 | 1892 | 2279 | 2666 |
| | | glycosidase crf1 | crf1 | modifying | | | | | | | | | |
| Aurpu2p4_005194 | AURPU_3_00166 | endo- | endo- | pectin-degrading | endo- | GH28 | | 358 | 359 | 360 | 1893 | 2280 | 2667 |
| | | polygalacturonase | polygalacturonase | | polygalacturonase | | | | | | | | |
| | | | GH28 | | | | | | | | | | |
| Aurpu2p4_005236 | AURPU_3_00290 | exo-inulinase | exo-inulinase | | exo-inulinase | GH32 | | 361 | 362 | 363 | 1894 | 2281 | 2668 |
| | | | GH32/GH43 | | GH32/GH43 | | | | | | | | |
| Aurpu2p4_005278 | Aurpu2p4_005278 | Bifunctional | chitin deacetylase CE4 | chitin-degrading | chitin deacetylase | CE4 | | 364 | 365 | 366 | 1895 | 2282 | 2669 |
| | | xylanase/deacetylase | | | CE4 | | | | | | | | |
| Aurpu2p4_005399 | AURPU_3_00295 | unknown | unknown | | unknown GH43 | GH43 | | 367 | 368 | 369 | 1896 | 2283 | 2670 |
| Aurpu2p4_005401 | Aurpu2p4_005401 | alpha- | alpha- | hemicellulose- | arabinofuranosidase | GH51 | | 370 | 371 | 372 | 1897 | 2284 | 2671 |
| | | arabinofuranosidase | arabinofuranosidase | degrading | | | | | | | | | |
| | | | GH51 | | | | | | | | | | |
| Aurpu2p4_005519 | AURPU_3_00354 | unknown | unknown | Hemicellulose- | unknown GH43 | GH43 | | 373 | 374 | 375 | 1898 | 2285 | 2672 |
| | | | | modifying | | | | | | | | | |
| Aurpu2p4_005580 | Aurpu2p4_005580 | Probable glucan | Probable glucan 1,3- | glucan- | glucan 1,3-beta- | GH5 | | 376 | 377 | 378 | 1899 | 2286 | 2673 |
| | | 1,3-beta- | beta-glucosidase A | degrading | glucosidase | | | | | | | | |
| | | glucosidase A | | | | | | | | | | | |
| Aurpu2p4_005825 | Aurpu2p4_005825 | Probable endo- | mixed-link glucanase | Glucan- | mixed-link | GH16 | | 379 | 380 | 381 | 1900 | 2287 | 2674 |
| | | 1,3(4)-beta- | GH16 | degrading | glucanase | | | | | | | | |
| | | glucanase | | | | | | | | | | | |
| | | An02g00850 | | | | | | | | | | | |
| Aurpu2p4_005865 | | Probable beta- | Probable glycosidase | Carbohydrate- | glycosidase | GH16 | | 382 | 383 | 384 | 1901 | 2288 | 2675 |
| | | fructosidase | crf1 | modfying | | | | | | | | | |
| Aurpu2p4_005914 | AURPU_3_00184 | Probable exo-1,4- | beta-xylosidase GH3 | hemicellulose- | beta-xylosidase¹⁴ | GH3 | | 385 | 386 | 387 | 1902 | 2289 | 2676 |
| | | beta-xylosidase | | degrading | | | | | | | | | |
| | | bxlB | | | | | | | | | | | |
| Aurpu2p4_005929 | Aurpu2p4_005929 | Uncharacterized | Uncharacterized | | oxidoreductase | | | 388 | 389 | 390 | 1903 | 2290 | 2677 |
| | | oxidoreductase | oxidoreductase | | | | | | | | | | |
| | | C521.03 | C521.03 | | | | | | | | | | |
| Aurpu2p4_006113 | AURPU_3_00395 | cellulase- | polysaccharide | Cellulose- | polysaccharide | GH61 | CBM1 | 391 | 392 | 393 | 1904 | 2291 | 2678 |
| | | enhancing | monooxygenase | degrading | monooxygenase | | | | | | | | |
| | | protein | | | | | | | | | | | |
| Aurpu2p4_006128 | AURPU_3_00058 | unknown | unknown | | unknown GH16 | GH16 | | 394 | 395 | 396 | 1905 | 2292 | 2679 |
| Aurpu2p4_006160 | AURPU_3_00320 | Xylosidase/arabinosidase | Xylosidase/arabinosidase | Hemicellulose- | Xylosidase/ | GH43 | | 397 | 398 | 399 | 1906 | 2293 | 2680 |
| | | | | modifying | arabinosidase | | | | | | | | |
| Aurpu2p4_006162 | | unknown | unknown | | unknown GH79 | GH79 | | 400 | 401 | 402 | 1907 | 2294 | 2681 |
| Aurpu2p4_006176 | | Probable alpha- | alpha-galactosidase | hemicellulose- | alpha- | GH27 | | 403 | 404 | 405 | 1908 | 2295 | 2682 |
| | | galactosidase A | GH27 | degrading | galactosidase | | | | | | | | |
| Aurpu2p4_006179 | | Lipase 2 | Lipase 1 | Lipid-degrading | lipase | | | 406 | 407 | 408 | 1909 | 2296 | 2683 |
| Aurpu2p4_006195 | | Carboxypeptidase | Carboxypeptidase S1 | protein | protease | | | 409 | 410 | 411 | 1910 | 2297 | 2684 |
| | | S1 homolog A | homolog A | hydrolysis | | | | | | | | | |
| Aurpu2p4_006206 | | unknown | unknown | | unknown CE1 | CE1 | | 412 | 413 | 414 | 1911 | 2298 | 2685 |
| Aurpu2p4_006207 | Aurpu2p4_006207 | GLEYA adhesin | possible adhesin | | adhesin | | | 415 | 416 | 417 | 1912 | 2299 | 2686 |
| | | domain | | | | | | | | | | | |
| Aurpu2p4_006222 | Aurpu2p4_006222 | Tannase | Tannase | Tannin- | tannase | | | 418 | 419 | 420 | 1913 | 2300 | 2687 |
| | | | | degrading | | | | | | | | | |
| Aurpu2p4_006237 | Aurpu2p4_006237 | Probable pectate | pectate lyase PL3 | pectin-degrading | pectate lyase | PL3 | | 421 | 422 | 423 | 1914 | 2301 | 2688 |
| | | lyase F | | | | | | | | | | | |
| Aurpu2p4_006246 | AURPU_3_00192 | beta-glucosidase | beta-glucosidase GH3 | cellulose- | beta-glucosidase | GH3 | | 424 | 425 | 426 | 1915 | 2302 | 2689 |
| | | | | degrading | | | | | | | | | |
| Aurpu2p4_006312 | AURPU_3_00032 | unknown | xyloglucanase GH12 | hemicellulose- | xyloglucanase | GH12 | | 427 | 428 | 429 | 1916 | 2303 | 2690 |
| | | | | degrading | | | | | | | | | |
| Aurpu2p4_006313 | Aurpu2p4_006313 | Probable | pectin methylesterase | pectin-degrading | pectinesterase | CE8 | | 430 | 431 | 432 | 1917 | 2304 | 2691 |
| | | pectinesterase A | CE8 | | | | | | | | | | |
| Aurpu2p4_006392 | AURPU_3_00331 | unknown | unknown | | unknown GH43 | GH43 | | 433 | 434 | 435 | 1918 | 2305 | 2692 |
| Aurpu2p4_006557 | | Glucan 1,3-beta- | Probable glucan 1,3- | cellulose- | glucan 1,3-beta- | GH5 | | 436 | 437 | 438 | 1919 | 2306 | 2693 |
| | | glucosidase 1 | beta-glucosidase A | degrading | glucosidase A | | | | | | | | |
| Aurpu2p4_006782 | Aurpu2p4_006782 | beta-glucosidase | beta-glucosidase | cellulose- | beta-glucosidase | GH3 | | 439 | 440 | 441 | 1920 | 2307 | 2694 |
| | | | GH3 | degrading | | | | | | | | | |
| Aurpu2p4_006900 | Aurpu2p4_006900 | GLEYA adhesin | possible adhesin | | adhesin | | | 442 | 443 | 444 | 1921 | 2308 | 2695 |
| | | domain | | | | | | | | | | | |
| Aurpu2p4_006933 | | Tripeptidyl- | Tripeptidyl-peptidase | protein | protease | | | 445 | 446 | 447 | 1922 | 2309 | 2696 |
| | | peptidase sed1 | SED1 | hydrolysis | | | | | | | | | |
| Aurpu2p4_007070 | Aurpu2p4_007070 | GLEYA adhesin | possible adhesin | | adhesin | | | 448 | 449 | 450 | 1923 | 2310 | 2697 |
| | | domain | | | | | | | | | | | |
| Aurpu2p4_007082 | AURPU_3_00013 | xylanase | xylanase GH10 | hemicellulose- | xylanase¹⁵ | GH10 | | 451 | 452 | 453 | 1924 | 2311 | 2698 |
| | | | | degrading | | | | | | | | | |
| Aurpu2p4_007093 | AURPU_3_00019 | xylanase | xylanase GH11 | hemicellulose- | xylanase¹⁶ | GH11 | | 454 | 455 | 456 | 1925 | 2312 | 2699 |
| | | | | degrading | | | | | | | | | |
| Aurpu2p4_007113 | | unknown | unknown PL22 | Pectin- | unknown PL22 | PL22 | | 457 | 458 | 459 | 1926 | 2313 | 2700 |
| | | | | degrading | | | | | | | | | |
| Aurpu2p4_007124 | | unknown | unknown | | unknown CBM1 | | CBM1 | 460 | 461 | 462 | 1927 | 2314 | 2701 |
| Aurpu2p4_007126 | AURPU_3_00356 | unknown | unknown | | unknown GH43 | GH43 | | 463 | 464 | 465 | 1928 | 2315 | 2702 |
| Aurpu2p4_007149 | Aurpu2p4_007149 | unknown | unknown | | unknown CBM1 | | CBM1 | 466 | 467 | 468 | 1929 | 2316 | 2703 |
| Aurpu2p4_007160 | | Putative lipase | Putative lipase | Lipid-degrading | lipase | | | 469 | 470 | 471 | 1930 | 2317 | 2704 |
| | | ATG15-1 | ATG15-1 | | | | | | | | | | |
| Aurpu2p4_007177 | AURPU_3_00035 | Beta-galactosidase | Beta-galactosidase | hemicellulose- | Beta-galactosidase | GH42 | | 472 | 473 | 474 | 1931 | 2318 | 2705 |
| | | | | degrading | | | | | | | | | |
| Aurpu2p4_007190 | Aurpu2p4_007190 | Endoglucanase B | Endoglucanase B | cellulose- | Endoglucanase B | GH5 | | 475 | 476 | 477 | 1932 | 2319 | 2706 |
| | | | | degrading | | | | | | | | | |
| Aurpu2p4_007196 | Aurpu2p4_007196 | Probable | Probable | pectin-degrading | pectinesterase | CE8 | | 478 | 479 | 480 | 1933 | 2320 | 2707 |
| | | pectinesterase/pectinesterase | pectinesterase A | | | | | | | | | | |
| | | inhibitor 41 | | | | | | | | | | | |
| Aurpu2p4_007206 | AURPU_3_00177 | exo- | exo-polygalacturonase | pectin-degrading | exo- | GH28 | | 481 | 482 | 483 | 1934 | 2321 | 2708 |
| | | polygalacturonase | GH28 | | polygalacturonase | | | | | | | | |
| Aurpu2p4_007220 | | Chitinase 1 | Chitinase 3 | chitin-degrading | chitinase | GH18 | | 484 | 485 | 486 | 1935 | 2322 | 2709 |
| Aurpu2p4_007270 | AURPU_3_00241 | beta-glucosidase | avenacinase GH3 | | avenacinase | GH3 | | 487 | 488 | 489 | 1936 | 2323 | 2710 |
| Aurpu2p4_007272 | | Carboxypeptidase | Carboxypeptidase | protein | protease | | | 490 | 491 | 492 | 1937 | 2324 | 2711 |
| | | cpdS | cpdS | hydrolysis | | | | | | | | | |
| Aurpu2p4_007292 | | Putative | Putative NADPH- | | oxidoreductase | | | 493 | 494 | 495 | 1938 | 2325 | 2712 |
| | | uncharacterized | dependent | | | | | | | | | | |
| | | oxidoreductase | methylglyoxal | | | | | | | | | | |
| | | YGL157W | reductase GRP2 | | | | | | | | | | |
| Aurpu2p4_007342 | | unknown | unknown | | unknown CE16 | CE16 | | 496 | 497 | 498 | 1939 | 2326 | 2713 |
| Aurpu2p4_007356 | AURPU_3_00178 | exo- | exo-polygalacturonase | pectin-degrading | exo- | GH28 | | 499 | 500 | 501 | 1940 | 2327 | 2714 |
| | | polygalacturonase | GH28 | | polygalacturonase | | | | | | | | |
| Aurpu2p4_007383 | Aurpu2p4_007383 | unknown | unknown CE1 | hemicellulose- | xylan alpha-1,2- | GH115 | | 502 | 503 | 504 | 1941 | 2328 | 2715 |
| | | | | degrading | glucuronidase | | | | | | | | |
| Aurpu2p4_007404 | | Probable glucan | Probable glucan 1,3- | cellulose- | glucan 1,3-beta- | GH5 | | 505 | 506 | 507 | 1942 | 2329 | 2716 |
| | | 1,3-beta- | beta-glucosidase A | degrading | glucosidase | | | | | | | | |
| | | glucosidase A | | | | | | | | | | | |
| Aurpu2p4_007424 | Aurpu2p4_007424 | unknown | galactanase GH5 | hemicellulose- | galactanase | GH5 | | 508 | 509 | 510 | 1943 | 2330 | 2717 |
| | | | | degrading | | | | | | | | | |
| Aurpu2p4_007428 | | unknown | exo-arabinanase | hemicellulose- | exo-arabinanase | GH93 | | 511 | 512 | 513 | 1944 | 2331 | 2718 |
| | | | GH93 | degrading | | | | | | | | | |
| Aurpu2p4_007429 | AURPU_3_00314 | Alpha-N- | Alpha-N- | hemicellulose- | arabino- | GH43 | | 514 | 515 | 516 | 1945 | 2332 | 2719 |
| | | arabinofuranosidase 2 | arabinofuranosidase 2 | degrading | furanosidase | | | | | | | | |
| Aurpu2p4_007455 | Aurpu2p4_007455 | Probable feruloyl | feruloyl esterase CE1 | hemicellulose- | feruloyl esterase | | | 517 | 518 | 519 | 1946 | 2333 | 2720 |
| | | esterase B | | degrading | | | | | | | | | |
| Aurpu2p4_007488 | AURPU_3_00028 | unknown | Probable xyloglucan- | Hemicellulose- | xyloglucan- | GH12 | | 520 | 521 | 522 | 1947 | 2334 | 2721 |
| | | | specific endo-beta- | degrading | specific endo- | | | | | | | | |
| | | | 1,4-glucanase A | | beta-1,4- | | | | | | | | |
| | | | | | glucanase | | | | | | | | |
| Aurpu2p4_007493 | | Subtilisin-like | Alkaline protease 2 | protein | protease | | | 523 | 524 | 525 | 1948 | 2335 | 2722 |
| | | proteinase Spm1 | | hydrolysis | | | | | | | | | |
| Aurpu2p4_007511 | AURPU_3_00315 | Alpha-N- | Alpha-N- | hemicellulose- | arabino- | GH43 | | 526 | 527 | 528 | 1949 | 2336 | 2723 |
| | | arabinofuranosidase 2 | arabinofuranosidase 2 | degrading | furanosidase | | | | | | | | |
| Aurpu2p4_007612 | Aurpu2p4_007612 | Cutinase | cutinase CE5 | cutin-degrading | cutinase | CE5 | | 529 | 530 | 531 | 1950 | 2337 | 2724 |
| Aurpu2p4_007614 | Aurpu2p4_007614 | Probable pectin | pectin lyase PL1 | pectin-degrading | pectin lyase | PL1 | | 532 | 533 | 534 | 1951 | 2338 | 2725 |
| | | lyase A | | | | | | | | | | | |
| Aurpu2p4_007621 | AURPU_3_00155 | endo- | Endo- | pectin-degrading | Endo- | GH28 | | 535 | 536 | 537 | 1952 | 2339 | 2726 |
| | | polygalacturonase | polygalacturonase | | polygalacturonase | | | | | | | | |
| | | | GH28 | | | | | | | | | | |
| Aurpu2p4_007662 | | Aspergillopepsin-2 | Aspergillopepsin-2 | protein | protease | | | 538 | 539 | 540 | 1953 | 2340 | 2727 |
| | | | | hydrolysis | | | | | | | | | |
| Aurpu2p4_007707 | AURPU_3_00394 | cellulase- | polysaccharide | cellulose- | polysaccharide | GH61 | | 541 | 542 | 543 | 1954 | 2341 | 2728 |
| | | enhancing protein | monooxygenase | degrading | monooxygenase | | | | | | | | |
| Aurpu2p4_007805 | Aurpu2p4_007805 | Laccase-3 | Laccase | lignin-degrading | laccase | | | 544 | 545 | 546 | 1955 | 2342 | 2729 |
| | | (Fragment) | | | | | | | | | | | |
| Aurpu2p4_007919 | Aurpu2p4_007919 | unknown | unknown | | unknown CE5 | CE5 | | 547 | 548 | 549 | 1956 | 2343 | 2730 |
| Aurpu2p4_008001 | AURPU_3_00054 | unknown | unknown | | unknown GH16 | GH16 | | 550 | 551 | 552 | 1957 | 2344 | 2731 |
| Aurpu2p4_008021 | Aurpu2p4_008021 | Mannan endo-1,4- | Mannan endo-1,4- | hemicellulose- | Mannan endo-1,4- | GH5 | | 553 | 554 | 555 | 1958 | 2345 | 2732 |
| | | beta-mannosidase 3 | beta-mannosidase 4 | degrading | beta-mannosidase | | | | | | | | |
| Aurpu2p4_008140 | Aurpu2p4_008140 | Probable feruloyl | feruloyl esterase CE1 | hemicellulose- | feruloyl esterase | | | 556 | 557 | 558 | 1959 | 2346 | 2733 |
| | | esterase B-2 | | modifying | | | | | | | | | |
| Aurpu2p4_008212 | AURPU_3_00357 | Putative | Putative | cellulose- | endoglucanase | GH45 | | 559 | 560 | 561 | 1960 | 2347 | 2734 |
| | | endoglucanase | endoglucanase type K | degrading | | | | | | | | | |
| | | type K | | | | | | | | | | | |
| Aurpu2p4_008231 | AURPU_3_00157 | Endo- | Probable endo- | pectin-degrading | endo- | CE8 | | 562 | 563 | 564 | 1961 | 2348 | 2735 |
| | | xylogalacturonan | xylogalacturonan | | xylogalacturonan | | | | | | | | |
| | | hydrolase A | hydrolase A | | hydrolase | | | | | | | | |
| Aurpu2p4_008239 | AURPU_3_00323 | unknown | exo-1,3-beta- | hemicellulose- | exo-1,3-beta- | GH43 | CBM35 | 565 | 566 | 567 | 1962 | 2349 | 2736 |
| | | | galactanase GH43 | degrading | galactanase | | | | | | | | |
| Aurpu2p4_008212 | AURPU_3_00357 | Putative | Putative | cellulose- | endoglucanase | GH45 | | 559 | 560 | 561 | 1960 | 2347 | 2734 |
| | | endoglucanase | endoglucanase type K | degrading | | | | | | | | | |
| | | type K | | | | | | | | | | | |
| Aurpu2p4_008231 | AURPU_3_00157 | Endo- | Probable endo- | pectin-degrading | endo- | CE8 | | 562 | 563 | 564 | 1961 | 2348 | 2735 |
| | | xylogalacturonan | xylogalacturonan | | xylogalacturonan | | | | | | | | |
| | | hydrolase A | hydrolase A | | hydrolase | | | | | | | | |
| Aurpu2p4_008239 | AURPU_3_00323 | unknown | exo-1,3-beta- | hemicellulose- | exo-1,3-beta- | GH43 | CBM35 | 565 | 566 | 567 | 1962 | 2349 | 2736 |
| | | | galactanase GH43 | degrading | galactanase | | | | | | | | |
| Aurpu2p4_008255 | AURPU_3_00064 | Beta-glucanase | unknown | | unknown GH16 | GH16 | | 568 | 569 | 570 | 1963 | 2350 | 2737 |
| Aurpu2p4_008271 | | Putative lipase | Putative lipase | lipid-degrading | lipase | | | 571 | 572 | 573 | 1964 | 2351 | 2738 |
| | | ATG15-1 | ATG15-1 | | | | | | | | | | |
| Aurpu2p4_008282 | | Probable | Probable tripeptidyl- | protein | protease | | | 574 | 575 | 576 | 1965 | 2352 | 2739 |
| | | tripeptidyl- | peptidase SED2 | hydrolysis | | | | | | | | | |
| | | peptidase SED2 | | | | | | | | | | | |
| Aurpu2p4_008385 | Aurpu2p4_008385 | Liver | Carboxylesterase 5A | | carboxylesterase | CE10 | | 577 | 578 | 579 | 1966 | 2353 | 2740 |
| | | carboxylesterase | | | | | | | | | | | |
| Aurpu2p4_008412 | AURPU_3_00305 | Probable beta- | Beta-galactosidase | hemicellulose- | Beta-galactosidase | GH35 | | 580 | 581 | 582 | 1967 | 2354 | 2741 |
| | | galactosidase C | GH35 | degrading | | | | | | | | | |
| Aurpu2p4_008485 | AURPU_3_00101 | Probable endo- | mixed-link glucanase | Glucan- | mixed-link | GH16 | | 583 | 584 | 585 | 1968 | 2355 | 2742 |
| | | 1,3(4)-beta- | GH16 | degrading | glucanase | | | | | | | | |
| | | glucanase | | | | | | | | | | | |
| | | AFUB_029980 | | | | | | | | | | | |
| Aurpu2p4_008495 | Aurpu2p4_008495 | Unknown-Esterase | unknown | | unknown CE12 | CE12 | | 586 | 587 | 588 | 1969 | 2356 | 2743 |
| Aurpu2p4_008503 | Aurpu2p4_008503 | unknown | probable beta- | cellulase- | beta- | GH79 | | 589 | 590 | 591 | 1970 | 2357 | 2744 |
| | | | glucuronidase GH79 | enhacing | glucuronidase | | | | | | | | |
| Aurpu2p4_008585 | Aurpu2p4_008585 | Cellobiose | Cellobiose | lignin-degrading | cellobiose | | CBM1 | 592 | 593 | 594 | 1971 | 2358 | 2745 |
| | | dehydrogenase | dehydrogenase | | dehydrogenase | | | | | | | | |
| Aurpu2p4_008692 | | Carboxypeptidase | Carboxypeptidase S1 | protein | protease | | | 595 | 596 | 597 | 1972 | 2359 | 2746 |
| | | S1 homolog B | homolog A | hydrolysis | | | | | | | | | |
| Aurpu2p4_008705 | Aurpu2p4_008705 | GLEYA adhesin | possible adhesin | | adhesin | | | 598 | 599 | 600 | 1973 | 2360 | 2747 |
| | | domain | | | | | | | | | | | |
| Aurpu2p4_008725 | AURPU_3_00334 | Arabinan endo- | endo-1,5-alpha- | hemicellulose- | endo-1,5-alpha- | GH43 | | 601 | 602 | 603 | 1974 | 2361 | 2748 |
| | | 1,5-alpha-L- | arabinanase GH43 | degrading | arabinanase | | | | | | | | |
| | | arabinosidase | | | | | | | | | | | |
| Aurpu2p4_008775 | Aurpu2p4_008775 | Putative | Putative galacturan | pectin-degrading | galacturan 1,4- | GH28 | | 604 | 605 | 606 | 1975 | 2362 | 2749 |
| | | galacturan 1,4- | 1,4-alpha- | | alpha- | | | | | | | | |
| | | alpha- | galacturonidase A | | galacturonidase | | | | | | | | |
| | | galacturonidase A | | | | | | | | | | | |
| Aurpu2p4_008807 | AURPU_3_00341 | unknown | unknown | Hemicellulose- | unknown GH43¹⁷ | GH43 | | 607 | 608 | 609 | 1976 | 2363 | 2750 |
| | | | | modfiying | | | | | | | | | |
| Aurpu2p4_008838 | | unknown | unknown | | unknown | | | 610 | 611 | 612 | 1977 | 2364 | 2751 |
| Aurpu2p4_008906 | AURPU_3_00175 | endo- | endo- | pectin-degrading | endo- | GH28 | | 613 | 614 | 615 | 1978 | 2365 | 2752 |
| | | polygalacturonase | polygalacturonase | | polygalacturonase | | | | | | | | |
| | | | GH28 | | | | | | | | | | |
| Aurpu2p4_008972 | Aurpu2p4_008972 | Probable pectin | pectin lyase PL1 | pectin-degrading | pectin lyase | PL1 | | 616 | 617 | 618 | 1979 | 2366 | 2753 |
| | | lyase A | | | | | | | | | | | |
| Aurpu2p4_008980 | AURPU_3_00147 | Probable beta- | beta-mannosidase | hemicellulose- | beta-mannosidase | GH2 | | 619 | 620 | 621 | 1980 | 2367 | 2754 |
| | | mannosidase A | GH2 | degrading | | | | | | | | | |
| Aurpu2p4_009032 | | Carboxypeptidase | Carboxypeptidase S1 | protein | protease | | | 622 | 623 | 624 | 1981 | 2368 | 2755 |
| | | S1 homolog B | homolog B | hydrolysis | | | | | | | | | |
| Aurpu2p4_009051 | Aurpu2p4_009051 | Cellobiose | Cellobiose | lignin-degrading | cellobiose | | | 625 | 626 | 627 | 1982 | 2369 | 2756 |
| | | dehydrogenase | dehydrogenase | | dehydrogenase | | | | | | | | |
| Aurpu2p4_009071 | AURPU_3_00110 | unknown | unknown | | unknown GH16 | GH16 | | 628 | 629 | 630 | 1983 | 2370 | 2757 |
| Aurpu2p4_009125 | | Cytosolic | Cytosolic | Phospholipid- | lipase | | | 631 | 632 | 633 | 1984 | 2371 | 2758 |
| | | phospholipase A2 | phospholipase A2 | modifying | | | | | | | | | |
| Aurpu2p4_009223 | Aurpu2p4_009223 | Alpha-fucosidase A | Alpha-fucosidase A | Carbohydrate- | Alpha-fucosidase | GH95 | | 634 | 635 | 636 | 1985 | 2372 | 2759 |
| | | | | modifying | | | | | | | | | |
| Aurpu2p4_009233 | AURPU_3_00016 | Endo-1,4-beta- | tomatinase GH10 | Tomatin | tomatinase | GH10 | | 637 | 638 | 639 | 1986 | 2373 | 2760 |
| | | xylanase C | | degrading | | | | | | | | | |
| Aurpu2p4_009300 | AURPU_3_00153 | Beta- | Beta-galactosidase | hemicellulose- | Beta-galactosidase | GH2 | | 640 | 641 | 642 | 1987 | 2374 | 2761 |
| | | glucuronidase | | degrading | | | | | | | | | |
| Aurpu2p4_009394 | Aurpu2p4_009394 | Probable feruloyl | feruloyl esterase CE1 | hemicellulose- | feruloyl esterase | CE1 | | 643 | 644 | 645 | 1988 | 2375 | 2762 |
| | | esterase B-1 | | modfiying | | | | | | | | | |
| Aurpu2p4_009401 | Aurpu2p4_009401 | unknown | unknown | | unknown CE5 | CE5 | | 646 | 647 | 648 | 1989 | 2376 | 2763 |
| Aurpu2p4_009472 | | unknown | Unsaturated | pectin-degrading | rhamno- | GH105 | | 649 | 650 | 651 | 1990 | 2377 | 2764 |
| | | | rhamnogalacturonyl | | galacturonyl | | | | | | | | |
| | | | hydrolase YteR | | hydrolase | | | | | | | | |
| Aurpu2p4_009494 | | Lipase B | Lipase B | Lipid-degrading | lipase | | | 652 | 653 | 654 | 1991 | 2378 | 2765 |
| Aurpu2p4_009495 | AURPU_3_00410 | arabinoxylan | arabinoxylan | hemicellulose- | arabino- | GH62 | | 655 | 656 | 657 | 1992 | 2379 | 2766 |
| | | arabino- | arabino-furanosidase | degrading | furanosidase¹⁸ | | | | | | | | |
| | | furanosidase | GH62 | | | | | | | | | | |
| Aurpu2p4_009496 | AURPU_3_00333 | Beta-xylosidase | Xylosidase/arabinosidase | Hemicellulose- | Xylosidase/ | GH43 | | 658 | 659 | 660 | 1993 | 2380 | 2767 |
| | | | | degrading | arabinosidase | | | | | | | | |
| Aurpu2p4_009563 | | Adhesin protein, | possible adhesin | | adhesin | | | 661 | 662 | 663 | 1994 | 2381 | 2768 |
| | | putative | | | | | | | | | | | |
| Aurpu2p4_009597 | Aurpu2p4_009597 | unknown | GDSL esterase/lipase | Lipid-degrading | lipase | CE16 | | 664 | 665 | 666 | 1995 | 2382 | 2769 |
| | | | EXL5 | | | | | | | | | | |
| Aurpu2p4_009603 | | Expansin family | unknown | Cellulase- | expansin | | | 667 | 668 | 669 | 1996 | 2383 | 2770 |
| | | protein | | enhancing | | | | | | | | | |
| Aurpu2p4_009751 | Aurpu2p4_009751 | xylanase | Xylanase GH10 | hemicellulose- | xylanase | GH10 | | 670 | 671 | 672 | 1997 | 2384 | 2771 |
| | | | | degrading | | | | | | | | | |
| Aurpu2p4_009762 | Aurpu2p4_009762 | endo- | endo- | pectin-degrading | rhamno- | GH28 | | 673 | 674 | 675 | 1998 | 2385 | 2772 |
| | | rhamnogalacturonase | rhamnogalacturonase | | galacturonase | | | | | | | | |
| | | | GH28 | | | | | | | | | | |
| Aurpu2p4_009775 | | Glucoamylase | Glucoamylase | starch- | Glucoamylase | | | 676 | 677 | 678 | 1999 | 2386 | 2773 |
| | | | | degrading | | | | | | | | | |
| Aurpu2p4_009782 | AURPU_3_00011 | Beta-glucosidase | beta-glucosidase GH1 | cellulose- | beta-glucosidase | GH1 | | 679 | 680 | 681 | 2000 | 2387 | 2774 |
| | | 26 | | degrading | | | | | | | | | |
| Aurpu2p4_009845 | AURPU_3_00402 | cellulase- | polysaccharide | cellulose- | polysaccharide | GH61 | CBM1 | 682 | 683 | 684 | 2001 | 2388 | 2775 |
| | | enhancing | monooxygenase | degrading | monooxygenase | | | | | | | | |
| | | protein | | | | | | | | | | | |
| Aurpu2p4_009863 | AURPU_3_00105 | unknown | unknown | | unknown GH16 | GH16 | | 685 | 686 | 687 | 2002 | 2389 | 2776 |
| Aurpu2p4_009889 | Aurpu2p4_009889 | Probable feruloyl | feruloyl esterase CE1 | hemicellulose- | feruloyl esterase | | | 688 | 689 | 690 | 2003 | 2390 | 2777 |
| | | esterase B-2 | | modifying | | | | | | | | | |
| Aurpu2p4_009890 | Aurpu2p4_009890 | Probable beta- | beta-glucosidase GH3 | cellulose- | beta-glucosidase | GH3 | | 691 | 692 | 693 | 2004 | 2391 | 2778 |
| | | glucosidase D | | degrading | | | | | | | | | |
| Aurpu2p4_009910 | AURPU_3_00219 | beta-glucosidase | beta-glucosidase GH3 | cellulose- | beta-glucosidase | GH3 | | 694 | 695 | 696 | 2005 | 2392 | 2779 |
| | | | | degrading | | | | | | | | | |
| Aurpu2p4_010058 | Aurpu2p4_010058 | Probable alpha- | alpha-galactosidase | hemicellulose- | alpha- | GH27 | CBM35 | 697 | 698 | 699 | 2006 | 2393 | 2780 |
| | | galactosidase D | GH27 | degrading | galactosidase | | | | | | | | |
| Aurpu2p4_010070 | Aurpu2p4_010070 | beta-glucosidase | beta-glucosidase GH3 | cellulose- | beta-glucosidase | GH3 | | 700 | 701 | 702 | 2007 | 2394 | 2781 |
| | | | | degrading | | | | | | | | | |
| Aurpu2p4_010087 | AURPU_3_00339 | Xylosidase/arabinosidase | Xylosidase/arabinosidase | hemicellulose- | Xylosidase/ | GH43 | | 703 | 704 | 705 | 2008 | 2395 | 2782 |
| | | | | modifying | arabinosidase | | | | | | | | |
| Aurpu2p4_010088 | Aurpu2p4_010088 | alpha- | alpha-glucuronidase | hemicellulose- | alpha- | GH67 | | 706 | 707 | 708 | 2009 | 2396 | 2783 |
| | | glucuronidase | GH67 | degrading | glucuronidase | | | | | | | | |
| Aurpu2p4_010125 | AURPU_3_00407 | cellulase- | polysaccharide | cellulose- | polysaccharide | GH61 | | 709 | 710 | 711 | 2010 | 2397 | 2784 |
| | | enhancing | monooxygenase | degrading | monooxygenase | | | | | | | | |
| | | protein | | | | | | | | | | | |
| Aurpu2p4_010146 | | Tripeptidyl- | Tripeptidyl-peptidase | Protein | protease | | | 712 | 713 | 714 | 2011 | 2398 | 2785 |
| | | peptidase sed4 | sed4 | hydrolysis | | | | | | | | | |
| Aurpu2p4_010192 | Aurpu2p4_010192 | Probable beta- | Beta-galactosidase | hemicellulose- | beta-galactosidase | GH35 | | 715 | 716 | 717 | 2012 | 2399 | 2786 |
| | | galactosidase B | GH35 | degrading | | | | | | | | | |
| Aurpu2p4_010196 | AURPU_3_00340 | Putative beta- | arabinoxylan | hemicellulose- | arabino- | GH43 | | 718 | 719 | 720 | 2013 | 2400 | 2787 |
| | | xylosidase | arabinofuranohydrolase | degrading | furanosidase | | | | | | | | |
| | | | GH43 | | | | | | | | | | |
| Aurpu2p4_010203 | Aurpu2p4_010203 | Rhamnogalacturonan | rhamnogalacturonan | pectin-degrading | rhamno- | CE12 | | 721 | 722 | 723 | 2014 | 2401 | 2788 |
| | | acetylesterase | acetylesterase CE12 | | galacturonan | | | | | | | | |
| | | | | | acetylesterase | | | | | | | | |
| Aurpu2p4_010291 | Aurpu2p4_010291 | Probable pectate | pectate lyase PL3 | pectin-degrading | pectate lyase | PL3 | | 724 | 725 | 726 | 2015 | 2402 | 2789 |
| | | lyase E | | | | | | | | | | | |
| Aurpu2p4_010300 | AURPU_3_00015 | beta-mannanase | beta-mannanase GH5 | Hemicellulose- | beta-mannanase | GH5 | CBM1 | 727 | 728 | 729 | 2016 | 2403 | 2790 |
| | | | | degrading | | | | | | | | | |
| Aurpu2p4_010313 | Aurpu2p4_010313 | Chitin deacetylase | Bifunctional | hemicellulose- | bifunctional | CE4 | CBM18 | 730 | 731 | 732 | 2017 | 2404 | 2791 |
| | | | xylanase/deacetylase | degrading | xylanase/ | | | | | | | | |
| | | | | | deacetylase | | | | | | | | |
| Aurpu2p4_010319 | Aurpu2p4_010319 | Laccase-2 | Laccase-2 | lignin-degrading | laccase | | | 733 | 734 | 735 | 2018 | 2405 | 2792 |
| Aurpu2p4_010388 | Aurpu2p4_010388 | Putative | exo-polygalacturonase | pectin-degrading | exo- | GH28 | | 736 | 737 | 738 | 2019 | 2406 | 2793 |
| | | galacturan 1,4- | GH28 | | polygalacturonase | | | | | | | | |
| | | alpha- | | | | | | | | | | | |
| | | galacturonidase C | | | | | | | | | | | |
| Aurpu2p4_010455 | AURPU_3_00312 | Probable glucan | exo-1,3-beta- | glucan- | exo-1,3-beta- | GH5 | | 739 | 740 | 741 | 2020 | 2407 | 2794 |
| | | 1,3-beta- | glucanase GH5 | degrading | glucanase | | | | | | | | |
| | | glucosidase A | | | | | | | | | | | |
| Aurpu2p4_010457 | AURPU_3_00408 | unknown | unknown | cellulose- | polysaccharide | GH61 | | 742 | 743 | 744 | 2021 | 2408 | 2795 |
| | | | | degrading | monooxygenase | | | | | | | | |
| Aurpu2p4_010464 | Aurpu2p4_010464 | Rhamnogalacturonate | Rhamnogalacturonate | pectin-degrading | rhamno- | PL4 | | 745 | 746 | 747 | 2022 | 2409 | 2796 |
| | | lyase | lyase | | galacturonase | | | | | | | | |
| Aurpu2p4_010466 | Aurpu2p4_010466 | Acetylxylan | Acetylxylan esterase 2 | hemicellulose- | acetylxylan | CE5 | | 748 | 749 | 750 | 2023 | 2410 | 2797 |
| | | esterase 2 | CE5 | degrading | esterase | | | | | | | | |
| Aurpu2p4_010484 | | Leucine | Aminopeptidase Y | Protein | protease | | | 751 | 752 | 753 | 2024 | 2411 | 2798 |
| | | aminopeptidase 2 | | hydrolysis | | | | | | | | | |
| Aurpu2p4_010534 | Aurpu2p4_010534 | Probable pectate | pectate lyase PL1 | pectin-degrading | pectate lyase | PL1 | | 754 | 755 | 756 | 2025 | 2412 | 2799 |
| | | lyase A | | | | | | | | | | | |
| Aurpu2p4_010571 | AURPU_3_00294 | unknown | unknown | | unknown GH43 | GH43 | | 757 | 758 | 759 | 2026 | 2413 | 2800 |
| Aurpu2p4_010592 | | Alkaline proteinase | Alkaline protease 1 | Protein | protease | | | 760 | 761 | 762 | 2027 | 2414 | 2801 |
| | | | | hydrolysis | | | | | | | | | |
| Aurpu2p4_010596 | Aurpu2p4_010596 | Probable pectate | pectate lyase PL1 | pectin-degrading | pectate lyase | PL1 | | 763 | 764 | 765 | 2028 | 2415 | 2802 |
| | lyase A | | | | | | | | | | | | |
| Aurpu2p4_010603 | Aurpu2p4_010603 | Probable glucan | Probable glucan 1,3- | cellulose- | glucan 1,3-beta- | GH5 | | 766 | 767 | 768 | 2029 | 2416 | 2803 |
| | | 1,3-beta- | beta-glucosidase A | degrading | glucosidase A | | | | | | | | |
| | | glucosidase A | | | | | | | | | | | |
| Aurpu2p4_010618 | | Probable | Tripeptidyl-peptidase | Protein | protease | | | 769 | 770 | 771 | 2030 | 2417 | 2804 |
| | | tripeptidyl- | SED2 | hydrolysis | | | | | | | | | |
| | | peptidase SED3 | | | | | | | | | | | |
| Aurpu2p4_010680 | | Carbohydrate- | unknown | | unknown | | | 772 | 773 | 774 | 2031 | 2418 | 2805 |
| | | binding | | | | | | | | | | | |
| | | cytochrome b562 | | | | | | | | | | | |
| | | (Fragment) | | | | | | | | | | | |
| Aurpu2p4_010683 | Aurpu2p4_010683 | Probable feruloyl | feruloyl esterase CE1 | hemicellulose- | feruloyl esterase | | | 775 | 776 | 777 | 2032 | 2419 | 2806 |
| | | esterase B-1 | | modifying | | | | | | | | | |
| Aurpu2p4_010701 | AURPU_3_00115 | unknown | unknown | | unknown GH16 | GH16 | | 778 | 779 | 780 | 2033 | 2420 | 2807 |
| Aurpu2p4_010884 | Aurpu2p4_010884 | unknown | unknown | | uncharacterized | | | 781 | 782 | 783 | 2034 | 2421 | 2808 |
| | | | | | lignocellulose- | | | | | | | | |
| | | | | | induced protein | | | | | | | | |
| Aurpu2p4_010891 | | Carboxypeptidase | Carboxypeptidase S1 | Protein | protease | | | 784 | 785 | 786 | 2035 | 2422 | 2809 |
| | | S1 homolog B | homolog A | hydrolysis | | | | | | | | | |
| Aurpu2p4_010898 | Aurpu2p4_010898 | hexosaminidase | hexosaminidase GH20 | chitin-degrading | hexosaminidase | GH20 | | 787 | 788 | 789 | 2036 | 2423 | 2810 |
| | | | | | GH20 | | | | | | | | |
| Aurpu2p4_010982 | AURPU_3_00409 | unknown | unknown | cellulose- | polysaccharide | GH61 | | 790 | 791 | 792 | 2037 | 2424 | 2811 |
| | | | | degrading | monooxygenase | | | | | | | | |
| Aurpu2p4_010999 | | Lysophospholipase 1 | Lysophospholipase 2 | Phospholipid- | lipase | | | 793 | 794 | 795 | 2038 | 2425 | 2812 |
| | | | | modifying | | | | | | | | | |
| Aurpu2p4_011049 | AURPU_3_00183 | beta-mannanase | beta-mannanase GH5 | hemicellulose- | beta-mannanase | GH5 | | 796 | 797 | 798 | 2039 | 2426 | 2813 |
| | | | | degrading | | | | | | | | | |
| Aurpu2p4_011071 | Aurpu2p4_011071 | Rhamnogalacturonate | Rhamnogalacturonate | pectin-degrading | rhamno- | PL4 | | 799 | 800 | 801 | 2040 | 2427 | 2814 |
| | | lyase | lyase | | galacturonase | | | | | | | | |
| Aurpu2p4_011080 | AURPU_3_00240 | Probable beta- | beta-glucosidase GH3 | cellulose- | beta-glucosidase | GH3 | | 802 | 803 | 804 | 2041 | 2428 | 2815 |
| | | glucosidase M | | degrading | | | | | | | | | |
| Aurpu2p4_011097 | | Aspergillopepsin-F | Aspartic protease | Protein | protease | | | 805 | 806 | 807 | 2042 | 2429 | 2816 |
| | | | PEP1 | hydrolysis | | | | | | | | | |
| Aurpu2p4_011162 | | Tripeptidyl- | Tripeptidyl-peptidase | Peptide | protease | | | 808 | 809 | 810 | 2043 | 2430 | 2817 |
| | | peptidase sed2 | sed2 | hydrolysis | | | | | | | | | |
| | Aurpu2p4_000066 | | unknown | | uncharacterized | | | | | | 2044 | 2431 | 2818 |
| | | | | | lignocellulose- | | | | | | | | |
| | | | | | induced protein | | | | | | | | |
| | Aurpu2p4_000166 | | Trans-1,2- | | Dehydrogenase | GH109 | | | | | 2045 | 2432 | 2819 |
| | | | dihydrobenzene-1,2- | | | | | | | | | | |
| | | | diol dehydrogenase | | | | | | | | | | |
| | Aurpu2p4_000811 | | O- | | oxidoreductase | | | | | | 2046 | 2433 | 2820 |
| | | | methylsterigmatocystin | | | | | | | | | | |
| | | | oxidoreductase | | | | | | | | | | |
| | Aurpu2p4_001233 | | Sterol-4-alpha- | | Dehydrogenase | | | | | | 2047 | 2434 | 2821 |
| | | | carboxylate 3- | | | | | | | | | | |
| | | | dehydrogenase, | | | | | | | | | | |
| | | | decarboxylating | | | | | | | | | | |
| | Aurpu2p4_002002 | | Retinol | | Dehydrogenase | | | | | | 2048 | 2435 | 2822 |
| | | | dehydrogenase 10-B | | | | | | | | | | |
| | Aurpu2p4_002244 | | Cytochrome P450 | | Cytochrome P450 | | | | | | 2049 | 2436 | 2823 |
| | | | 3A11 | | | | | | | | | | |
| | Aurpu2p4_002270 | | Tyrosinase | Pigment- | Tyrosinase | | | | | | 2050 | 2437 | 2824 |
| | | | | producing | | | | | | | | | |
| | Aurpu2p4_002403 | | unknown | | uncharacterized | | | | | | 2051 | 2438 | 2825 |
| | | | | | lignocellulose- | | | | | | | | |
| | | | | | induced protein | | | | | | | | |
| | Aurpu2p4_002547 | | Uncharacterized | | oxidoreductase | | | | | | 2052 | 2439 | 2826 |
| | | | oxidoreductase | | | | | | | | | | |
| | | | C26F1.07 | | | | | | | | | | |
| | Aurpu2p4_003458 | | NADPH--cytochrome | | NADPH-- | | | | | | 2053 | 2440 | 2827 |
| | | | P450 reductase | | cytochrome P450 | | | | | | | | |
| | | | | | reductase | | | | | | | | |
| | Aurpu2p4_003964 | | unknown | | uncharacterized | | | | | | 2054 | 2441 | 2828 |
| | | | | | lignocellulose- | | | | | | | | |
| | | | | | induced protein | | | | | | | | |
| | Aurpu2p4_004483 | | Uncharacterized | | oxidoreductase | | | | | | 2055 | 2442 | 2829 |
| | | | oxidoreductase dltE | | | | | | | | | | |
| | Aurpu2p4_004802 | | O- | | oxidoreductase | | | | | | 2056 | 2443 | 2830 |
| | | | methylsterigmatocystin | | | | | | | | | | |
| | | | oxidoreductase | | | | | | | | | | |
| | Aurpu2p4_005858 | | unknown | | uncharacterized | GH128 | | | | | 2057 | 2444 | 2831 |
| | | | | | lignocellulose- | | | | | | | | |
| | | | | | induced protein | | | | | | | | |
| | Aurpu2p4_006413 | | Saccharopine | | Dehydrogenase | | | | | | 2058 | 2445 | 2832 |
| | | | dehydrogenase | | | | | | | | | | |
| | | | [NADP(+), L- | | | | | | | | | | |
| | | | glutamate-forming] | | | | | | | | | | |
| | Aurpu2p4_007081 | | Tannase | Tannin- | tannase | | | | | | 2059 | 2446 | 2833 |
| | | | | degrading | | | | | | | | | |
| | Aurpu2p4_007695 | | unknown | | unknown GH16 | GH16 | | | | | 2060 | 2447 | 2834 |
| | Aurpu2p4_008408 | | unknown | | uncharacterized | | | | | | 2061 | 2448 | 2835 |
| | | | | | lignocellulose- | | | | | | | | |
| | | | | | induced protein | | | | | | | | |
| | Aurpu2p4_008733 | | Carboxylesterase 4A | | carboxylesterase | CE10 | | | | | 2062 | 2449 | 2836 |
| | Aurpu2p4_009064 | | unknown | | uncharacterized | | | | | | 2063 | 2450 | 2837 |
| | | | | | lignocellulose- | | | | | | | | |
| | | | | | induced protein | | | | | | | | |
| | Aurpu2p4_009608 | | unknown | | uncharacterized | | | | | | 2064 | 2451 | 2838 |
| | | | | | lignocellulose- | | | | | | | | |
| | | | | | induced protein | | | | | | | | |
| | Aurpu2p4_009911 | | Liver carboxylesterase 1 | | carboxylesterase | CE10 | | | | | 2065 | 2452 | 2839 |
| | Aurpu2p4_009938 | | unknown | | uncharacterized | | | | | | 2066 | 2453 | 2840 |
| | | | | | lignocellulose- | | | | | | | | |
| | | | | | induced protein | | | | | | | | |
| | Aurpu2p4_010261 | | unknown | | uncharacterized | | | | | | 2067 | 2454 | 2841 |
| | | | | | lignocellulose- | | | | | | | | |
| | | | | | induced protein | | | | | | | | |
| | Aurpu2p4_010853 | | Cytochrome P450 1A1 | | Cytochrome P450 | | | | | | 2068 | 2455 | 2842 |
| | Aurpu2p4_011048 | | unknown | | uncharacterized | | | | | | 2069 | 2456 | 2843 |
| | | | | | lignocellulose- | | | | | | | | |
| | | | | | induced protein | | | | | | | | |
| | AURPU_00050 | | unknown | | unknown CE5 | CE5 | | | | | 2070 | 2457 | 2844 |
| | AURPU_00052 | | Xylanase GH10 | hemicellulose- | xylanase | GH10 | | | | | 2071 | 2458 | 2845 |
| | | | | degrading | | | | | | | | | |
| | AURPU_00075 | | alpha- | hemicellulose- | alpha- | GH51 | | | | | 2072 | 2459 | 2846 |
| | | | arabinofuranosidase | degrading | arabinofuranosidase | | | | | | | | |
| | | | GH51 | | | | | | | | | | |
| | AURPU_00077 | | Pectinesterase | pectin-degrading | Pectinesterase | CE8 | | | | | 2073 | 2460 | 2847 |
| | AURPU_00104 | | Cutinase | cutin-degrading | Cutinase | CE5 | | | | | 2074 | 2461 | 2848 |
| | AURPU_00109 | | Cellobiose | lignin-degrading | Cellobiose | | | | | | 2075 | 2462 | 2849 |
| | | | dehydrogenase | | dehydrogenase | | | | | | | | |
| | AURPU_00159 | | Probable glycosidase | Carbohydrate- | glycosidase | GH16 | | | | | 2076 | 2463 | 2850 |
| | | | crf1 | modifying | | | | | | | | | |
| | AURPU_00163 | | Polysaccharide | cellulose- | polysaccharide | GH61 | | | | | 2077 | 2464 | 2851 |
| | | | monooxygenase | degrading | monooxygenase | | | | | | | | |
| | AURPU_00174 | | Tyrosinase | Pigment- | Tyrosinase | | | | | | 2078 | 2465 | 2852 |
| | | | | producing | | | | | | | | | |
| | AURPU_00225 | | Endo- | pectin-degrading | endo- | GH28 | | | | | 2079 | 2466 | 2853 |
| | | | polygalacturonase | | polygalacturonase | | | | | | | | |
| | | | GH28 | | | | | | | | | | |
| | AURPU_00252 | | unknown | | unknown | | | | | | 2080 | 2467 | 2854 |
| | AURPU_00265 | | xylanase GH10 | hemicellulose- | xylanase | GH10 | | | | | 2081 | 2468 | 2855 |
| | | | | degrading | | | | | | | | | |
| | AURPU_00300 | | xyloglucanase GH12 | hemicellulose- | xyloglucanase | GH12 | | | | | 2082 | 2469 | 2856 |
| | | | | degrading | | | | | | | | | |
| | AURPU_00305 | | Putative | cellulose- | endoglucanase | GH45 | | | | | 2083 | 2470 | 2857 |
| | | | endoglucanase type K | degrading | | | | | | | | | |
| | AURPU_00319 | | arabinogalactanase | hemicellulose- | arabino- | GH53 | | | | | 2084 | 2471 | 2858 |
| | | | GH53 | degrading | galactanase | | | | | | | | |
| | AURPU_00344 | | Endo-beta-1,4- | Glucan- | endo-beta-1,4- | GH5 | | | | | 2085 | 2472 | 2859 |
| | | | glucanase A | degrading | glucanase | | | | | | | | |
| | AURPU_00374 | | xylanase GH11 | hemicellulose- | xylanase | GH11 | | | | | 2086 | 2473 | 2860 |
| | | | | degrading | | | | | | | | | |
| | AURPU_00399 | | unknown | | unknown | | | | | | 2087 | 2474 | 2861 |
| | AURPU_00402 | | exo-1,3-beta- | cellulose- | exo-1,3-beta- | GH5 | | | | | 2088 | 2475 | 2862 |
| | | | glucanase GH5 | degrading | glucanase | | | | | | | | |
| | AURPU_00430 | | unknown | | unknown CE5 | CE5 | | | | | 2089 | 2476 | 2863 |
| | AURPU_00431 | | Acetylxylan esterase 1 | hemicellulose- | acetylxylan | CE1 | | | | | 2090 | 2477 | 2864 |
| | | | CE1 | degrading | esterase | | | | | | | | |
| | AURPU_00439 | | Polysaccharide | cellulose- | Polysaccharide | GH61 | CBM1 | | | | 2091 | 2478 | 2865 |
| | | | monooxygenase | degrading | monooxygenase | | | | | | | | |
| | | | GH61 | | | | | | | | | | |
| | AURPU_00457 | | Probable beta- | cellulose- | Beta-glucosidase | GH3 | | | | | 2092 | 2479 | 2866 |
| | | | glucosidase A | degrading | | | | | | | | | |
| | AURPU_00470 | | xylanase GH11 | hemicellulose- | xylanase | GH11 | | | | | 2093 | 2480 | 2867 |
| | | | | degrading | | | | | | | | | |
| | AURPU_00475 | | Probable endo-1,3(4)- | cellulose- | endo-1,3(4)-beta- | GH16 | | | | | 2094 | 2481 | 2868 |
| | | | beta-glucanase | degrading | glucanase | | | | | | | | |
| | | | AFUA_2G14360 | | | | | | | | | | |
| | AURPU_00476 | | Probable endo-1,3(4)- | cellulose- | endo-1,3(4)-beta- | GH16 | | | | | 2095 | 2482 | 2869 |
| | | | beta-glucanase | degrading | glucanase | | | | | | | | |
| | | | NFIA_089530 | | | | | | | | | | |
| | AURPU_2_00209 | | Alpha-N- | hemicellulose- | Alpha-N-arabino- | GH43 | | | | | 2096 | 2483 | 2870 |
| | | | arabinofuranosidase 2 | degrading | furanosidase | | | | | | | | |
| | AURPU_2_00581 | | Probable | pectin-degrading | exopoly- | GH28 | | | | | 2097 | 2484 | 2871 |
| | | | exopolygalacturonase B | | galacturonase | | | | | | | | |
| | AURPU_2_01541 | | xylanase GH11 | hemicellulose- | xylanase | GH11 | | | | | 2098 | 2485 | 2872 |
| | | | | degrading | | | | | | | | | |
| | AURPU_2_01594 | | beta-glucosidase GH3 | cellulose- | beta-glucosidase | GH3 | | | | | 2099 | 2486 | 2873 |
| | | | | degrading | | | | | | | | | |
| | AURPU_2_02646 | | unknown | | uncharacterized | | | | | | 2100 | 2487 | 2874 |
| | | | | | lignocellulose- | | | | | | | | |
| | | | | | induced protein | | | | | | | | |
| | AURPU_2_03623 | | Endo- | pectin-degrading | Endo- | GH28 | | | | | 2101 | 2488 | 2875 |
| | | | polygalacturonase | | polygalacturonase | | | | | | | | |
| | | | GH28 | | | | | | | | | | |
| | AURPU_2_04552 | | Xylanase GH10 | hemicellulose- | Xylanase | GH10 | | | | | 2102 | 2489 | 2876 |
| | | | | degrading | | | | | | | | | |
| | AURPU_2_04949 | | Probable glycosidase | Carbohydrate- | glycosidase | GH16 | | | | | 2103 | 2490 | 2877 |
| | | | crf1 | modifying | | | | | | | | | |
| | AURPU_2_05877 | | Polysaccharide | cellulose- | Polysaccharide | GH61 | | | | | 2104 | 2491 | 2878 |
| | | | monooxygenase | degrading | monooxygenase | | | | | | | | |
| | AURPU_2_06264 | | arabinoxylan | hemicellulose- | arabinoxylan | GH43 | | | | | 2105 | 2492 | 2879 |
| | | | arabinofuranohydrolase | degrading | arabinofurano- | | | | | | | | |
| | | | GH43 | | hydrolase | | | | | | | | |
| | AURPU_3_00001 | | beta-glucosidase GH1 | cellulose- | beta-glucosidase | GH1 | | | | | 2106 | 2493 | 2880 |
| | | | | degrading | | | | | | | | | |
| | AURPU_3_00014 | | Xylanase GH10 | hemicellulose- | Xylanase | GH10 | | | | | 2107 | 2494 | 2881 |
| | | | | degrading | | | | | | | | | |
| | AURPU_3_00018 | | xylanase GH11 | hemicellulose- | xylanase¹⁹ | GH11 | | | | | 2108 | 2495 | 2882 |
| | | | | degrading | | | | | | | | | |
| | AURPU_3_00023 | | Endo-1,4-beta- | hemicellulose- | Endo-1,4-beta- | GH11 | | | | | 2109 | 2496 | 2883 |
| | | | xylanase B | degrading | xylanase | | | | | | | | |
| | AURPU_3_00024 | | Endo-1,4-beta- | hemicellulose- | Endo-1,4-beta- | GH11 | | | | | 2110 | 2497 | 2884 |
| | | | xylanase B | degrading | xylanase | | | | | | | | |
| | AURPU_3_00051 | | unknown | | unknown GH16 | GH16 | | | | | 2111 | 2498 | 2885 |
| | AURPU_3_00113 | | Probable glycosidase | Carbohydrate | glycosidase | GH16 | | | | | 2112 | 2499 | 2886 |
| | | | crf1 | modifying | | | | | | | | | |
| | AURPU_3_00118 | | Probable glycosidase | Carbohydrate- | glycosidase | GH16 | CBM18 | | | | 2113 | 2500 | 2887 |
| | | | crf2 | modifying | | | | | | | | | |
| | AURPU_3_00139 | | Chitinase GH18 | chitin-degrading | Chitinase | GH18 | | | | | 2114 | 2501 | 2888 |
| | AURPU_3_00156 | | Endo- | pectin-degrading | Endo-rhamno- | GH28 | | | | | 2115 | 2502 | 2889 |
| | | | rhamnogalacturonase | | galacturonase | | | | | | | | |
| | | | GH28 | | | | | | | | | | |
| | AURPU_3_00173 | | exo-polygalacturonase | pectin-degrading | exo- | GH28 | | | | | 2116 | 2503 | 2890 |
| | | | GH28 | | polygalacturonase | | | | | | | | |
| | AURPU_3_00174 | | exo- | pectin-degrading | exo-rhamno- | GH28 | | | | | 2117 | 2504 | 2891 |
| | | | rhamnogalacturonase | | galacturonase | | | | | | | | |
| | | | GH28 | | | | | | | | | | |
| | AURPU_3_00208 | | beta-glucosidase | cellulose- | beta-glucosidase | GH3 | | | | | 2118 | 2505 | 2892 |
| | | | GH3 | degrading | | | | | | | | | |
| | AURPU_3_00209 | | Probable beta- | cellulose- | Beta-glucosidase | GH3 | | | | | 2119 | 2506 | 2893 |
| | | | glucosidase D | degrading | | | | | | | | | |
| | AURPU_3_00307 | | Beta-galactosidase | hemicellulose- | Beta-galactosidase | GH35 | | | | | 2120 | 2507 | 2894 |
| | | | GH35 | degrading | | | | | | | | | |
| | AURPU_3_00428 | | Probable alpha- | hemicellulose- | Alpha- | GH67 | | | | | 2121 | 2508 | 2895 |
| | | | glucuronidase A | degrading | glucuronidase | | | | | | | | |
| | Aurpu2p4_000157 | | Probable serine | Protein | protease | | | | | | 2122 | 2509 | 2896 |
| | | | protease EDA2 | hydrolysis | | | | | | | | | |
| | Aurpu2p4_000356 | | Putative | lignin-degrading | peroxidase | | | | | | 2123 | 2510 | 2897 |
| | | | sterigmatocystin | | | | | | | | | | |
| | | | biosynthesis | | | | | | | | | | |
| | | | peroxidase stcC | | | | | | | | | | |
| | Aurpu2p4_000818 | | unknown | | unknown GH121 | GH121 | | | | | 2124 | 2511 | 2898 |
| | Aurpu2p4_000960 | | Lipase 1 | Lipid-degrading | lipase | CE10 | | | | | 2125 | 2512 | 2899 |
| | Aurpu2p4_001076 | | Lipase 4 | Lipid-degrading | lipase | CE10 | | | | | 2126 | 2513 | 2900 |
| | Aurpu2p4_001476 | | feruloyl esterase CE1 | hemicellulose- | feruloyl esterase | | | | | | 2127 | 2514 | 2901 |
| | | | | degrading | | | | | | | | | |
| | Aurpu2p4_001745 | | possible hydrophobin | | hydrophobin | | | | | | 2128 | 2515 | 2902 |
| | Aurpu2p4_001987 | | Probable glucan 1,3- | cellulose- | glucan 1,3-beta- | GH5 | | | | | 2129 | 2516 | 2903 |
| | | | beta-glucosidase A | degrading | glucosidase | | | | | | | | |
| | Aurpu2p4_002339 | | Lipase 2 | Lipid-degrading | lipase | CE10 | | | | | 2130 | 2517 | 2904 |
| | Aurpu2p4_002490 | | Minor extracellular | Protein | protease | | | | | | 2131 | 2518 | 2905 |
| | | | protease vpr | hydrolysis | | | | | | | | | |
| | Aurpu2p4_002528 | | Probable aspartic-type | Protein | protease | | | | | | 2132 | 2519 | 2906 |
| | | | endopeptidase OPSB | hydrolysis | | | | | | | | | |
| | Aurpu2p4_003052 | | Gluconolactonase | | gluconolactonase | | | | | | 2133 | 2520 | 2907 |
| | Aurpu2p4_003108 | | unknown | | unknown CE1 | CE1 | | | | | 2134 | 2521 | 2908 |
| | Aurpu2p4_003243 | | possible pyranose | Sugar-modifying | pyranose | | | | | | 2135 | 2522 | 2909 |
| | | | dehydrogenase | | dehydrogenase | | | | | | | | |
| | Aurpu2p4_003247 | | possible pyranose | Sugar-modifying | pyranose | | | | | | 2136 | 2523 | 2910 |
| | | | dehydrogenase | | dehydrogenase | | | | | | | | |
| | Aurpu2p4_003704 | | Neutral protease 2 | Protein | protease | | | | | | 2137 | 2524 | 2911 |
| | | | homolog | hydrolysis | | | | | | | | | |
| | | | SNOG_10522 | | | | | | | | | | |
| | Aurpu2p4_004187 | | Probable glucan 1,3- | cellulose- | glucan 1,3-beta- | GH5 | | | | | 2138 | 2525 | 2912 |
| | | | beta-glucosidase A | degrading | glucosidase | | | | | | | | |
| | Aurpu2p4_004476 | | Probable endo-1,3(4)- | cellulose- | endo-1,3(4)-beta- | GH16 | | | | | 2139 | 2526 | 2913 |
| | | | beta-glucanase | degrading | glucanase | | | | | | | | |
| | | | ACLA_073210 | | | | | | | | | | |
| | Aurpu2p4_004865 | | Extracellular | Protein | protease | | | | | | 2140 | 2527 | 2914 |
| | | | metalloprotease | hydrolysis | | | | | | | | | |
| | | | AO090012001025 | | | | | | | | | | |
| | Aurpu2p4_005304 | | Uncharacterized | | unknown CE7 | CE7 | | | | | 2141 | 2528 | 2915 |
| | | | protein PA2218 | | | | | | | | | | |
| | Aurpu2p4_005861 | | WSC domain- | | unknown CE1 | CE1 | | | | | 2142 | 2529 | 2916 |
| | | | containing protein 1 | | | | | | | | | | |
| | Aurpu2p4_005992 | | possible adhesin | | adhesin | | | | | | 2143 | 2530 | 2917 |
| | Aurpu2p4_006091 | | Probable aspartic-type | Protein | protease | | | | | | 2144 | 2531 | 2918 |
| | | | endopeptidase | hydrolysis | | | | | | | | | |
| | | | AFUA_3G01220 | | | | | | | | | | |
| | Aurpu2p4_006277 | | Lipase 1 | Lipid-degrading | lipase | CE10 | | | | | 2145 | 2532 | 2919 |
| | Aurpu2p4_007520 | | Gluconolactonase | | gluconolactonase | | | | | | 2146 | 2533 | 2920 |
| | Aurpu2p4_007546 | | possible adhesin | | adhesin | | | | | | 2147 | 2534 | 2921 |
| | Aurpu2p4_007951 | | Lipase 1 | Lipid-degrading | lipase | CE10 | | | | | 2148 | 2535 | 2922 |
| | Aurpu2p4_008628 | | Lipase 4 | Lipid-degrading | lipase | CE10 | | | | | 2149 | 2536 | 2923 |
| | Aurpu2p4_008719 | | Putative | lignin-degrading | peroxidase | | | | | | 2150 | 2537 | 2924 |
| | | | sterigmatocystin | | | | | | | | | | |
| | | | biosynthesis | | | | | | | | | | |
| | | | peroxidase stcC | | | | | | | | | | |
| | Aurpu2p4_009254 | | Lipase 1 | Lipid-degrading | lipase | CE10 | | | | | 2151 | 2538 | 2925 |
| | Aurpu2p4_009278 | | Lipase 1 | Lipid-degrading | lipase | CE10 | | | | | 2152 | 2539 | 2926 |
| | Aurpu2p4_009437 | | possible pyranose | Sugar-modifying | pyranose | | | | | | 2153 | 2540 | 2927 |
| | | | dehydrogenase | | dehydrogenase | | | | | | | | |
| | Aurpu2p4_009445 | | Lipase 2 | Lipid-degrading | lipase | CE10 | | | | | 2154 | 2541 | 2928 |
| | Aurpu2p4_010136 | | unknown | | unknown GH2 | GH2 | | | | | 2155 | 2542 | 2929 |
| | Aurpu2p4_010244 | | Lipase 1 | Lipid-degrading | lipase | CE10 | | | | | 2156 | 2543 | 2930 |
| | Aurpu2p4_010617 | | Uncharacterized | | unknown CE7 | CE7 | | | | | 2157 | 2544 | 2931 |
| | | | protein PA2218 | | | | | | | | | | |
| | Aurpu2p4_010719 | | Bacilysin biosynthesis | | oxidoreductase | | | | | | 2158 | 2545 | 2932 |
| | | | oxidoreductase BacC | | | | | | | | | | |
| | Aurpu2p4_010798 | | Lipase 1 | | Lipid-degrading | lipase | CE10 | | | | 2159 | 2546 | 2933 |
| | Aurpu2p4_010869 | | possible hydrophobin | | hydrophobin | | | | | | 2160 | 2547 | 2934 |

¹⁰For example, endo-1,4-beta-xylanase.
¹¹For example, cellulose 1,4-beta-cellobiosidase
¹²For example, alpha-N-arabinofuranosidase
¹³Probable arabinosidase or beta-galactanase.
¹⁴For example, xylan 1,4-beta-xylanase
¹⁵For example, endo-1,4-beta-xylanase.
¹⁶For example, endo-1,4-beta-xylanase.
¹⁷Demonstrates arabinosidase or arabino(furano)sidases activity (see Example 22).
¹⁸For example, alpha-L-arabinofuranosidase axhA-1
¹⁹For example, endo-1,4-beta-xylanase

TABLE 2A
List of genes of Scytalidium thermophilum with reference to exon boundaries

| | Genomic | Genomic | |
|---|---|---|---|
| | sequence | sequence | |
| Gene ID | (SEQ ID NO:) | length | Exon boundaries (nucleotide positions) and exons |
| Scyth2p4_000006 | 1 | 1405 | 1 . . . 83, 138 . . . 541, 633 . . . 679, 799 . . . 1212, 1271 . . . 1405 |
| Scyth2p4_000010 | 2 | 964 | 1 . . . 178, 246 . . . 964 |
| Scyth2p4_000016 | 3 | 1809 | 1 . . . 161, 234 . . . 894, 968 . . . 1019, 1077 . . . 1555, 1627 . . . 1809 |
| Scyth2p4_000019 | 4 | 656 | 1 . . . 310, 385 . . . 656 |
| Scyth2p4_000123 | 5 | 1677 | 1 . . . 1677 |
| Scyth2p4_000124 | 6 | 873 | 1 . . . 78, 179 . . . 312, 373 . . . 529, 622 . . . 873 |
| Scyth2p4_000141 | 7 | 1560 | 1 . . . 1120, 1184 . . . 1560 |
| Scyth2p4_000168 | 8 | 971 | 1 . . . 261, 327 . . . 971 |
| Scyth2p4_000230 | 9 | 1325 | 1 . . . 1073, 1145 . . . 1325 |
| Scyth2p4_000277 | 10 | 2072 | 1 . . . 204, 280 . . . 1652, 1712 . . . 2072 |
| Scyth2p4_000610 | 11 | 1515 | 1 . . . 421, 503 . . . 1515 |
| Scyth2p4_000863 | 12 | 1946 | 1 . . . 165, 280 . . . 1446, 1518 . . . 1946 |
| Scyth2p4_000904 | 13 | 1332 | 1 . . . 1332 |
| Scyth2p4_001035 | 14 | 2348 | 1 . . . 301, 417 . . . 547, 640 . . . 906, 972 . . . 2348 |
| Scyth2p4_001183 | 15 | 1728 | 1 . . . 493, 563 . . . 1728 |
| Scyth2p4_001259 | 16 | 652 | 1 . . . 360, 428 . . . 652 |
| Scyth2p4_001262 | 17 | 1331 | 1 . . . 360, 440 . . . 1184, 1270 . . . 1331 |
| Scyth2p4_001326 | 18 | 988 | 1 . . . 423, 491 . . .633, 691 . . . 988 |
| Scyth2p4_001371 | 19 | 2659 | 1 . . . 191, 257 . . . 560, 623 . . . 997, 1061 . . . 2659 |
| Scyth2p4_001379 | 20 | 1751 | 1 . . . 208, 287 . . . 545, 612 . . . 1356, 1418 . . . 1609, 1689 . . . 1751 |
| Scyth2p4_001450 | 21 | 1451 | 1 . . . 43, 112 . . . 974, 1065 . . . 1451 |
| Scyth2p4_001460 | 22 | 1721 | 1 . . . 323, 388 . . . 486, 538, 776, 847 . . . 1721 |
| Scyth2p4_001513 | 23 | 5221 | 1 . . . 615, 680 . . . 782, 836 . . . 894, 987 . . . 1272, 1334 . . . 1399, 1467 . . . 1552, |
| | | | 1622 . . . 2274, 2344 . . . 2498, 2557 . . . 2719, 2776 . . . 2818, 2881 . . .3232, |
| | | | 3297 . . . 3686, 3791 . . . 4397, 4492 . . . 5221 |
| Scyth2p4_001745 | 24 | 1251 | 1 . . . 1251 |
| Scyth2p4_001867 | 25 | 2739 | 1 . . . 639, 691 . . .2739 |
| Scyth2p4_001875 | 26 | 1504 | 1 . . . 331, 397 . . . 629, 689, 797, 854 . . . 1135, 1194 . . . 1504 |
| Scyth2p4_001878 | 27 | 1185 | 1 . . . 342, 396 . . . 683, 745 . . . 1093, 1148 . . . 1185 |
| Scyth2p4_001887 | 28 | 6439 | 1 . . . 135, 191 . . . 1674, 2408 . . . 2497, 2576 . . . 2647, 2710 . . . 3205, 3965 . . . 4543, |
| | | | 5548 . . . 5672, 5743 . . . 6439 |
| Scyth2p4_001903 | 29 | 1287 | 1 . . . 210, 262 . . . 425, 483 . . . 1143, 1204 . . . 1287 |
| Scyth2p4_001974 | 30 | 1340 | 1 . . . 745, 817 . . . 1340 |
| Scyth2p4_001995 | 31 | 859 | 1 . . . 104, 161 . . . 731, 788 . . . 859 |
| Scyth2p4_001998 | 32 | 867 | 1 . . . 867 |
| Scyth2p4_002014 | 33 | 1285 | 1 . . . 271, 348 . . . 438, 497 . . . 542, 607 . . . 1195, 1248 . . . 1285 |
| Scyth2p4_002032 | 34 | 908 | 1 . . . 489, 558 . . . 908 |
| Scyth2p4_002058 | 35 | 2823 | 1 . . . 260, 375 . . . 531, 614 . . . 1151, 1216 . . . 1336, 1397 . . . 1614, 1674 . . . 2512, |
| | | | 2588 . . . 2694, 2775 . . . 2823 |
| Scyth2p4_002089 | 36 | 1082 | 1 . . . 270, 329 . . . 919, 978 . . . 1082 |
| Scyth2p4_002099 | 37 | 823 | 1 . . . 685, 744 . . . 823 |
| Scyth2p4_002112 | 38 | 945 | 1 . . . 945 |
| Scyth2p4_002143 | 39 | 2612 | 1 . . . 157, 209 . . . 469, 533 . . . 1140, 1188 . . . 2612 |
| Scyth2p4_002153 | 40 | 3458 | 1 . . . 83, 177 . . . 200, 261 . . . 415, 3088 . . . 3458 |
| Scyth2p4_002186 | 41 | 858 | 1 . . . 145, 209 . . . 858 |
| Scyth2p4_002220 | 42 | 1104 | 1 . . . 105, 155 . . . 973, 1042 . . . 1104 |
| Scyth2p4_002225 | 43 | 822 | 1 . . . 46, 126 . . . 414, 501 . . . 822 |
| Scyth2p4_002425 | 44 | 927 | 1 . . . 186, 258 . . . 419, 517 . . . 927 |
| Scyth2p4_002446 | 45 | 666 | 1 . . . 666 |
| Scyth2p4_002491 | 46 | 3064 | 1 . . . 556, 618 . . . 3064 |
| Scyth2p4_002582 | 47 | 1938 | 1 . . . 51, 112 . . . 1938 |
| Scyth2p4_002596 | 48 | 1669 | 1 . . . 363, 425 . . . 1669 |
| Scyth2p4_002639 | 49 | 1631 | 1 . . . 419, 472 . . . 557, 613 . . . 1631 |
| Scyth2p4_002689 | 50 | 705 | 1 . . . 705 |
| Scyth2p4_002854 | 51 | 1114 | 1 . . . 599, 664 . . . 1114 |
| Scyth2p4_002859 | 52 | 1380 | 1 . . . 1380 |
| Scyth2p4_003064 | 53 | 2677 | 1 . . . 290, 344 . . . 452, 519 . . . 608, 670 . . . 728, 809 . . . 838, 925 . . . 948, 1015 . . . 1074, |
| | | | 1140 . . . 1301, 1356 . . . 1533, 1611 . . . 1638, 1695 . . . 2237, 2297 . . . 2378, |
| | | | 2437 . . . 2677 |
| Scyth2p4_003098 | 54 | 5182 | 1 . . . 2154, 2215 . . . 2458, 2532 . . . 2567, 2626 . . . 2592, 2947 . . . 3583, 3632 . . . 3703, |
| | | | 3849 . . . 3943, 4035 . . . 5182 |
| Scyth2p4_003108 | 55 | 1621 | 1 . . . 166, 228 . . . 1621 |
| Scyth2p4_003124 | 56 | 1020 | 1 . . . 1020 |
| Scyth2p4_003222 | 57 | 875 | 1 . . . 426, 516 . . . 673, 788 . . . 875 |
| Scyth2p4_003248 | 58 | 1992 | 1 . . . 1992 |
| Scyth2p4_003738 | 59 | 3794 | 1 . . . 201, 308 . . . 1518, 2392 . . . 2692, 2905 . . . 3359, 3428 . . . 3794 |
| Scyth2p4_003766 | 60 | 1338 | 1 . . . 552, 851 . . . 1249, 1312 . . . 1338 |
| Scyth2p4_003836 | 61 | 2740 | 1 . . . 49, 116 . . . 300, 364 . . . 1791, 1856 . . . 2090, 2151 . . . 2740 |
| Scyth2p4_003875 | 62 | 1057 | 1 . . . 243, 308 . . . 1057 |
| Scyth2p4_003882 | 63 | 3067 | 1 . . . 81, 384 . . . 571, 624 . . . 1012, 1068 . . . 3067 |
| Scyth2p4_003909 | 64 | 1035 | 1 . . . 1035 |
| Scyth2p4_003923 | 65 | 3163 | 1 . . . 774, 833 . . . 3163 |
| Scyth2p4_003925 | 66 | 1023 | 1 . . . 303, 365 . . . 861, 927 . . . 1023 |
| Scyth2p4_003929 | 67 | 459 | 1 . . . 459 |
| Scyth2p4_003943 | 68 | 2358 | 1 . . . 2358 |
| Scyth2p4_004010 | 69 | 1479 | 1 . . . 127, 183 . . . 544, 613 . . . 1479 |
| Scyth2p4_004018 | 70 | 798 | 1 . . . 798 |
| Scyth2p4_004025 | 71 | 1059 | 1 . . . 1059 |
| Scyth2p4_004026 | 72 | 1446 | 1 . . . 1446 |
| Scyth2p4_004049 | 73 | 928 | 1 . . . 126, 192 . . . 285, 354 . . . 700, 764 . . . 928 |
| Scyth2p4_004099 | 74 | 1536 | 1 . . . 178, 242 . . . 1536 |
| Scyth2p4_004162 | 75 | 998 | 1 . . . 645, 705 . . . 998 |
| Scyth2p4_004197 | 76 | 1607 | 1 . . . 90, 159 . . . 511, 576 . . . 648, 707 . . . 955, 1017 . . . 1607 |
| Scyth2p4_004205 | 77 | 1404 | 1 . . . 664, 731 . . . 1404 |
| Scyth2p4_004235 | 78 | 1324 | 1 . . . 1138, 1200 . . . 1324 |
| Scyth2p4_004237 | 79 | 2264 | 1 . . . 1795, 1858 . . . 2264 |
| Scyth2p4_004263 | 80 | 1586 | 1 . . . 628, 693 . . . 1117, 1260 . . . 1586 |
| Scyth2p4_004293 | 81 | 1662 | 1 . . . 412, 473 . . . 1662 |
| Scyth2p4_004317 | 82 | 1358 | 1 . . . 698, 756 . . . 1162, 1222 . . . 1358 |
| Scyth2p4_004650 | 83 | 1474 | 1 . . . 419, 512 . . . 743, 823 . . . 1059, 1142 . . . 1474 |
| Scyth2p4_004945 | 84 | 936 | 1 . . . 400, 510 . . . 721, 808 . . . 855, 925 . . . 936 |
| Scyth2p4_004976 | 85 | 1476 | 1 . . . 317, 384 . . . 1476 |
| Scyth2p4_005037 | 86 | 2101 | 1 . . . 740, 806 . . . 981, 1054 . . . 1279, 1356 . . . 1532, 1594 . . . 2101 |
| Scyth2p4_005092 | 87 | 1032 | 1 . . . 34, 91 . . . 930, 998 . . . 1032 |
| Scyth2p4_005093 | 88 | 849 | 1 . . . 216, 358 . . . 849 |
| Scyth2p4_005094 | 89 | 749 | 1 . . . 204, 267, 749 |
| Scyth2p4_005146 | 90 | 1437 | 1 . . . 195, 271 . . . 471, 531 . . . 1076, 1147 . . . 1437 |
| Scyth2p4_005307 | 91 | 1156 | 1 . . . 724, 830 . . . 908, 1001 . . . 1019, 1106 . . . 1156 |
| Scyth2p4_005334 | 92 | 1005 | 1 . . . 1005 |
| Scyth2p4_005335 | 93 | 989 | 1 . . . 520, 586 . . . 842, 906 . . . 989 |
| Scyth2p4_005384 | 94 | 874 | 1 . . . 441, 498 . . . 618, 690 . . . 874 |
| Scyth2p4_005465 | 95 | 1101 | 1 . . . 958, 1031 . . . 1101 |
| Scyth2p4_005588 | 96 | 1253 | 1 . . . 373, 436 . . . 1253 |
| Scyth2p4_005596 | 97 | 2460 | 1 . . . 145, 220 . . . 627, 686 . . . 2460 |
| Scyth2p4_005646 | 98 | 781 | 1 . . . 275, 340, 781 |
| Scyth2p4_005692 | 99 | 893 | 1 . . . 320, 394, 761, 820 . . . 893 |
| Scyth2p4_005696 | 100 | 791 | 1 . . . 417, 484 . . . 657, 723, 791 |
| Scyth2p4_005712 | 101 | 1317 | 1 . . . 172, 229 . . . 924, 989 . . . 1317 |
| Scyth2p4_005714 | 102 | 1394 | 1 . . . 1172, 1230 . . . 1305, 1371 . . . 1394 |
| Scyth2p4_005722 | 103 | 1412 | 1 . . . 120, 179 . . . 278, 340 . . . 666, 752 . . . 1265, 1325 . . . 1412 |
| Scyth2p4_005760 | 104 | 1031 | 1 . . . 92, 156 . . . 576, 648 . . . 1031 |
| Scyth2p4_005775 | 105 | 478 | 1 . . . 183, 254 . . . 478 |
| Scyth2p4_005777 | 106 | 477 | 1 . . . 198, 262 . . . 477 |
| Scyth2p4_005792 | 107 | 2586 | 1 . . . 2586 |
| Scyth2p4_005865 | 108 | 1032 | 1 . . . 301, 377 . . . 1032 |
| Scyth2p4_005894 | 109 | 885 | 1 . . . 885 |
| Scyth2p4_006005 | 110 | 1158 | 1 . . . 1158 |
| Scyth2p4_006013 | 111 | 3539 | 1 . . . 334, 415 . . . 932, 1003 . . . 1182, 1254 . . . 1307, 2019 . . . 2842, 2919 . . . 3168 |
| | | | 3280 . . . 3413, 3482 . . . 3539 |
| Scyth2p4_006014 | 112 | 2165 | 1 . . . 512, 574, 752, 812 . . . 1088, 1207 . . . 1634, 1685 . . . 1814, 1883 . . . 2165 |
| Scyth2p4_006016 | 113 | 1090 | 1 . . . 284, 348 . . . 681, 751 . . . 926, 994 . . . 1090 |
| Scyth2p4_006040 | 114 | 1267 | 1 . . . 194, 252 . . . 1047, 1106 . . . 1267 |
| Scyth2p4_006061 | 115 | 1755 | 1 . . . 621, 680 . . . 1484, 1541 . . . 1755 |
| Scyth2p4_006263 | 116 | 1173 | 1 . . . 85, 141 . . . 303, 366 . . . 470, 528 . . . 1173 |
| Scyth2p4_006265 | 117 | 2874 | 1 . . . 250, 406 . . . 822, 878 . . . 2874 |
| Scyth2p4_006499 | 118 | 3030 | 1 . . . 82, 143 . . . 3030 |
| Scyth2p4_006556 | 119 | 1203 | 1 . . . 88, 146 . . . 1203 |
| Scyth2p4_006566 | 120 | 1244 | 1 . . . 348, 405 . . . 561, 622 . . . 653, 723 . . . 1244 |
| Scyth2p4_006586 | 121 | 1092 | 1 . . . 1092 |
| Scyth2p4_006591 | 122 | 2668 | 1 . . . 230, 290 . . . 1163, 1220 . . . 2668 |
| Scyth2p4_006628 | 123 | 1560 | 1 . . . 333, 388 . . . 1560 |
| Scyth2p4_006768 | 124 | 2631 | 1 . . . 79, 135 . . . 206, 273 . . . 346, 399 . . . 891, 955 . . . 2043, 2117 . . . 2631 |
| Scyth2p4_006914 | 125 | 1687 | 1 . . . 1587, 1655 . . . 1687 |
| Scyth2p4_006916 | 126 | 776 | 1 . . . 52, 109 . . . 385, 455 . . . 776 |
| Scyth2p4_006920 | 127 | 1053 | 1 . . . 70, 150 . . . 511, 589 . . . 1053 |
| Scyth2p4_006931 | 128 | 1105 | 1 . . . 423, 480 . . . 505, 562 . . . 620, 696 . . . 756, 826 . . . 1105 |
| Scyth2p4_006993 | 129 | 1746 | 1 . . . 89, 148 . . . 641, 776 . . . 1395, 1450 . . . 1623, 1693 . . . 1746 |
| Scyth2p4_007002 | 130 | 1437 | 1 . . . 1437 |
| Scyth2p4_007064 | 131 | 1321 | 1 . . . 99, 165 . . . 318, 384 . . . 1321 |
| Scyth2p4_007097 | 132 | 1027 | 1 . . . 537, 635 . . . 1027 |
| Scyth2p4_007200 | 133 | 1465 | 1 . . . 297, 356, 745, 805 . . . 1160, 1231 . . . 1465 |
| Scyth2p4_007231 | 134 | 818 | 1 . . . 55, 114 . . . 455, 532 . . . 818 |
| Scyth2p4_007246 | 135 | 1179 | 1 . . . 140, 213 . . . 1179 |
| Scyth2p4_007249 | 136 | 1197 | 1 . . . 1197 |
| Scyth2p4_007259 | 137 | 1053 | 1 . . . 358, 434 . . . 1053 |
| Scyth2p4_007263 | 138 | 888 | 1 . . . 448, 524 . . . 888 |
| Scyth2p4_007266 | 139 | 3446 | 1 . . . 303, 368 . . . 801, 867 . . . 2167, 2224 . . . 3446 |
| Scyth2p4_007287 | 140 | 1321 | 1 . . . 260, 335 . . . 497, 562 . . . 801, 856 . . . 1207, 1278 . . . 1321 |
| Scyth2p4_007304 | 141 | 1655 | 1 . . . 91, 160 . . . 351, 413 . . . 479, 578 . . . 674, 731 . . . 815, 871 . . . 988, 1044 . . . 1089, |
| | | | 1160 . . . 1517, 1615 . . . 1655 |
| Scyth2p4_007313 | 142 | 2402 | 1 . . . 191, 260 . . . 2402 |
| Scyth2p4_007314 | 143 | 928 | 1 . . . 753, 812 . . . 928 |
| Scyth2p4_007531 | 144 | 1713 | 1 . . . 209, 275 . . . 649, 771 . . . 928, 994 . . . 1172, 1249 . . . 1583, 1668 . . . 1713 |
| Scyth2p4_007556 | 145 | 1062 | 1 . . . 1062 |
| Scyth2p4_007557 | 146 | 1053 | 1 . . . 830, 1020 . . . 1053 |
| Scyth2p4_007647 | 147 | 3340 | 1 . . . 819, 873 . . . 1866, 1950 . . . 3340 |
| Scyth2p4_007651 | 148 | 844 | 1 . . . 46, 111 . . . 691, 758 . . . 844 |
| Scyth2p4_007699 | 149 | 1322 | 1 . . . 373, 466 . . . 1322 |
| Scyth2p4_007856 | 150 | 1104 | 1 . . . 1104 |
| Scyth2p4_007921 | 151 | 1860 | 1 . . . 211, 265 . . . 440, 505 . . . 1860 |
| Scyth2p4_008285 | 152 | 534 | 1 . . . 534 |
| Scyth2p4_008294 | 153 | 1406 | 1 . . . 218, 287 . . . 435, 507 . . . 649, 706 . . . 874, 931 . . . 1406 |
| Scyth2p4_008312 | 154 | 1508 | 1 . . . 201, 264 . . . 1508 |
| Scyth2p4_008328 | 155 | 1003 | 1 . . . 269, 323 . . . 827, 893 . . . 1003 |
| Scyth2p4_008336 | 156 | 1363 | 1 . . . 297, 358, 715, 770 . . . 1116, 1169 . . . 1363 |
| Scyth2p4_008341 | 157 | 1066 | 1 . . . 58, 126 . . . 183, 236 . . . 623, 691 . . . 883, 960 . . . 1066 |
| Scyth2p4_008344 | 158 | 595 | 1 . . . 181, 258 . . . 324, 391 . . . 595 |
| Scyth2p4_008363 | 159 | 1210 | 1 . . . 932, 994 . . . 1210 |
| Scyth2p4_008372 | 160 | 1583 | 1 . . . 570, 628 . . . 980, 1036 . . . 1279, 1336 . . . 1466, 1526 . . . 1583 |
| Scyth2p4_008392 | 161 | 1458 | 1 . . . 269, 389 . . . 536, 601 . . . 797, 874 . . . 1089, 1163 . . . 1341, 1415 . . . 1458 |
| Scyth2p4_008399 | 162 | 717 | 1 . . . 335, 411 . . . 717 |
| Scyth2p4_008411 | 163 | 1377 | 1 . . . 784, 869 . . . 1377 |
| Scyth2p4_008417 | 164 | 753 | 1 . . . 397, 470, 753 |
| Scyth2p4_008418 | 165 | 854 | 1 . . . 52, 134 . . . 487, 565 . . . 854 |
| Scyth2p4_008663 | 166 | 1293 | 1 . . . 22, 81 . . . 101, 222 . . . 455, 530 . . . 1293 |
| Scyth2p4_008755 | 167 | 2176 | 1 . . . 316, 386 . . . 829, 895 . . . 1026, 1080 . . . 2176 |
| Scyth2p4_008830 | 168 | 1910 | 1 . . . 441, 499 . . . 661, 727 . . . 1910 |
| Scyth2p4_008896 | 169 | 1088 | 1 . . . 389, 496 . . . 571, 658 . . . 922, 1033 . . . 1088 |
| Scyth2p4_009014 | 170 | 2281 | 1 . . . 4, 66 . . . 238, 302 . . . 565, 642 . . . 702, 769 . . . 867, 1013 . . . 1061, 1112 . . . 1167, |
| | | | 1218 . . . 1755, 1813 . . . 2281 |
| Scyth2p4_009047 | 171 | 1284 | 1 . . . 856, 926 . . . 1284 |
| Scyth2p4_009244 | 172 | 1742 | 1 . . . 219, 375 . . . 1742 |
| Scyth2p4_009303 | 173 | 2191 | 1 . . . 250, 304 . . . 499, 568 . . . 2191 |
| Scyth2p4_009308 | 174 | 1070 | 1 . . . 159, 246 . . . 591, 700 . . . 1070 |
| Scyth2p4_009393 | 175 | 2615 | 1 . . . 83, 149 . . . 659, 733 . . . 854, 2501 . . . 2615 |
| Scyth2p4_009418 | 176 | 1497 | 1 . . . 398, 462 . . . 580, 648 . . . 1192, 1264 . . . 1497 |
| Scyth2p4_009426 | 177 | 2237 | 1 . . . 447, 521 . . . 642, 1874 . . . 1891, 2123 . . . 2237 |
| Scyth2p4_009442 | 178 | 1157 | 1 . . . 145, 201 . . . 839, 898 . . . 1157 |
| Scyth2p4_009463 | 179 | 1667 | 1 . . . 794, 853 . . . 1048, 1113 . . . 1667 |
| Scyth2p4_009475 | 180 | 1842 | 1 . . . 853, 911 . . . 978, 1099 . . . 1842 |
| Scyth2p4_009509 | 181 | 1362 | 1 . . . 177, 259 . . . 588, 637 . . . 1362 |
| Scyth2p4_009510 | 182 | 1197 | 1 . . . 102, 151 . . . 1197 |
| Scyth2p4_009516 | 183 | 792 | 1 . . . 179, 318 . . . 792 |
| Scyth2p4_009525 | 184 | 1502 | 1 . . . 209, 269 . . . 426, 511 . . . 585, 669 . . . 1088, 1150 . . . 1286, 1341 . . . 1502 |
| Scyth2p4_009550 | 185 | 1479 | 1 . . . 255, 312 . . . 497, 587 . . . 827, 884 . . . 1173, 1288 . . . 1479 |
| Scyth2p4_009554 | 186 | 875 | 1 . . . 100, 162 . . . 523, 618 . . . 875 |
| Scyth2p4_009565 | 187 | 1370 | 1 . . . 615, 678 . . . 1370 |
| Scyth2p4_009569 | 188 | 1788 | 1 . . . 1042, 1105 . . . 1252, 1317 . . . 1788 |
| Scyth2p4_009610 | 189 | 1020 | 1 . . . 155, 250 . . . 876, 939 . . . 1020 |
| Scyth2p4_009620 | 190 | 974 | 1 . . . 335, 392 . . . 974 |
| Scyth2p4_009626 | 191 | 1236 | 1 . . . 1156, 1217 . . . 1236 |
| Scyth2p4_009629 | 192 | 1559 | 1 . . . 113, 186 . . . 240, 308 . . . 410, 483 . . . 616, 677 . . . 879, 935 . . . 1076, 1140 . . . 1225, |
| | | | 1286 . . . 1458, 1522 . . . 1559 |
| Scyth2p4_009651 | 193 | 1407 | 1 . . . 1407 |
| Scyth2p4_009653 | 194 | 1131 | 1 . . . 444, 521 . . . 964, 1036 . . . 1131 |
| Scyth2p4_009700 | 195 | 1320 | 1 . . . 430, 513 . . . 837, 900 . . . 1320 |
| Scyth2p4_009707 | 196 | 2834 | 1 . . . 49, 106 . . . 266, 325 . . . 806, 880 . . . 1219, 1275 . . . 1764, 1824 . . . 2089, |
| | | | 2147 . . . 2240, 2293 . . . 2525, 2592 . . . 2834 |
| Scyth2p4_009711 | 197 | 4308 | 1 . . . 204, 269 . . . 1250, 2172 . . . 2881, 4132 . . . 4308 |
| Scyth2p4_009720 | 198 | 1074 | 1 . . . 1074 |
| Scyth2p4_009765 | 199 | 3723 | 1 . . . 23, 311 . . . 446, 1486 . . . 3723 |
| Scyth2p4_009796 | 200 | 3125 | 1 . . . 235, 309 . . . 961, 1077 . . . 1160, 1240 . . . 2017, 2083 . . . 3125 |
| Scyth2p4_009823 | 201 | 789 | 1 . . . 789 |
| Scyth2p4_009929 | 202 | 4377 | 1 . . . 457, 506 . . . 3441, 3490 . . . 3769, 3818 . . . 4052, 4107 . . . 4377 |
| Scyth2p4_010021 | 203 | 878 | 1 . . . 66, 132 . . . 436, 509 . . . 878 |
| Scyth2p4_010034 | 204 | 1404 | 1 . . . 137, 204 . . . 1404 |
| Scyth2p4_010146 | 205 | 898 | 1 . . . 108, 173 . . . 898 |
| Scyth2p4_010149 | 206 | 1449 | 1 . . . 364, 413 . . . 521, 576, 791, 859 . . . 1349, 1403 . . . 1449 |
| Scyth2p4_010269 | 207 | 1108 | 1 . . . 466, 528 . . . 1108 |
| Scyth2p4_010278 | 208 | 5924 | 1 . . . 248, 315 . . . 401, 463 . . . 779, 838 . . . 924, 1001 . . . 4447, 4522 . . . 4602, |
| | | | 4736 . . . 5029, 5116 . . . 5214, 5353 . . . 5802, 5878 . . . 5924 |
| Scyth2p4_010280 | 209 | 1887 | 1 . . . 398, 458 . . . 943, 1001 . . . 1060, 1118 . . . 1183, 1251 . . . 1755, 1810 . . . 1887 |
| Scyth2p4_010281 | 210 | 1919 | 1 . . . 361, 422 . . . 503, 571 . . . 599, 673 . . . 807, 884 . . . 965, 1017 . . . 1159, 1234 . . . 1315, |
| | | | 1371 . . . 1585, 1667 . . . 1776, 1863 . . . 1919 |
| Scyth2p4_010291 | 211 | 1518 | 1 . . . 433, 494 . . . 1518 |
| Scyth2p4_010295 | 212 | 657 | 1 . . . 222, 295 . . . 657 |
| Scyth2p4_010361 | 213 | 2163 | 1 . . . 181, 246 . . . 428, 529 . . . 2069, 2131 . . . 2163 |
| Scyth2p4_010373 | 214 | 1526 | 1 . . . 288, 341 . . . 1085, 1144 . . . 1526 |
| Scyth2p4_010387 | 215 | 3027 | 1 . . . 3027 |
| Scyth2p4_010416 | 216 | 2030 | 1 . . . 1078, 1139 . . . 1914, 1986 . . . 2030 |
| Scyth2p4_010423 | 217 | 1254 | 1 . . . 377, 450 . . . 1254 |
| Scyth2p4_010457 | 218 | 815 | 1 . . . 278, 353 . . . 683, 741 . . . 815 |
| Scyth2p4_010462 | 219 | 1779 | 1 . . . 298, 364 . . . 713, 1244 . . . 1314, 1387 . . . 1458, 1557 . . . 1779 |
| Scyth2p4_010469 | 220 | 1917 | 1 . . . 592, 650 . . . 1917 |
| Scyth2p4_010519 | 221 | 1418 | 1 . . . 1162, 1231 . . . 1418 |
| Scyth2p4_010552 | 222 | 2203 | 1 . . . 208, 292 . . . 578, 676 . . . 802, 860 . . . 1321, 1389 . . . 2203 |
| Scyth2p4_010553 | 223 | 2644 | 1 . . . 88, 1200 . . . 1752, 1831 . . . 2644 |
| Scyth2p4_010743 | 224 | 886 | 1 . . . 55, 121 . . . 480, 600 . . . 886 |
| Scyth2p4_010756 | 225 | 846 | 1 . . . 846 |
| Scyth2p4_010779 | 226 | 6427 | 1 . . . 137, 192 . . . 449, 512 . . . 637, 710 . . . 733, 790 . . . 940, 1009 . . . 1204, 1257 . . . 1375, |
| | | | 1449 . . . 1654, 1742 . . . 2087, 2253 . . . 4325, 4700 . . . 6427 |
| Scyth2p4_010780 | 227 | 2746 | 1 . . . 427, 481 . . . 1299, 1380 . . . 2746 |
| Scyth2p4_010784 | 228 | 2733 | 1 . . . 2733 |
| Scyth2p4_010822 | 229 | 1217 | 1 . . . 317, 411 . . . 803, 1124 . . . 1217 |
| Scyth2p4_010823 | 230 | 2353 | 1 . . . 384, 437 . . . 2353 |
| Scyth2p4_010825 | 231 | 1500 | 1 . . . 429, 484 . . . 657, 715 . . . 1500 |
| Scyth2p4_010857 | 232 | 752 | 1 . . . 260, 329 . . . 752 |
| Scyth2p4_010865 | 233 | 906 | 1 . . . 906 |
| Scyth2p4_010870 | 234 | 1979 | 1 . . . 934, 1024 . . . 1979 |
| Scyth2p4_010884 | 235 | 1514 | 1 . . . 399, 486 . . . 658, 874 . . . 1277, 1474 . . . 1514 |
| Scyth2p4_010894 | 236 | 1143 | 1 . . . 369, 433 . . . 612, 712 . . . 1143 |
| Scyth2p4_010898 | 237 | 1426 | 1 . . . 336, 403 . . . 629, 703 . . . 1426 |
| Scyth2p4_010899 | 238 | 1682 | 1 . . . 116, 182 . . . 612, 687 . . . 1275, 1337 . . . 1682 |
| Scyth2p4_001141 | 239 | 1447 | 1 . . . 112, 172 . . . 1085, 1196 . . . 1447 |
| Scyth2p4_001257 | 240 | 1005 | 1 . . . 1005 |
| Scyth2p4_001442 | 241 | 759 | 1 . . . 104, 201 . . . 604, 692 . . . 759 |
| Scyth2p4_001768 | 242 | 2206 | 1 . . . 179, 253 . . . 912, 970 . . . 2206 |
| Scyth2p4_002054 | 243 | 1751 | 1 . . . 217, 303 . . . 1130, 1195 . . . 1751 |
| Scyth2p4_003709 | 244 | 336 | 1 . . . 336 |
| Scyth2p4_003954 | 245 | 2366 | 1 . . . 116, 181 . . . 239, 297 . . . 335, 485 . . . 540, 595 . . . 699, 765 . . . 780, 834 . . . 1279, |
| | | | 1335 . . . 1657, 1720 . . . 1782, 2075 . . . 2366 |
| Scyth2p4_004342 | 246 | 1363 | 1 . . . 230, 306 . . . 555, 617 . . . 1363 |
| Scyth2p4_004817 | 247 | 1785 | 1 . . . 1785 |
| Scyth2p4_005217 | 248 | 1210 | 1 . . . 291, 357 . . . 576, 645 . . . 1210 |
| Scyth2p4_007345 | 249 | 1540 | 1 . . . 167, 233 . . . 395, 535 . . . 621, 688 . . . 851, 955 . . . 1540 |
| Scyth2p4_007869 | 250 | 579 | 1 . . . 579 |
| Scyth2p4_009477 | 251 | 2054 | 1 . . . 386, 445 . . . 929, 994 . . . 1811, 1887 . . . 2054 |
| Scyth2p4_009552 | 252 | 940 | 1 . . . 88, 256 . . . 617, 701 . . . 940 |
| Scyth2p4_009704 | 253 | 1311 | 1 . . . 1311 |
| Scyth2p4_010302 | 254 | 551 | 1 . . . 141, 198 . . . 551 |
| Scyth2p4_010820 | 255 | 565 | 1 . . . 208, 288 . . . 565 |
| SCYTH_1_00385 | 256 | 2721 | 1 . . . 621, 673 . . . 2721 |
| SCYTH_1_00739 | 257 | 1958 | 1 . . . 177, 292 . . . 1458, 1530 . . . 1958 |
| SCYTH_1_03688 | 259 | 1059 | 1 . . . 1059 |
| SCYTH_1_09019 | 260 | 1199 | 1 . . . 264, 333 . . . 1199 |
| SCYTH_2_05417 | 261 | 1625 | 1 . . . 413, 466 . . . 551, 607 . . . 1625 |
| Scyth2p4_000071 | 263 | 2145 | 1 . . . 899, 959 . . . 1427, 1519 . . . 2145 |
| Scyth2p4_000786 | 264 | 1472 | 1 . . . 42, 141 . . . 298, 361 . . . 1295, 1360 . . . 1472 |
| Scyth2p4_000879 | 265 | 1375 | 1 . . . 153, 218 . . . 1375 |
| Scyth2p4_001265 | 266 | 990 | 1 . . . 88, 170 . . . 410, 483 . . . 757, 827 . . . 990 |
| Scyth2p4_001349 | 267 | 2050 | 1 . . . 255, 331 . . . 466, 537 . . . 691, 750 . . . 1066, 1122 . . . 1297, 1360 . . . 1726, |
| | | | 1801 . . . 2050 |
| Scyth2p4_002059 | 268 | 1768 | 1 . . . 400, 481 . . . 714, 780 . . . 971, 1045 . . . 1147, 1202 . . . 1587, 1650 . . . 1768 |
| Scyth2p4_002062 | 269 | 1792 | 1 . . . 471, 530 . . . 1792 |
| Scyth2p4_002618 | 270 | 2078 | 1 . . . 548, 605 . . . 2078 |
| Scyth2p4_002885 | 271 | 1352 | 1 . . . 1242, 1299 . . . 1352 |
| Scyth2p4_003845 | 272 | 2564 | 1 . . . 370, 442 . . . 559, 629 . . . 966, 1536 . . . 1596, 1718 . . . 1769, 2022 . . . 2564 |
| Scyth2p4_003921 | 273 | 2399 | 1 . . . 2090, 2153 . . . 2399 |
| Scyth2p4_003974 | 274 | 2051 | 1 . . . 305, 383 . . . 1135, 1199 . . . 2051 |
| Scyth2p4_003996 | 275 | 2901 | 1 . . . 129, 196 . . . 552, 613 . . . 2901 |
| Scyth2p4_004891 | 276 | 1507 | 1 . . . 333, 393 . . . 622, 676 . . . 1507 |
| Scyth2p4_005785 | 277 | 1098 | 1 . . . 1098 |
| Scyth2p4_006840 | 278 | 914 | 1 . . . 419, 500 . . . 914 |
| Scyth2p4_007340 | 279 | 1926 | 1 . . . 111, 178 . . . 1926 |
| Scyth2p4_007698 | 280 | 1624 | 1 . . . 470, 560 . . . 1094, 1154 . . . 1624 |
| Scyth2p4_008300 | 281 | 990 | 1 . . . 261, 324 . . . 850, 912 . . . 990 |
| Scyth2p4_009549 | 282 | 1648 | 1 . . . 295, 346 . . . 689, 752 . . . 1648 |
| Scyth2p4_010449 | 283 | 3157 | 1 . . . 607, 730 . . . 1125, 1872 . . . 2083, 2138 . . . 2789, 2844 . . . 3157 |
| Scyth2p4_010575 | 284 | 1398 | 1 . . . 606, 669 . . . 822, 881 . . . 1398 |
| Scyth2p4_010881 | 285 | 1640 | 1 . . . 500, 602 . . . 1640 |

TABLE 2B
List of genes of Myriococcum thermophilum with reference to exon boundaries

| | Genomic | | |
|---|---|---|---|
| | sequence | Genomic | |
| | (SEQ | sequence | |
| Gene ID | ID NO:) | length | Exon boundaries (nucleotide positions) and exons |
| Myrth2p4_000015 | 856 | 1707 | 1 . . . 1707 |
| Myrth2p4_000358 | 857 | 745 | 1 . . . 394, 462 . . . 745 |
| Myrth2p4_000359 | 858 | 2483 | 1 . . . 52, 189 . . . 1034, 1144 . . . 1265, 1394 . . . 1487, 1569 . . . 1618, |
| | | | 1683 . . . 1761, 1823 . . . 2055, 2129 . . . 2171, 2266 . . . 2483 |
| Myrth2p4_000363 | 859 | 1856 | 1 . . . 781, 858 . . . 943, 1497 . . . 1856 |
| Myrth2p4_000376 | 860 | 1528 | 1 . . . 96, 159 . . . 416, 639 . . . 835, 930 . . . 1142, 1232 . . . 1410, |
| | | | 1485 . . . 1528 |
| Myrth2p4_000388 | 861 | 2404 | 1 . . . 561, 1278 . . . 1414, 1510 . . . 1722, 1806 . . . 2052, 2156 . . . 2286, |
| | | | 2347 . . . 2404 |
| Myrth2p4_000417 | 862 | 1017 | 1 . . . 178, 302 . . . 1017 |
| Myrth2p4_000486 | 863 | 732 | 1 . . . 732 |
| Myrth2p4_000495 | 864 | 2067 | 1 . . . 261, 718 . . . 2067 |
| Myrth2p4_000510 | 865 | 898 | 1 . . . 224, 352 . . . 898 |
| Myrth2p4_000524 | 866 | 832 | 1 . . . 99, 188 . . . 832 |
| Myrth2p4_000531 | 867 | 780 | 1 . . . 780 |
| Myrth2p4_000543 | 868 | 1606 | 1 . . . 208, 276 . . . 1184, 1254 . . . 1606 |
| Myrth2p4_000545 | 869 | 1589 | 1 . . . 159, 216 . . . 456, 527 . . . 1221, 1284 . . . 1368, 1423 . . . 1589 |
| Myrth2p4_000589 | 870 | 1212 | 1 . . . 1212 |
| Myrth2p4_000694 | 871 | 2139 | 1 . . . 204, 289 . . . 1559, 1616 . . . 1711, 1767 . . . 2139 |
| Myrth2p4_000867 | 872 | 1534 | 1 . . . 442, 522 . . . 1534 |
| Myrth2p4_000999 | 873 | 966 | 1 . . . 552, 733 . . . 966 |
| Myrth2p4_001083 | 874 | 1722 | 1 . . . 502, 560 . . . 1722 |
| Myrth2p4_001208 | 875 | 1570 | 1 . . . 192, 287 . . . 1570 |
| Myrth2p4_001304 | 876 | 2903 | 1 . . . 43, 102 . . . 286, 339 . . . 1772, 1842 . . . 1984, 2042 . . . 2133, |
| | | | 2202 . . . 2434, 2547 . . . 2903 |
| Myrth2p4_001319 | 877 | 908 | 1 . . . 644, 729 . . . 781, 859 . . . 908 |
| Myrth2p4_001328 | 878 | 1329 | 1 . . . 417, 528 . . . 685, 803 . . . 1191, 1304 . . . 1329 |
| Myrth2p4_001333 | 879 | 862 | 1 . . . 243, 323 . . . 862 |
| Myrth2p4_001339 | 880 | 2984 | 1 . . . 72, 319 . . . 473, 534 . . . 922, 985 . . . 2984 |
| Myrth2p4_001354 | 881 | 1147 | 1 . . . 79, 181 . . . 230, 290 . . . 690, 763 . . . 1147 |
| Myrth2p4_001362 | 882 | 975 | 1 . . . 975 |
| Myrth2p4_001366 | 883 | 1144 | 1 . . . 116, 208 . . . 1144 |
| Myrth2p4_001368 | 884 | 2334 | 1 . . . 2334 |
| Myrth2p4_001374 | 885 | 832 | 1 . . . 63, 156 . . . 545, 623 . . . 832 |
| Myrth2p4_001375 | 886 | 1418 | 1 . . . 80, 148 . . . 548, 696 . . . 1156, 1269 . . . 1418 |
| Myrth2p4_001378 | 887 | 1336 | 1 . . . 362, 445 . . . 490, 626 . . . 1211, 1305 . . . 1336 |
| Myrth2p4_001403 | 888 | 1045 | 1 . . . 489, 593 . . . 1045 |
| Myrth2p4_001451 | 889 | 1399 | 1 . . . 275, 982 . . . 1399 |
| Myrth2p4_001463 | 890 | 1501 | 1 . . . 152, 263 . . . 411, 522 . . . 1501 |
| Myrth2p4_001467 | 891 | 1758 | 1 . . . 90, 189 . . . 541, 631 . . . 703, 774 . . . 1022, 1168 . . . 1758 |
| Myrth2p4_001469 | 892 | 1980 | 1 . . . 1980 |
| Myrth2p4_001494 | 893 | 2445 | 1 . . . 2445 |
| Myrth2p4_001496 | 894 | 2357 | 1 . . . 212, 276 . . . 1086, 1137 . . . 2357 |
| Myrth2p4_001537 | 895 | 856 | 1 . . . 121, 177 . . . 301, 362 . . . 619, 674 . . . 856 |
| Myrth2p4_001550 | 896 | 1373 | 1 . . . 515, 619 . . . 892, 969 . . . 1042, 1109 . . . 1281, 1336 . . . 1373 |
| Myrth2p4_001581 | 897 | 992 | 1 . . . 284, 358 . . . 431, 503 . . . 544, 639 . . . 856, 936 . . . 992 |
| Myrth2p4_001582 | 898 | 2779 | 1 . . . 524, 653 . . . 1227, 1324 . . . 1411, 1573 . . . 1810, 1913 . . . 1924, |
| | | | 2091 . . . 2221, 2500 . . . 2779 |
| Myrth2p4_001589 | 899 | 1968 | 1 . . . 111, 219 . . . 1339, 1443 . . . 1870, 1943 . . . 1968 |
| Myrth2p4_001667 | 900 | 813 | 1 . . . 813 |
| Myrth2p4_001718 | 901 | 1199 | 1 . . . 549, 642 . . . 1199 |
| Myrth2p4_001719 | 902 | 1137 | 1 . . . 602, 687 . . . 1137 |
| Myrth2p4_001916 | 903 | 2201 | 1 . . . 175, 262 . . . 1542, 2161 . . . 2201 |
| Myrth2p4_001926 | 904 | 1185 | 1 . . . 1185 |
| Myrth2p4_001996 | 905 | 1648 | 1 . . . 432, 1188 . . . 1218, 1290 . . . 1416, 1561 . . . 1648 |
| Myrth2p4_002010 | 906 | 2007 | 1 . . . 2007 |
| Myrth2p4_002134 | 907 | 1607 | 1 . . . 337, 447 . . . 932, 1063 . . . 1607 |
| Myrth2p4_002293 | 908 | 1709 | 1 . . . 363, 467 . . . 1211, 1648 . . . 1709 |
| Myrth2p4_002328 | 909 | 1092 | 1 . . . 426, 561 . . . 703, 795 . . . 1092 |
| Myrth2p4_002394 | 910 | 1739 | 1 . . . 190, 315 . . . 1318, 1376 . . . 1567, 1680 . . . 1739 |
| Myrth2p4_002434 | 911 | 3417 | 1 . . . 667, 723 . . . 1169, 1240 . . . 1503, 1572 . . . 1663, 1744 . . . 1773, |
| | | | 1836 . . . 3071, 3172 . . . 3417 |
| Myrth2p4_002456 | 912 | 1392 | 1 . . . 43, 109 . . . 965, 1048 . . . 1392 |
| Myrth2p4_002548 | 913 | 6869 | 1 . . . 6781, 6853 . . . 6869 |
| Myrth2p4_002549 | 914 | 1714 | 1 . . . 156, 277 . . . 735, 792 . . . 999, 1098 . . . 1452, 1522 . . . 1714 |
| Myrth2p4_002563 | 915 | 4539 | 1 . . . 787, 911 . . . 943, 1060 . . . 1886, 2009 . . . 2275, 2372 . . . 3871, |
| | | | 3958 . . . 4539 |
| Myrth2p4_002601 | 916 | 1392 | 1 . . . 1392 |
| Myrth2p4_002632 | 917 | 2387 | 1 . . . 61, 165 . . . 586, 708 . . . 1379, 1500 . . . 2387 |
| Myrth2p4_002634 | 918 | 1987 | 1 . . . 153, 262 . . . 1428, 1556 . . . 1987 |
| Myrth2p4_002638 | 919 | 1431 | 1 . . . 109, 219 . . . 1145, 1355 . . . 1431 |
| Myrth2p4_002915 | 920 | 1074 | 1 . . . 287, 381 . . . 550, 647 . . . 1074 |
| Myrth2p4_002916 | 921 | 983 | 1 . . . 218, 280 . . . 632, 766 . . . 983 |
| Myrth2p4_002917 | 922 | 1449 | 1 . . . 791, 936 . . . 1449 |
| Myrth2p4_002930 | 923 | 2236 | 1 . . . 148, 208 . . . 838, 901 . . . 1192, 1259 . . . 1445, 1679 . . . 2052, |
| | | | 2213 . . . 2236 |
| Myrth2p4_003005 | 924 | 420 | 1 . . . 420 |
| Myrth2p4_003034 | 925 | 1297 | 1 . . . 380, 493 . . . 1297 |
| Myrth2p4_003051 | 926 | 1461 | 1 . . . 388, 581 . . . 806, 868 . . . 1083, 1165 . . . 1337, 1421 . . . 1461 |
| Myrth2p4_003065 | 927 | 1444 | 1 . . . 370, 512 . . . 876, 980 . . . 1053, 1136 . . . 1308, 1392 . . . 1444 |
| Myrth2p4_003070 | 928 | 2553 | 1 . . . 2553 |
| Myrth2p4_003103 | 929 | 1017 | 1 . . . 126, 211 . . . 304, 396 . . . 742, 853 . . . 1017 |
| Myrth2p4_003203 | 930 | 1679 | 1 . . . 409, 502 . . . 1679 |
| Myrth2p4_003274 | 931 | 1313 | 1 . . . 611, 722 . . . 803, 945 . . . 1313 |
| Myrth2p4_003333 | 932 | 1614 | 1 . . . 259, 326 . . . 414, 490 . . . 1614 |
| Myrth2p4_003368 | 933 | 836 | 1 . . . 281, 431 . . . 836 |
| Myrth2p4_003495 | 934 | 1463 | 1 . . . 404, 533 . . . 764, 834 . . . 1067, 1131 . . . 1463 |
| Myrth2p4_003633 | 935 | 953 | 1 . . . 406, 464 . . . 561, 631 . . . 744, 838 . . . 885, 942 . . . 953 |
| Myrth2p4_003679 | 936 | 1377 | 1 . . . 1377 |
| Myrth2p4_003685 | 937 | 1817 | 1 . . . 620, 721 . . . 792, 912 . . . 1183, 1264 . . . 1817 |
| Myrth2p4_003686 | 938 | 1412 | 1 . . . 323, 404 . . . 1412 |
| Myrth2p4_003747 | 939 | 880 | 1 . . . 152, 255 . . . 358, 448 . . . 558, 741 . . . 880 |
| Myrth2p4_003793 | 940 | 1421 | 1 . . . 204, 279 . . . 479, 537 . . . 1082, 1152 . . . 1421 |
| Myrth2p4_003921 | 941 | 1423 | 1 . . . 793, 997 . . . 1075, 1291 . . . 1423 |
| Myrth2p4_003927 | 942 | 1386 | 1 . . . 93, 168 . . . 176, 249 . . . 281, 481 . . . 713, 814 . . . 874, 983 . . . 1235, |
| | | | 1343 . . . 1386 |
| Myrth2p4_003941 | 943 | 1073 | 1 . . . 523, 630 . . . 871, 993 . . . 1073 |
| Myrth2p4_003942 | 944 | 1023 | 1 . . . 1023 |
| Myrth2p4_003966 | 945 | 630 | 1 . . . 377, 498 . . . 630 |
| Myrth2p4_004088 | 946 | 1334 | 1 . . . 73, 206 . . . 368, 497 . . . 601, 683 . . . 1334 |
| Myrth2p4_004089 | 947 | 3049 | 1 . . . 257, 445 . . . 872, 1021 . . . 2572, 2644 . . . 3049 |
| Myrth2p4_004201 | 948 | 1715 | 1 . . . 585, 639 . . . 1443, 1498 . . . 1715 |
| Myrth2p4_004260 | 949 | 1063 | 1 . . . 298, 375 . . . 641, 714 . . . 1063 |
| Myrth2p4_004335 | 950 | 1101 | 1 . . . 212, 294 . . . 356, 445 . . . 495, 586 . . . 931, 994 . . . 1101 |
| Myrth2p4_004336 | 951 | 1271 | 1 . . . 352, 451 . . . 1271 |
| Myrth2p4_004345 | 952 | 2164 | 1 . . . 962, 1017 . . . 1035, 1114 . . . 1304, 1387 . . . 1458, 1543 . . . 2164 |
| Myrth2p4_004391 | 953 | 1023 | 1 . . . 1023 |
| Myrth2p4_004393 | 954 | 1516 | 1 . . . 198, 257 . . . 1516 |
| Myrth2p4_004397 | 955 | 747 | 1 . . . 747 |
| Myrth2p4_004415 | 956 | 4416 | 1 . . . 4416 |
| Myrth2p4_004442 | 957 | 1619 | 1 . . . 328, 419 . . . 651, 723 . . . 831, 902 . . . 1183, 1315 . . . 1619 |
| Myrth2p4_004455 | 958 | 1449 | 1 . . . 1449 |
| Myrth2p4_004476 | 959 | 1406 | 1 . . . 153, 294 . . . 946, 1073 . . . 1242, 1360 . . . 1406 |
| Myrth2p4_004487 | 960 | 890 | 1 . . . 568, 648 . . . 706, 804 . . . 890 |
| Myrth2p4_004497 | 961 | 3374 | 1 . . . 837, 940 . . . 1927, 2026 . . . 3374 |
| Myrth2p4_004508 | 962 | 922 | 1 . . . 98, 175 . . . 742, 821 . . . 922 |
| Myrth2p4_004535 | 963 | 1827 | 1 . . . 1827 |
| Myrth2p4_004704 | 964 | 1510 | 1 . . . 545, 618 . . . 792, 852 . . . 1125, 1233 . . . 1510 |
| Myrth2p4_004725 | 965 | 2181 | 1 . . . 199, 267 . . . 442, 521 . . . 795, 878 . . . 1262, 1331 . . . 1937, |
| | | | 2129 . . . 2181 |
| Myrth2p4_004787 | 966 | 3029 | 1 . . . 84, 127 . . . 337, 433 . . . 518, 582 . . . 879, 934 . . . 1022, 1141 . . . 1244, |
| | | | 1301 . . . 1597, 1649 . . . 3029 |
| Myrth2p4_004788 | 967 | 1107 | 1 . . . 1107 |
| Myrth2p4_004953 | 968 | 540 | 1 . . . 540 |
| Myrth2p4_004960 | 969 | 1494 | 1 . . . 230, 336 . . . 484, 578 . . . 720, 813 . . . 981, 1043 . . . 1494 |
| Myrth2p4_004965 | 970 | 894 | 1 . . . 894 |
| Myrth2p4_004966 | 971 | 1094 | 1 . . . 162, 276 . . . 389, 486 . . . 1094 |
| Myrth2p4_004986 | 972 | 1542 | 1 . . . 263, 942 . . . 1542 |
| Myrth2p4_004993 | 973 | 1507 | 1 . . . 282, 363 . . . 548, 615 . . . 787, 861 . . . 1206, 1316 . . . 1507 |
| Myrth2p4_005017 | 974 | 1218 | 1 . . . 929, 1002 . . . 1218 |
| Myrth2p4_005025 | 975 | 4739 | 1 . . . 123, 186 . . . 437, 516 . . . 4739 |
| Myrth2p4_005037 | 976 | 777 | 1 . . . 353, 474 . . . 777 |
| Myrth2p4_005039 | 977 | 1352 | 1 . . . 1121, 1220 . . . 1352 |
| Myrth2p4_005084 | 978 | 744 | 1 . . . 242, 321 . . . 744 |
| Myrth2p4_005133 | 979 | 1232 | 1 . . . 156, 237 . . . 428, 503 . . . 1133, 1195 . . . 1232 |
| Myrth2p4_005148 | 980 | 1017 | 1 . . . 574, 686 . . . 1017 |
| Myrth2p4_005149 | 981 | 972 | 1 . . . 972 |
| Myrth2p4_005155 | 982 | 1668 | 1 . . . 129, 221 . . . 320, 397 . . . 723, 916 . . . 1432, 1575 . . . 1668 |
| Myrth2p4_005177 | 983 | 1506 | 1 . . . 195, 271 . . . 1506 |
| Myrth2p4_005191 | 984 | 1232 | 1 . . . 468, 556 . . . 961, 1096 . . . 1232 |
| Myrth2p4_005222 | 985 | 2622 | 1 . . . 2622 |
| Myrth2p4_005269 | 986 | 1382 | 1 . . . 197, 281 . . . 443, 520 . . . 592, 664 . . . 1382 |
| Myrth2p4_005317 | 987 | 3403 | 1 . . . 309, 389 . . . 2123, 2253 . . . 3403 |
| Myrth2p4_005320 | 988 | 969 | 1 . . . 969 |
| Myrth2p4_005321 | 989 | 972 | 1 . . . 466, 599 . . . 972 |
| Myrth2p4_005328 | 990 | 1194 | 1 . . . 1194 |
| Myrth2p4_005329 | 991 | 1292 | 1 . . . 101, 351 . . . 925, 1040 . . . 1089, 1170 . . . 1204, 1280 . . . 1292 |
| Myrth2p4_005340 | 992 | 1649 | 1 . . . 393, 458 . . . 543, 622 . . . 877, 1005 . . . 1649 |
| Myrth2p4_005343 | 993 | 975 | 1 . . . 55, 139 . . . 480, 611 . . . 748, 827 . . . 975 |
| Myrth2p4_005368 | 994 | 1724 | 1 . . . 294, 497 . . . 886, 1077 . . . 1429, 1493 . . . 1724 |
| Myrth2p4_005452 | 995 | 2892 | 1 . . . 313, 450 . . . 636, 723 . . . 2568, 2638 . . . 2892 |
| Myrth2p4_005454 | 996 | 845 | 1 . . . 440, 511 . . . 607, 675 . . . 845 |
| Myrth2p4_005463 | 997 | 1988 | 1 . . . 129, 199 . . . 302, 401 . . . 1067, 1856 . . . 1905, 1979 . . . 1988 |
| Myrth2p4_005484 | 998 | 1323 | 1 . . . 99, 159 . . . 315, 386 . . . 1323 |
| Myrth2p4_005539 | 999 | 2075 | 1 . . . 1359, 1487 . . . 1545, 1724 . . . 2075 |
| Myrth2p4_005561 | 1000 | 1779 | 1 . . . 392, 450 . . . 1779 |
| Myrth2p4_005590 | 1001 | 1462 | 1 . . . 1144, 1272 . . . 1462 |
| Myrth2p4_005626 | 1002 | 1492 | 1 . . . 594, 730 . . . 883, 978 . . . 1492 |
| Myrth2p4_005639 | 1003 | 1270 | 1 . . . 56, 123 . . . 434, 490 . . . 1270 |
| Myrth2p4_005750 | 1004 | 892 | 1 . . . 55, 156 . . . 512, 606 . . . 892 |
| Myrth2p4_005752 | 1005 | 1246 | 1 . . . 272, 427 . . . 1033, 1172 . . . 1246 |
| Myrth2p4_005753 | 1006 | 1022 | 1 . . . 690, 831 . . . 1022 |
| Myrth2p4_005819 | 1007 | 3131 | 1 . . . 303, 362 . . . 448, 527 . . . 835, 932 . . . 1920, 3032 . . . 3131 |
| Myrth2p4_005822 | 1008 | 1563 | 1 . . . 179, 240 . . . 358, 470 . . . 510, 575 . . . 661, 731 . . . 921, 1029 . . . 1563 |
| Myrth2p4_005854 | 1009 | 778 | 1 . . . 254, 361 . . . 778 |
| Myrth2p4_005856 | 1010 | 1010 | 1 . . . 134, 258 . . . 854, 929 . . . 1010 |
| Myrth2p4_005886 | 1011 | 1379 | 1 . . . 402, 512 . . . 675, 842 . . . 1236, 1330 . . . 1379 |
| Myrth2p4_005920 | 1012 | 1712 | 1 . . . 113, 179 . . . 609, 679 . . . 1270, 1367 . . . 1712 |
| Myrth2p4_005923 | 1013 | 1182 | 1 . . . 154, 221 . . . 344, 409 . . . 514, 590 . . . 769, 832 . . . 1182 |
| Myrth2p4_005937 | 1014 | 1623 | 1 . . . 1413, 1486 . . . 1623 |
| Myrth2p4_005945 | 1015 | 1166 | 1 . . . 267, 363 . . . 953, 1062 . . . 1166 |
| Myrth2p4_005946 | 1016 | 1293 | 1 . . . 284, 378 . . . 445, 532 . . . 955, 1107 . . . 1293 |
| Myrth2p4_005976 | 1017 | 1474 | 1 . . . 195, 261 . . . 307, 377 . . . 443, 499 . . . 556, 643 . . . 884, 982 . . . 1322, |
| | | | 1414 . . . 1474 |
| Myrth2p4_006001 | 1018 | 2433 | 1 . . . 249, 330 . . . 408, 509 . . . 520, 630 . . . 699, 768 . . . 1749, |
| | | | 1857 . . . 1928, 2020 . . . 2433 |
| Myrth2p4_006022 | 1019 | 1265 | 1 . . . 717, 855 . . . 1265 |
| Myrth2p4_006028 | 1020 | 1443 | 1 . . . 558, 781 . . . 1443 |
| Myrth2p4_006058 | 1021 | 967 | 1 . . . 320, 425 . . . 792, 894 . . . 967 |
| Myrth2p4_006119 | 1022 | 1333 | 1 . . . 252, 319 . . . 954, 1088 . . . 1333 |
| Myrth2p4_006140 | 1023 | 1107 | 1 . . . 1107 |
| Myrth2p4_006141 | 1024 | 1434 | 1 . . . 1434 |
| Myrth2p4_006201 | 1025 | 814 | 1 . . . 198, 323 . . . 814 |
| Myrth2p4_006226 | 1026 | 1432 | 1 . . . 149, 231 . . . 400, 490 . . . 728, 874 . . . 1016, 1153 . . . 1432 |
| Myrth2p4_006305 | 1027 | 1746 | 1 . . . 361, 438 . . . 546, 656 . . . 925, 1002 . . . 1621, 1703 . . . 1746 |
| Myrth2p4_006387 | 1028 | 1255 | 1 . . . 88, 153 . . . 1255 |
| Myrth2p4_006397 | 1029 | 2458 | 1 . . . 293, 356 . . . 461, 545 . . . 687, 749 . . . 833, 897 . . . 957, 1017 . . . 1130, |
| | | | 1221 . . . 1232, 1382 . . . 1484, 1589 . . . 2250, 2355 . . . 2458 |
| Myrth2p4_006400 | 1030 | 1242 | 1 . . . 360, 425 . . . 581, 638 . . . 669, 727 . . . 1242 |
| Myrth2p4_006403 | 1031 | 1023 | 1 . . . 1023 |
| Myrth2p4_006408 | 1032 | 2597 | 1 . . . 248, 359 . . . 1232, 1317 . . . 1686, 1819 . . . 2597 |
| Myrth2p4_006434 | 1033 | 1642 | 1 . . . 327, 440 . . . 1642 |
| Myrth2p4_006514 | 1034 | 1662 | 1 . . . 372, 433 . . . 1662 |
| Myrth2p4_006524 | 1035 | 2020 | 1 . . . 51, 144 . . . 1175, 1253 . . . 2020 |
| Myrth2p4_006587 | 1036 | 3143 | 1 . . . 562, 658 . . . 3143 |
| Myrth2p4_006646 | 1037 | 890 | 1 . . . 186, 272 . . . 433, 486 . . . 890 |
| Myrth2p4_006765 | 1038 | 1042 | 1 . . . 460, 672 . . . 1042 |
| Myrth2p4_006772 | 1039 | 836 | 1 . . . 49, 133 . . . 406, 515 . . . 836 |
| Myrth2p4_006795 | 1040 | 1293 | 1 . . . 99, 158 . . . 304, 422 . . . 1111, 1231 . . . 1293 |
| Myrth2p4_006807 | 1041 | 889 | 1 . . . 145, 243 . . . 889 |
| Myrth2p4_006821 | 1042 | 936 | 1 . . . 324, 508 . . . 936 |
| Myrth2p4_006837 | 1043 | 2207 | 1 . . . 192, 256 . . . 311, 380 . . . 550, 627 . . . 797, 901 . . . 1029, 1097 . . . 2207 |
| Myrth2p4_007013 | 1044 | 648 | 1 . . . 209, 273 . . . 648 |
| Myrth2p4_007061 | 1045 | 1350 | 1 . . . 847, 947 . . . 1350 |
| Myrth2p4_007109 | 1046 | 2288 | 1 . . . 262, 315 . . . 2124, 2234 . . . 2288 |
| Myrth2p4_007127 | 1047 | 1074 | 1 . . . 1074 |
| Myrth2p4_007150 | 1048 | 947 | 1 . . . 122, 236 . . . 291 . . . 523 . . . 947 |
| Myrth2p4_007367 | 1049 | 1265 | 1 . . . 159, 260 . . . 605, 895 . . . 1265 |
| Myrth2p4_007409 | 1050 | 775 | 1 . . . 295, 408 . . . 775 |
| Myrth2p4_007425 | 1051 | 1247 | 1 . . . 145, 214 . . . 852, 1000 . . . 1247 |
| Myrth2p4_007444 | 1052 | 2844 | 1 . . . 49, 120 . . . 286, 343 . . . 824, 890 . . . 1229, 1309 . . . 1798, |
| | | | 1868 . . . 2133, 2198 . . . 2291, 2369 . . . 2844 |
| Myrth2p4_007447 | 1053 | 1001 | 1 . . . 281, 398 . . . 1001 |
| Myrth2p4_007461 | 1054 | 1398 | 1 . . . 439, 539 . . . 863, 978 . . . 1398 |
| Myrth2p4_007538 | 1055 | 1748 | 1 . . . 1587, 1716 . . . 1748 |
| Myrth2p4_007539 | 1056 | 1659 | 1 . . . 383, 509 . . . 660, 796 . . . 1218, 1395 . . . 1459, 1576 . . . 1659 |
| Myrth2p4_007540 | 1057 | 412 | 1 . . . 49, 138 . . . 412 |
| Myrth2p4_007556 | 1058 | 1334 | 1 . . . 414, 553 . . . 578, 671 . . . 729, 856 . . . 916, 1049 . . . 1334 |
| Myrth2p4_007648 | 1059 | 2854 | 1 . . . 79, 134 . . . 205, 268 . . . 341, 408 . . . 897, 1065 . . . 2052, |
| | | | 2121 . . . 2188, 2337 . . . 2854 |
| Myrth2p4_007688 | 1060 | 1185 | 1 . . . 993, 1090 . . . 1185 |
| Myrth2p4_007726 | 1061 | 912 | 1 . . . 912 |
| Myrth2p4_007729 | 1062 | 1343 | 1 . . . 168, 225 . . . 554, 612 . . . 1343 |
| Myrth2p4_007771 | 1063 | 1668 | 1 . . . 108, 223 . . . 316, 461 . . . 704, 793 . . . 999, 1104 . . . 1668 |
| Myrth2p4_007781 | 1064 | 1734 | 1 . . . 806, 882 . . . 1077, 1213 . . . 1734 |
| Myrth2p4_007801 | 1065 | 1071 | 1 . . . 1071 |
| Myrth2p4_007815 | 1066 | 1200 | 1 . . . 444, 564 . . . 1004, 1105 . . . 1200 |
| Myrth2p4_007838 | 1067 | 1167 | 1 . . . 181, 292 . . . 371, 443 . . . 492, 572 . . . 616, 771 . . . 1167 |
| Myrth2p4_007849 | 1068 | 1718 | 1 . . . 110, 184 . . . 238, 312 . . . 548, 652 . . . 854, 996 . . . 1137, |
| | | | 1198 . . . 1283, 1403 . . . 1575, 1681 . . . 1718 |
| Myrth2p4_007850 | 1069 | 1609 | 1 . . . 338, 455 . . . 551, 646 . . . 845, 938 . . . 1085, 1168 . . . 1426, |
| | | | 1572 . . . 1609 |
| Myrth2p4_007861 | 1070 | 1877 | 1 . . . 818, 928 . . . 1124, 1193 . . . 1340, 1415 . . . 1877 |
| Myrth2p4_007867 | 1071 | 1410 | 1 . . . 606, 703 . . . 1410 |
| Myrth2p4_007877 | 1072 | 884 | 1 . . . 100, 167 . . . 528, 639 . . . 884 |
| Myrth2p4_007915 | 1073 | 1106 | 1 . . . 155, 313 . . . 930, 1022 . . . 1106 |
| Myrth2p4_007920 | 1074 | 2385 | 1 . . . 255, 313 . . . 498, 1414 . . . 1496, 1564 . . . 2038, 2194 . . . 2385 |
| Myrth2p4_007924 | 1075 | 2637 | 1 . . . 2637 |
| Myrth2p4_007956 | 1076 | 753 | 1 . . . 753 |
| Myrth2p4_007996 | 1077 | 2049 | 1 . . . 622, 701 . . . 2049 |
| Myrth2p4_008028 | 1078 | 833 | 1 . . . 371, 464 . . . 833 |
| Myrth2p4_008123 | 1079 | 1260 | 1 . . . 1260 |
| Myrth2p4_008179 | 1080 | 1099 | 1 . . . 961, 1029 . . . 1099 |
| Myrth2p4_008220 | 1081 | 1215 | 1 . . . 373, 467 . . . 1215 |
| Myrth2p4_008285 | 1082 | 2530 | 1 . . . 148, 224 . . . 661, 729 . . . 2530 |
| Myrth2p4_008298 | 1083 | 832 | 1 . . . 347, 445 . . . 665, 753 . . . 832 |
| Myrth2p4_008299 | 1084 | 2568 | 1 . . . 203, 330 . . . 2568 |
| Myrth2p4_008353 | 1085 | 2398 | 1 . . . 397, 462 . . . 2398 |
| Myrth2p4_008360 | 1086 | 2788 | 1 . . . 476, 603 . . . 835, 942 . . . 2788 |
| Myrth2p4_008429 | 1087 | 1077 | 1 . . . 134, 369 . . . 1077 |
| Myrth2p4_008437 | 1088 | 903 | 1 . . . 903 |
| Myrth2p4_008501 | 1089 | 1776 | 1 . . . 49, 165 . . . 566, 740 . . . 996, 1106 . . . 1178, 1238 . . . 1776 |
| Myrth2p4_008515 | 1090 | 1780 | 1 . . . 92, 167 . . . 642, 738 . . . 1322, 1518 . . . 1780 |
| Myrth2p4_008522 | 1091 | 1443 | 1 . . . 1443 |
| Myrth2p4_008530 | 1092 | 915 | 1 . . . 101, 210 . . . 757, 827 . . . 915 |
| Myrth2p4_008541 | 1093 | 918 | 1 . . . 918 |
| Myrth2p4_008564 | 1094 | 727 | 1 . . . 307, 462 . . . 727 |
| Myrth2p4_008615 | 1095 | 2721 | 1 . . . 2721 |
| Myrth2p4_008650 | 1096 | 246 | 1 . . . 246 |
| Myrth2p4_008756 | 1097 | 1296 | 1 . . . 1296 |
| Myrth2p4_000413 | 1098 | 1746 | 1 . . . 585, 663 . . . 1034, 1108 . . . 1596, 1663 . . . 1746 |
| Myrth2p4_000624 | 1099 | 700 | 1 . . . 93, 267 . . . 415, 538 . . . 700 |
| Myrth2p4_001189 | 1100 | 2148 | 1 . . . 106, 160 . . . 550, 609 . . . 2148 |
| Myrth2p4_001457 | 1101 | 1746 | 1 . . . 1477, 1532 . . . 1746 |
| Myrth2p4_001536 | 1102 | 2030 | 1 . . . 72, 186 . . . 739, 886 . . . 1156, 1232 . . . 1514, 1580 . . . 1814, |
| | | | 1877 . . . 2030 |
| Myrth2p4_001740 | 1103 | 1337 | 1 . . . 1218, 1290 . . . 1337 |
| Myrth2p4_003589 | 1104 | 1593 | 1 . . . 378, 447 . . . 676, 735 . . . 1593 |
| Myrth2p4_003938 | 1105 | 1474 | 1 . . . 257, 466 . . . 1474 |
| Myrth2p4_006092 | 1106 | 828 | 1 . . . 301, 362 . . . 828 |
| Myrth2p4_006213 | 1107 | 1376 | 1 . . . 651, 746 . . . 1055, 1213 . . . 1376 |
| Myrth2p4_008350 | 1108 | 1793 | 1 . . . 348, 452 . . . 889, 972 . . . 1793 |
| MYRTH_1_00009 | 1111 | 1649 | 1 . . . 393, 458 . . . 877, 1005 . . . 1649 |
| MYRTH_1_00020 | 1112 | 1614 | 1 . . . 259, 314 . . . 418, 485 . . . 1614 |
| MYRTH_1_00021 | 1113 | 2445 | 1 . . . 1323, 2275 . . . 2445 |
| MYRTH_1_00032 | 1116 | 2544 | 1 . . . 801, 904 . . . 1891, 1990 . . . 2443, 2511 . . . 2544 |
| MYRTH_1_00037 | 1117 | 815 | 1 . . . 660, 705 . . . 815 |
| MYRTH_1_00069 | 1118 | 1829 | 1 . . . 36, 104 . . . 1270, 1398 . . . 1829 |
| MYRTH_1_00080 | 1119 | 884 | 1 . . . 100, 167 . . . 528, 603 . . . 884 |
| MYRTH_1_00084 | 1120 | 1817 | 1 . . . 620, 721 . . . 792, 912 . . . 1183, 1306 . . . 1817 |
| MYRTH_1_00087 | 1121 | 3029 | 1 . . . 84, 127 . . . 337, 433 . . . 518, 582 . . . 1022, 1141 . . . 1244, |
| | | | 1301 . . . 1597, 1649 . . . 3029 |
| MYRTH_1_00098 | 1122 | 1255 | 1 . . . 88, 153 . . . 460, 581 . . . 1255 |
| MYRTH_2_00218 | 1123 | 929 | 1 . . . 444, 542 . . . 762, 850 . . . 929 |
| MYRTH_2_00583 | 1124 | 3143 | 1 . . . 562, 658 . . . 3143 |
| MYRTH_2_00740 | 1125 | 1290 | 1 . . . 1290 |
| MYRTH_2_01076 | 1127 | 1321 | 1 . . . 107, 174 . . . 485, 541 . . . 1321 |
| MYRTH_2_01077 | 1128 | 1306 | 1 . . . 92, 159 . . . 470, 526 . . . 1306 |
| MYRTH_2_02633 | 1132 | 2398 | 1 . . . 397, 462 . . . 2398 |
| MYRTH_2_04186 | 1134 | 1410 | 1 . . . 606, 703 . . . 1410 |
| MYRTH_2_04244 | 1135 | 1218 | 1 . . . 929, 1002 . . . 1218 |
| MYRTH_3_00003 | 1138 | 1343 | 1 . . . 168, 342 . . . 554, 612 . . . 1343 |
| MYRTH_3_00016 | 1139 | 1839 | 1 . . . 1269, 1819 . . . 1839 |
| MYRTH_3_00086 | 1140 | 1614 | 1 . . . 259, 314 . . . 414, 490 . . . 1614 |
| MYRTH_3_00105 | 1141 | 1101 | 1 . . . 239, 294 . . . 356, 586 . . . 931, 994 . . . 1101 |
| MYRTH_3_00120 | 1142 | 1293 | 1 . . . 81, 155 . . . 304, 422 . . . 1111, 1231 . . . 1293 |
| MYRTH_3_00124 | 1143 | 1208 | 1 . . . 101, 351 . . . 925, 1040 . . . 1089, 1170 . . . 1208 |
| MYRTH_4_05758 | 1145 | 1107 | 1 . . . 1107 |
| MYRTH_4_09820 | 1147 | 929 | 1 . . . 444, 542 . . . 762, 850 . . . 929 |
| Myrth2p4_000387 | 1148 | 2075 | 1 . . . 500, 590 . . . 2075 |
| Myrth2p4_000489 | 1149 | 1882 | 1 . . . 505, 585 . . . 740, 816 . . . 1882 |
| Myrth2p4_001363 | 1150 | 2403 | 1 . . . 2403 |
| Myrth2p4_001546 | 1151 | 2436 | 1 . . . 208, 333 . . . 365, 429 . . . 694, 777 . . . 903, 970 . . . 1434, |
| | | | 1537 . . . 2312, 2407 . . . 2436 |
| Myrth2p4_002267 | 1152 | 2258 | 1 . . . 166, 248 . . . 1162, 1268 . . . 2058, 2214 . . . 2258 |
| Myrth2p4_002365 | 1153 | 2437 | 1 . . . 243, 373 . . . 508, 726 . . . 880, 1037 . . . 1353, 1454 . . . 1629, |
| | | | 1708 . . . 2062, 2146 . . . 2437 |
| Myrth2p4_003086 | 1154 | 2154 | 1 . . . 181, 241 . . . 557, 622 . . . 2022, 2110 . . . 2154 |
| Myrth2p4_004152 | 1155 | 840 | 1 . . . 840 |
| Myrth2p4_004330 | 1156 | 1516 | 1 . . . 204, 280 . . . 709, 840 . . . 1516 |
| Myrth2p4_004961 | 1157 | 1122 | 1 . . . 273, 371 . . . 900, 1044 . . . 1122 |
| Myrth2p4_005807 | 1158 | 1132 | 1 . . . 224, 356 . . . 565, 674 . . . 831, 903 . . . 1132 |
| Myrth2p4_005966 | 1159 | 1806 | 1 . . . 468, 544 . . . 1806 |
| Myrth2p4_006645 | 1160 | 1260 | 1 . . . 1260 |
| Myrth2p4_008594 | 1161 | 1622 | 1 . . . 1047, 1143 . . . 1622 |

TABLE 2C
List of genes of Aureobasidium pullulans with reference to exon boundaries

| | Genomic | | |
|---|---|---|---|
| | sequence | Genomic | |
| | (SEQ | sequence | |
| Gene ID | ID NO:) | length | Exon boundaries (nucleotide positions) and exons |
| Aurpu2p4_000013 | 1774 | 1865 | 1 . . . 920, 1067 . . . 1865 |
| Aurpu2p4_000017 | 1775 | 1820 | 1 . . . 454, 518 . . . 596, 651 . . . 858, 911 . . . 1045, 1099 . . . 1312, |
| | | | 1376 . . . 1681, 1735 . . . 1820 |
| Aurpu2p4_000070 | 1776 | 1376 | 1 . . . 78, 132 . . . 1376 |
| Aurpu2p4_000074 | 1777 | 2572 | 1 . . . 88, 153 . . . 468, 523 . . . 808, 881 . . . 2572 |
| Aurpu2p4_000163 | 1778 | 798 | 1 . . . 215, 276 . . . 798 |
| Aurpu2p4_000184 | 1779 | 1321 | 1 . . . 185, 247 . . . 1139, 1191 . . . 1321 |
| Aurpu2p4_000224 | 1780 | 1215 | 1 . . . 288, 471 . . . 632, 687 . . . 1126, 1185 . . . 1215 |
| Aurpu2p4_000225 | 1781 | 781 | 1 . . . 312, 368 . . . 781 |
| Aurpu2p4_000232 | 1782 | 1110 | 1 . . . 1110 |
| Aurpu2p4_000354 | 1783 | 1638 | 1 . . . 1638 |
| Aurpu2p4_000408 | 1784 | 2361 | 1 . . . 2361 |
| Aurpu2p4_000459 | 1785 | 1362 | 1 . . . 62, 120 . . . 200, 252 . . . 1362 |
| Aurpu2p4_000533 | 1786 | 2403 | 1 . . . 2403 |
| Aurpu2p4_000568 | 1787 | 1215 | 1 . . . 1215 |
| Aurpu2p4_000586 | 1788 | 882 | 1 . . . 882 |
| Aurpu2p4_000590 | 1789 | 2013 | 1 . . . 235, 304 . . . 648, 713 . . . 1024, 1076 . . . 2013 |
| Aurpu2p4_000594 | 1790 | 2027 | 1 . . . 1250, 1298 . . . 2027 |
| Aurpu2p4_000617 | 1791 | 1575 | 1 . . . 1575 |
| Aurpu2p4_000662 | 1792 | 1380 | 1 . . . 279, 329 . . . 1105, 1159 . . . 1380 |
| Aurpu2p4_000692 | 1793 | 1589 | 1 . . . 53, 106 . . . 767, 818 . . . 1406, 1454 . . . 1589 |
| Aurpu2p4_000730 | 1794 | 1727 | 1 . . . 463, 520 . . . 1433, 1488 . . . 1727 |
| Aurpu2p4_000792 | 1795 | 1526 | 1 . . . 299, 351 . . . 534, 583 . . . 646, 779 . . . 810, 954 . . . 1526 |
| Aurpu2p4_000799 | 1796 | 2676 | 1 . . . 2676 |
| Aurpu2p4_000819 | 1797 | 1791 | 1 . . . 329, 389 . . . 548, 625 . . . 1791 |
| Aurpu2p4_000860 | 1798 | 2241 | 1 . . . 304, 353 . . . 2241 |
| Aurpu2p4_000919 | 1799 | 1487 | 1 . . . 609, 661 . . . 926, 976 . . . 1091, 1142 . . . 1174, 1225 . . . 1487 |
| Aurpu2p4_000934 | 1800 | 1381 | 1 . . . 446, 499 . . . 689, 741 . . . 1381 |
| Aurpu2p4_000947 | 1801 | 1896 | 1 . . . 1896 |
| Aurpu2p4_000948 | 1802 | 1863 | 1 . . . 171, 227 . . . 284, 339 . . . 386, 445 . . . 722, 778 . . . 1863 |
| Aurpu2p4_000984 | 1803 | 2609 | 1 . . . 966, 1017 . . . 2609 |
| Aurpu2p4_000995 | 1804 | 1104 | 1 . . . 455, 516 . . . 1104 |
| Aurpu2p4_001037 | 1805 | 1828 | 1 . . . 43, 103 . . . 1070, 1124 . . . 1828 |
| Aurpu2p4_001097 | 1806 | 3426 | 1 . . . 3426 |
| Aurpu2p4_001104 | 1807 | 1469 | 1 . . . 428, 479 . . . 1469 |
| Aurpu2p4_001152 | 1808 | 1435 | 1 . . . 1155, 1214 . . . 1435 |
| Aurpu2p4_001194 | 1809 | 6009 | 1 . . . 6009 |
| Aurpu2p4_001195 | 1810 | 1372 | 1 . . . 189, 239 . . . 651, 761 . . . 1178, 1229 . . . 1372 |
| Aurpu2p4_001256 | 1811 | 802 | 1 . . . 284, 338 . . . 416, 476 . . . 802 |
| Aurpu2p4_001441 | 1812 | 1949 | 1 . . . 361, 418 . . . 1949 |
| Aurpu2p4_001503 | 1813 | 1493 | 1 . . . 133, 185 . . . 503, 557 . . . 1493 |
| Aurpu2p4_001504 | 1814 | 1658 | 1 . . . 292, 350 . . . 517, 571 . . . 719, 773 . . . 868, 942 . . . 1163, 1224 . . . 1658 |
| Aurpu2p4_001512 | 1815 | 1663 | 1 . . . 1581, 1634 . . . 1663 |
| Aurpu2p4_001553 | 1816 | 2249 | 1 . . . 942, 992 . . . 1840, 1896 . . . 2144, 2199 . . . 2249 |
| Aurpu2p4_001599 | 1817 | 1752 | 1 . . . 1752 |
| Aurpu2p4_001600 | 1818 | 1728 | 1 . . . 1728 |
| Aurpu2p4_001633 | 1819 | 1400 | 1 . . . 717, 772 . . . 1049, 1304 . . . 1400 |
| Aurpu2p4_001665 | 1820 | 1821 | 1 . . . 437, 495 . . . 1821 |
| Aurpu2p4_001680 | 1821 | 1270 | 1 . . . 611, 670 . . . 1270 |
| Aurpu2p4_001713 | 1822 | 1140 | 1 . . . 172, 226 . . . 461, 515 . . . 713, 771 . . . 926, 980 . . . 1140 |
| Aurpu2p4_001718 | 1823 | 1215 | 1 . . . 577, 639 . . . 1160, 1211 . . . 1215 |
| Aurpu2p4_001807 | 1824 | 1125 | 1 . . . 1125 |
| Aurpu2p4_001825 | 1825 | 1284 | 1 . . . 242, 299 . . . 416, 472 . . . 1284 |
| Aurpu2p4_001892 | 1826 | 1245 | 1 . . . 1245 |
| Aurpu2p4_001986 | 1827 | 2189 | 1 . . . 589, 646 . . . 2189 |
| Aurpu2p4_002000 | 1828 | 846 | 1 . . . 846 |
| Aurpu2p4_002005 | 1829 | 1173 | 1 . . . 1173 |
| Aurpu2p4_002047 | 1830 | 734 | 1 . . . 185, 245 . . . 734 |
| Aurpu2p4_002086 | 1831 | 1759 | 1 . . . 404, 454 . . . 1759 |
| Aurpu2p4_002155 | 1832 | 850 | 1 . . . 316, 381 . . . 850 |
| Aurpu2p4_002166 | 1833 | 1062 | 1 . . . 1062 |
| Aurpu2p4_002167 | 1834 | 2884 | 1 . . . 269, 322 . . . 1074, 1129 . . . 1237, 1292 . . . 2884 |
| Aurpu2p4_002190 | 1835 | 1310 | 1 . . . 102, 159 . . . 312, 364 . . . 1310 |
| Aurpu2p4_002220 | 1836 | 1478 | 1 . . . 263, 312 . . . 437, 489 . . . 617, 665 . . . 731, 782 . . . 1178, 1231 . . . 1478 |
| Aurpu2p4_002256 | 1837 | 2544 | 1 . . . 178, 234 . . . 932, 985 . . . 1112, 1164 . . . 1747, 1797 . . . 2544 |
| Aurpu2p4_002267 | 1838 | 1185 | 1 . . . 1185 |
| Aurpu2p4_002284 | 1839 | 1497 | 1 . . . 1497 |
| Aurpu2p4_002399 | 1840 | 2713 | 1 . . . 146, 195 . . . 376, 427 . . . 640, 692 . . . 988, 1042 . . . 2713 |
| Aurpu2p4_002518 | 1841 | 1485 | 1 . . . 427, 515 . . . 1485 |
| Aurpu2p4_002522 | 1842 | 1079 | 1 . . . 351, 405 . . . 1079 |
| Aurpu2p4_002533 | 1843 | 2256 | 1 . . . 177, 226 . . . 451, 501 . . . 635, 882 . . . 1744, 1811 . . . 2038, |
| | | | 2098 . . . 2256 |
| Aurpu2p4_002671 | 1844 | 1110 | 1 . . . 1110 |
| Aurpu2p4_002672 | 1845 | 2849 | 1 . . . 118, 168 . . . 263, 317 . . . 373, 430 . . . 615, 701 . . . 733, 785 . . . 874, |
| | | | 923 . . . 1191, 1240 . . . 1732, 1783 . . . 2849 |
| Aurpu2p4_002750 | 1846 | 1170 | 1 . . . 104, 157 . . . 289, 345 . . . 484, 537 . . . 1170 |
| Aurpu2p4_002860 | 1847 | 2220 | 1 . . . 2220 |
| Aurpu2p4_002907 | 1848 | 1674 | 1 . . . 1674 |
| Aurpu2p4_002940 | 1849 | 4560 | 1 . . . 335, 388 . . . 3884, 3938 . . . 3959, 4165 . . . 4342, 4393 . . . 4560 |
| Aurpu2p4_002942 | 1850 | 1209 | 1 . . . 1209 |
| Aurpu2p4_002955 | 1851 | 1686 | 1 . . . 1686 |
| Aurpu2p4_002987 | 1852 | 1216 | 1 . . . 187, 241 . . . 340, 394 . . . 1216 |
| Aurpu2p4_003029 | 1853 | 1020 | 1 . . . 1020 |
| Aurpu2p4_003104 | 1854 | 1737 | 1 . . . 1737 |
| Aurpu2p4_003184 | 1855 | 2442 | 1 . . . 969, 1017 . . . 1371, 1424 . . . 2442 |
| Aurpu2p4_003313 | 1856 | 1809 | 1 . . . 334, 392 . . . 1809 |
| Aurpu2p4_003364 | 1857 | 2784 | 1 . . . 2784 |
| Aurpu2p4_003555 | 1858 | 1440 | 1 . . . 1440 |
| Aurpu2p4_003594 | 1859 | 1575 | 1 . . . 1575 |
| Aurpu2p4_003606 | 1860 | 1092 | 1 . . . 280, 332 . . . 1092 |
| Aurpu2p4_003607 | 1861 | 1306 | 1 . . . 505, 562 . . . 896, 955 . . . 1113, 1166 . . . 1306 |
| Aurpu2p4_003685 | 1862 | 881 | 1 . . . 245, 299 . . . 518, 570 . . . 881 |
| Aurpu2p4_003727 | 1863 | 1468 | 1 . . . 542, 595 . . . 1468 |
| Aurpu2p4_003747 | 1864 | 3552 | 1 . . . 212, 266 . . . 452, 709 . . . 907, 1047 . . . 1236, 1287 . . . 3552 |
| Aurpu2p4_003884 | 1865 | 1113 | 1 . . . 157, 212 . . . 1113 |
| Aurpu2p4_003888 | 1866 | 2763 | 1 . . . 2231, 2283 . . . 2763 |
| Aurpu2p4_003893 | 1867 | 948 | 1 . . . 948 |
| Aurpu2p4_003941 | 1868 | 1336 | 1 . . . 1074, 1128 . . . 1266, 1323 . . . 1336 |
| Aurpu2p4_004107 | 1869 | 2366 | 1 . . . 462, 662 . . . 1591, 1644 . . . 2366 |
| Aurpu2p4_004115 | 1870 | 1038 | 1 . . . 406, 467 . . . 1038 |
| Aurpu2p4_004128 | 1871 | 1434 | 1 . . . 1434 |
| Aurpu2p4_004186 | 1872 | 742 | 1 . . . 261, 320 . . . 742 |
| Aurpu2p4_004265 | 1873 | 2724 | 1 . . . 289, 344 . . . 2724 |
| Aurpu2p4_004286 | 1874 | 2861 | 1 . . . 812, 1268 . . . 1495, 1548 . . . 1575, 1627 . . . 2143, 2197 . . . 2861 |
| Aurpu2p4_004297 | 1875 | 2145 | 1 . . . 1894, 1958 . . . 2145 |
| Aurpu2p4_004347 | 1876 | 1413 | 1 . . . 1413 |
| Aurpu2p4_004477 | 1877 | 2778 | 1 . . . 72, 124 . . . 295, 345 . . . 625, 681 . . . 836, 885 . . . 1884, 1940 . . . 2139, |
| | | | 2193 . . . 2356, 2406 . . . 2778 |
| Aurpu2p4_004489 | 1878 | 2212 | 1 . . . 196, 465 . . . 512, 564 . . . 802, 859 . . . 1040, 1240 . . . 2212 |
| Aurpu2p4_004524 | 1879 | 1011 | 1 . . . 1011 |
| Aurpu2p4_004527 | 1880 | 2151 | 1 . . . 2151 |
| Aurpu2p4_004550 | 1881 | 854 | 1 . . . 452, 509 . . . 854 |
| Aurpu2p4_004694 | 1882 | 1082 | 1 . . . 134, 182 . . . 265, 317 . . . 1082 |
| Aurpu2p4_004762 | 1883 | 1477 | 1 . . . 282, 410 . . . 536, 588 . . . 672, 726 . . . 1335, 1448 . . . 1477 |
| Aurpu2p4_004776 | 1884 | 705 | 1 . . . 705 |
| Aurpu2p4_004801 | 1885 | 2180 | 1 . . . 666, 715 . . . 896, 1229 . . . 1671, 1726 . . . 2180 |
| Aurpu2p4_004899 | 1886 | 1884 | 1 . . . 1884 |
| Aurpu2p4_004916 | 1887 | 1928 | 1 . . . 416, 475 . . . 587, 640 . . . 1928 |
| Aurpu2p4_004926 | 1888 | 1217 | 1 . . . 365, 422 . . . 880, 935 . . . 1217 |
| Aurpu2p4_004937 | 1889 | 2255 | 1 . . . 491, 542 . . . 918, 977 . . . 1678, 1731 . . . 1989, 2048 . . . 2255 |
| Aurpu2p4_004986 | 1890 | 1282 | 1 . . . 158, 209 . . . 518, 569 . . . 1282 |
| Aurpu2p4_005056 | 1891 | 1308 | 1 . . . 1308 |
| Aurpu2p4_005097 | 1892 | 2901 | 1 . . . 423, 483 . . . 717, 770 . . . 2901 |
| Aurpu2p4_005194 | 1893 | 1098 | 1 . . . 1098 |
| Aurpu2p4_005236 | 1894 | 2160 | 1 . . . 399, 454 . . . 2160 |
| Aurpu2p4_005278 | 1895 | 830 | 1 . . . 706, 763 . . . 830 |
| Aurpu2p4_005399 | 1896 | 1036 | 1 . . . 327, 377 . . . 1036 |
| Aurpu2p4_005401 | 1897 | 2397 | 1 . . . 120, 171 . . . 394, 443 . . . 827, 882 . . . 1226, 1283 . . . 1523, |
| | | | 1571 . . . 1734, 1786 . . . 2397 |
| Aurpu2p4_005519 | 1898 | 1026 | 1 . . . 1026 |
| Aurpu2p4_005580 | 1899 | 1854 | 1 . . . 1374, 1630 . . . 1854 |
| Aurpu2p4_005825 | 1900 | 1220 | 1 . . . 413, 475 . . . 1028, 1090 . . . 1220 |
| Aurpu2p4_005865 | 1901 | 1248 | 1 . . . 1248 |
| Aurpu2p4_005914 | 1902 | 2530 | 1 . . . 145, 201 . . . 522, 580 . . . 2530 |
| Aurpu2p4_005929 | 1903 | 1025 | 1 . . . 33, 91 . . . 333, 414 . . . 894, 958 . . . 1025 |
| Aurpu2p4_006113 | 1904 | 1095 | 1 . . . 1095 |
| Aurpu2p4_006128 | 1905 | 884 | 1 . . . 442, 496 . . . 884 |
| Aurpu2p4_006160 | 1906 | 1722 | 1 . . . 1722 |
| Aurpu2p4_006162 | 1907 | 1608 | 1 . . . 1608 |
| Aurpu2p4_006176 | 1908 | 1484 | 1 . . . 445, 513 . . . 1227, 1285 . . . 1396, 1455 . . . 1484 |
| Aurpu2p4_006179 | 1909 | 1392 | 1 . . . 1392 |
| Aurpu2p4_006195 | 1910 | 2233 | 1 . . . 659, 711 . . . 1164, 1231 . . . 1489, 1544 . . . 1708, 1770 . . . 2233 |
| Aurpu2p4_006206 | 1911 | 1725 | 1 . . . 1035, 1093 . . . 1725 |
| Aurpu2p4_006207 | 1912 | 6091 | 1 . . . 203, 255 . . . 455, 508 . . . 4226, 4281 . . . 4787, 4857 . . . 5006, |
| | | | 5064 . . . 5293, 5339 . . . 6091 |
| Aurpu2p4_006222 | 1913 | 1788 | 1 . . . 1788 |
| Aurpu2p4_006237 | 1914 | 773 | 1 . . . 202, 268 . . . 773 |
| Aurpu2p4_006246 | 1915 | 2528 | 1 . . . 172, 222 . . . 320, 373 . . . 2528 |
| Aurpu2p4_006312 | 1916 | 964 | 1 . . . 317, 381 . . . 836, 898 . . . 964 |
| Aurpu2p4_006313 | 1917 | 1052 | 1 . . . 444, 504 . . . 1052 |
| Aurpu2p4_006392 | 1918 | 1655 | 1 . . . 263, 314 . . . 1655 |
| Aurpu2p4_006557 | 1919 | 1451 | 1 . . . 364, 427 . . . 1451 |
| Aurpu2p4_006782 | 1920 | 3618 | 1 . . . 93, 344 . . . 533, 586 . . . 592, 651 . . . 748, 801 . . . 1252, 1300 . . . 1888, |
| | | | 1947 . . . 2106, 2163 . . . 2336, 2390 . . . 2839, 2892 . . . 3618 |
| Aurpu2p4_006900 | 1921 | 2341 | 1 . . . 416, 466 . . . 533, 582 . . . 756, 815 . . . 1135, 1186 . . . 1924, |
| | | | 1976 . . . 2341 |
| Aurpu2p4_006933 | 1922 | 2242 | 1 . . . 278, 515 . . . 1235, 1295 . . . 2242 |
| Aurpu2p4_007070 | 1923 | 1257 | 1 . . . 1257 |
| Aurpu2p4_007082 | 1924 | 1287 | 1 . . . 65, 122 . . . 540, 616 . . . 1082, 1150 . . . 1287 |
| Aurpu2p4_007093 | 1925 | 813 | 1 . . . 257, 308 . . . 455, 509 . . . 679, 733 . . . 813 |
| Aurpu2p4_007113 | 1926 | 2028 | 1 . . . 2028 |
| Aurpu2p4_007124 | 1927 | 777 | 1 . . . 360, 415 . . . 777 |
| Aurpu2p4_007126 | 1928 | 1653 | 1 . . . 263, 321 . . . 1653 |
| Aurpu2p4_007149 | 1929 | 1263 | 1 . . . 1263 |
| Aurpu2p4_007160 | 1930 | 1971 | 1 . . . 1971 |
| Aurpu2p4_007177 | 1931 | 2187 | 1 . . . 2187 |
| Aurpu2p4_007190 | 1932 | 1865 | 1 . . . 289, 348 . . . 1657, 1710 . . . 1865 |
| Aurpu2p4_007196 | 1933 | 1239 | 1 . . . 609, 676 . . . 1239 |
| Aurpu2p4_007206 | 1934 | 1435 | 1 . . . 360, 406 . . . 573, 626 . . . 1435 |
| Aurpu2p4_007220 | 1935 | 1089 | 1 . . . 538, 593 . . . 1089 |
| Aurpu2p4_007270 | 1936 | 2669 | 1 . . . 118, 166 . . . 285, 333 . . . 541, 611 . . . 907, 959 . . . 1064, 1117 . . . 2669 |
| Aurpu2p4_007272 | 1937 | 1961 | 1 . . . 208, 264 . . . 500, 559 . . . 617, 675 . . . 841, 902 . . . 1273, 1325 . . . 1961 |
| Aurpu2p4_007292 | 1938 | 1064 | 1 . . . 71, 134 . . . 1064 |
| Aurpu2p4_007342 | 1939 | 1042 | 1 . . . 77, 133 . . . 1042 |
| Aurpu2p4_007356 | 1940 | 1433 | 1 . . . 723, 777 . . . 1433 |
| Aurpu2p4_007383 | 1941 | 3123 | 1 . . . 3123 |
| Aurpu2p4_007404 | 1942 | 1650 | 1 . . . 1650 |
| Aurpu2p4_007424 | 1943 | 1236 | 1 . . . 1236 |
| Aurpu2p4_007428 | 1944 | 1829 | 1 . . . 14, 430 . . . 927, 976 . . . 1739, 1795 . . . 1829 |
| Aurpu2p4_007429 | 1945 | 1052 | 1 . . . 290, 350 . . . 1052 |
| Aurpu2p4_007455 | 1946 | 1572 | 1 . . . 1572 |
| Aurpu2p4_007488 | 1947 | 1131 | 1 . . . 228, 287 . . . 358, 418 . . . 1131 |
| Aurpu2p4_007493 | 1948 | 1856 | 1 . . . 387, 568 . . . 1515, 1569 . . . 1856 |
| Aurpu2p4_007511 | 1949 | 1152 | 1 . . . 253, 325 . . . 426, 480 . . . 909, 966 . . . 1152 |
| Aurpu2p4_007612 | 1950 | 786 | 1 . . . 278, 330 . . . 531, 589 . . . 786 |
| Aurpu2p4_007614 | 1951 | 1189 | 1 . . . 552, 602 . . . 1189 |
| Aurpu2p4_007621 | 1952 | 1275 | 1 . . . 440, 496 . . . 880, 938 . . . 984, 1035 . . . 1275 |
| Aurpu2p4_007662 | 1953 | 873 | 1 . . . 873 |
| Aurpu2p4_007707 | 1954 | 843 | 1 . . . 132, 184 . . . 409, 461 . . . 843 |
| Aurpu2p4_007805 | 1955 | 2072 | 1 . . . 1612, 1670 . . . 1851, 1911 . . . 2072 |
| Aurpu2p4_007919 | 1956 | 895 | 1 . . . 109, 166 . . . 266, 317 . . . 373, 423 . . . 716, 770 . . . 895 |
| Aurpu2p4_008001 | 1957 | 2647 | 1 . . . 298, 349 . . . 710, 763 . . . 2407, 2460 . . . 2647 |
| Aurpu2p4_008021 | 1958 | 1541 | 1 . . . 1242, 1293 . . . 1541 |
| Aurpu2p4_008140 | 1959 | 1636 | 1 . . . 369, 422 . . . 1636 |
| Aurpu2p4_008212 | 1960 | 1203 | 1 . . . 338, 396 . . . 1203 |
| Aurpu2p4_008231 | 1961 | 2251 | 1 . . . 1600, 1653 . . . 2251 |
| Aurpu2p4_008239 | 1962 | 1672 | 1 . . . 256, 312 . . . 400, 456 . . . 1075, 1128 . . . 1215, 1274 . . . 1672 |
| Aurpu2p4_008255 | 1963 | 880 | 1 . . . 701, 766 . . . 880 |
| Aurpu2p4_008271 | 1964 | 1517 | 1 . . . 153, 213 . . . 1517 |
| Aurpu2p4_008282 | 1965 | 1986 | 1 . . . 217, 356 . . . 1986 |
| Aurpu2p4_008385 | 1966 | 2258 | 1 . . . 121, 188 . . . 871, 922 . . . 1399, 1448 . . . 2258 |
| Aurpu2p4_008412 | 1967 | 3649 | 1 . . . 341, 396 . . . 478, 532 . . . 627, 742 . . . 933, 983 . . . 1180, |
| | | | 1279 . . . 1354, 1406 . . . 1519, 1780 . . . 3649 |
| Aurpu2p4_008485 | 1968 | 1058 | 1 . . . 528, 579 . . . 1058 |
| Aurpu2p4_008495 | 1969 | 2152 | 1 . . . 426, 1304 . . . 1796, 1853 . . . 2023, 2085 . . . 2152 |
| Aurpu2p4_008503 | 1970 | 1875 | 1 . . . 1875 |
| Aurpu2p4_008585 | 1971 | 2640 | 1 . . . 2640 |
| Aurpu2p4_008692 | 1972 | 2039 | 1 . . . 117, 167 . . . 298, 354 . . . 769, 821 . . . 872, 930 . . . 2039 |
| Aurpu2p4_008705 | 1973 | 3036 | 1 . . . 3036 |
| Aurpu2p4_008725 | 1974 | 960 | 1 . . . 960 |
| Aurpu2p4_008775 | 1975 | 3302 | 1 . . . 1356, 1653 . . . 1781, 2223 . . . 3302 |
| Aurpu2p4_008807 | 1976 | 1129 | 1 . . . 310, 362 . . . 479, 532 . . . 1129 |
| Aurpu2p4_008838 | 1977 | 2346 | 1 . . . 818, 1047 . . . 1484, 1539 . . . 2346 |
| Aurpu2p4_008906 | 1978 | 1291 | 1 . . . 13, 64 . . . 791, 846 . . . 952, 1006 . . . 1291 |
| Aurpu2p4_008972 | 1979 | 1941 | 1 . . . 258, 390 . . . 464, 664 . . . 792, 846 . . . 860, 915 . . . 983, 1040 . . . 1050, |
| | | | 1105 . . . 1232, 1430 . . . 1631, 1692 . . . 1941 |
| Aurpu2p4_008980 | 1980 | 3232 | 1 . . . 608, 669 . . . 1379, 1531 . . . 1781, 2047 . . . 2477, 2534 . . . 3232 |
| Aurpu2p4_009032 | 1981 | 2108 | 1 . . . 132, 188 . . . 410, 589 . . . 937, 1042 . . . 1650, 1703 . . . 2108 |
| Aurpu2p4_009051 | 1982 | 2136 | 1 . . . 2136 |
| Aurpu2p4_009071 | 1983 | 1397 | 1 . . . 336, 390 . . . 1397 |
| Aurpu2p4_009125 | 1984 | 2549 | 1 . . . 50, 107 . . . 2549 |
| Aurpu2p4_009223 | 1985 | 2464 | 1 . . . 154, 205 . . . 544, 595 . . . 2464 |
| Aurpu2p4_009233 | 1986 | 1020 | 1 . . . 1020 |
| Aurpu2p4_009300 | 1987 | 2697 | 1 . . . 2697 |
| Aurpu2p4_009394 | 1988 | 1560 | 1 . . . 1560 |
| Aurpu2p4_009401 | 1989 | 684 | 1 . . . 684 |
| Aurpu2p4_009472 | 1990 | 1329 | 1 . . . 1329 |
| Aurpu2p4_009494 | 1991 | 1543 | 1 . . . 392, 442 . . . 495, 547 . . . 1543 |
| Aurpu2p4_009495 | 1992 | 987 | 1 . . . 987 |
| Aurpu2p4_009496 | 1993 | 1746 | 1 . . . 1746 |
| Aurpu2p4_009563 | 1994 | 1059 | 1 . . . 397, 463 . . . 968, 1018 . . . 1059 |
| Aurpu2p4_009597 | 1995 | 1161 | 1 . . . 867, 925 . . . 1161 |
| Aurpu2p4_009603 | 1996 | 800 | 1 . . . 311, 362 . . . 621, 679 . . . 800 |
| Aurpu2p4_009751 | 1997 | 1437 | 1 . . . 452, 512 . . . 1367, 1423 . . . 1437 |
| Aurpu2p4_009762 | 1998 | 1443 | 1 . . . 359, 410 . . . 702, 755 . . . 1443 |
| Aurpu2p4_009775 | 1999 | 938 | 1 . . . 353, 410 . . . 938 |
| Aurpu2p4_009782 | 2000 | 1989 | 1 . . . 417, 464 . . . 1041, 1092 . . . 1680, 1729 . . . 1854, 1909 . . . 1989 |
| Aurpu2p4_009845 | 2001 | 1038 | 1 . . . 1038 |
| Aurpu2p4_009863 | 2002 | 985 | 1 . . . 705, 762 . . . 787, 841 . . . 985 |
| Aurpu2p4_009889 | 2003 | 1692 | 1 . . . 1190, 1245 . . . 1692 |
| Aurpu2p4_009890 | 2004 | 2555 | 1 . . . 528, 578 . . . 869, 919 . . . 2213, 2262 . . . 2555 |
| Aurpu2p4_009910 | 2005 | 2639 | 1 . . . 322, 376 . . . 2639 |
| Aurpu2p4_010058 | 2006 | 1711 | 1 . . . 324, 377 . . . 1711 |
| Aurpu2p4_010070 | 2007 | 2923 | 1 . . . 75, 125 . . . 320, 379 . . . 487, 593 . . . 689, 742 . . . 2032, 2082 . . . 2923 |
| Aurpu2p4_010087 | 2008 | 1783 | 1 . . . 1570, 1629 . . . 1783 |
| Aurpu2p4_010088 | 2009 | 2511 | 1 . . . 2511 |
| Aurpu2p4_010125 | 2010 | 1508 | 1 . . . 102, 162 . . . 1508 |
| Aurpu2p4_010146 | 2011 | 2596 | 1 . . . 1543, 1655 . . . 1871, 1927 . . . 2596 |
| Aurpu2p4_010192 | 2012 | 3218 | 1 . . . 174, 230 . . . 297, 345 . . . 374, 429 . . . 1220, 1316 . . . 3218 |
| Aurpu2p4_010196 | 2013 | 1599 | 1 . . . 477, 535 . . . 1599 |
| Aurpu2p4_010203 | 2014 | 880 | 1 . . . 118, 179 . . . 413, 475 . . . 880 |
| Aurpu2p4_010291 | 2015 | 813 | 1 . . . 528, 580 . . . 813 |
| Aurpu2p4_010300 | 2016 | 1365 | 1 . . . 1365 |
| Aurpu2p4_010313 | 2017 | 1937 | 1 . . . 262, 311 . . . 889, 941 . . . 1335, 1393 . . . 1836, 1890 . . . 1937 |
| Aurpu2p4_010319 | 2018 | 2170 | 1 . . . 226, 279 . . . 535, 582 . . . 1719, 1771 . . . 1950, 2004 . . . 2170 |
| Aurpu2p4_010388 | 2019 | 1489 | 1 . . . 276, 331 . . . 479, 535 . . . 758, 814 . . . 1007, 1071 . . . 1388, |
| | | | 1484 . . . 1489 |
| Aurpu2p4_010455 | 2020 | 1878 | 1 . . . 77, 133 . . . 269, 556 . . . 813, 864 . . . 1189, 1246 . . . 1364, |
| | | | 1422 . . . 1663, 1717 . . . 1791, 1859 . . . 1878 |
| Aurpu2p4_010457 | 2021 | 1581 | 1 . . . 1581 |
| Aurpu2p4_010464 | 2022 | 1873 | 1 . . . 205, 260 . . . 708, 825 . . . 953, 1001 . . . 1873 |
| Aurpu2p4_010466 | 2023 | 731 | 1 . . . 507, 558 . . . 731 |
| Aurpu2p4_010484 | 2024 | 1749 | 1 . . . 292, 346 . . . 1146, 1265 . . . 1551, 1606 . . . 1749 |
| Aurpu2p4_010534 | 2025 | 1023 | 1 . . . 550, 608 . . . 1023 |
| Aurpu2p4_010571 | 2026 | 2226 | 1 . . . 2226 |
| Aurpu2p4_010592 | 2027 | 1352 | 1 . . . 309, 364 . . . 711, 762 . . . 1352 |
| Aurpu2p4_010596 | 2028 | 1058 | 1 . . . 537, 591 . . . 1058 |
| Aurpu2p4_010603 | 2029 | 1298 | 1 . . . 969, 1074 . . . 1298 |
| Aurpu2p4_010618 | 2030 | 1898 | 1 . . . 243, 298 . . . 606, 664 . . . 813, 867 . . . 1898 |
| Aurpu2p4_010680 | 2031 | 1423 | 1 . . . 22, 90 . . . 326, 380 . . . 978, 1046 . . . 1423 |
| Aurpu2p4_010683 | 2032 | 1596 | 1 . . . 275, 345 . . . 393, 446 . . . 665, 721 . . . 1452, 1565 . . . 1596 |
| Aurpu2p4_010701 | 2033 | 1266 | 1 . . . 348, 402 . . . 736, 792 . . . 1266 |
| Aurpu2p4_010884 | 2034 | 1185 | 1 . . . 1185 |
| Aurpu2p4_010891 | 2035 | 2164 | 1 . . . 144, 236 . . . 345, 396 . . . 570, 624 . . . 943, 1003 . . . 2164 |
| Aurpu2p4_010898 | 2036 | 1827 | 1 . . . 1356, 1414 . . . 1827 |
| Aurpu2p4_010982 | 2037 | 1260 | 1 . . . 1260 |
| Aurpu2p4_010999 | 2038 | 1767 | 1 . . . 546, 604 . . . 867, 925 . . . 1767 |
| Aurpu2p4_011049 | 2039 | 1465 | 1 . . . 174, 235 . . . 561, 616 . . . 1081, 1147 . . . 1342, 1402 . . . 1465 |
| Aurpu2p4_011071 | 2040 | 1848 | 1 . . . 208, 262 . . . 662, 714 . . . 764, 817 . . . 1848 |
| Aurpu2p4_011080 | 2041 | 2451 | 1 . . . 127, 179 . . . 648, 699 . . . 756, 809 . . . 2451 |
| Aurpu2p4_011097 | 2042 | 1182 | 1 . . . 1182 |
| Aurpu2p4_011162 | 2043 | 1776 | 1 . . . 1776 |
| Aurpu2p4_000066 | 2044 | 1899 | 1 . . . 1899 |
| Aurpu2p4_000166 | 2045 | 1294 | 1 . . . 54, 106 . . . 519, 569 . . . 1294 |
| Aurpu2p4_000811 | 2046 | 1683 | 1 . . . 138, 187 . . . 1683 |
| Aurpu2p4_001233 | 2047 | 1583 | 1 . . . 901, 1459 . . . 1583 |
| Aurpu2p4_002002 | 2048 | 1050 | 1 . . . 1050 |
| Aurpu2p4_002244 | 2049 | 2043 | 1 . . . 221, 298 . . . 872, 929 . . . 2043 |
| Aurpu2p4_002270 | 2050 | 1277 | 1 . . . 188, 242 . . . 947, 999 . . . 1277 |
| Aurpu2p4_002403 | 2051 | 1857 | 1 . . . 1857 |
| Aurpu2p4_002547 | 2052 | 1042 | 1 . . . 228, 278 . . . 1042 |
| Aurpu2p4_003458 | 2053 | 2144 | 1 . . . 1791, 1848 . . . 2144 |
| Aurpu2p4_003964 | 2054 | 588 | 1 . . . 588 |
| Aurpu2p4_004483 | 2055 | 1073 | 1 . . . 441, 708 . . . 1073 |
| Aurpu2p4_004802 | 2056 | 2161 | 1 . . . 124, 178 . . . 435, 486 . . . 2161 |
| Aurpu2p4_005858 | 2057 | 1242 | 1 . . . 1242 |
| Aurpu2p4_006413 | 2058 | 1557 | 1 . . . 35, 103 . . . 185, 246 . . . 451, 502 . . . 1557 |
| Aurpu2p4_007081 | 2059 | 1865 | 1 . . . 352, 405 . . . 665, 718 . . . 1865 |
| Aurpu2p4_007695 | 2060 | 1434 | 1 . . . 76, 122 . . . 666, 721 . . . 1434 |
| Aurpu2p4_008408 | 2061 | 1127 | 1 . . . 71, 126 . . . 205, 261 . . . 1047, 1100 . . . 1127 |
| Aurpu2p4_008733 | 2062 | 1835 | 1 . . . 723, 810 . . . 1835 |
| Aurpu2p4_009064 | 2063 | 1113 | 1 . . . 1113 |
| Aurpu2p4_009608 | 2064 | 1448 | 1 . . . 553, 605 . . . 1321, 1387 . . . 1448 |
| Aurpu2p4_009911 | 2065 | 1758 | 1 . . . 301, 355 . . . 455, 504 . . . 606, 656 . . . 1758 |
| Aurpu2p4_009938 | 2066 | 435 | 1 . . . 435 |
| Aurpu2p4_010261 | 2067 | 1865 | 1 . . . 873, 927 . . . 1036, 1094 . . . 1865 |
| Aurpu2p4_010853 | 2068 | 1654 | 1 . . . 219, 274 . . . 1503, 1556 . . . 1654 |
| Aurpu2p4_011048 | 2069 | 846 | 1 . . . 846 |
| AURPU_3_00014 | 2107 | 1434 | 1 . . . 449, 509 . . . 1364, 1420 . . . 1434 |
| AURPU_3_00051 | 2111 | 1434 | 1 . . . 76, 203 . . . 666, 721 . . . 1434 |
| AURPU_3_00113 | 2112 | 1206 | 1 . . . 1206 |
| AURPU_3_00118 | 2113 | 1422 | 1 . . . 556, 611 . . . 1422 |
| AURPU_3_00139 | 2114 | 1553 | 1 . . . 524, 861 . . . 1463, 1514 . . . 1553 |
| AURPU_3_00156 | 2115 | 1820 | 1 . . . 454, 518 . . . 596, 651 . . . 825, 911 . . . 1045, 1099 . . . 1285, |
| | | | 1376 . . . 1681, 1735 . . . 1820 |
| AURPU_3_00173 | 2116 | 1541 | 1 . . . 276, 331 . . . 479, 535 . . . 758, 814 . . . 1007, 1071 . . . 1541 |
| AURPU_3_00174 | 2117 | 1398 | 1 . . . 1398 |
| AURPU_3_00209 | 2119 | 5098 | 1 . . . 528, 578 . . . 869, 919 . . . 2213, 2262 . . . 2538, 2593 . . . 2634, |
| | | | 3540 . . . 4596, 4651 . . . 5098 |
| AURPU_3_00307 | 2120 | 3218 | 1 . . . 174, 230 . . . 297, 345 . . . 374, 429 . . . 1117, 1294 . . . 3218 |
| Aurpu2p4_000157 | 2122 | 1723 | 1 . . . 96, 173 . . . 1723 |
| Aurpu2p4_000356 | 2123 | 1035 | 1 . . . 184, 236 . . . 1035 |
| Aurpu2p4_000818 | 2124 | 2028 | 1 . . . 2028 |
| Aurpu2p4_000960 | 2125 | 1847 | 1 . . . 138, 187 . . . 787, 839 . . . 906, 963 . . . 1847 |
| Aurpu2p4_001076 | 2126 | 1797 | 1 . . . 445, 498 . . . 756, 807 . . . 1797 |
| Aurpu2p4_001476 | 2127 | 1280 | 1 . . . 252, 309 . . . 1280 |
| Aurpu2p4_001745 | 2128 | 417 | 1 . . . 184, 241 . . . 326, 382 . . . 417 |
| Aurpu2p4_001987 | 2129 | 2335 | 1 . . . 425, 481 . . . 2335 |
| Aurpu2p4_002339 | 2130 | 1860 | 1 . . . 264, 316 . . . 450, 512 . . . 891, 945 . . . 1860 |
| Aurpu2p4_002490 | 2131 | 2812 | 1 . . . 141, 190 . . . 591, 641 . . . 932, 984 . . . 2812 |
| Aurpu2p4_002528 | 2132 | 1532 | 1 . . . 364, 448 . . . 1532 |
| Aurpu2p4_003052 | 2133 | 1275 | 1 . . . 1275 |
| Aurpu2p4_003108 | 2134 | 2106 | 1 . . . 2106 |
| Aurpu2p4_003243 | 2135 | 7430 | 1 . . . 227, 286 . . . 538, 597 . . . 729, 796 . . . 1037, 1092 . . . 1305, |
| | | | 1362 . . . 1454, 1504 . . . 2180, 2235 . . . 2263, 3199 . . . 3725, |
| | | | 3786 . . . 3809, 3869 . . . 4355, 4434 . . . 4548, 4645 . . . 4686, |
| | | | 4741 . . . 4788, 4848 . . . 5045, 5099 . . . 5146, 5207 . . . 5272, |
| | | | 5447 . . . 5518, 5583 . . . 5624, 5690 . . . 5749, 5864 . . . 5889, |
| | | | 6063 . . . 6093, 6196 . . . 6286, 6343 . . . 6390, 6463 . . . 6492, |
| | | | 6559 . . . 7035, 7090 . . . 7430 |
| Aurpu2p4_003247 | 2136 | 2046 | 1 . . . 316, 365 . . . 2046 |
| Aurpu2p4_003704 | 2137 | 1243 | 1 . . . 226, 283 . . . 822, 885 . . . 1166, 1224 . . . 1243 |
| Aurpu2p4_004187 | 2138 | 2439 | 1 . . . 433, 485 . . . 1291, 1350 . . . 1656, 1713 . . . 2439 |
| Aurpu2p4_004476 | 2139 | 4947 | 1 . . . 189, 239 . . . 267, 320 . . . 570, 620 . . . 3295, 3350 . . . 4947 |
| Aurpu2p4_004865 | 2140 | 909 | 1 . . . 909 |
| Aurpu2p4_005304 | 2141 | 1089 | 1 . . . 1089 |
| Aurpu2p4_005861 | 2142 | 1571 | 1 . . . 279, 330 . . . 1571 |
| Aurpu2p4_005992 | 2143 | 1362 | 1 . . . 1263, 1318 . . . 1362 |
| Aurpu2p4_006091 | 2144 | 1466 | 1 . . . 246, 303 . . . 1466 |
| Aurpu2p4_006277 | 2145 | 1656 | 1 . . . 219, 274 . . . 1656 |
| Aurpu2p4_007520 | 2146 | 1230 | 1 . . . 115, 182 . . . 1001, 1065 . . . 1230 |
| Aurpu2p4_007546 | 2147 | 578 | 1 . . . 115, 166 . . . 578 |
| Aurpu2p4_007951 | 2148 | 2030 | 1 . . . 129, 185 . . . 205, 259 . . . 318, 382 . . . 722, 772 . . . 1063, 1116 . . . 2030 |
| Aurpu2p4_008628 | 2149 | 1632 | 1 . . . 1632 |
| Aurpu2p4_008719 | 2150 | 1026 | 1 . . . 124, 181 . . . 373, 440 . . . 759, 812 . . . 1026 |
| Aurpu2p4_009254 | 2151 | 1936 | 1 . . . 212, 264 . . . 1264, 1329 . . . 1936 |
| Aurpu2p4_009278 | 2152 | 1557 | 1 . . . 1557 |
| Aurpu2p4_009437 | 2153 | 2129 | 1 . . . 47, 100 . . . 838, 891 . . . 2129 |
| Aurpu2p4_009445 | 2154 | 1745 | 1 . . . 225, 278 . . . 559, 693 . . . 1745 |
| Aurpu2p4_010136 | 2155 | 1764 | 1 . . . 110, 165 . . . 1764 |
| Aurpu2p4_010244 | 2156 | 1860 | 1 . . . 1099, 1154 . . . 1310, 1368 . . . 1594, 1652 . . . 1860 |
| Aurpu2p4_010617 | 2157 | 1041 | 1 . . . 1041 |
| Aurpu2p4_010719 | 2158 | 1102 | 1 . . . 52, 111 . . . 563, 622 . . . 787, 991 . . . 1102 |
| Aurpu2p4_010798 | 2159 | 1726 | 1 . . . 240, 290 . . . 634, 683 . . . 1726 |
| Aurpu2p4_010869 | 2160 | 410 | 1 . . . 166, 228 . . . 313, 372 . . . 410 |

[0260] The present invention is illustrated in further details by the following non-limiting examples.

### EXAMPLES

### Example 1

### Fermentation of the Organism

### Materials & Methods

[0261] In general, for each species, starter mycelium was grown in rich medium (either mycological broth or yeast malt broth (the latter being indicated with YM)) and then washed with water. The starter was then used to inoculate different liquid media or solid substrate and the resulting mycelium was used for RNA extraction and library construction.

[0262] Following are the medium recipes and the solid substrates with a referenced source (if available) as well as a table (Table 3) listing the media variations, since in some cases the basic recipes of the referenced source have been altered depending on the species grown. This is then followed by a summary of the specific species as grown in the examples.

### A. Mycological Broth

[0263] Per liter: 10 g soytone, 40 g D-glucose, 1 mL Trace Element solution, Double-distilled water;
Adjust pH to 5.0 with hydrochloric acid (HCl) and bring volume to 1 L with double-distilled water.
Trace Element Solution contains 2 mM Iron(II) sulphate heptahydrate (FeSO₄.7H₂O), 1 mM Copper (II) sulphate pentahydrate (CuSO₄.5H₂O), 5 mM Zinc sulphate heptahydrate (ZnSO₄.7H₂O), 10 mM Manganese sulphate monohydrate (MnSO₄.H₂O), 5 mM Cobalt(II) chloride hexahydrate (CoCl₂.6H₂O), 0.5 mM Ammonium molybdate tetrahydrate ((NH₄)₆Mo₇O₂₄.4H₂O), and 95 mM Hydrochloric acid (HCl) dissolved in double-distilled water.

### B. Yeast-Malt Broth (YM)

[0264] (Reference: ATCC medium No. 200)
Per liter: 3 g yeast extract, 3 g malt extract, 5 g peptone, 10 g D-glucose, Double-distilled water to 1 L.

### C. Trametes Defined Medium (TDM)

[0265] (Reference: Reid and Piace, Effect of Residual lignin type and amount on biological bleaching of kraft pulp by
Trametes versicolor. Applied Environmental Microbiology 60: 1395-1400, 1994.)
Per liter: 10 g D-glucose, 0.75 g L-Asparagine monohydrate, 0.68 g Potassium phosphate monobasic (KH₂PO₄), 0.25 g Magnesium sulphate heptahydrate (MgSO₄.7H₂O), 15 mg Calcium chloride dihydrate (CaCl₂.2H₂O), 100 μg Thiamine hydrochloride, 1 ml Trace Element solution, 0.5 g Tween™ 80, Double distilled water; Adjust pH to 5.5 with 3 M potassium hydroxide and bring volume to 1 L with double-distilled water.

TABLE 3
Variations of TDM media used for library construction

| Varia- | |
|---|---|
| tion | Description |
| TDM-1 | Medium was prepared as in basic recipe described above. |
| TDM-2 | Quantity of asparagine monohydrate was reduced to 0.15 g. |
| TDM-3 | Manganese sulphate monohydrate was omitted from the |
| | medium. |
| TDM-4 | The quantity of manganese sulphate monohydrate was raised |
| | to 0.2 mM final concentration in the medium. |
| TDM-5 | The quantity of copper (II) sulphate pentahydrate was |
| | raised to 20 μM. |
| TDM-6 | Glucose was replaced with 10 g per liter of cellulose |
| | (Solka-Floc, 200FCC) |
| TDM-7 | Glucose was replaced with 10 g per liter of xylan from |
| | birchwood (Sigma Cat. # X-0502) |
| TDM-8 | Glucose was replaced with 10 g per liter of wheat bran¹. |
| TDM-9 | Glucose was replaced with 10 g per liter of citrus pectin |
| | (Sigma Cat. # P-9135). |
| TDM-10 | Tween ™ 80 was omitted from the medium. |
| TDM-11 | The double-distilled water was replaced with whitewater² |
| | collected from peroxide bleaching (which occurs during |
| | the manufacture of fine paper). |
| TDM-12 | The double-distilled water was replaced with whitewater² |
| | collected from newsprint manufacture. |
| TDM-13 | Glucose was replaced with 5 g per liter of ground |
| | hardwood kraft pulp³. |
| TDM-14 | The medium's pH was raised to 7.5. |
| TDM-15 | The strain was incubated at 5° C. above its optimum |
| | growth temperature. |
| TDM-16 | The strain was incubated at 10° C. below its optimum |
| | growth temperature. |
| TDM-17 | One half of the double-distilled water was replaced with |
| | whitewater from newsprint manufacture. Glucose was |
| | omitted. |
| TDM-18 | Potassium phosphate monobasic was replaced with 5 mM |
| | phytic acid from rice (Sigma Cat. # P3168). |
| TDM-19 | Asparagine monohydrate was increased to 4 g per liter. |
| TDM-20 | Asparagine monohydrate was increased to 4 g per liter |
| | and glucose was replaced with 2% fructose. |
| TDM-21 | Asparagine monohydrate was increased to 4 g per liter; |
| | 100 mL of double-distilled water was replaced |
| | with 100 mL kerosene⁴. Glucose was omitted. |
| TDM-22 | Asparagine monohydrate was increased to 4 g per liter; |
| | 100 mL of double-distilled water was replaced with 100 mL |
| | hexadecane (Sigma cat. # H0255). Glucose was omitted. |
| TDM-23 | Asparagine monohydrate was increased to 4 g per liter; |
| | one half of the double-distilled water was replaced with |
| | 25% whitewater from newsprint manufacture plus 25% white |
| | water from peroxide bleaching. Glucose was omitted. |
| TDM-24 | Asparagine monohydrate was increased to 4 g per liter |
| | and the quantity of manganese sulphate monohydrate was |
| | raised to 0.2 mM final concentration in the medium. |
| TDM-25 | Asparagine monohydrate was increased to 4 g per liter |
| | and manganese sulphate monohydrate was omitted from the |
| | medium. |
| TDM-26 | Asparagine monohydrate was increased to 4 g per liter; |
| | and potassium phosphate monobasic was replaced with 5 mM |
| | phytic acid from rice (Sigma Cat. # P3168). |
| TDM-27 | Glucose was replaced with 10 g per liter of olive oil |
| | (Sigma cat. # O1514) |
| TDM-28 | One half of the double-distilled water was replaced with |
| | whitewater from peroxide bleaching. Glucose was omitted. |
| TDM-29 | Glucose was replaced with 10 g per liter of tallow. |
| TDM-30 | Glucose was replaced with 10 g per liter of yellow |
| | grease. |
| TDM-31 | Glucose was replaced with 10 g per liter of defined |
| | lipid (Sigma cat. # L0288). |
| TDM-32 | Glucose was replaced with 50 g per liter of D-xylose. |
| TDM-33 | Glucose was replaced with 20 g per liter of glycerol and |
| | 20 ml per liter of ethanol. |
| TDM-34 | Glucose was reduced to 1 g per liter and 10 g per liter |
| | of bran was added. |
| TDM-35 | Glucose was reduced to 1 g per liter and 10 g per liter |
| | of pectin (Sigma Cat. # P-9135) was added. |
| TDM-36 | Glucose was replaced with 10 g per liter of biodiesel. |
| TDM-37 | Glucose was replaced with 10 g per liter of soy |
| | feedstock. |
| TDM-38 | Glucose was replaced with 10 g per liter of locust bean |
| | gum (Sigma cat # G0753). |
| TDM-39 | One half of double-distilled water was replaced with a |
| | 1:1 ratio of whitewater from newsprint manufacture and |
| | white water from peroxide bleaching. Glucose was |
| | omitted. |
| TDM-40 | The medium's pH was raised to 8.5. |
| TDM-41 | One half of double-distilled water was replaced with |
| | whitewater from peroxide bleaching; plus yeast extract |
| | was added to 1 g per liter. Glucose was omitted. |
| TDM-42 | Glucose was replaced with 5 g per liter of yellow grease |
| | and 5 g per liter of soy feedstock |
| TDM-43 | Glucose was replaced with 20 g per liter of fructose. |
| TDM-44 | Glucose was replaced with 10 g per liter of cellulose |
| | (Solka-Floc, 200FCC) plus 1 g per liter of sophorose. |
| TDM-45 | The medium's pH was raised to 8.84. |

¹Food grade wheat bran sourced from the supermarket was used.
²All Whitewaters were sourced from Quebec paper mills by PAPRICAN on the Applicant's behalf.
³Hardwood kraft pulp was sourced from Quebec paper mills by PAPRICAN on the Applicant's behalf.
⁴Kerosene was sourced from a general hardware store.

### D. Asparagine Salts Medium (AS):

[0266] (Reference: Ikeda et al., Laccase and Melanization in Clinically Important Cryptococcus Species Other Than Cryptococcus neoformans Journal of Clinical Microbiology 40: 1214-1218, 2002)
Per liter: 3.0 g D-glucose, 1.0 g L-Asparagine monohydrate, 3.0 g KH2PO4, 0.5 g Mg SO4.7H2O, 1 mg Thiamine.

TABLE 4
Variations of AS media used for library construction

| Varia- | |
|---|---|
| tion | Description |
| AS-1 | Medium was prepared as in basic recipe described above. |
| AS-2 | Glucose was replaced with 10 g per liter of pectin. |
| AS-3 | One half of double-distilled water was replaced with a |
| | 1:1 ratio of whitewater from newsprint manufacture and |
| | white water from peroxide bleaching. Glucose was omitted. |

### E. Solid Substrates Used:

[0267] SS-1 5 g Wheat Bran.

[0268] SS-2 5 g Wheat bran plus 5 mL defined lipid.

[0269] SS-3 5 g Oat bran (food grade, sourced from supermarket).

[0270] The Scytalidium thermophilum, Myriococcum thermophilum, and Aureobasidium pullulans strains were each grown according to the methods described above under the following growth conditions: TDM-1, -2, -3, -4, -5, -6, -7, -8, 9, -10, -13, -14, -15, -39; YM, whereby the following optimal growth temperature was used: 25° C.

[0271] The strains carrying the recombinant genes were grown according to the methods described above under the following growth conditions: minimal medium as described in Kafer et al., (1977, Adv. Genet. 19:33-131) except that the salt concentrations were raised ten-fold and the glucose concentration was 150 grams per liter, at 30° C.

### Example 2

### Genome Sequencing and Assembly

[0272] Genomic DNA was isolated from mycelium when the growth culture had reached the mid log phase. Genomic DNA was sequenced using the Roche 454 Titanium technology (http://www.454.com) to a genome coverage of over 20-fold according to the instructions of the manufacturer. The sequences were assembled using the Newbler and Celera assemblers (http://sourceforge.net/apps/mediawiki/wgs-assembler).

### Example 3

### Building the cDNA Libraries

[0273] Total RNA was isolated from fungal cells or mycelia when the growth cultures had reached the late log phase. The mycelia were collected by filtration through Miracloth and washed with water by filtration. The mycelia were padded dry using paper towels, and frozen in liquid nitrogen and stored at −80° C. To extract total RNA, the frozen mycelia or cells were ground to a fine powder in liquid nitrogen using pestle and mortar. Approximately 1-1.5 gram of frozen fungal powder was dissolved in 10 mL of TRIzol® reagent and RNA was extracted according to the manufacturer's protocol (Invitrogen Life Sciences, Cat. #15596-018). Following extraction, the RNA was dissolved at 1-1.5 mg/ml of DEPC-treated water.

[0274] The PolyATtract® mRNA Isolation Systems (Promega, Cat. #Z5300) was used to isolate poly(A)+RNA. In general, equal amounts of total RNA extracted from up to ten culture conditions were pooled. One milligram of total RNA was used for isolation of poly(A)+RNA according to the protocol provided by the manufacturer. The purified poly(A)+RNA was dissolved at 200-500 μg/mL of DEPC-treated water.
[0275] Five micrograms of poly(A)+RNA were used for the construction of cDNA library. Double-stranded cDNA was synthesized using the ZAP-cDNA® Synthesis Kit (Stratagene, Cat. #200400) according to the manufacturer's protocol with the following modifications. An anchored oligo(dT) linker-primer was used in the first-strand synthesis reaction to force the primer to anneal to the beginning of the poly(A) tail of the mRNA. The anchored oligo(dT) linker-primer has the sequence:

(SEQ ID NO: 2935)
5′-GAGAGAGAGAGAGAGAGAGAACTAGTCTCGAGTTTTTTTTTTTTTTT
TTTVN-3′

where V is A, C, or G and N is A, C, G, or T. A second modification was made by adding trehalose at a final concentration of 0.6 M and betaine at a final concentration of 2 M in the buffer of the first-strand synthesis reaction to promote full-length synthesis. Following synthesis and size fractionation, fractions of double-stranded cDNA with sizes longer than 600 by were pooled. The pooled cDNA was cloned directionally into the plasmid vector BlueScript KS+® (Stratagene) or a modified BlueScript KS+vector that contained Gateway® (Invitrogen) recombination sites. The cDNA library was transformed into E. coli strain XL10-Gold ultracompetent cells (Stratagene, Cat. #Z00315) for propagation.

[0276] Bacterial cells carrying cDNA clones were grown on LB agar containing the antibiotic ampicillin for selection of plasmid-borne bacteria and X-gal and IPTG to use the blue/white system to screen for the presence cDNA inserts. The white bacterial colonies, those carrying cDNA inserts, were transferred by a colony-picking robot to 384-well MTP for replication and storage. Clones that were to be analyzed by sequencing were transferred to 96-well deep blocks using liquid-handling robots. The bacteria were cultured at 37° C. with shaking at 150 rpm. After 24 hours of growth, plasmid DNA from the cDNA clones was prepared by alkaline lysis and sequenced from the 5′ end using ABI 3730×1 DNA analyzers (Applied Biosystems). The chromatograms obtained following single-pass sequencing of the cDNA clones were processed using Phred (available at http://www.phrap.org) to assign sequence quality values, Lucy as described in Chou and Holmes (2001, Bioinformatics, 17(12) 1093-1104) to remove vector and low quality sequences, and Phrap (available at http://www.phrap.org/) to assemble overlapping sequences derived from the same gene into contigs.

### Example 4

### Annotations

[0277] An in-house automated annotation pipeline was used to predict genes in the assembled genome sequence. The analysis pipeline used in part the ab initio tool Genemark® (http://exon.biology.gatech.edu/) for prediction. It also used the predictor Augustus (http://augustus.gobics.de/) trained on de novo assembled sequences and orthologous sequences for gene finding. Sequence similarity searches against the mycoCLAP® (http://cubique.fungalgenomics.ca/mycoCLAP/) and NCBI non-redundant databases were performed with BLASTX as described in Altschul et al., (1997) (Nucleic Acids Res. 25(17): 3389-3402). Proteins encoding biomass-degrading enzymes possess conserved domains. We used the domains available at the European Bioinformatics Institute (www.ebi.ac.uk/Tools/InterProScan/) to assist in the identification of target enzymes.

[0278] Proteins targeted to the extracellular space by the classical secretory pathway possess an N-terminal signal peptide, composed of a central hydrophobic core surrounded by N- and C-terminal hydrophilic regions. We used Phobius (available at http://phobius.cgb.ki.se) and SignalP® version 3 (available at http://www.cbs.dtu.dk/services/SignalP) to recognize the presence of signal peptides encoded by the cDNA clones. The tools TargetP® (available at http://www.cbs.dtu.dk/services/TargetP) and Big-PI Fungal Predictor (available at http://mendel.imp.ac.at/gpi/fungi_server.html) were used to remove sequences that encode proteins which are targeted to the mitochondria or bound to the cell wall. Finally, sequences predicted to encode soluble secreted proteins by these automated tools were analyzed manually. Clones that comprise full-length cDNAs which are predicted to encode soluble secreted proteins were sequenced completely. For genes identified from the genome sequence, oligonucleotide primers specific to the target genes were designed and used to PCR amplified the target genes from double-stranded cDNA or genomic DNA. The PCR amplified products were cloned into an appropriate expression vector for protein production in host cells. The genomic, coding and polypeptide sequences were assigned SEQ ID NOs, annotations, general functions, protein activities, CAZy family classifications, as summarized in Tables 1A-1C. Where appropriate, carbohydrate-binding modules (CBMs) of particular interest for the degradation of biomass were also listed in Tables 1A-1C.

### Example 5

### Assays for Characterization of Polypeptides

[0279] Polypeptides of the present invention may be additionally cloned into an expression vector, expressed and characterized (e.g., in sugar release assays) for activity relating to their ability to breakdown and/or process biomass as described in WO/2012/92676, WO/2012/130950, and WO/2012/130964 using appropriate substrates (e.g., acid pre-treated corn stover, hot water treated washed wheat straw, or hot water treated washed corn fiber substrate). Soluble sugars that are released can be analyzed for example by proton NMR.

[0280] A number of assays may be used to characterize the polypeptides of the present invention. Selected non-limiting examples of such assays are described and/or referenced below. Of course, other assays not explicitly mentioned or referenced here may also be used, and the expression “can be” used below is intended to reflect this possibility. Furthermore, a person of skill in the art would be able to modify or adapt these and other assays, as necessary, to characterize a particular polypeptide.
[0281] Acetylxylan esterase CE5. Polypeptides of the present invention having this activity can be characterized as described in Water et al., Appl Environ Microbiol. (2012), 78(10): 3759-62; or Yang et al., International Journal of Molecular Sciences (2010), 11(12): 5143-5151.
[0282] Adhesin protein Mad1. Polypeptides of the present invention having this activity can be characterized for example as described in Wang and St Leger, Eukaryot. Cell (2007), 6(5): 808-816.
[0283] Adhesin. Polypeptides of the present invention having this activity (reviewed in Dranginis et al., Microbiology and Molecular Biology Reviews (2007), 71(2): 282-294) can be characterized using techniques well known in the art (e.g. adhesion assays).
[0284] Aldose 1-epimerase (mutarotase, aldose mutarotase). Polypeptides of the present invention having this activity can be characterized as described in Timson and Reece, FEBS Letters (2003), 543(1-3):21-24; and Villalobo et al., Exp. Parasitol. (2005) 110(3): 298-302.
[0285] Allergen Asp f 15. Polypeptides of the present invention having this activity can be characterized as described in Bowyer et al., Medical Mycology (2007), 45(1): 17-26.
[0286] Alpha-arabinofuranosidase. Polypeptides of the present invention having this activity can be characterized for example as described by Poutanen et al. (Appl. Microbiol. Biotechnol. 1988, 28, 425-432) using 5 mM p-nitrophenyl alpha-L-arabinofuranoside as substrates. The reactions may be carried out in 50 mM citrate buffer at pH 6.0, 40° C. with a total reaction time of 30 min. The reaction is stopped by adding 0.5 ml of 1 M sodium carbonate and the liberated p-nitrophenol is measured at 405 nm. Activity is expressed in U/ml. Furthermore, arabionofuranosidases may also be useful in animal feed compositions to increase digestibility. Corn arabinoxylan is heavily di-substituted with arabinose. In order to facilitate the xylan degradation it is advantageous to remove as many as possible of the arabinose substituents. The in vitro degradation of arabinoxylans in a corn based diet supplemented with a polypeptide of the present invention having alpha-arabinofuranosidase activity and a commercial xylanase is studied in an in vitro digestion system, as described in WO/2006/114094.
[0287] Alpha-fucosidase. Polypeptides of the present invention having this activity can be characterized for example as described in U.S. Pat. No. 5,637,490; in Zielke et al., J. Lab. Clin. Med. (1972), 79:164; or using commercially available kits (e.g., Alpha-L-Fucosidase (AFU) Assay Kit, Cat. No. BQ082A-EALD, BioSupplyUK).
[0288] Alpha-galactosidase. Polypeptides of the present invention having this activity can be characterized for example as described in US patent application publication No. US 2010/0273235 A1. Briefly, a synthetic substrate, 4-Nitrophenyl-α-D-galactoside is used and the release of p-Nitro-phenol is followed at a wavelength of 405 nm in a reaction buffer containing 100 mM sodium phosphate, 50 mM sodium chloride, pH 6.8 at 26° C.
[0289] Alpha-glucuronidase GH67. Polypeptides of the present invention having this activity can be characterized for example as described in Lee et al., J Ind Microbiol Biotechnol. (2012), 39(8): 1245-51, or Nagy et al., J. Bacteriol. (2002), 184: 4925-4929.
[0290] Aminopeptidase Y. Polypeptides of the present invention having this activity can be characterized for example as described in Yasuhara et al., J. Biol. Chem. (1994) 269(18): 13644-50.
[0291] Arabinogalactanase. Polypeptides of the present invention having this activity can be characterized for example as described in Yamamoto and Emi, Methods in Enzymology (1988), 160: 719-725.
[0292] Arabinoxylan arabinofuranohydrolase (AXH) GH43. Polypeptides of the present invention having this activity can be characterized for example as described in Yoshida et al., Journal of Bacteriology (2010), 192(20): 5424-5436.
[0293] Arabinoxylan arabinofuranosidase GH62. Polypeptides of the present invention having this activity can be characterized for example as described in Sakamoto et al., Applied Microbiology and Biotechnology (2011), 90(1): 137-146.
[0294] Aspartic protease. Polypeptides of the present invention having this activity can be characterized for example as described in Tacco et al., Med. Mycol. (2009), 47(8): 845-854; or in Hu et al., Journal of Biomedicine and Biotechnology (2012), 2012:728975.
[0295] Aspartic-type endopeptidase. Polypeptides of the present invention having this activity can be characterized for example as described in Tjalsma et al., J. Biol. Chem. (1999), 274: 28191-28197.
[0296] Aspergillopepsin-2. Polypeptides of the present invention having this activity can be characterized for example as described in Huang et al., Journal of Biological Chemistry (2000), 275(34): 26607-14.
[0297] Avenacinase. Polypeptides of the present invention having this activity can be characterized for example as described in Kwak et al., Phytopathology (2010), 100(5): 404-14; or in Bowyer et al., Science (1995), 267(5196): 371-4.
[0298] Beta-galactosidase. Polypeptides of the present invention having this activity can be characterized for example using commercially available kits (e.g., β-Galactosidase Enzyme Assay System with Reporter Lysis Buffer, Cat. No. E2000, Promega).
[0299] Beta-glucanase. Polypeptides of the present invention having this activity can be characterized for example as described in US patent application publication number US 2012/0023626 A1; or in U.S. Pat. No. 8,309,338.
[0300] Beta-glucosidase. Polypeptides of the present invention having this activity can be characterized for example as described in PCT application publication No. WO/2007/019442; or by using a commercially available kit (e.g., Beta-Glucosidase Assay Kit, Cat. No. KA1611, Abnova Corp).
[0301] Beta-glucuronidase GH79. Polypeptides of the present invention having this activity can be characterized for example as described in Eudes et al., Plant Cell Physiology (2008), 49(9): 1331-41; or Michikawa et al., Journal of Biological Chemistry (2012), 287: 14069-14077.
[0302] Beta-mannanase. Polypeptides of the present invention having this activity can be characterized for example as described in European patent application No. EP 2261359 A1; or in PCT application publication No. WO2008009673A2.
[0303] Beta-mannosidase. Polypeptides of the present invention having this activity can be characterized for example as described in Park et al., N. Biotechnol. (2011), 28(6): 639-48; Duffaud et al., Appl Environ Microbiol. (1997), 63(1): 169-77; or in Fliedrová et al., Protein Expr Purif. (2012), 85(2): 159-64.
[0304] Beta-xylosidase. Polypeptides of the present invention having this activity can be characterized for example as described in Wagschal et al., Applied and Environmental Microbiology (2005), 71(9): 5318-5323; or Shao et al., Appl Environ Microbiol. (2011), 77(3): 719-726.
[0305] Bifunctional xylanase/deacetylase. Polypeptides of the present invention having this activity can be characterized for example as described in Cepeljnik et al., Folia Microbiol. (2006), 51(4): 263-267; US patent application publication No. US 2012/0028306 A1; U.S. Pat. No. 7,759,102; or PCT application publication No. WO 2006/078256 A2; or Grozinger and Schreiber, Chem Biol. (2002), 9(1): 3-16.
[0306] Carbohydrate-binding cytochrome. Polypeptides of the present invention having this activity can be characterized for example as described in Yoshida et al., Appl Environ Microbiol. (2005) 71(8): 4548-4555.
[0307] Carboxypeptidase. Polypeptides of the present invention having this activity can be characterized for example as described in US patent application publication No. US 2007/0160711 A1; or in PCT application publication No. WO 1998/014599A1.
[0308] Cellobiohydrolase GH6. Polypeptides of the present invention having this activity can be characterized for example as described in Takahashi et al., Applied and Environmental Microbiology (2010), 76(19): 6583-6590.
[0309] Cellobiohydrolase GH7. Polypeptides of the present invention having this activity can be characterized for example as described in Segato et al., Biotechnology for Biofuels (2012), 5:21; or Baumann et al., Biotechnol. for Biofuels (2011), 4:45.
[0310] Cellobiose dehydrogenase. Polypeptides of the present invention having this activity can be characterized for example as described in Schou et al., Biochem. J. (1998), 330: 565-571; or Baminger et al., J. Microbiol Methods. (1999), 35(3): 253-9.
[0311] Chitin deacetylase. Polypeptides of the present invention having this activity can be characterized for example as described in European patent application No. EP 0610320 B1.
[0312] Chitinase. Polypeptides of the present invention having this activity can be characterized for example as described in U.S. Pat. No. 7,087,810.
[0313] Chitooligosaccharide deacetylase. Polypeptides of the present invention having this activity can be characterized for example as described in John et al., Proc Natl Acad Sci USA (1993), 90(2): 625-9.
[0314] Chitotriosidase-1. Polypeptides of the present invention having this activity can be characterized for example as described in U.S. Pat. No. 6,057,142.
[0315] Cholinesterase. Polypeptides of the present invention having this activity can be characterized for example as described in Abass Askar et al., Canadian Journal Veterinary Research (2011), 75(4): 261-270; or Cátia et al., PLoS One (2012), 7(3): e33975.
[0316] Cutinase. Polypeptides of the present invention having this activity can be characterized for example as described in US patent application publication No. US 2012/0028318 A1; or in Chen et al., J. Biol Chem. (2008), 283(38): 25854-62.
[0317] Cytochrome P450. Polypeptides of the present invention having this activity can be characterized for example as using commercially available kits (e.g., P450-Glo™ Assays, Promega); or as described in Walsky and Obach, Drug Metab Dispos. (2004), 32(6): 647-60.
[0318] Dehydrogenase. Polypeptides of the present invention having this activity can be characterized for example as described in Mayer and Arnold, J. Biomol. Screen. (2002), 7(2): 135-140.
[0319] Endo-1,3(4)-beta-glucanase (laminarinase). Polypeptides of the present invention having this activity can be characterized for example as described in Akiyama et al., J Plant Physiol. (2009), 166(16): 1814-25; or Hua et al., Biosci Biotechnol Biochem. (2011), 75(9): 1807-12.
[0320] Endo-1,4-beta-xylanase. Polypeptides of the present invention having this activity can be characterized for example as described in Song et al., Enzyme and Microbial Technology (2013). 52(3): 170-176.
[0321] Endo-1,5-alpha-arabinanase. Polypeptides of the present invention having this activity can be characterized for example as described in US patent publication No. US 2012/0270263. More particularly, this assay of arabinase activity is based on colorimetrically determination by measuring the resulting increase in reducing groups using a 3,5-dinitrosalicylic acid reagent. Enzyme activity can be calculated from the relationship between the concentration of reducing groups, as arabinose equivalents, and absorbance at 540 nm. The assay is generally carried out at pH 3.5, but it can be performed at different pH values for the additional characterization and specification of enzymes. Polypeptides of the present invention having this activity can also be characterized for example as described in Hong et al., Biotechnol Lett. (2009), 31(9): 1439-43.
[0322] Endo-1,6-beta-glucanase. Polypeptides of the present invention having this activity can be characterized for example as described in Bryant et al., Fungal Genet Biol. (2007), 44(8): 808-17; or in Oyama et al., Biosci Biotechnol Biochem. (2006), 70(7): 1773-5.
[0323] Endochitinase. Polypeptides of the present invention having this activity can be characterized for example as described in Wen et al., Biotechnol. Applied Biochem. (2002), 35: 213-219.
[0324] Endoglucanase. Polypeptides of the present invention having this activity can be characterized for example as described in U.S. Pat. No. 8,063,267.
[0325] Endoglycoceramidase. Polypeptides of the present invention having this activity can be characterized for example as described in U.S. Pat. No. 5,795,765; or US patent application publication No. US 2009/0170155 A1.
[0326] Endo-polygalacturonase. Polypeptides of the present invention having this activity can be characterized for example as described in European patent application publication Nos. EP1614748 A1 and EP1114165 A1.
[0327] Endo-polygalacturonase. Polypeptides of the present invention having this activity can be characterized for example as described in PCT application publication No. WO 1994/014952 A1; or in European patent application publication No. EP1614748 A1.
[0328] Endo-rhamnogalacturonase GH28. Polypeptides of the present invention having this activity can be characterized for example as described in Sprockett et al., Gene (2011), 479(1-2): 29-36; or An et al., Carbohydrate Research (1994), 264(1): 83-96.
[0329] Exo-1,3-beta-galactanase GH43. Polypeptides of the present invention having this activity can be characterized for example as described in Ichinose et al., Appl Environ Microbiol. (2006), 72(5): 3515-3523.
[0330] Exo-1,3-beta-glucanase. Polypeptides of the present invention having this activity can be characterized for example as described in O'Connell et al., Appl Microbiol Biotechnol. (2011), 89(3): 685-96; or Santos et al., J Bacteria (1979), 139(2): 333-338.
[0331] Exo-1,4-beta-xylosidase. Polypeptides of the present invention having this activity can be characterized for example as described in La Grange et al., Applied and Environmental Microbiology (2001), 67(12): 5512-5519.
[0332] Exo-arabinanase. Polypeptides of the present invention having this activity can be characterized for example as described in Tatsuji Sakamoto and Thibault, Appl Environ Microbiol. (2001), 67(7): 3319-3321.
[0333] Exoglucanase. Polypeptides of the present invention having this activity can be characterized for example as described in Creuzet et al., FEMS Microbiology Letters (1983), 20(3): 347-350; or Kruus et al., Journal of Bacteriology (1995), 177(6): 1641-1644.
[0334] Exo-glucosaminidase GH2. Polypeptides of the present invention having this activity can be characterized for example as described in Tanaka et al., Journal of Bacteriology (2003), 185(17): 5175-5181.
[0335] Exo-polygalacturonase. Polypeptides of the present invention having this activity can be characterized for example as described in Dong and Wang, BMC Biochem. (2011), 12: 51.
[0336] Exo-rhamnogalacturonase GH28. Polypeptides of the present invention having this activity can be characterized for example as described in U.S. Pat. No. 5,811,291.
[0337] Expansin. Polypeptides of the present invention having this activity can be characterized for example as described in PCT application publication No. WO 2005/030965 A2; or in U.S. Pat. No. 7,001,743.
[0338] Expansin-like protein 1. Polypeptides of the present invention having this activity can be characterized for example as described in Lee et al., Molecules and Cells (2010), 29(4): 379-85.
[0339] Feruloyl esterase. Polypeptides of the present invention having this activity can be characterized for example as described in PCT application publication No. WO 2009/076122 A1.
[0340] Galactanase GH5. Polypeptides of the present invention having this activity can be characterized for example as described in Ichinose et al., Applied and Environmental Microbiology (2008), 74(8): 2379-2383.
[0341] Gamma-glutamyltranspeptidase 2. Polypeptides of the present invention having this activity can be characterized for example as described in Rossi et al., PLoS One (2012), 7(2): e30543.
[0342] Glucan 1,3-beta-glucosidase. Polypeptides of the present invention having this activity can be characterized for example as described in Boonvitthya et al., Biotechnol Lett (2012), 34(10): 1937-43.
[0343] Glycosidase. Polypeptides of the present invention having this activity can be characterized for example as described in U.S. Pat. No. 8,119,383.
[0344] Hephaestin-like protein 1. Polypeptides of the present invention having this activity can be characterized for example as described for oxioreductases.
[0345] Hexosaminidase. Polypeptides of the present invention having this activity can be characterized for example as described in Wendeler and Sandhoff, Glycoconj J. (2009), 26(8):945-952.
[0346] Hydrophobin. Polypeptides of the present invention having this activity can be characterized for example as described in Bettini et al., Canadian Journal of Microbiology (2012), 58(8): 965-972; or Niu et al., Amino Acids. (2012), 43(2):763-71.
[0347] Iron transport multicopper oxidase FET3. Polypeptides of the present invention having this activity can be characterized for example as described in Askwith et al., Cell (1994), 76: 403-10; or De Silva et al., J. Biol. Chem. (1995) 270: 1098-1101.
[0348] Laccase. Polypeptides of the present invention having this activity can be characterized for example as described in Dedeyan et al., Appl Environ Microbiol. (2000), 66(3): 925-929.
[0349] Laminarinase GH55. Polypeptides of the present invention having this activity can be characterized for example as described in Ishida et al., J Biol Chem. (2009), 284(15): 10100-10109; or Kawai et al., Biotechnol Lett. (2006), 28(6): 365-71.
[0350] L-Ascorbate oxidase. Polypeptides of the present invention having this activity can be characterized for example as described in U.S. Pat. Nos. 5,612,208 and 5,180,672.
[0351] L-carnitine dehydrogenase. Polypeptides of the present invention having this activity can be characterized for example as described in Aurich et al., Biochim Biophys Acta. (1967), 139(2): 505-7; or U.S. Pat. No. 5,156,966.
[0352] Leucine aminopeptidase 1. Polypeptides of the present invention having this activity can be characterized for example as described in Beattie et al., Biochem. J. (1987), 242: 281-283.
[0353] Licheninase (beta-D-glucan 4-glucanohydrolase). Polypeptides of the present invention having this activity can be characterized for example as described in Tang et al., J Agric Food Chem. (2012), 60(9): 2354-61.
[0354] Lipase. Polypeptides of the present invention having this activity can be characterized for example as described in U.S. Pat. Nos. 7,662,602 and 7,893,232.
[0355] L-sorbosone dehydrogenase. Polypeptides of the present invention having this activity can be characterized for example as described in Shinjoh et al., Applied and Environment Microbiology (1995), 61(2): 413-420.
[0356] Lysophospholipase. Polypeptides of the present invention having this activity can be characterized for example as described in U.S. Pat. No. 5,965,422.
[0357] Metallocarboxypeptidase. Polypeptides of the present invention having this activity can be characterized for example as described in Tayyab et al., J Biosci Bioeng. (2011), 111(3): 259-65; or Song et al., J Biol Chem. (1997), 272(16): 10543-50.
[0358] Methylenetetrahydrofolate dehydrogenase [NAD(+)]. Polypeptides of the present invention having this activity can be characterized for example as described in Wohlfarth et al., J Bacteria (1991), 173(4): 1414-1419.
[0359] Mixed-link glucanase. Polypeptides of the present invention having this activity can be characterized for example as described in Clark et al., Carbohydr Res. (1978), 61: 457-477.
[0360] Multicopper oxidase. Polypeptides of the present invention having this activity can be characterized for example as described in US patent application publication No. US 2012/0094335 A1.
[0361] Mutanase. Polypeptides of the present invention having this activity can be characterized for example as described in Pleszczyńska, Biotechnol Lett. (2010), 32(11): 1699-1704; or WO 1998/000528 A1.
[0362] N-acetylglucosaminidase GH18. Polypeptides of the present invention having this activity can be characterized for example as described in Murakami et al., Glycobiology (2013), e-pub: February 22, PMID: 23436287; or in US patent application publication No. US20120258089 A1.
[0363] NADPH—cytochrome P450 reductase. Polypeptides of the present invention having this activity can be characterized for example as described in Guengerich et al., Nat Protoc. (2009), 4(9): 1245-51.
[0364] Non-hemolytic phospholipase C. Polypeptides of the present invention having this activity can be characterized for example as described in Weingart and Hooke, Curr Microbiol. (1999), 38(4): 233-8; Korbsrisate et al., J Clin Microbiol. (1999), 37(11): 3742-5.
[0365] Oxidase. Polypeptides of the present invention having this activity can be characterized for example using a number of commercially available kits [e.g., Amplex® Red Galactose/Galactose Oxidase Kit (A22179) and Amplex® Red Glucose/Glucose Oxidase Assay Kit (Molecular Probes/Invitrogen); Cytochrome C Oxidase Assay Kit (Cat. No. CYTOCOX1-1KT; Sigma-Aldrich); Xanthine Oxidase Assay Kit (ab102522, Abcam); Lysyl Oxidase Activity Assay Kit (ab112139, Abcam); Glucose Oxidase Assay Kit (ab138884, Abcam); Monoamine oxidase B (MAOB) Specific Activity Assay Kit (ab109912, Abcam)].
[0366] Oxidoreductase. Polypeptides of the present invention having this activity can be characterized for example as described in Hommes et al., Anal Chem. (2013), 85(1): 283-291.
[0367] Para-nitrobenzyl esterase. Polypeptides of the present invention having this activity can be characterized for example as described in Moore and Arnold, Nat Biotechnol. (1996), 14(4): 458-67.
[0368] Pectate lyase. Polypeptides of the present invention having this activity can be characterized for example as described in Wang et al., BMC Biotechnology (2011), 11: 32.
[0369] Pectin methylesterase. Polypeptides of the present invention having this activity can be characterized for example as described in PCT application publication No. WO 1997/031102 A1.
[0370] Pectinesterase. Polypeptides of the present invention having this activity can be characterized for example as described in U.S. Pat. No. 5,053,232.
[0371] Penicillopepsin. Polypeptides of the present invention having this activity can be characterized for example as described in Cao et al., Protein Sci. (2000), 9(5): 991-1001; or Hofmann et al., Biochemistry. (1984), 14; 23(4): 635-43.
[0372] Peroxidase. Polypeptides of the present invention having this activity can be characterized for example using a number of commercially available kits [e.g., Amplex® Red Hydrogen Peroxide/Peroxidase Assay Kit (Molecular Probes/Invitrogen); Peroxidase Activity Assay Kit (Cat. No. K772-100; BioVision); QuantiChrom™ Peroxidase Assay Kit (Cat. No. DPOD-100, BioAssay Systems].
[0373] Phospholipase C. Polypeptides of the present invention having this activity can be characterized for example using commercially available kits (Amplex® Red Phosphatidylcholine-Specific Phospholipase C Assay Kit, Molecular Probes/Invitrogen).
[0374] Polysaccharide monooxygenase. Polypeptides of the present invention having this activity can be characterized for example as described in Kittl et al., Biotechnol Biofuels. (2012), 5(1):79, Phillips et al., ACS Chem Biol (2011), 6(12): 1399-1406, Wu et al., J. Biol. Chem (2013), 288(18): 12828-39.
[0375] Polysaccharide monooxygenases, sometimes referred to functionally as “cellulase-enhancing proteins”, generally belong the enzyme class GH61 and are reported to cleave polysaccharides with the insertion of oxygen.
[0376] Protease. Polypeptides of the present invention having this activity can be characterized for example as described in US patent application publication No. US 2005/0010037 A1.
[0377] Putative exoglucanase type C (1,4-beta-cellobiohydrolase; beta-glucancellobiohydrolase; exocellobiohydrolase I). Polypeptides of the present invention having this activity can be characterized for example as described in Dai et al., Applied Biochemistry and Biotechnology (1999), 79, Issue 1-3: 689-699.
[0378] Rhamnogalacturonan lyase PL4. Polypeptides of the present invention having this activity can be characterized for example as described in Mutter et al., Plant Physiol. (1998), 117: 153-163; or de Vries, Appl. Microbiol Biotechnol. (2003), 61: 10-20.
[0379] Rodlet protein. Polypeptides of the present invention having this activity can be characterized for example as described in Yang et al., Biopolymers (2013), 99(1): 84-94.
[0380] Serine-type carboxypeptidase F. Polypeptides of the present invention having this activity can be characterized for example as described in U.S. Pat. No. 6,379,913.
[0381] Swollenin. Polypeptides of the present invention having this activity can be characterized for example as described in Jäger et al., Biotechnol Biofuels. (2011), 4: 33; or Saloheimo et al., Eur J Biochem. (2002), 269(17): 4202-11.
[0382] Tyrosinase. Polypeptides of the present invention having this activity can be characterized for example as described in US patent application publication No. US 2011/0311693 A1.
[0383] Unsaturated rhamnogalacturonyl hydrolase YteR. Polypeptides of the present invention having this activity can be characterized for example as described in Itoh et al., Biochem Biophys Res Commun. (2006), 347(4): 1021-9; or Itoh et al., J Mol Biol. (2006), 360(3): 573-85.
[0384] Xylan alpha-1,2-glucuronidase. Polypeptides of the present invention having this activity can be characterized for example as described in Ishihara, M. and Shimizu, K., “alpha-(1->2)-Glucuronidase in the enzymatic saccharification of hardwood xylan: Screening of alpha-glucuronidase producing fungi.” Journal Mokuzai Gakkaishi, (1988) 34: 58-64.
[0385] Xylanase. Polypeptides of the present invention having this activity can be characterized for example as described in US patent application publication No. US 2012/0028306 A1; U.S. Pat. No. 7,759,102; or PCT application publication No. WO 2006/078256 A2.
[0386] Xyloglucanase GH12. Polypeptides of the present invention having this activity can be characterized for example as described in Master et al., Biochem. (2008), 411(1): 161-170.
[0387] Xyloglucan-specific endo-beta-1,4-glucanase A. Polypeptides of the present invention having this activity can be characterized for example as described in European patent application publication No. EP0972016 B1; in U.S. Pat. No. 6,077,702; Damásio et al., Biochim Biophys Acta. (2012), 1824(3): 461-7; or Wong et al., Appl Microbiol Biotechnol. (2010), 86(5): 1463-71.
[0388] Xylosidase/arabinosidase. Polypeptides of the present invention having this activity can be characterized for example as described in Whitehead and Cotta, Curr Microbiol. (2001), 43(4): 293-8; or Xiong et al., Journal of Experimental Botany (2007), 58(11): 2799-2810.

### Example 6

### General Molecular Biology Procedures

[0389] Standard molecular cloning techniques such as DNA isolation, gel electrophoresis, enzymatic restriction modifications of nucleic acids, E. coli transformation, etc., were performed as described by Sambrook et al., 1989, (Molecular cloning: a laboratory manual, 2nd Ed., Cold Spring Harbor Laboratory Press, Cold Spring Harbor, N.Y. and Innes et al. (1990) PCR protocols, a guide to methods and applications, Academic Press, San Diego, edited by Michael A. Innis et al). Primers were prepared by IDT (Integrated DNA Technologies). Sanger DNA sequencing was performed using an Applied Biosystem's 3730×1 DNA Analyzer technology at the Innovation Centre (Génome Québec), McGill University in Montreal.

### Example 7

### Construction of pGBFIN49 Expression Plasmids

[0390] Genes of interest were cloned into the expression vector pGBFIN-49. This vector is a derivative of pGBFIN-41 that contains the A. niger glaA promoter, A. niger TrpC terminator, A. nidulans gpdA promoter, gene encoding the pheomycin resistance gene, A. niger glaA terminator and an E. coli backbone. FIG. 1 represents a schematic map of pGBFIN-49 and the complete nucleotide sequence is presented as SEQ ID NO: 2936. Details of the construction of pGBFIN-49 are as follows:

### 1. TtrpC Terminator PCR Amplification (0.7 kb):

[0391] TtrpC terminator was PCR amplified using purified pGBFIN33 plasmid as a template. The following primers and PCR program were used:

(SEQ ID NO: 2937)
Primer-3: 5′-GTCCGTCGCCGTCCTTCAccgccggtccgacg-3′
(SEQ ID NO: 2938)
Primer-4: 5′-GCGGCCGGCGTATTGGGTGttacggagc-3′

[0392] Primer-4 is entirely specific to the TtrpC 3′ end. Primer-3 was designed to suit the LIC cloning strategy but also to keep the TtrpC sequence as close to the original sequence. To do so, five adenines were replaced by thymines (underlined).

[0393] PCR Master Mix:

| | | |
|---|---|---|
| pGBFIN33 | 1 | μL (5-10 ng) |
| Primer-3 (10 mM) | 1 | μL |
| Primer-4 (10 mM) | 1 | μL |
| dNTPs (2 mM) | 5 | μL |
| HF Buffer (5x) | 10 | μL |
| Phusion DNS pol. | 0.5 | μL |
| Nuclease-free water | 31.5 | μL |
| Total | 50 | μL |

[0394] PCR Program:

[0395] 1×98° C., 2 min; 25×(98° C., 30 sec; 68° C., 30 sec; 72° C., 1 min); 72° C., 7 min.

[0396] Reaction conditions: 5 μL of the PCR reaction was separated by electrophoresis on 1.0% agarose gel and the remaining was purified using QIAEX II™ gel Extraction kit (QIAGEN) and resuspended in nuclease-free water.

2. pGBFIN41 Vector PCR Amplification (8.3 kb):

[0397] Vector backbone was PCR amplified using pGBFIN41 as a template. Primers were designed outside of the ccdA region (not included in pGBFIN49). The following primers and PCR program were used:

(SEQ ID NO: 2939)
Primer-2: 5′-CACCCAATACGCCGGCCGCgcttccagacagctc-3′
(SEQ ID NO: 2940)
Primer-1C: 5′-GGTGTTTTGTTGCTGGGGAtgaagctcaggctctca
gttgcgtc-3′

[0398] Primer-2 contains a pgpdA-specific region and an extra sequence specific to TtrpC 3′ end (also included in Primer-4). Primer-1C was designed to suit the LIC cloning strategy but also to keep PgalA region as close to the original sequence. To do so, three thymines were replaced by adenines (underlined).

[0399] PCR Master Mix:

| | | |
|---|---|---|
| pGBFIN41 | 1 | μL (50 ng) |
| Primer-2 (10 mM) | 1 | μL |
| Primer-1C (10 mM) | 1 | μL |
| dNTPs (2 mM) | 5 | μL |
| HF Buffer (5x) | 10 | μL |
| Phusion DNS pol. | 0.5 | μL |
| DMSO | 1 | μL |
| Nuclease-free water | 30.5 | μL |
| Total | 50 | μL |

[0400] PCR Program:

[0401] 1×98° C., 3 min; 10×(98° C., 30 sec; 68° C., 30 sec, 72° C., 5 min); 20×(98° C., 30 sec, 68° C., 30 sec, 72° C., 5 min+10 sec/cycle); 72° C., 10 min.

[0402] Reaction Conditions:

[0403] 5 μL of the PCR reaction was separated on a 0.5% agarose gel and remaining was purified using QIAEX II™ gel Extraction kit (QIAGEN) and resuspended in nuclease-free water.

3. pGBFIN41+TtrpC Overlap-Extension PCR:

[0404] Overlap-extension/Long range PCR was performed to: a) fuse the two PCR pieces together; b) add an SfoI restriction site to re-circularize the vector. No primers were used in the overlap-extension stage. Primer-11 and Primer-12 were used for the long range PCR reaction.

(SEQ ID NO: 78)
Primer-11: 5′-CACCGGCGCCGTCCGTCGCCGTCCTTC-3′
(SEQ ID NO: 79)
Primer-12: 5′-ACGGCGCCGGTGTTTTGTTGCTGGGGATG-3′

[0405] Primer-11 is specific to the LIC tag located on the TtrpC terminator, while Primer-12 is specific to the LIC tag located on the PglaA region. The SfoI restriction site sequence is underlined above.

[0406] A standard PCR master mix was prepared to perform overlap-extension PCR using pGBFIN41 and TtrpC purified PCR products as templates. No primers were added.

[0407] Overlap-Extension Master Mix:

| | |
|---|---|
| TtrpC | 1 μL |
| pGBFIN41 | 9 μL |
| Buffer GC (5x) | 10 μL |
| dNTPs (2 mM) | 5 μL |
| Phusion DNA pol. | 0.5 μL |
| Nuclase-free water | 24.5 μL |
| pGBFIN41 | 50 μL |

[0408] PCR Program—Overlap (No Primers):

[0409] 1×98° C., 2 min; 5×(98° C., 15 sec; 58° C., 30 sec; 72° C., 5 min), 5×(98° C., 15 sec; 63° C., 30 sec; 72° C., 5 min), 5×(98° C., 15 sec; 68° C., 30 sec; 72° C., 5 min); 72° C., 10 min.

[0410] The overlap-extension PCR product was then, purified on QIAEX II™ column and 5 μL of the purified reaction was used as template DNA for Long range PCR step with Primers-11 and -12.

[0411] PCR Master Mix:

| | |
|---|---|
| Overlap product | 5 μL |
| Primer-11 (10 mM) | 1 μL |
| Primer-12 (10 mM) | 1 μL |
| dNTPs (2 mM) | 5 μL |
| HF Buffer (5x) | 10 μL |
| Phusion DNA pol. | 0.5 μL |
| DMSO | 1 μL |
| Nuclease-free water | 26.5 μL |
| pGBFIN41 | 50 μL |

[0412] PCR Program—Long Range:

[0413] 1×98° C., 3 min; 10×(98° C., 30 sec; 68° C., 30 sec; 72° C., 5 min); 20×(98° C., 30 sec; 68° C., 30 sec; 72° C., 5 min+10 sec/cycle); 72° C., 10 min.

[0414] Reaction Conditions:

[0415] 5 μL of the PCR reaction was separated on 0.5% agarose gel and remaining was purified using QIAEX II™ gel Extraction kit and resuspended in nuclease-free water. Then, SfoI digestion was performed and digested product was purified using QIAEX II gel extraction kit follow the procedure as described by the manufacturer.

### 4. Ligation:

[0416] 100 ng of the purified digested fragment was ligated to itself using 1 μL of T4 DNA Ligase (New England Biolabs, M0202), and incubated at 16° C. overnight. Enzyme inactivation was performed at 65° C. for 10 minutes. Then, 10 μL of ligation product was transformed in DH5 E. coli competent cells and plated on 2xYT agar containing 100 ug/mL ampicillin. DNA extraction was performed on single colonies the next day. Restriction analysis and sequencing were done to confirm the structure.

### Example 8

### Cloning of Scytalidium thermophilum, Myriococcum thermophilum, and Aureobasidium pullulans genes in E. coli

[0417] Cloning genes of interest in the pGBFIN-49 expression vector was performed using the Ligation-independent cloning (LIC) method according to Aslanidis, C., de Jong, P. (1990) Nucleic Acids Research Vol. 18 No. 20, 6069-6074.

[0418] Coding sequences from genes of interest were amplified by PCR using primers containing LIC tags, which are homologous to Pgla and TrpC sequences in the pGBFIN-49 cloning vector fused to sequences homologous to the coding sequences of the gene of interest, and either genomic DNA or cDNA as template. Primers have the following sequences:

(SEQ ID NO: 2941)
Forward primer: 5′-CCCCAGCAACAAAACACCTCAGCAATG...
15-20 nucleotides specific to each gene to be
cloned
(SEQ ID NO: 2942)
Reverse primer: 5′-GAAGGACGGCGACGGACTTCA...15-20
nucleotides specific to each gene to be cloned

[0419] PCR Mix Consists of Following Components:

| | |
|---|---|
| Template (gDNA or cDNA) 1-10 ng/μL | 1 μL |
| 5X Phusion HF Buffer (Finnzymes ™) | 10 μL |
| 2 mM dNTPs | 5 μL |
| LIC primer (F + R) mix 10 mM | 0.5 μL |
| Phusion DNA Polymerase (Finnzymes ™) | 0.5 μL |
| DMSO | 1.5 μL |
| H₂O | 31.5 μL |
| TOTAL | 50 μL |

[0420] PCR Amplification was Carried Out with Following Conditions:

3-step protocol

| Cycle step | Temp | Time | | Cycles |
|---|---|---|---|---|
| Initial denaturation | 98° C. | 30 | s | 1 |
| Denaturation | 98° C. | 10 | s | 10 |
| Annealing | 58° C. | 30 | s | |
| Extension | 72° C. | 30 | s | |
| Denaturation | 98° C. | 10 | s | 20 |
| Annealing | 68° C. | 30 | s | |
| Extension | 72° C. | 30 | s | |
| Final extension | 70° C. | 10 | min | 1 |

| | | | |
|---|---|---|---|
| End of PCR storage | 4° C. | hold | 1 |

[0421] Following PCR, 90 μL milliQ™ water was added to each sample and the mix was purified using a MultiScreen PCR₉₆ Filter Plate (Millipore) according to manufacturer's instructions. The PCR product was eluted from the filter in 25 μL 10 mM Tris-HCl pH 8.0.

[0422] Expression Vector pGBFIN-49 was PCR Amplified Using Primers with Following Sequences:

(SEQ ID NO: 2943)
Forward primer: 5′-GTCCGTCGCCGTCCTTCACCG-3′
(SEQ ID NO: 2944)
Reverse primer: 5′-GGTGTTTTGTTGCTGGGGATGAAGC-3′

### Primers are Located at Either Site of the SfoI Restriction Site

[0423] PCR Mix Consists of Following Components:

| | |
|---|---|
| pGBFIN-49 plasmid DNA (10 ng/μL) | 2 μL |
| 5X Phusion HF Buffer (Finnzymes ™) | 20 μL |
| 2 mM dNTPs | 10 μL |
| LIC Primer mix (F + R) 10 mM | 2 μL |
| Phusion DNA Polymerase (Finnzymes ™) | 1.5 μL |
| DMSO | 3 μL |
| H₂O | 61.5 μL |
| TOTAL | 100 μL |

[0424] PCR Amplification was Carried Out with Following Conditions:

| | 2-step PCR protocol | | |
|---|---|---|---|
| Cycle step | Temp. | Time | Cycles |
| Initial denaturation | 98° C. | 2 min | 1 |
| Denaturation | 98° C. | 10 s | 35 |
| Annealing + Extension | 68° C. | 4 min + 10 s/cycle | |
| Final extension | 70° C. | 10 min | 1 |
| End of PCR storage | 4° C. | Hold | 1 |

[0425] Following PCR, 1 μL of DpnI was added to the PCR mix and digestion was performed overnight at 37° C. Digested PCR product was purified using the Qiaquick™ PCR purification kit (Qiagen) according to manufacturer's instructions.

[0426] Obtained PCR fragments were treated with T4 DNA polymerase in the presence of dTTP to create single stranded tails at the ends of the PCR fragments. The single stranded tails of the PCR fragment are complementary to those of the vector, thus permitting non-covalent bi-molecular associations, e.g., circularization between molecules.

[0427] The reaction mix of the T4 DNA polymerase treatment of the pGBFIN-49 PCR fragment consisted of the following components:

| | | |
|---|---|---|
| Purified pGBFIN-49 PCR fragment | 600 | ng |
| 10X Neb Buffer 2 | 2 | μL |
| 25 mM dTTP | 2 | μL |
| DTT 100 μM | 0.8 | μL |
| T4 DNA Polymerase 3 U/μL | 1 | μL |
| H₂O | Up to 20 | μL |
| TOTAL | 20 | μL |

[0428] The reaction mix of T4 DNA polymerase treatment of the Gene of Interest (GOI) PCR fragment consisted of the following components:

| | |
|---|---|
| Purified GOI PCR | 5 μL |
| 10X NEB Buffer 2 | 2 μL |
| 25 mM dATP | 2 μL |
| DTT 100 μM | 0.8 μL |
| T4 DNA Polymerase 3 U/μL | 1 μL |
| H₂O | 9.2 μL |
| TOTAL | 20 μL |

[0429] Reaction Conditions were as Follows:

| Step | Temperature (° C.) | Duration |
|---|---|---|
| Annealing | 22 | 30 min |
| Enzyme inactivation | 75 | 20 min |
| End | 4 | Hold |

[0430] Following T4 DNA polymerase treatment, 2 μL of pGBFIN-49 vector and 4 μL of the GOI were mixed and incubated at room temperature allowing annealing of GOI fragment with pGBFIN-49 vector fragment. The bi-molecular forms are used to transform E. coli. Plasmid DNA of resulting transformants was isolated and verified by sequence analyses for correct amplification and cloning of the gene of interest.

### Example 9

### Transformation of Scytalidium thermophilum, Myriococcum Thermophilum, and Aureobasidium pullulans Gene Expression Cassettes into A. niger

[0431] As host strain for enzyme production, A. niger GBA307 was used. Construction of A. niger GBA307 is described in WO 2011/009700.

[0432] Transformation of A. niger was performed essentially according to the method described by Tilburn, J. et. al. (1983) Gene 26, 205-221 and Kelly, J & Hynes, M. (1985) EMBO J., 4, 475-479 with the following modifications:
[0433] Spores were grown for 16-24 hours at 30° C. in a rotary shaker at 250 rpm in Aspergillus minimal medium. Aspergillus minimal medium contains per liter: 6 g NaNO₃; 0.52 g KCl; 1.52 g KH₂PO₄; 1.12 ml 4 M KOH; 0.52 g MgSO₄.7H₂O; 10 g glucose; 1 g casamino acids; 22 mg ZnSO₄.7H₂O; 11 mg H₃BO₃; 5 mg FeSO₄.7H₂O; 1.7 mg CoCl₂.6H₂O; 1.6 mg CuSO₄.5H₂O; 5 mg MnCl₂.2H₂O; 1.5 mg Na₂MoO₄.2H₂O; 50 mg EDTA; 2 mg riboflavin; 2 mg thiamine-HCl; 2 mg nicotinamide; 1 mg pyridoxine-HCl; 0.2 mg panthotenic acid; 4 μg biotin; 10 ml Penicillin (50001 U/mL/Streptomycin (5000 UG/mL) solution (Invitrogen);
[0434] Glucanex 200G (Novozymes) was used for the preparation of protoplasts;
[0435] After protoplast formation (2-3 hours) 10 mL TB layer (per liter: 109.32 g Sorbitol; 100 mL 1 M Tris-HCl pH 7.5) was pipetted gently on top of the protoplast suspension. After centrifugation for 10 min at 4330×g at 4° C. in a swinging bucket rotor, the protoplasts on the interface were transferred to a fresh tube and washed with STC buffer (1.2 M Sorbitol, 10 mM Tris-HCl pH 7.5, 50 mM CaCl₂). The protoplast suspension was centrifuged for 10 min at 1560×g in a swinging bucket rotor and resuspended in STC-buffer at a concentration of 10⁸ protoplasts/mL;
[0436] To 200 μL of the protoplast suspension, 20 μL ATA (0.4 M Aurintricarboxylic acid), the DNA dissolved in 10 μL in TE buffer (10 mM Tris-HCl pH 7.5, 0.1 mM EDTA), 100 μL of a PEG solution (20% PEG 4000 (Merck), 0.8M sorbitol, 10 mM Tris-HCl pH 7.5, 50 mM CaCl₂) was added;
[0437] After incubation of the DNA-protoplast suspension for 10 min at room temperature, 1.5 ml PEG solution (60% PEG 4000 (Merck), 10 mM Tris-HCl pH7.5, 50 mM CaCl₂) was added slowly, with repeated mixing of the tubes. After incubation for 20 min at room temperature, suspensions were diluted with 5 ml 1.2 M sorbitol, mixed by inversion and centrifuged for 10 min at 2770×g at room temperature.
[0438] The protoplasts were resuspended gently in 1 mL 1.2 M sorbitol and plated onto selective regeneration medium consisting of Aspergillus minimal medium without riboflavin, thiamine.HCl, nicotinamide, pyridoxine, panthotenic acid, biotin, casamino acids and glucose, supplemented with 150 μg/mL Phleomycin (Invitrogen), 0.07 M NaNO₃, 1 M sucrose, solidified with 2% bacteriological agar #1 (Oxoid, England). After incubation for 5-10 days at 30° C., single transformants were isolated on PDA (Potato Dextrose Agar (Difco) supplemented with 150 μg/mL Phleomycin in 96 wells MTP. After 5-7 days growth at 30° C. single transformants were used for MTP fermentation.

### Example 10

### Aspergillus niger Microtiter Plate Fermentation

[0439] 96 wells microtiter plates (MTP) with sporulated Aspergillus niger strains were used to harvest spores for MTP fermentations. To do this, 100 ?l water was added to each well and after resuspending the mixture, 40 μL of spore suspension was used to inoculate 2 mL A. niger medium (70 g/L glucose.H₂O, 10 g/L yeast extract, 10 g/L (NH₄)₂SO₄, 2 g/L K₂SO₄, 2 g/L KH₂PO₄, 0.5 g/L MgSO₄.7H₂O, 0.5 g/L ZnSO₄.7H₂O, 0.2 g/L CaCl₂, 0.01 g/L MnSO₄.7H₂O, 0.05 g/L FeSO₄.7H₂O, 0.002 Na₂MoO₄.2H₂O, 0.25 g/L Tween™-80, 10 g/L citric acid, 30 g/L MES; pH 5.5 adjusted with 4 M NaOH) in a 24 well MTP. In the MTP fermentations for strains expressing GH61 proteins (e.g., polysaccharide monooxygenases), 30 μM CuSO₄ was included in the media. The MTP's were incubated in a humidity shaker (Infors) at 34° C. at 550 rpm, and 80% humidity for 6 days. Plates were centrifuged and supernatants were harvested.

### Example 11

### Aspergillus niger Shake Flask Fermentation

[0440] Approximately 1×10⁸-1×10⁷ spores were inoculated in 20 mL pre-culture medium containing Maltose 30 g/L; Peptone (aus casein) 10 g/L; Yeast extract 5 g/L; KH₂PO₄ 1 g/L; MgSO₄.7H₂O 0.5 g/L; ZnCl₂ 0.03 g/L; CaCl₂ 0.02 g/L; MnSO₄.4H₂O 0.01 g/L; FeSO₄.7H₂O 0.3 g/L; Tween™-80 3 g/L; pH 5.5. After growing overnight at 34° C. in a rotary shaker, 10-15 mL of the growing culture was inoculated in 100 mL main culture containing Glucose.H₂O 70 g/L; Peptone (aus casein) 25 g/L; Yeast extract 12.5 g/L; K₂SO₄ 2 g/L; KH₂PO₄ 1 g/L; MgSO₄.7H₂O 0.5 g/L; ZnCl₂ 0.03 g/L; CaCl₂ 0.02 g/L; MnSO₄.1H₂O 0.009 g/L; FeSO₄.7H₂O 0.003 g/L; pH 5.6.

[0441] Note: for GH61 (e.g., polysaccharide monooxygenase) enzymes the culture media were supplemented with 10 μM CuSO₄.

[0442] Main cultures were grown until all glucose was consumed as measured with Combur Test N strips (Roche), which was the case mostly after 4-7 days of growth. Culture supernatants were harvested by centrifugation for 10 minutes at 5000×g followed by germ-free filtration of the supernatant over 0.2 μm PES filters (Nalgene).

### Example 12

### Protein Concentration Determination with TCA-Biuret Method

[0443] Concentrated protein samples (supernatants) were diluted with water to a concentration between 2 and 8 mg/mL. Bovine serum albumin (BSA) dilutions (0, 1, 2, 5, 8 and 10 mg/mL were made and included as samples to generate a calibration curve. 1 mL of each diluted protein sample was transferred into a 10-mL tube containing 1 mL of a 20% (w/v) trichloro acetic acid solution in water and mixed thoroughly. Subsequently, the tubes were incubated on ice water for one hour and centrifuged for 30 minutes, at 4° C. and 6000 rpm. The supernatant was discarded and pellets were dried by inverting the tubes on a tissue and letting them stand for 30 minutes at room temperature. Next, 4-mL BioQuant Biuret reagent mix was added to the pellet in the tube and the pellet was solubilized upon mixing. Next, 1 mL water was added to the tube, the tube was mixed thoroughly and incubated at room temperature for 30 minutes. The absorption of the mixture was measured at 546 nm with a water sample used as a blank measurement and the protein concentration was calculated via the BSA calibration line.

### Example 13

### Microtiter Plate (MTP) Sugar-Release Activity Assay

[0444] For each (hemi-)cellulase assay, the stored samples were analyzed twice according the following procedure 100 μL sample and 100 μL of a (hemi-)cellulase base mix [1.75 mg/g DM TEC-210 or a 3 enzyme mix at a total dosage of 3.5 mg/g DM consisting of 0.5 mg/g DM BG (14% of total protein 3E mix), 1.6 mg/g DM CBHI (47% of total protein 3E mix) and 1.4 mg/g DM CBHII (39% of total protein 3E mix)] was transferred to two suitable vials: one vial containing 800 μL 2.5% (w/w) dry matter of the acid pre-treated corn stover substrate in a 50 mM citrate buffer, buffered at pH 4.5. The other vial consisted of a blank, where the 800 μL 2.5% (w/w) dry matter, acid pre-treated corn stover substrate suspension was replaced by 800 μL 50 mM citrate buffer, buffered at pH 4.5. The assay samples were incubated for 72 hrs at 65° C. After incubation of the assay samples, a fixed volume of an internal standard, maleic acid (20 g/L), EDTA (40 g/L) and DSS (0.5 g/L), was added. After centrifugation, the supernatant of the samples is lyophilized overnight; subsequently 100 μL D₂O is added to the dried residue and lyophilized once more. The dried residue is dissolved in 600 μL of D₂O.

[0445] The amount of sugar released, is based on the signal between 4.65-4.61 ppm, relative to DSS, and is determined by means of 1D ¹H NMR operating at a proton frequency of 500 MHz, using a pulseprogram without water suppression, at a temperature of 27° C.

[0446] The (hemi)-cellulase enzyme solution may contain residual sugars. Therefore, the results of the assay are corrected for the sugar content measured after incubation of the enzyme solution.

### Example 14

### Sugar-Release Activity Assays: Labscale, Incubation with Shaking

[0447] A. niger strains expressing Scytalidium thermophilum, Myriococcum thermophilum, and Aureobasidium pullulans clones were grown in shake flask, as described above (Example 11), in order to obtain greater amounts of material for further testing. The fermentation supernatants (volume between 40 and 80 mL) were concentrated using a 10-kDa spin filter to a volume of approximately 5 mL. Subsequently, the protein concentration in the concentrated supernatant was determined via a TCA-biuret method, as described above in Example 12. The (hemi-)cellulase activity of these protein samples was tested in an assay where the supernatants were spiked on top of an enzyme base mix in the presence of 10% (w/w) acid pretreated corn stover (aCS). ‘To spike’ or ‘spiking of’ a supernatant or an enzyme indicates, in this context, the addition of a supernatant or an enzyme to a (hemi)-cellulase base mix. The feedstock solution was prepared via the dilution of a concentrated feedstock solution with water. Subsequently, the pH was adjusted to pH 4.5 with a 4 M NaOH solution. The proteins were spiked based on dosage; the concentrated supernatant samples were added in a final concentration of 2 mg/gDM to the base enzyme mix (TEC-210 5 mg/gDM) in a total volume of 10 mL at a feedstock concentration of 10% aCS (w/w) in an 30-mL centrifuge bottle (Nalgene Oakridge). All experiments were performed at least in duplicate and were incubated for 72 hours at 65° C. in an oven incubator (Techne HB-1D hybridization oven) while rotating at set-point 3. After incubation, the samples were centrifuged and soluble sugars were analysed by HPLC as described below.

### Example 15

### Soluble Sugar Analysis by HPLC

[0448] The sugar content of the samples after enzymatic hydrolysis were analyzed using a High-Performance Liquid Chromatography System (Agilent 1100) equipped with a refection index detector (Agilent 1260 Infinity). The separation of the sugars was achieved by using a 300×7.8 mm Aminex HPX-87P (Bio-Rad cat. no. 125-0098) column; Pre-column: Micro guard Carbo-P (Bio-Rad cat. no. 125-0119); mobile phase was HPLC grade water; flow rate of 0.6 mL/min and a column temperature of 85° C. The injection volume was 10 μL.

[0449] The samples were diluted with HPLC grade water to a maximum of 10 g/L glucose and filtered by using 0.2 μm filter (Afridisc LC25 mm syringe filter PVDF membrane). The glucose was identified and quantified according to the retention time, which was compared to the external glucose standard (D-(+)-Glucose Sigma cat. no: G7528) ranging from 0.2; 0.4; 1.0; 2.0 g/L.

### Example 16

### Protein Activity Assays

[0450] 16.1 Alpha-Arabino(Furano)Sidase Activity Assay

[0451] This assay measures the ability of α-arabino(furano)sidases to remove the alpha-L-arabinofuranosyl residues from substituted xylose residues. Single and double substituted oligosaccharides are prepared by incubating wheat arabinoxylan (WAX medium viscosity; 2 mg/mL; Megazyme, Bray, Ireland) in 50 mM acetate buffer pH 4.5 with an appropriate amount of endo-xylanase (Aspergillus Awamori, F J M, Kormelink, Carbohydrate Research, 249 (1993) 355-367) for 48 hours at 50° C. to produce an sufficient amount of arabinoxylo-oligosaccharides. The reaction is stopped by heating the samples at 100° C. for 10 minutes. The samples are centrifuged for 5 minutes at 10,000×g. The supernatant is used for further experiments. Degradation of the arabinoxylan is followed by High Performance Anion Exchange Chromatography (HPAEC).

[0452] The enzyme is added to the single and double substituted arabinoxylo-oligosaccharides (endo-xylanase treated WAX) in a dosage of 10 mg protein/g substrate in 50 mM sodium acetate buffer which is then incubated at 65° C. for 24 hours. The reaction is stopped by heating the samples at 100° C. for 10 minutes. The samples are centrifuged for 5 minutes at 10,000×g and 10 times diluted. Release of arabinose from the arabinoxylo-oligosaccharides is analyzed by HPAEC analysis.

[0453] The analysis is performed using a Dionex HPLC system equipped with a Dionex CarboPac PA-1 (2 mm ID×250 mm) column in combination with a CarboPac PA guard column (2 mm ID×50 mm) and a Dionex PAD-detector (Dionex Co. Sunnyvale). A flow rate of 0.3 mL/min is used with the following gradient of sodium acetate in 0.1 M NaOH: 0-40 min, 0-400 mM. Each elution is followed by a washing step of 5 min 1000 mM sodium acetate in 0.1 M NaOH and an equilibration step of 15 min 0.1 M NaOH. Arabinose release is quantified by an arabinose standard (Sigma) and compared to a sample where no enzyme was added.

### 16.2 Beta-Xylosidase Activity Assay

[0454] This assay measures the release of xylose by the action of beta-xylosidase on xylobiose. Sodium acetate buffer (0.05 M, pH 4.5) is prepared as follows. 4.1 g of anhydrous sodium acetate or 6.8 g of sodium acetate*3H₂O is dissolved in distilled water to a final volume of 1000 mL (Solution A). In a separate flask, 3.0 g (2.86 mL) of glacial acetic acid is mixed with distilled water to make the total volume of 1000 mL (Solution B). The final 0.05 M sodium acetate buffer, pH 4.5, is prepared by mixing Solution A with Solution B until the pH of the resulting solution is equal to 4.5.

[0455] Xylobiose was purchased from Sigma and a solution of 100 μg/mL sodium acetate buffer pH 4.5 was prepared. The assay is performed as detailed below.

[0456] The enzyme is added to the substrate in a dosage of 10, 5 or 1 mg protein/g substrate, which is then incubated at 62-65° C. for 24 hours. The reaction is stopped by heating the samples for 10 minutes at 100° C. Samples are appropriate diluted and the release of xylose is analyzed by High Performance Anion Exchange Chromatography.

[0457] The analysis is performed using a Dionex HPLC system equipped with a Dionex CarboPac PA-1 (2 mm ID×250 mm) column in combination with a CarboPac PA guard column (2 mm ID×50 mm) and a Dionex PAD-detector (Dionex Co. Sunnyvale). A flow rate of 0.3 mL/min is used with the following gradient of sodium acetate in 0.1 M NaOH: 0-20 min, 0-17.8 mM. Each elution is followed by a washing step of 5 min 1000 mM sodium acetate in 0.1 M NaOH and an equilibration step of 15 min 0.1 M NaOH.

[0458] In case interfering compounds are present that complicate xylose quantification, the analysis is performed by running isocratic on H₂O for 30 min a gradient (0.5M NaOH is added post-column at 0.1 mL/min for detection) followed by a washing step of 5 min 1000 mM sodium acetate in 0.1 M NaOH and an equilibration step of 15 min H₂O.

[0459] Standards of xylose and xylobiose (Sigma) are used for identification and quantification of the substrate and product formed by the enzyme.

### 16.3 Acetyl-Xylan Esterase Activity Assay

[0460] Acetyl-xylan esterases are enzymes able to hydrolyze ester linked acetyl groups attached to the xylan backbone, releasing acetic acid. This assay measures the release of acetic acid by the action of acetyl xylan esterase on acid pretreated corn stover (aCS) that contains ester linked acetyl groups.

### Determine the Presence of Acetyl Groups in pCS

[0461] The aCS used contains ±284 (±5.5) μg acetic acid/20 mg pCS as determined according to the following method.

[0462] About 20 mg of aCS substrate was weighed in a 2 mL reaction tube and placed in an ice-water bath. Then 1 mL of 0.4M NaOH in Millipore water/isopropanol (1:1) was added and the sample was thoroughly mixed. This was incubated on ice for 1 hour. Subsequently, the samples were mixed again and incubated for 2 additional hours at room temperature (mixed once in a while). After this samples were centrifuged for 5 min at 12000 rpm and the supernatant was analyzed for acetic acid content by HPLC.

### Enzyme Incubations

[0463] Enzyme incubations were performed in citrate buffer (0.05 M, pH 4.5) which is prepared as follows; 14.7 g of tri-sodium citrate is dissolved in distilled water to a final volume of 1000 mL (Solution A). In a separate flask, 10.5 g citric acid monohydrate is mixed with distilled water to make the total volume of 1000 mL (Solution B). The final 0.05 M sodium citrate buffer, pH 4.5, is prepared by mixing Solution A with Solution B until the pH of the resulting solution is 4.5.

[0464] The aCS substrate is solved in citrate buffer to obtain ±20 mg/mL. The enzyme is added to the substrate in a dosage of 1 or 10 mg protein/g substrate, which is then incubated at 60° C. for 24 hours head-over-tail. The reaction is stopped by heating the samples for 10 minutes at 100° C. The release of acetic acid is analyzed by HPLC.

[0465] As a blank sample the substrate is treated and incubated in the same way but then without the addition of enzyme.

[0466] The analysis is performed using an Ultimate 3000 system (Dionex) equipped with a Shodex RI detector and an Aminex HPX 87H column (7.8 mm ID×300 mm) column (BioRad). A flow rate of 0.6 mL/min is used with 5.0 mM H2SO4 as eluent for 30 minutes at a column temperature of 40° C. Acetic acid was used as a standard to quantify its release from pCS by the enzymes.

### 16.4 Endoxylanase Activity Assay 1

[0467] Endoxylanases are enzyme able to hydrolyze β-1,4 bond in the xylan backbone, producing short xylooligosaccharides. This assay measures the release of xylose and xylo-oligosaccharides by the action of xylanases on wheat arabinoxylan oligosaccharides (WAX) (Megazyme, Medium viscosity 29 cSt) and Beech Wood Xylan (Beech) (Sigma).

[0468] Sodium acetate buffer (0.05 M, pH 4.5) is prepared as follows; 4.1 g of anhydrous sodium acetate is dissolved in distilled water to a final volume of 1000 mL (Solution A). In a separate flask, 3.0 g (2.86 mL) of glacial acetic acid is mixed with distilled water to make the total volume of 1000 mL (Solution B). The final 0.05 M sodium acetate buffer, pH 4.5, is prepared by mixing Solution A with Solution B until the pH of the resulting solution is 4.5.

[0469] The substrates WAX and Beech are solved in sodium acetate buffer to obtain 2.0 mg/mL. The enzyme is added to the substrate in a dosage of 10 mg protein/g substrate which is then incubated at 65° C. for 24 hours. The reaction is stopped by heating the samples for 10 minutes at 100° C. The release of xylose and (arabino)xylan oligosaccharides is analyzed by High Performance Anion Exchange Chromatography.

[0470] As a blank sample the substrate is treated and incubated in the same way but then without the addition of enzyme.

[0471] The analysis is performed using a Dionex HPLC system equipped with a Dionex CarboPac PA-1 (2 mm ID×250 mm) column in combination with a CarboPac PA guard column (2 mm ID×50 mm) and a Dionex PAD-detector (Dionex Co. Sunnyvale). A flow rate of 0.3 mL/min is used with the following gradient of sodium acetate in 0.1 M NaOH: 0-40 min, 0-400 mM. Each elution is followed by a washing step of 5 min 1000 mM sodium acetate in 0.1 M NaOH and an equilibration step of 15 min 0.1 M NaOH. Standards of xylose, xylobiose, xylotriose and xylotetraose (Sigma) are used to identify and quantify these oligomers released by the action of the enzyme.

### 16.5 Endo-Xylanase Activity Assay 2

[0472] Endo-xylanases are enzyme able to hydrolyze beta-1,4 bond in the xylan backbone, producing short xylooligosaccharides. This assay measures the release of xylose and xylo-oligosaccharides by the action of xylanases on wheat arabinoxylan oligosaccharides (WAX) (Megazyme, Medium viscosity 29 cSt).

[0473] Sodium acetate buffer (0.05 M, pH 4.5) is prepared as follows: 4.1 g of anhydrous sodium acetate is dissolved in distilled water to a final volume of 1000 mL (Solution A). In a separate flask, 3.0 g (2.86 mL) of glacial acetic acid is mixed with distilled water to make the total volume of 1000 mL (Solution B). The final 0.05 M sodium acetate buffer, pH 4.5, is prepared by mixing Solution A with Solution B until the pH of the resulting solution is 4.5.

[0474] The substrate WAX is solved in sodium acetate buffer to obtain 2.0 mg/mL. The enzyme is added to the substrate in a dosage of 1 mg protein/g substrate which is then incubated at 65° C. for 24 hours. During these 24 hours, samples are taken and the reaction is stopped by heating the samples for 10 minutes at 100° C.

[0475] The enzyme activity is demonstrated by using a reducing sugars assay (PAHBAH) as detection method.

[0476] Reagent A: 5 g of p-Hydroxybenzoic acid hydrazide (PAHBAH) is suspended in 60 mL water, 4.1 mL of concentrated hydrochloric acid is added and the volume is adjusted to 100 mL. Reagent B: 0.5 M sodium hydroxide. Both reagents are stored at room temperature. Working Reagent: 10 mL of Reagent A is added to 40 mL of Reagent B. This solution is prepared freshly every day, and is stored on ice between uses. Using the above reagents, the assay is performed as detailed below.

[0477] The assay is conducted in microtiter plate format. After incubation 10 μL of each sample is added to a well and mixed with 150 μL working reagent. These solutions are heated at 70° C. for 30 minutes or for 5 minutes at 90° C. After cooling down, the samples are analyzed by measuring the absorbance at 405 nm. The standard curve is made by treating 10 μL of an appropriate diluted xylose solution the same way as the samples. The reducing-ends formed due to the action of enzyme is expressed as xylose equivalents.

[0478] Rasamsonia (Talaromyces) emersonii strain was deposited at CENTRAAL BUREAU VOOR SCHIMMELCULTURES, Uppsalalaan 8, P.O. Box 85167, NL-3508 AD Utrecht, The Netherlands in December 1964 having the Accession Number CBS 393.64.

[0479] Other suitable strains can be equally used in the present examples to show the effect and advantages of the invention. For example TEC-101, TEC-147, TEC-192, TEC-201 or TEC-210 are suitable Rasamsonia strains which are described in WO 2011/000949. The “4E mix” or “4E composition” was used containing CBHI, CBHII, EG4 and BG (30 wt %, 25 wt %, 28 wt % and 8 wt %, respectively, as described in WO 2011/098577, wt % on dry matter protein).

[0480] Rasamsonia (Talaromyces) emersonii strain TEC-101 (also designated as FBG 101) was deposited at CENTRAAL BUREAU VOOR SCHIMMELCULTURES, Uppsalalaan 8, P.O. Box 85167, NL-3508 AD Utrecht, The Netherlands on 30, Jun. 2010 having the Accession Number CBS 127450.

[0481] TEC-210 was fermented according to the inoculation and fermentation procedures described in WO 2011/000949.

[0482] The 4E mix (4 enzymes mixture or 4 enzyme mix) containing CBHI, CBHII, GH61 and BG (30%, 25%, 36% and 9%, respectively as described in WO 2011/098577) was used.

[0483] 3E mix (3 enzymes mixture or 3 enzyme mix) is spiked with a fourth enzyme to form the 4E mix.

### 16.6 Xyloglucanase Activity Assay

[0484] Sodium acetate buffer (0.05 M, pH 4.5) is prepared as follows: 4.1 g of anhydrous sodium acetate is dissolved in distilled water to a final volume of 1000 mL (Solution A). In a separate flask, 3.0 g (2.86 mL) of glacial acetic acid is mixed with distilled water to make the total volume of 1000 mL (Solution B). The final 0.05 M sodium acetate buffer, pH 4.5, is prepared by mixing Solution A with Solution B until the pH of the resulting solution is 4.5.

[0485] Tamarind xyloglucan is dissolved in sodium acetate buffer to obtain 2.0 mg/mL. The enzyme is added to the substrate in a dosage of 10 mg protein/g substrate, which is then incubated at 60° C. for 24 hours. The reaction is stopped by heating the samples for 10 minutes at 100° C. The formation of lower molecular weight oligosaccharides is analyzed by High Performance size-exclusion Chromatography

[0486] As a blank sample, the substrate is treated and incubated in the same way but then without the addition of enzyme.

[0487] The analysis is performed using High-performance size-exclusion chromatography (HPSEC) performed on three TSK-gel columns (6.0 mm×15.0 cm per column) in series SuperAW4000, SuperAW3000, SuperAW2500; Tosoh Bioscience), in combination with a PWXguard column (Tosoh Bioscience). Elution is performed at 55° C. with 0.2 M sodium nitrate at 0.6 mL/min. The eluate was monitored using a Shodex RI-101 (Kawasaki) refractive index (RI) detector. Calibration was performed by using pullulans (Associated Polymer Labs Inc., New York, USA) with a molecular weight in the range of 0.18-788 kDa.

### 16.7 Assay Protocol CU1: Colorimetric Assay for Glycosidase or Esterase Activity, Measuring Release of 4-Nitrophenol

[0488] Enzyme sample is diluted in 10 mM citrate buffer, pH 5.0, made by dissolving 1.92 g of citric acid in water, adjusting pH to 5.0 with 10 M NaOH and diluting to 1 L. 10 μL of diluted enzyme sample is added to 30 μL of 50 mM acetate-phosphate-borate reaction buffer at appropriate pH (made by dissolving 2.88 mL 99.7% glacial acetic acid, 3.42 mL 85% phosphoric acid, and 3.10 g boric acid in water, adjusting pH with 10 M NaOH and diluting to 1 L) in a PCR plate and preheated to appropriate temperature in a dry bath heater, and reaction is started by addition of 10 μL of preheated 5 mM substrate in water (see Table 5) to buffer and sample. Standards contain 10 μL of 4-nitrophenol (from 0 to 3 mM; 3 mM solution is made by dissolving 139 mg 4-nitrophenol in isopropyl alcohol and diluting 300 μL of resulting 100 mM solution to 10 mL in water) and 40 μL of reaction buffer. Sample blank contains 10 μL of enzyme sample and 40 μL of reaction buffer. Substrate blank contains 10 μL of substrate (see table) and 40 μL of reaction buffer. After appropriate incubation time, 50 μL of [1] for 4-nitrophenyl acetate, 1 M HEPES buffer pH 8 in water; [2] for 4-nitrophenyl butyrate, 250 mM Na2CO3 in water; [3] for all other substrates, 1 M Na2CO3 in water is added. 80 μL is then transferred to a clear microtiter flat-bottomed plate, absorbance is read at 410 nm and compared to the standard curve. One unit is defined as the amount of enzyme that releases one micromole of 4-nitrophenol per minute at the specified pH and temperature. (Adapted from Holmsen et al (1989) Methods in Enzymology, 169, 336-342.)

TABLE 5

| Enzyme activity | Substrate |
|---|---|
| arabinofuranosidase | 4-nitrophenyl alpha-L-arabinofuranoside |
| arabinopyranosidase | 4-nitrophenyl alpha-L-arabinopyranoside |
| beta-galactosidase | 4-nitrophenyl beta-D-galactopyranoside |
| hexosaminidase/N- | 4-nitrophenyl beta-D-glucosaminide |
| acetylglucosaminidase | |
| beta-glucosidase | 4-nitrophenyl beta-D-glucopyranoside |
| beta-mannosidase | 4-nitrophenyl beta-D-mannopyranoside |
| beta-xylosidase | 4-nitrophenyl beta-D-xylopyranoside |
| Acetylesterase | 4-nitrophenyl acetate |
| Cutinase; lipase | 4-nitrophenyl butyrate |

### 16.8 Assay Procedure CU2: Colorimetric Assay for Endo-Glycanase Activity, Measuring Copper (I) Reduced by Polysaccharide Reducing Ends

[0489] Enzyme sample is diluted in 10 mM citrate buffer, pH 5.0, made by dissolving 1.92 g of citric acid in water, adjusting pH to 5.0 with 10 M NaOH and diluting to 1 L. 10 μL of diluted sample is added to 30 μL of either [1] 50 mM acetate-phosphate-borate reaction buffer at appropriate pH (made by dissolving 2.88 mL 99.7% glacial acetic acid, 3.42 mL 85% phosphoric acid, and 3.10 g boric acid in water, adjusting pH with 10 M NaOH and diluting to 1 L) or [2] for enzymes that utilize calcium, 50 mM acetate-MOPS-borate reaction buffer at appropriate pH (made by dissolving 2.88 mL 99.7% glacial acetic acid, 10.45 g MOPS, and 3.10 g boric acid in water, adjusting pH with 10 M NaOH and diluting to 1 L) in a PCR plate and preheated to appropriate temperature in a dry bath heater. The reaction is started by addition of 10 μL of preheated 5 mM substrate in water (see Table 6) to buffer and sample. Standards contain 10 μL of 0 to 7.5 mM monosaccharide solution (see Table 6) in water and 40 μL of reaction buffer. Enzyme sample blank contains 10 μL of sample and 40 μL of reaction buffer. Substrate blank contains 10 μL of substrate (see Table 6) and 40 μL of reaction buffer. After appropriate incubation time, 10 μL is removed and added to another PCR plate containing 95 μL of BCA Reagent A (made by dissolving 0.543 g Na2CO3, 0.242 g NaHCO3 and 19 mg disodium 2,2′-bicinchoninate in water and diluting to 1 L) and 95 μL of BCA Reagent B (made by dissolving 12 mg CuSO4 and 13 mg L-Serine in water and diluting to 1 L), sealed and incubated in a dry bath heater for 25 minutes at 80° C. PCR plate is put on ice for 5 minutes, then 160 μL is transferred to a clear microtiter flat-bottomed plate, absorbance is read at 562 nm and compared to the standard curve. One unit is defined as the amount of enzyme that releases one micromole of monosaccharide-equivalent reducing ends per minute at the specified pH and temperature. (Adapted from Fox et al (1991) Anal. Biochem., 195, 93-96.)

TABLE 6

| Enzyme | Substrate | Standard |
|---|---|---|
| Tomatinase | alpha-tomatine | galactose |
| Endomannanase | Beta-Mannan | Mannose |
| Endoglucanase | Carboxymethyl | Glucose |
| | cellulose (1:1 mixture | |
| | of 4M and 7M) | |
| Laminarinase | Laminarin | Glucose |
| Lichenanase | Lichenan | Glucose |
| Endomannanase | Locust bean gum | Mannose |
| Arabinoxylan | Low Viscosity Wheat | Arabinose |
| arabinofuranohydrolase | Arabinoxylan | |
| Endopolygalacturonase | Polygalacturonic acid | Galacturonic acid |
| Sucrase/Alpha-glucosidase/ | Sucrose | Glucose + Fructose |
| Invertase | | (1:1 mixture) |

### 16.9 Assay Procedure CU3: UV Assay for Acetylesterase Activity, Measuring Release of Alpha-Naphthol

[0490] Enzyme sample is diluted in 10 mM citrate buffer, pH 5.0, made by dissolving 1.92 g of citric acid in dH₂O, adjusting pH to 5.0 with 10 M NaOH and diluting to 1 L. 20 μL of diluted sample is added to 20 μL of 300 mM acetate-phosphate-borate reaction buffer at appropriate pH (made by dissolving 17.28 mL 99.7% glacial acetic acid, 20.52 mL 85% phosphoric acid, and 18.6 g boric acid in water, adjusting pH with 10 M NaOH and diluting to 1 L) in a clear microtiter plate and preheated to appropriate temperature in the plate reader. The reaction is started by addition of 160 μL 0.5 mM alpha-naphthyl acetate substrate solution in water (prepared by diluting 46.55 mg of a-Naphthyl acetate in 1 mL of acetone and then transferring to 499 mL of water), preheated to assay temperature in a dry block heater, to the buffer and enzyme sample. Standards contain 180 μL of 0 to 0.1 mM alpha-naphthol in water and 20 μL of reaction buffer. Blank contains 20 μL of reaction buffer, 20 μL of water and 160 μL of substrate solution. Absorbance is continuously monitored at 303 nm and compared to that of the standards. One unit is the amount of enzyme that produces one micromole of alpha-naphthol per minute under the specified conditions. (Adapted from Yuorno et al. (1981), Anal. Biochem. 115, 188-193)

### 16.10 Assay Procedure CU4: Polarimetric Assay for Aldose 1-Epimerase Activity, Measuring the Rate Increase of the Mutarotation of Alpha-D-Glucose

[0491] 5 mM phosphate reaction buffer (prepared by dissolving 342 μL 85% phosphoric acid in water, adjusting to pH 5.0 with 1 M NaOH and diluting to 1 L) is preheated to 40° C. A Perkin-Elmer 341 polarimeter (USA) with sodium/halogen and mercury lamps preheated to 40° C. and is blanked by measuring the optical rotation of polarized 578 nm light by 5 mL reaction buffer. 36 mg of alpha-D-Glucose is dissolved in 10 mL of reaction buffer, then 60 μL of undiluted enzyme is added to 4.94 mL of the resulting solution and optical rotation is immediately measured in the polarimeter. Readings are recorded at 40° C. every minute until equilibrium is reached. One unit is the amount of enzyme that converts one micromole of alpha-D-glucose to beta-D-glucose (calculated by determining the reaction's first-order rate constant less that of the blank) in one minute. (Adapted from Bailey et al. (1975), Methods in Enzymology 41, 471-484).

### 16.11 Assay Procedure CU5: Colorimetric Assay Measuring Acid Release by the Absorbance of a pH Indicator

[0492] Reaction buffer is 2.5 mM MOPS, pH 7.2 (0.52 g MOPS dissolved in water, pH adjusted with 1 M NaOH and diluted to 1 L) or 2.5 mM acetate, pH 5.3 (144 μL glacial acetic acid dissolved in water, pH adjusted with 1 M NaOH and diluted to 1 L). Substrate stock solution is made by dissolving 111.1 mg of ethyl ferulate and 70 mg of 4-nitrophenol or 350 mg of bromocresol green in isopropyl alcohol. Substrate working solution is made by diluting substrate stock solution 1:10 with reaction buffer: pH 7.2 reaction buffer is used for substrate stock solution containing 4-nitrophenol, pH 5.3 for stock containing bromocresol green. Enzyme is thoroughly buffer exchanged into reaction buffer before use in the assay. Enzyme and substrate working solution are preheated to the appropriate temperature; 100 μL substrate working solution is added to a microtiter plate, and 20 μL of enzyme solution is added. The change in absorbance at 410 nm (pH 7.2) or 600 nm (pH 5.3) is determined. The pH of the solution is calculated by comparing the absorbance to that of the blank, and the amount of acid released is calculated. One unit is defined as the amount of enzyme that produces one micromole of ferulic acid per minute. (Adapted from Ramirez et al. (2008), Appl Biochem Biotechnol 151, 711-723.)

### 16.12 Assay Procedure CU6: UV Assay of Lyase Activity, Measuring Formation of Unsaturated Bonds

[0493] Enzyme sample is diluted in 50 mM acetate-mops-borate reaction buffer at appropriate pH (made by dissolving 2.88 mL 99.7% glacial acetic acid, 10.45 g MOPS, 3.10 g boric acid and 1.11 g calcium chloride in water, adjusting pH with 10 M NaOH and diluting to 1 L) and left to equilibrate for 30 minutes at room temperature. Reaction buffer is mixed in a 1:1 ratio with substrate solution (1% polygalacturonic acid in water or 0.75% Rhamnogalacturonan I from potato in water) and preheated to reaction temperature in a dry bath heater (if reaction temperature is greater than plate reader maximum temperature) or in a microtiter plate in plate reader. Reaction is started by addition of 10 μL of diluted enzyme sample to 240 μL of reaction buffer/substrate in UV-transparent microtiter flat-bottomed plate. Blank contains 10 μL of reaction buffer added to 240 μL of reaction buffer/substrate solution. Absorbance at 235 nm is continuously monitored, and the molar absorptivity coefficient of unsaturated galacturonic acid is used to determine activity. One unit is the amount of enzyme that releases one micromole of unsaturated galacturonic acid equivalents per minute under the specified conditions. Adapted from Hansen et al. (2001) J. AOAC International, 84, 1851-1854)

### 16.13 Assay Procedure CU7: Fluorescence Assay, Measuring Release of 4-Methylumbelliferone

[0494] Enzyme sample is diluted in 10 mM citrate buffer, pH 5.0, made by dissolving 1.92 g of citric acid in water, adjusting pH to 5.0 with 10 M NaOH and diluting to 1 L. 10 μL of diluted sample is added to 30 μL of 50 mM acetate-phosphate-borate reaction buffer at appropriate pH (made by dissolving 2.88 mL 99.7% glacial acetic acid, 3.42 mL 85% phosphoric acid, and 3.10 g boric acid in water, adjusting pH with 10 M NaOH and diluting to 1 L) in a PCR plate and preheated to appropriate temperature in a dry bath heater. The reaction is started by addition of 10 μL of preheated 1 mM substrate in water (made by diluting 5.0 mg of 4-methylumbelliferyl cellobioside or 4-methylumbelliferyl lactoside in 10 mL water) to buffer and sample. Standards contain 10 μL of 4-methylumbelliferone (from 0 to 50 uM; 19.8 mg of 4-methylumbelliferone sodium salt is dissolved in 100 mL methanol and resulting solution is diluted 20× in water) and 40 μL of reaction buffer. Enzyme sample blank contains 10 μL of enzyme sample and 40 μL of reaction buffer. Substrate blank contains 10 μL of substrate and 40 μL of reaction buffer. After appropriate incubation time, 20 μL is removed and added to a black microtiter plate containing 180 μL of glycine/carbonate buffer, pH 10.7 (made by dissolving 10 g glycine and 8.8 g sodium carbonate in water, adjusting pH with 10 M NaOH and diluting to 1 L). The fluorescence of the wells is measured at 355 nm excitation, 460 nm emission and compared to the standard curve. One unit is defined as the amount of enzyme that releases one micromole of 4-methylumbelliferone per minute. (Adapted from van Tilbeurgh et al. (1988), Methods in Enzymology 160: 45-59.)

### 16.14 Assay Procedure CUB: Spectrophotometric Assay of Acetylxylanesterase Activity, Measuring Release of Acetic Acid

[0495] Enzyme sample is diluted in 10 mM citrate buffer, pH 5.0, made by dissolving 1.92 g of citric acid in dH₂O, adjusting pH to 5.0 with 10 M NaOH and diluting to 1 L. 40 μL of 1% acetylated xylan from birchwood are added to 40 μL of 50 mM phosphate reaction buffer (prepared by dissolving 3.42 mL of 85& phosphoric acid in water, adjusting pH to 6.0 with 10 M NaOH and diluting to 1 L) in the wells of a 96-well PCR plate and preheated to the appropriate temperature in a dry block heater. The reaction is started by adding 20 μL of diluted sample to the wells containing substrate and reaction buffer. Standards contain 20 μL of 0 mg/mL to 1 mg/mL acetic acid in water, and 80 ul reaction buffer. Sample blank contains 20 μL of diluted enzyme sample, 40 μL of reaction buffer and 40 μL of water. Substrate blank contains 40 μL of substrate and 60 μL of reaction buffer. After appropriate incubation time, the plate is heated to 90° C. for 5 minutes and centrifuged 10 minutes at 1500×g. The amount of acetic acid in the supernatant is then determined with the K-ACETAK kit by Megazyme; one unit is defined as the amount of enzyme required to release one micromole of acetic acid per minute under the specified conditions. (Adapted from Johnson et al. (1988), Methods in Enzymology 160, 551-560 and K-ACETAK assay kit procedure by Megazyme (Ireland)).

### 16.15 Assay Procedure CU9: Gas Chromatographic Assay of Methylesterase Activity, Measuring Release of Methanol

[0496] Reaction buffer is 50 mM phosphate, pH 6.6, made by dissolving 3.42 mL 85% phosphoric acid in water, adjusting pH with 10 M NaOH and diluting to 1 L. Enzyme sample is diluted in buffer and preheated to reaction temperature. Substrate solution, 1% esterified pectin in water, is preheated to reaction temperature; reaction is started by adding 100 μL of diluted enzyme to 900 μL of substrate solution. Standards contain 100 μL methanol (0 to 100 mM in water) and 900 μL of substrate solution. After appropriate incubation time, samples are mixed and aliquot is injected into a gas chromatograph; peak areas of samples are compared to that of standards. One unit is amount of enzyme that produces one micromole of methanol per minute. (Adapted from Bartolome et al. (1972), J. Agric. Food Chem. 20 (2), 262-266.)

### 16.16 Assay Procedure CU10: Colorimetric Assay of Cellobiose Dehydrogenase, Measuring Reduction of DCIP

[0497] Enzyme sample is diluted in 10 mM citrate buffer, pH 5.0, made by dissolving 1.92 g of citric acid in water, adjusting pH to 5.0 with 10 M NaOH and diluting to 1 L. 10 μL of diluted enzyme sample is added to 10 μL of 48 mM sodium fluoride (made by dissolving 2 mg NaF in 10 mL water), 10 μL of 3.6 mM 2,6-dichloroindophenol (DCIP, made by dissolving 9.6 mg in 10 mL water) and 80 μL of 50 mM acetate-phosphate-borate reaction buffer at appropriate pH (made by dissolving 2.88 mL 99.7% glacial acetic acid, 3.42 mL 85% phosphoric acid, and 3.10 g boric acid in water, adjusting pH with 10 M NaOH and diluting to 1 L) in a clear microtiter flat-bottomed plate and preheated to the appropriate temperature in a dry bath heater. Reaction is started by addition of 120 μL of 360 mM lactose (made by dissolving 1.23 g lactose in 100 mL water). Blank contains 10 μL sample, 10 μL 48 mM NaF, 10 μL 3.6 mM DCIP, 80 μL reaction buffer and 120 μL water. Absorbance at 520 nm is continuously monitored and compared to the molar absorptivity coefficient of DCIP. One unit is the amount of enzyme that reduces one micromole of DCIP per minute under the specified assay conditions. (Adapted from Baminger et al. (2001), Appl Environ Microbiol, 67(4), 1766-1774.)

### 16.17 Assay Procedure CU11: Colorimetric Assay of Aldolactonase, Measuring Glucono-Delta-Lactone

[0498] Enzyme sample is diluted in 50 mM acetate reaction buffer, pH 5 (made by dissolving 2.88 mL 99.7% glacial acetic acid in water, adjusting pH with 10 M NaOH and diluting to 1 L) and preheated to 37° C. 50 mL of 4.0 M hydroxylamine hydrochloride (made by dissolving 27.6 g hydroxylamine hydrochloride in water and diluting to 100 mL) is mixed with 50 mL of 3.0 M sodium hydroxide (made by dissolving 12 g of sodium hydroxide and diluting to 100 mL); the resulting alkaline hydroxylamine solution is used within the next 3 hours. 0.239 g of glucono-delta-lactone are dissolved in 100 mL reaction buffer that has been preheated to 37° C., and 125 μL of the resulting 13.4 mM substrate solution is immediately pipetted to a clear flat-bottomed microtiter plate. The reaction is started by addition of 15 μL diluted sample to substrate solution. Standards contain 80-125 μL of substrate solution, with the volume made up to 140 μL with reaction buffer. After 10 minutes incubation, 28 μL alkaline hydroxylamine solution is added, then 14 μL 4 M HCl is added (made by diluting concentrated HCl threefold in water), then 14 μL of 0.5 M FeCl₃ (made by dissolving 8.1 g FeCl₃ in water and diluting to 100 mL) is added. Absorbances are read at 540 nm and compared to the standard curve. One unit is the amount of enzyme that removes one micromole of glucono-delta-lactone per minute. (Adapted from Hestrin et al. (1949), J. Biol. Chem. 180, 249-261.)

### 16.18 Activity-Temperature Profiles

[0499] Temperature optima are determined by first determining the range of enzyme concentration that reproducibly displays initial velocity kinetics at 40° C. in the appropriate assay. Enzyme is then diluted to an amount within this range, divided into aliquots, and, where possible, each aliquot is assayed simultaneously at the different temperatures (e.g., when reaction is incubated in a dry bath heater, then transferred to a plate reader for endpoint measurement). Where simultaneous measurements at different temperatures are impossible (e.g., when reaction is incubated in a plate reader for continuous measurement) activities are measured in sequence at different temperatures.

### Example 17

### Identification of Genes that Encode Secreted Proteins

[0500] Genes (and polypeptides) from the organisms Scytalidium thermophilum (Scyth), Myriococcum thermophilum (Myrth), and Aureobasidium pullulans (Aurpu) were identified that, based on curation (described above, see Example 4), encoded a secreted protein. A list of these genes and polypeptides is shown in Tables 1A-1C.

### Example 18

### Improvement of Thermophilic Cellulase Mixture by Various Proteins in an MTP Activity Assay Using aCS as Substrate

[0501] (Hemi-)cellulosic proteins of interest were cloned and expressed in A. niger as described above in Examples 8-10. Supernatants of protein MTP fermentations were added to a TEC-210 cellulase enzyme base mix as described above (Example 13), and acid pretreated corn stover (aCS) was used as the substrate. Several proteins demonstrated increased sugar release, as seem below in Table 7.

TABLE 7
Effect of various proteins spiked on TEC-210 using aCS substrate
in MTP assay

| Target ID | SEQ ID NOs: | Glucose (AU) |
|---|---|---|
| TEC only | — | 32.6 |
| Scyth2p4_010825 | 231, 516, 801 | 36.8 |
| Scyth2p4_008294 | 153, 438, 723 | 37.0 |
| Scyth2p4_006005 | 110, 395, 680 | 37.0 |
| MYRTH_3_00099 | 1054, 1360, 1666 | 37.0 |
| Myrth2p4_006397 | 1029, 1335, 1641 | 37.1 |
| MYRTH_2_03760 | 897, 1203, 1509 | 43.3 |
| AURPU_3_00017 | 1775, 2162, 2549 | 36.8 |
| AURPU_3_00429 | 1814, 2201, 2588 | 37.0 |
| AURPU_3_00353 | 1848, 2235, 2622 | 37.3 |

[0502] In a second set of experiments with acid pretreated corn stover (aCS) as the substrate, supernatants of a different set of protein fermentations were added to TEC-210 as described above. Several proteins demonstrated increased sugar release, as shown below in Table 8.

TABLE 8
Effect a different set of various proteins spiked on TEC-210 using
aCS substrate

| Target ID | SEQ ID NO: | Glucose (AU) |
|---|---|---|
| TEC only | — | 52.6 |
| Scyth2p4_009823 | 201, 486, 771 | 56.5 |
| SCYTH_1_02579 | 258, 543, 828 | 57.1 |
| SCYTH_1_00740 | 12, 297, 582 | 57.7 |
| Myrth2p4_008437 | 1088, 1394, 1700 | 57.7 |
| Myrth2p4_003274 | 931, 1237, 1543 | 58.3 |
| Myrth2p4_006213 | 1107, 1413, 1719 | 70.5 |
| AURPU_3_00208 | 2118, 2505, 2892 | 60.7 |
| Aurpu2p4_008503 | 1970, 2357, 2744 | 61.5 |
| Aurpu2p4_006782 | 1920, 2307, 2694 | 62.3 |

[0503] In a third set of experiments with aCS as the substrate, supernatant of GH61 MTP fermentations was added to a 3 enzyme cellulase base mixes, as described above. Spiking showed increased sugar release, as shown below in Table 9.

TABLE 9
Effect of various GH61 enzymes spiked
on 3 enzyme mix using aCS substrate

| Target ID | SEQ ID NOs: | Glucose (AU) |
|---|---|---|
| 3 enzyme mix | — | 21.9 |
| SCYTH_1_00672 | 104, 389, 674 | 26.6 |
| SCYTH_1_05851 | 157, 442, 727 | 26.8 |
| Scyth2p4_002689 | 50, 335, 620 | 27.6 |
| MYRTH_2_03236 | 857, 1163, 1469 | 26.8 |
| MYRTH_2_01413 | 953, 1259, 1565 | 27.1 |
| MYRTH_2_03391 | 950, 1256, 1562 | 27.1 |
| AURPU_3_00402 | 2001, 2388, 2775 | 24.0 |
| AURPU_3_00407 | 2010, 2397, 2784 | 24.7 |
| AURPU_3_00395 | 1904, 2291, 2678 | 26.3 |

[0504] In another set of experiments with acid pretreated corn stover (aCS) as the substrate, the supernatants of one protein MTP fermentations was added to TEC-210 as described above. This protein showed increased sugar release, as shown below in Table 10.

TABLE 10
Effect of the AURPU_3_00184 protein
spiked on TEC-210 using aCS substrate

| Target ID | SEQ ID NOs: | Glucose (AU) |
|---|---|---|
| TEC only | — | 25.1 |
| AURPU_3_00184 | 1902, 2289, 2676 | 28.9 |

### Example 19

### Improvement of Thermophilic Cellulase Mixture by Various Scytalidium thermophilum Proteins in an Activity Assay at Labscale Including Mixing

[0505] Scytalidium thermophilum proteins were cloned and expressed in A. niger as described above (Examples 8-10). Concentrated supernatants from shake flask fermentations were used in sugar release activity assays as described above (Example 14), using 10% aCS NREL as feedstock. In one set of experiments, supernatant of the Scytalidium thermophilum protein Scyth2p4_{—}009442 was spiked based on protein dosage on top of a TEC-210 base mix, as described above. The protein showed increased sugar release, as shown below in Table 11.

TABLE 11
Effect of a Scytalidium thermophilum protein spiked based
on protein dosage on TEC-210 using 10% DM aCS substrate

Glucose

| Target ID | SEQ ID NOs: | Average (AU) | stdev |
|---|---|---|---|
| TEC only | — | 31.4 | 0.07 |
| Scyth2p4_009442 | 178, 463, 748 | 32.5 | 0.09 |

### Example 20

### Improvement of Thermophilic Cellulase Mixture by Various Aureobasidium pullulans Proteins in an Activity Assay at Labscale Including Mixing

[0506] The cellulase enhancing activity of various Aureobasidium pullulans beta-galactosidase (BG) proteins were further analyzed. The supernatant of the A. niger expressing shake flask fermentations were concentrated and spiked in a dosage of 0.45 mg/gDM on top of a base activity of a three enzyme base mix (4.55 mg/gDM composed of: CBHI at 1.25 g/gDM, CBHII at 1.5 mg/gDM and GH61 at 1.8 mg/gDM) at a feedstock concentration of 10% (w/w) aCS, as described above (Example 14). As a negative control, the 3 enzyme base mix was also tested. All experiments were performed at least in duplicate and were incubated for 72 hours at 65° C. in an oven incubator (Techne HB-1D hybridization oven) while rotating at set-point 3. After incubation, the samples were centrifuged and soluble sugars were analysed by HPLC as described above (Example 15). Addition of the Aureobasidium pullulans BG proteins yielded increased sugar release, as shown below in Table 12.

TABLE 12
Effect of Aureobasidium pullulans BG proteins
spiked on top of a 3E mix using aCS substrate

| Protein ID | SEQ ID NOs: | Glucose (g/L) |
|---|---|---|
| 3 enzyme mix | — | 6.7 |
| Aurpu2p4_006782 | 1920, 2307, 2694 | 26.1 |
| AURPU_3_00208 | 2118, 2505, 2892 | 26.8 |

### Example 21

### Improvement of Thermophilic Cellulase Mixture by Various Proteins in an Activity Assay at Labscale Including Mixing

[0507] The cellulase enhancing activity of various GH61 proteins were further analyzed. The supernatant of the A. niger expressing Scyth2p4_{—}002220, MYRTH_{—}2_{—}04272, and MYRTH_{—}2_{—}01413 shake flask fermentations were concentrated and spiked in a dosage of 1.8 mg/gDM on top of a base activity of a three enzyme base mix (3.2 mg/gDM composed of: BG at 0.45 g/gDM, CBHI at 1.5 mg/gDM and CBHII at 1.25 mg/gDM) at a feedstock concentration of 10% (w/w) aCS, as described above (Example 14). As a negative control, the 3 enzyme base mix was also tested. All experiments were performed at least in duplicate and were incubated for 72 hours at 65° C. in an oven incubator (Techne HB-1D hybridization oven) while rotating at set-point 3. After incubation, the samples were centrifuged and soluble sugars were analysed by HPLC as described above (Example 15). Addition of these GH61 proteins yielded increased sugar release, as shown below in Table 13.

TABLE 13
Effect of various GH61 proteins spiked
on top of a 3E mix using aCS substrate

| Target ID | SEQ ID NOs: | Glucose (g/L) |
|---|---|---|
| 3 enzyme mix | — | 29.7 |
| Scyth2p4_002220 | 42, 327, 612 | 32.5 |
| MYRTH_2_04272 | 1040, 1346, 1652 | 32.1 |
| MYRTH_2_01413 | 953, 1259, 1565 | 32.4 |

[0508] In another experiment, the cellulase enhancing activity of Scytalidium thermophilum CBHII protein SCYTH_{—}1_{—}03721 was further analyzed. The SCYTH_{—}1_{—}03721 gene was cloned and expressed in A. niger as described above (Examples 8-10). The supernatant of an A. niger expressing SCYTH_{—}1_{—}03721 shake flask fermentation was concentrated and spiked in a dosage of 1.5 mg/gDM on top of a base activity of a three enzyme base mix (3.5 mg/gDM composed of: BG at 0.45 g/gDM, CBHI at 1.25 mg/gDM and GH61 at 1.8 mg/gDM) at a feedstock concentration of 10% (w/w) aCS, as described above (Example 14). As a negative control, the 3 enzyme base mix was also tested. All experiments were performed at least in duplicate and were incubated for 72 hours at 65° C. in an oven incubator (Techne HB-1D hybridization oven) while rotating at set-point 3. After incubation, the samples were centrifuged and soluble sugars were analysed by HPLC as described above (Example 15). Addition of the SCYTH_{—}1_{—}03721 protein yielded increased sugar release, as shown below in Table 14.

TABLE 14
Effect of CBHII SCYTH_1_03721 protein spiked
on top of a 3E mix using aCS substrate

| Target ID | SEQ ID NOs: | Glucose (g/L) |
|---|---|---|
| 3 enzyme mix | — | 28.1 |
| SCYTH_1_03721 | 129, 414, 699 | 32.5 |

[0509] In another experiment, the cellulase enhancing activity of another Myriococcum thermophilum GH61 protein was further analysed. The supernatant of the A. niger expressing MYRTH_{—}2_{—}03760 shake flask fermentation was concentrated and spiked in a dosage of 1.8 mg/gDM on top of a base activity of a three enzyme base mix (3.2 mg/gDM composed of: BG at 0.45 g/gDM, CBHI at 1.5 mg/gDM and CBHII at 1.25 mg/gDM) at a feedstock concentration of 10% (w/w) aCS, as described above (Example 14). As a negative control, the 3 enzyme base mix was also tested. All experiments were performed at least in duplicate and were incubated for 72 hours at 65° C. in an oven incubator (Techne HB-1D hybridization oven) while rotating at set-point 3. After incubation, the samples were centrifuged and soluble sugars were analysed by HPLC as described above (Example 15). Addition of this Myriococcum thermophilum GH61 protein yielded increased sugar release, as shown below in Table 15.

TABLE 15
Effect of GH61 protein MYRTH_2_03760 spiked
on top of a 3E mix using aCS substrate

| Target ID | SEQ ID NOs: | Glucose (g/L) |
|---|---|---|
| 3 enzyme mix | — | 17.8 |
| MYRTH_2_03760 | 897, 1203, 1509 | 19.1 |

[0510] In another experiment, the cellulose-enhancing activity of Myriococcum thermophilum CBHI protein MYRTH2p4_{—}003203 was further analyzed. The MYRTH2p4_{—}003203 gene was cloned and expressed in A. niger as described above (Examples 8-10). The supernatant of an A. niger expressing MYRTH2p4_{—}003203 shake flask fermentation was concentrated and spiked in a dosage of 1.25 mg/gDM on top of a base activity of a three enzyme base mix (3.75 mg/gDM composed of: BG at 0.45 g/gDM, CBHII at 1.5 mg/gDM and GH61 at 1.8 mg/gDM) at a feedstock concentration of 10% (w/w) aCS, as described above (Example 14). As a negative control, the 3 enzyme base mix was also tested. All experiments were performed at least in duplicate and were incubated for 72 hours at 65° C. in an oven incubator (Techne HB-1D hybridization oven) while rotating at set-point 3. After incubation, the samples were centrifuged and soluble sugars were analysed by HPLC as described above (Example 15).

[0511] Addition of this Myriococcum thermophilum CBHI protein yielded increased sugar release, as shown below in Table 16.

TABLE 16
Effect of CBHI MYRTH2p4_003203 protein
spiked on top of a 3E mix using aCS substrate

| Target ID | SEQ ID NOs: | Glucose (g/L) |
|---|---|---|
| 3 enzyme mix | — | 19.2 |
| MYRTH2p4_003203 | 930, 1237, 1543 | 22.1 |

[0512] In another experiment, the cellulase enhancing activity of Myriococcum thermophilum beta-galactosidase (BG) protein MYRTH_{—}1_{—}00021 was further analyzed. The supernatant of an A. niger expressing MYRTH_{—}1_{—}00021 shake flask fermentation was concentrated and spiked in a dosage of 0.45 mg/gDM on top of a base activity of a three enzyme base mix (4.55 mg/gDM composed of: CBHI at 1.25 g/gDM, CBHII at 1.5 mg/gDM and GH61 at 1.8 mg/gDM) at a feedstock concentration of 10% (w/w) aCS, as described above (Example 14). As a negative control, the 3 enzyme base mix was also tested. All experiments were performed at least in duplicate and were incubated for 72 hours at 65° C. in an oven incubator (Techne HB-1D hybridization oven) while rotating at set-point 3. After incubation, the samples were centrifuged and soluble sugars were analysed by HPLC as described above (Example 15).

[0513] Addition of this Myriococcum thermophilum BG protein yielded increased sugar release, as shown below in Table 17 and in FIG. 8.

TABLE 17
Effect of beta-galactosidase MYRTH_1_00021 protein
spiked on top of a 3E mix using aCS substrate

| Target ID | SEQ ID NOs: | Glucose (g/L) |
|---|---|---|
| 3 enzyme mix | — | 13.8 |
| MYRTH_1_00021 | 1113, 1419, 1725 | 16.6 |

### Example 22

### Identification of Thermophilic Various Arabino(Furano)Sidases

[0514] The arabino(furano)sidase activity of various enzymes was further analysed, as described above (Example 16.1). The supernatant of A. niger shake flask fermentations were concentrated and assayed for arabinose release from wheat arabinoxylan, which was pre-digested by an endo-xylanase, after incubation for 24 hours at pH 4.5 and 65° C. Three enzymes showed increased arabinose release as shown below in Table 18.

TABLE 18
Effect of various proteins on pre-
digested wheat arabinoxylan substrate

| | | μg/mL | % arabinose |
|---|---|---|---|
| Target ID | SEQ ID NOs: | arabinose | release of max |
| no enzyme | — | 4.5 | 0 |
| SCYTH_1_01777 | 36, 321, 606 | 7.6 | 0.4 |
| SCYTH_1_01831 | 191, 476, 761 | 23.4 | 2.7 |
| MYRTH_1_00007 | 1015, 1321, 1627 | 10.6 | 0.9 |
| MYRTH_3_00127 | 1144, 1450, 1756 | 161.4 | 22 |
| MYRTH_1_00002 | 1109, 1415, 1721 | 5.3 | 0.1 |
| MYRTH_2_00959 | 1126, 1432, 1738 | 149.0 | 20.6 |
| AURPU_3_00341 | 1976, 2363, 2750 | 7.8 | 0.5 |
| AURPU_3_00342 | 1824, 2211, 2598 | 7.3 | 0.4 |
| AURPU_3_00410 | 1992, 2379, 2766 | 11.7 | 1 |
| AURPU_3_00333 | 1993, 2380, 2767 | 5.6 | 0.2 |

### Example 23

### Identification of Thermophilic Beta-Xylosidases

[0515] The beta-xylosidase activity of various enzymes was further analyzed. The supernatants of the A. niger shake flask fermentations were concentrated and assayed in different dosages for xylose release from xylobiose after incubation for 24 hours at pH 4.5 and 65° C. as described above (Example 16.2). Several enzymes showed significant xylose release from xylobiose as shown below in Table 19.

TABLE 19
Effect of various enzymes on release of xylose from xylobiose

| | | Concen- | % xylose release |
|---|---|---|---|
| | | tration | from xylobiose (% |
| Target ID | SEQ ID NOs: | (w/w) | from max possible) |
| Scyth2p4_001371 | 19, 304, 589 | 0.1% | 6 |
| | | 1% | 22 |
| MYRTH_1_00003 | 1138, 1444, 1750 | 0.1% | 0 |
| | | 1% | 1 |
| MYRTH_2_01280 | 1131, 1437, 1743 | 0.1% | 0 |
| | | 1% | 4 |
| MYRTH2p4_001496 | 894, 1200, 1506 | 0.5% | 9 |
| MYRTH_2_00959 | 1126, 1433, 1739 | 0.5% | 1 |
| AURPU_3_00184 | 1902, 2289, 2676 | 0.1% | 57 |
| | | 1% | 100 |

### Example 24

### Identification of Thermophilic Scytalidium thermophilum Acetyl-Xylan Esterase

[0516] The acetyl-xylan esterase activity of Scytalidium thermophilum SCYTH_{—}2_{—}07393 was further analyzed. The supernatant of this Scytalidium thermophilum A. niger shake flask fermentation was concentrated and assayed for acetic acid release from acid pretreated corn stover as described above (Example 16.3). The enzymes was identified as active acetyl xylan esterase because it was able to release acetic acid from the substrate as is shown in Table 20.

TABLE 20
Effect of SCYTH_2_07393 (SEQ ID NOs: 262, 547, 832) enzyme
on release of acetic acid from pretreated corn stover

| SCYTH_2_07393 | Acetic acid (μg/mL) |
|---|---|
| no enzyme | 63 |
| 0.1% (w/w) | 131 |
| 1% (w/w) | 152 |

### Example 25

### Characterization Various Thermophilic Endoxylanases

[0517] The endoxylanase activity of SCYTH_{—}1_{—}09019, SCYTH_{—}1_{—}09441, SCYTH_{—}1_{—}01114, MYRTH_{—}2_{—}03560, AURPU_{—}3_{—}00013, and AURPU_{—}3_{—}00019 proteins was further analyzed. The supernatant of the A. niger shake flask fermentations were concentrated and assayed for endoxylanase activity on wheat arabinoxylan oligosaccharides and beech wood xylan as described above in endoxylanase activity assay 1 (Example 16.4). The proteins were able to release xylose and xylose oligomers release from the two substrates after incubation for 24 hours with 1% (w/w) enzyme dose at pH 4.5 and 65° C. as is shown in Table 21.

TABLE 21
Effect of various proteins on release of xylose and xylose oligomers
from Beech wood xylan and Wheat arabinoxylan

| | | | Amount released (μg/mg substrate) | | | |
|---|---|---|---|---|---|---|
| | 1% (w/w) E/S | SEQ ID NOs: | xylose | xylobiose | xylotriose | xylotetraose |
| Beech wood | no enzyme | — | 1.4 | 0.3 | 0.0 | 0.2 |
| xylan | SCYTH_1_09019 | 260, 545, 830 | 63.0 | 373.0 | 10.7 | 0.5 |
| | SCYTH_1_09441 | 155, 440, 725 | 24.4 | 129.9 | 140.6 | 30.2 |
| | SCYTH_1_01114 | 218, 503, 788 | 29.3 | 180.4 | 162.5 | 20.5 |
| | MYRTH_2_03560 | 1022, 1328, 1634 | 7.0 | 383.9 | 7.8 | 0.8 |
| | AURPU_3_00013 | 1924, 2311, 2698 | 84.6 | 337.1 | 53.4 | 0.5 |
| ara | no enzyme | — | 0.5 | 0.0 | 0.0 | 0.1 |
| bin | SCYTH_1_09019 | 260, 545, 830 | 43.6 | 75.3 | 1.9 | 0.0 |
| | SCYTH_1_09441 | 155, 440, 725 | 5.7 | 14.3 | 7.3 | 2.0 |
| | SCYTH_1_01114 | 218, 503, 788 | 8.0 | 18.4 | 8.3 | 1.4 |
| | MYRTH_2_03560 | 1022, 1328, 1634 | 4.1 | 73.4 | 2.3 | 0.0 |
| | AURPU_3_00013 | 1924, 2311, 2698 | 55.8 | 87.0 | 1.0 | 0.0 |
| | AURPU_3_00019 | 1925, 2312, 2699 | 1.7 | 4.3 | 5.7 | 2.6 |

[0518] In a second set of experiments, the endoxylanase activity of the proteins SCYTH_{—}1_{—}09019, SCYTH_{—}1_{—}00286, SCYTH_{—}1_{—}09441, SCYTH_{—}1_{—}01114, MYRTH_{—}2_{—}03560, MYRTH_{—}2_{—}01976, AURPU_{—}3_{—}00013, AURPU_{—}3_{—}00019, AURPU_{—}3_{—}00018 was further analyzed as described above in endoxylanase activity assay 2 (Example 16.5). The supernatant of the A. niger shake flask fermentations were concentrated and assayed for endoxylanase activity by measuring reducing-end formation expressed as xylose equivalents after incubation of the enzymes at 0.1% (w/w) dose on wheat arabinoxylan during 24 hours at 65° C. and pH 4.5. The enzymes were able to release reducing sugars from the substrates, as shown in Table 22 and in FIG. 2, where panels A, B and C correspond to proteins from Scytalidium thermophilum, Myriococcum thermophilum, and Aureobasidium pullulans, respectively.

TABLE 22
Effect of various proteins on the release of reducing sugars
(reported as xylose equivalents) from Wheat arabinoxylan

| | | reducing-ends expressed in xylose equivalents (μg/mL) | | | | | | | |
|---|---|---|---|---|---|---|---|---|---|
| Target ID | SEQ ID NOs: | t = 0 h | t = 0.5 h | t = 1 h | t = 2 h | t = 3 h | t = 4 h | t = 6 h | t = 24 h |
| no enzyme | — | −6.0 | −14.5 | −17.0 | −11.9 | −11.7 | −12.6 | −11.8 | −9.9 |
| SCYTH_1_09019 | 260, 545, 830 | 2.3 | 340.0 | 394.0 | 438.0 | 440.1 | 440.2 | 446.4 | 462.1 |
| SCYTH_1_00286 | 237, 522, 807 | 2.3 | 0.8 | 1.9 | 0.4 | 3.6 | 5.0 | 9.1 | 26.7 |
| SCYTH_1_09441 | 155, 440, 725 | −6.0 | 187.1 | 213.4 | 240.1 | 245.8 | 244.7 | 241.4 | 248.4 |
| SCYTH_1_01114 | 218, 503, 788 | −6.0 | 251.3 | 248.2 | 243.7 | 237.6 | 244.8 | 257.0 | 266.4 |
| MYRTH_2_03560 | 1022, 1328, 1634 | 2.3 | 292.5 | 344.9 | 391.8 | 415.2 | 437.7 | 457.9 | 454.6 |
| MYRTH_2_01976 | 972, 1278, 1584 | −6.0 | 236.9 | 242.3 | 224.9 | 235.1 | 214.4 | 220.3 | 211.2 |
| AURPU_3_00013 | 1924, 2311, 2698 | 2.3 | 149.8 | 267.0 | 380.5 | 411.1 | 439.5 | 475.6 | 548.5 |
| AURPU_3_00019 | 1925, 2312, 2699 | −6.0 | 62.0 | 86.3 | 110.2 | 122.1 | 122.8 | 131.9 | 127.4 |
| AURPU_3_00018 | 2108, 2495, 2882 | −6.0 | 165.9 | 169.9 | 190.1 | 206.6 | 222.1 | 249.5 | 240.6 |

### Example 26

### Characterization of Thermophilic Aureobasidium pullulans Xyloglucanase

[0519] The xyloglucanase activity of AURPU_{—}3_{—}00030 (SEQ ID NOs: 1778, 2165, 2552) and AURPU_{—}3_{—}00028 (SEQ ID NOs: 1947, 2334, 2721) proteins were further analyzed. The supernatant of these two Aureobasidium pullulan A. niger shake flask fermentations were concentrated and assayed for xyloglucanase activity on Tamarind xyloglucan as described above (Example 16.6). Both enzymes were identified as active xyloglucanase because they were able to release low molecular weight oligosaccharides, as shown in FIG. 3.

### Example 27

### Further Characterization of Expressed Enzymes from Scytalidium thermophilum

[0520] The Scytalidium thermophilum proteins SCYTH_{—}2_{—}07268, SCYTH_{—}2_{—}07393, SCYTH_{—}1_{—}00740, SCYTH_{—}1_{—}03721, SCYTH_{—}1_{—}03688, SCYTH_{—}1_{—}01623, Scyth2p4_{—}005037, and SCYTH_{—}2_{—}07965 were further characterized using the assay protocols and assay conditions indicated in the table below.

| | SEQ ID | | | Assay | Activity | Fold increase |
|---|---|---|---|---|---|---|
| Target ID | NOs: | Assay Protocol | Substrate | Conditions | (U/mL)^{‡} | over control* |
| SCYTH_2_07268 | 174, 459, | CU5 | Ethyl ferulate, 4 mM | pH 5.3, | 7 | na |
| | 744 | (Example 16.11) | | 40° C., | | |
| | | | | 30 min | | |
| SCYTH_2_07393 | 262, 547, | CU8 | acetylated xylan from | pH 5, | 3.1 | na |
| | 832 | (Example 16.14) | beechwood 0.4% | 40° C., | | |
| | | | | 15 min | | |
| SCYTH_1_00740 | 12, 297, | CU1 | 4-nitrophenyl beta-D- | pH 5, | 3.3 | na |
| | 582 | (Example 16.7) | glucosaminide, 1 mM | 40° C., | | |
| | | | | 30 min | | |
| SCYTH_1_03721 | 129, 414, | CU7 | 4-methylumbelliferyl | pH 5, | 0.002 | na |
| | 699 | (Example 16.13) | beta-D-lactoside, 0.2 mM | 40° C., | | |
| | | | | 30 min | | |
| SCYTH_1_03688 | 259, 544, | CU1 | 4-nitrophenyl alpha- | pH 5, | 1.3 | 65 |
| | 829 | (Example 16.7) | L-arabinofuranoside, | 40° C., | | |
| | | | 1 mM | 30 min | | |
| SCYTH_1_01623 | 160, 445, | CU7 | 4-methylumbelliferyl | pH 5, | 0.0066 | 6.6 |
| | 730 | (Example 16.13) | beta-D-cellobioside, | 40° C., | | |
| | | | 0.2 mM | 30 min | | |
| Scyth2p4_005037 | 86, 371, | CU6 | Polygalacturonic | pH 8, | 0.43 | na |
| | 656 | (Example 16.12) | acid, 0.9% | 40° C., | | |
| | | | | initial rate | | |
| SCYTH_2_07965 | 125, 410, | CU6 | Rhamnogalacturonan | pH 6, | 1.1 | na |
| | 695 | (Example 16.12) | I, 0.7% | 40° C., | | |
| | | | | initial rate | | |

*na, not applicable as control exhibited no detectable activity. Control is an equal volume of supernatant from a vector-only transformant
^{‡}U, micromole product formed per minute under the indicated assay conditions

### Example 28

### Further Characterization of Expressed Enzymes from Myriococcum thermophilum

[0521] The Myriococcum thermophilum proteins Myrth2p4_{—}003495, Myrth2p4_{—}005155, Myrth2p4_{—}007061, MYRTH_{—}2_{—}01934, MYRTH2p4_{—}001537, MYRTH2p4_{—}005923, MYRTH2p4_{—}003942, MYRTH_{—}1_{—}00080, MYRTH_{—}4_{—}09372, MYRTH2p4_{—}001451, MYRTH_{—}4_{—}09820, Myrth2p4_{—}003941, MYRTH_{—}1_{—}00024, MYRTH2p4_{—}002293, MYRTH_{—}3_{—}00003, MYRTH_{—}3_{—}00097, MYRTH_{—}4_{—}06111, Myrth2p4_{—}001304, Myrth2p4_{—}000359, Myrth2p4_{—}007801, MYRTH2p4_{—}003203, and Myrth2p4_{—}006226 were further characterized using the assay protocols and assay conditions indicated in the table below.

| | | | | | | Fold |
|---|---|---|---|---|---|---|
| | | | | | | increase |
| | SEQ ID | | | Assay | Activity | over |
| Target ID | NOs: | Assay Protocol | Substrate | Conditions | (U/mL)^{‡} | control* |
| Myrth2p4_003495 | 934, 1240, | CU11 | glucono-delta-lactone | pH 5, | 55 | 12.2 |
| | 1546 | (Example 16.17) | 12 mM | 37° C., | | |
| | | | | 30 min | | |
| Myrth2p4_005155 | 982, 1288, | CU4 | alpha-D-Glucose, | pH 5, | 83 | na |
| | 1594 | (Example 16.12) | 10 umol/mL | 40° C., | | |
| | | | | continuous | | |
| Myrth2p4_007061 | 1045, 1351, | CU4 | alpha-D-Glucose, | pH 5, | 96 | na |
| | 1657 | (Example 16.10) | 10 umol/mL | 40° C., | | |
| | | | | continuous | | |
| MYRTH_2_01934 | 980, 1286, | CU3 | alpha-naphthyl acetate, | pH 5, | 11.8 | na |
| | 1592 | (Example 16.9) | 0.4 mM | 30° C., | | |
| | | | | continuous | | |
| MYRTH2p4_001537 | 895, 1201, | CU8 | acetylated xylan from | pH 5, | 2.7 | na |
| | 1507 | (Example 16.14) | beechwood 0.4% | 40° C., | | |
| | | | | 15 min | | |
| MYRTH2p4_005923 | 1013, 1319, | CU8 | acetylated xylan from | pH 5, | 3.5 | na |
| | 1625 | (Example 16.14) | beechwood 0.4% | 40° C., | | |
| | | | | 15 min | | |
| MYRTH2p4_003942 | 944, 1250, | CU9 | esterified pectin, 1% | pH 8, | 34 | na |
| | 1556 | (Example 16.15) | | 40° C., | | |
| | | | | 15 min | | |
| MYRTH_1_00080 | 1119, 1425, | CU1 | 4-nitrophenyl acetate, 1 mM | pH 5, | 0.2 | 5 |
| | 1731 | (Example 16.7) | | 30° C., | | |
| | | | | 30 min | | |
| MYRTH_4_09372 | 1146, 1452, | CU2 | Xylan from beechwood | pH 5, | 17.3 | 58 |
| | 1758 | (Example 16.8) | 0.2% | 40° C., | | |
| | | | | 30 min | | |
| MYRTH2p4_001451 | 889, 1195, | CU2 | Xylan from beechwood | pH 5, | 12.7 | 42 |
| | 1501 | (Example 16.8) | 0.2% | 40° C., | | |
| | | | | 30 min | | |
| MYRTH_4_09820 | 1147, 1453 | CU2 | Carboxymethylcellulose, | pH 5, | 3 | 10 |
| | 1759 | (Example 16.8) | 0.2% | 40° C., | | |
| | | | | 30 min | | |
| Myrth2p4_003941 | 943, 1249, | CU2 | Laminarin, 0.2% | pH 5, | 2.2 | 220 |
| | 1555 | (Example 16.8) | | 40° C., | | |
| | | | | 30 min | | |
| MYRTH_1_00024 | 943, 1249, | CU2 | Lichenan, 0.2% | pH 5, | 1.05 | 11.7 |
| | 1555 | (Example 16.8) | | 40° C., | | |
| | | | | 30 min | | |
| MYRTH2p4_002293 | 908, 1214, | CU2 | Carboxymenthylcellulose, | pH 5, | 4.1 | 13.7 |
| | 1520 | (Example 16.8) | 0.2% | 40° C., | | |
| | | | | 30 min | | |
| MYRTH_3_00003 | 1138, 1444, | CU2 | Locust bean gum, 0.2% | pH 5, | 1.6 | 1600 |
| | 1750 | (Example 16.8) | | 40° C., | | |
| | | | | 30 min | | |
| MYRTH_3_00097 | 974, 1280, | CU2 | Carboxymethylcellulose, | pH 5, | 2 | 6.7 |
| | 1586 | (Example 16.8) | 0.2% | 40° C., | | |
| | | | | 30 min | | |
| MYRTH_4_06111 | 1071, 1377, | CU2 | Carboxymethylcellulose, | pH 5, | 16 | 53 |
| | 1683 | (Example 16.8) | 0.2% | 40° C., | | |
| | | | | 30 min | | |
| Myrth2p4_001304 | 876, 1182, | CU10 | Lactose, 180 mM | pH 5, | 0.37 | na |
| | 1488 | (Example 16.16) | | 40° C., | | |
| | | | | continuous | | |
| Myrth2p4_000359 | 858, 1164, | CU10 | Lactose, 180 mM | pH 5, | 0.43 | na |
| | 1470 | (Example 16.16) | | 40° C., | | |
| | | | | continuous | | |
| Myrth2p4_007801 | 1065, 1371, | CU6 | Polygalacturonic acid, | pH 8, | 1.1 | na |
| | 1677 | (Example 16.12) | 0.9% | 40° C., | | |
| | | | | continuous | | |
| MYRTH2p4_003203 | 930, 1236, | CU7 | 4-methylumbelliferyl | pH 5, | 0.03 | 30 |
| | 1542 | (Example 16.13) | beta-D-cellobioside | 40° C., | | |
| | | | | 30 min | | |
| Myrth2p4_006226 | 1026, 1332, | CU6 | Polygalacturonic acid | pH 8, | 10 | na |
| | 1638 | (Example 16.12) | 0.9% | 40° C., | | |
| | | | | continuous | | |

*na, not applicable as control exhibited no detectable activity. Control is an equal volume of supernatant from a vector-only transformant
^{‡}U, micromole product formed per minute under the indicated assay conditions

### Example 29

### Further Characterization of Expressed Enzymes from Aureobasidium pullulans

[0522] The Aureobasidium pullulans proteins Aurpu2p4_{—}002220, Aurpu2p4_{—}008140, Aurpu2p4_{—}010203, Aurpu2p4_{—}009597, Aurpu2p4_{—}009401, AURPU_{—}3_{—}00030, AURPU_{—}3_{—}00153, AURPU_{—}3_{—}00155, AURPU_{—}3_{—}00166, AURPU_{—}3_{—}00175, AURPU_{—}3_{—}00177, AURPU_{—}3_{—}00191, AURPU_{—}3_{—}00241, AURPU_{—}3_{—}00284, AURPU_{—}3_{—}00296, AURPU_{—}3_{—}00035, and Aurpu2p4_{—}011071, were further characterized using the assay protocols and assay conditions indicated in the table below.

| | | | | | | Fold |
|---|---|---|---|---|---|---|
| | | | | | | increase |
| | SEQ ID | Assay | | Assay | Activity | over |
| Target ID | NOs: | Protocol | Substrate | Conditions | (U/ml)^{‡} | control* |
| Aurpu2p4_002220 | 1836, 2223, | CU4 | alpha-D-Glucose, 10 umol/mL | pH 5, 40° C., | 39 | na |
| | 2610 | (Example 16.10) | | continuous | | |
| Aurpu2p4_008140 | 1959, 2346, | CU5 | Ethyl ferulate, 4 mM | pH 5.3, | 121 | na |
| | 2733 | (Example 16.11) | | 40° C., 30 min | | |
| Aurpu2p4_010203 | 2014, 2401, | CU1 | 4-nitrophenyl acetate, 1 mM | pH 5, 30° C., | 0.17 | 4.3 |
| | 2788 | (Example 16.7) | | 30 min | | |
| Aurpu2p4_009597 | 1995, 2382, | CU3 | alpha-naphthyl acetate, 0.4 mM | pH 5, 30° C., | 48 | na |
| | 2769 | (Example 16.9) | | continuous | | |
| Aurpu2p4_009401 | 1989, 2376, | CU1 | 4-nitrophenyl butyrate, 1 mM | pH 7, 30° C., | 1.2 | na |
| | 2763 | (Example 16.7) | | 30 min | | |
| AURPU_3_00030 | 1778, 2165, | CU2 | xyloglucan from tamarind, | pH 5, 40° C., | 7.6 | 109 |
| | 2552 | (Example 16.8) | 0.08% | 30 min | | |
| AURPU_3_00153 | 1987, 2374, | CU1 | 4-nitrophenyl alpha-L- | pH 5, 40° C., | 0.51 | na |
| | 2761 | (Example 16.7) | arabinopyranoside, 1 mM | 30 min | | |
| AURPU_3_00155 | 1952, 2339, | CU2 | polygalacturonic acid, 0.1% | pH 5, 40° C., | 157 | 390 |
| | 2726 | (Example 16.8) | | 30 min | | |
| AURPU_3_00166 | 1893, 2280, | CU2 | polygalacturonic acid, 0.1% | pH 5, 40° C., | 4.1 | 10.3 |
| | 2667 | (Example 16.8) | | 30 min | | |
| AURPU_3_00175 | 1978, 2365, | CU2 | polygalacturonic acid, 0.1% | pH 5, 40° C., | 12 | 30 |
| | 2752 | (Example 16.8) | | 30 min | | |
| AURPU_3_00177 | 1934, 2321, | CU2 | polygalacturonic acid, 0.1% | pH 5, 40° C., | 2.6 | 6.5 |
| | 2708 | (Example 16.8) | | 30 min | | |
| AURPU_3_00191 | 1873, 2260, | CU1 | 4-nitrophenyl beta-D- | pH 5, 40° C., | 20.6 | 412 |
| | 2647 | (Example 16.7) | glucopyranoside, 1 mM | 30 min | | |
| AURPU_3_00241 | 1936, 2323, | CU1 | 4-nitrophenyl beta-D- | pH 5, 40° C., | 89.8 | 1800 |
| | 2710 | (Example 16.7) | glucopyranoside, 1 mM | 30 min | | |
| AURPU_3_00284 | 1801, 2188, | CU2 | sucrose, 0.2% | pH 5, 40° C., | 10.4 | 210 |
| | 2575 | (Example 16.8) | | 30 min | | |
| AURPU_3_00296 | 1847, 2234, | CU2 | sucrose, 0.2% | pH 5, 40° C., | 12.6 | 250 |
| | 2621 | (Example 16.8) | | 30 min | | |
| AURPU_3_00035 | 1931, 2318, | CU1 | 4-nitrophenyl alpha-L- | pH 5, 40° C., | 53 | na |
| | 2705 | (Example 16.7) | arabinopyranoside, 1 mM | 30 min | | |
| Aurpu2p4_011071 | 2040, 2427, | CU6 | Rhamnogalacturonan I, 0.7% | pH 6, 40° C., | 0.86 | na |
| | 2814 | (Example 16.12) | | continuous | | |

*na, not applicable as control exhibited no detectable activity. Control is an equal volume of supernatant from a vector-only transformant
^{‡}U, micromole product formed per minute under the indicated assay conditions

### Example 30

### Determination of Activity-Temperature Profiles

[0523] The activity-temperature profiles were determined for various proteins of the present invention according to the protocol in Example 16.18. Results for are shown in FIGS. 4-16 for various proteins from Scytalidium thermophilum, Myriococcum thermophilum, and Aureobasidium pullulans, using the Assay Protocols and Assay Conditions indicated below in Tables 23-25.

TABLE 23
Activity-temperature profiles for various Scytalidium thermophilum proteins

| | | | | |
|---|---|---|---|---|
| | | SEQ ID | Assay | |
| Figure | Protein | NOs: | protocol | Assay conditions |

| | | | |
|---|---|---|---|
| 4A | SCYTH_1_09019 | CU2 | 0.2% xylan from beechwood, |
| | | (Example 16.8) | pH 6.0, 30 min |
| 4B | SCYTH_1_01114 | CU2 | 0.2% xylan from beechwood, |
| | | (Example 16.8) | pH 5.5, 30 min |
| 4C | SCYTH_1_09441 | CU2 | 0.2% xylan from beechwood, |
| | | (Example 16.8) | pH 5.5, 30 min |
| 5A | Scyth2p4_009303 | CU1 | 1 mM pNP-alpha-L-Arabinofuranoside, |
| | | (Example 16.7) | pH 5.0, 30 min |
| 5B | Scyth2p4_004025 | CU2 | 0.1% wheat arabinoxylan, |
| | | (Example 16.8) | low viscosity, pH 5.0, 30 min. |
| 5C | SCYTH_1_00574 | CU2 | 0.2% carboxymethylcellulose, |
| | | (Example 16.8) | pH 6.0, 30 min |
| 5D | SCYTH_1_08979 | CU7 | 0.2 mM 4-methylumbelliferyl- |
| | | (Example 16.13) | cellobioside, pH 5.0, 30 min |

TABLE 24
Activity-temperature profiles for various Myriococcum thermophilum proteins

| | | | | |
|---|---|---|---|---|
| | | SEQ ID | | |
| Figure | Protein | NOs: | Assay protocol | Assay conditions |

| | | | |
|---|---|---|---|
| 6A | MYRTH_2_03560 | CU2 | 0.2% beechwood xylan, |
| | | (Example 16.8) | pH 4.0, 30 min |
| 6B | MYRTH_2_04091 | CU2 | 0.2% beechwood xylan |
| | | (Example 16.8) | pH 7.0, 30 min |
| 6C | MYRTH_1_00068 | CU2 | 0.2% beechwood xylan |
| | | (Example 16.8) | pH 4.0, 30 min |
| 6D | MYRTH_2_00256 | CU7 | 4-methylumbelliferyl- |
| | | (Example 16.13) | cellobioside, pH 5.5, 30 min |
| 7A | MYRTH_2_01976 | CU2 | 0.2% beechwood xylan |
| | | (Example 16.8) | pH 6.0, 30 min |
| 7B | MYRTH_2_00218 | CU2 | 0.2% carboxymethylcellulose |
| | | (Example 16.8) | (7M + 4M), pH 5, 30 min |
| 7C | MYRTH_1_00018 | CU1 | 1 mM 4-nitrophenyl beta-D- |
| | | (Example 16.7) | galactopyranoside, pH 4.0, 30 min |
| 7D | MYRTH_2_04288 | CU2 | 0.08% locust bean gum, |
| | | (Example 16.8) | pH 5.0, 30 min |
| 8A | MYRTH_2_04289 | CU2 | 0.08% locust bean gum, |
| | | (Example 16.8) | pH 5.0, 30 min |
| 8B | MYRTH2p4_001339 | CU1 | 1 mM pNP-beta-glucopyranoside, |
| | | (Example 16.7) | pH 5.0, 30 min |
| 8C | MYRTH_1_00021 | CU1 | 1 mM pNP beta-glucopyranoside, |
| | | (Example 16.7) | pH 5.5, 30 min |
| 8D | MYRTH_2_00959 | CU2 | 0.1% low viscosity wheat |
| | | (Example 16.8) | arabinoxylan, pH 6.0, 30 min |
| 9A | MYRTH_1_00035 | CU2 | 0.08% locust bean gum, |
| | | (Example 16.8) | pH 6.0, 30 min |
| 9B | MYRTH2p4_005976 | CU2 | 0.2% carboxymethylcellulose, |
| | | (Example 16.8) | pH 5.5, 30 min |
| 9C | MYRTH_4_03993 | CU7 | 4-methylumbelliferyl-cellobioside, |
| | | (Example 16.13) | pH 4.5, 30 min |
| 9D | MYRTH_3_00099 | CU7 | 4-methylumbelliferyl-lactoside, |
| | | (Example 16.13) | pH 4.0, 30 min |
| 10A | MYRTH_2_00848 | CU1 | 1 mM p-nitrophenyl-alpha-L- |
| | | (Example 16.7) | arabinopyranoside, pH 5.0, 30 min |
| 10B | MYRTH_3_00127 | CU2 | 0.1% wheat arabinoxylan, low |
| | | (Example 16.8) | viscosity, pH 4.5, 30 min |
| 10C | Myrth2p4_006408 | CU2 | 0.08% xyloglucan, |
| | | (Example 16.8) | pH 6.0, 30 min |
| 10D | MYRTH2p4_001496 | CU1 | 1 mM p-nitrophenyl-beta-D- |
| | | (Example 16.7) | Xylopyranoside, pH 4.5, 30 min |
| 11A | MYRTH_2_00256 | CU7 | 0.2 mM 4-methylumbelliferyl- |
| | | (Example 16.13) | cellobioside, pH 5.0, 30 min |

TABLE 25
Activity-temperature profiles for various Aureobasidium pullulans proteins

| | | | | |
|---|---|---|---|---|
| | | SEQ ID | | |
| Figure | Protein | NOs: | Assay protocol | Assay conditions |

| | | | |
|---|---|---|---|
| 12A | AURPU_00052 | CU2 | 0.2% xylan from beechwood, |
| | | (Example 16.8) | pH 4.5, 30 min |
| 12B | AURPU_3_00014 | CU2 | 0.2% xylan from beechwood, |
| | | (Example 16.8) | pH 4.0, 30 min |
| 12C | Aurpu2p4_005858 | CU1 | 5 mM pNP-beta-D Glucopyranoside, |
| | | (Example 16.7) | pH 5.0, 30 min |
| 12D | Aurpu2p4_010898 | CU1 | 5 mM pNP-N-acetyl-beta-D- |
| | | (Example 16.7) | glucosaminide, pH 4.0, 30 min |
| 13A | AURPU_3_00307 | CU1 | (1 mM pNP-Beta-Galactopyranoside, |
| | | (Example 16.7) | pH 4.0, 30 min) GH20 |
| 13B | Aurpu2p4_008021 | CU2 | (0.2% Beta-mannan, |
| | | (Example 16.8) | pH 5, 30 min) GH5 |
| 13C | Aurpu2p4_009751 | CU2 | (0.2% xylan from beechwood, |
| | | (Example 16.8) | pH 4.0, 30 min) GH10 |
| 13D | AURPU_3_00016 | CU2 | 0.2% alpha-tomatine, |
| | | (Example 16.8) | pH 4.0, 30 min |
| 14A | AURPU_3_00018 | CU2 | (0.2% xylan from beechwood |
| | | (Example 16.8) | pH 3.5, 30 min) GH 11 |
| 14B | AURPU_3_00019 | CU2 | (0.2% xylan from beechwood |
| | | (Example 16.8) | pH 3.5, 30 min) GH 11 |
| 14C | AURPU_3_00147 | CU1 | (1 mM 4-nitrophenyl beta-D- |
| | | (Example 16.7) | mannopyranoside, pH 3.0, 30 min) GH2 |
| 14D | Aurpu2p4_006782 | CU1 | (1 mM pNP-β-D Glucopyranoside, |
| | | (Example 16.7) | 30 min, pH 4.0) GH 3 |
| 15A | AURPU_3_00192 | CU1 | (1 mM pNP-beta-Glucopyranoside, |
| | | (Example 16.7) | pH 4.0, 30 min) GH3 |
| 15B | AURPU_3_00208 | CU1 | (1 mM pNP-beta-Glucopyranoside, |
| | | (Example 16.7) | pH 4.0, 30 min) GH3 |
| 15C | Aurpu2p4_001633 | CU2 | (0.2% carboxymethylcellulose, |
| | | (Example 16.8) | pH 5.5, 30 min) GH5 |
| 15D | AURPU_ 3_00312 | CU1 | (1 mM pNP-beta-Glucopyranoside, |
| | | (Example 16.7) | pH 5.0, 30 min) GH5 |
| 16A | AURPU_3_00183 | CU2 | 0.08% locust bean gum, |
| | | (Example 16.8) | pH 4.5, 30 min |
| 16B | AURPU_3_00013 | CU2 | 0.2% xylan from beechwood, |
| | | (Example 16.8) | pH 6.0, 30 min |
| 16C | AURPU_3_00184 | CU1 | 1 mM p-nitrophenyl-beta-d- |
| | | (Example 16.7) | xylopyranoside, pH 5.0, 30 min |
| 16D | Aurpu2p4_011071 | CU6 | 0.7% Rhamnogalacturonan I from |
| | | (Example 16.12) | potato, pH 5.0, initial rate |

[0524] Although the present invention has been described hereinabove by way of specific embodiments thereof, it can be modified, without departing from the spirit and nature of the subject invention as defined in the appended claims.

The application's sequence listing, which the Patent Office published only in electronic form, follows.

SEQUENCE LISTING (2946 sequences)

SEQ ID NO: 1 - DNA, 1405 bp, Scytalidium thermophilum
atgcgtttctccgcctccctgctccttgccctgacgggctccgctgccgccagccctatccgggctgaggaagagatccgggtgtacgacttgcccatctcactgttcgatgatcgtcaggctgacatatgatccagcgccttcacgccccgccaagtgcagggtctggatgctgccatgaaggctgccggaagggagtacatcggcacctccctcaccgtgaggaacgacttccaggagcagaacatcatccgcactgagttcggctccatcacgcctgagaacgcccagaagtgggacgccactgagcccaaccgcggccagttcaccttcggctctgccgaccagcacatggactgggcccgccagaacgggaagcacgtccgctgccacacccttgtctggtactcccaactgcccggctgggtgtccaacagcggcttcaacaatgccaccttgcagcaggtgatgcagaatcacatcaaccaggtgatgggacggtaccgcggccgttgcaatcactgggacgttgtcaatgagggtatgtgatccaactttccatgctggatgttgtcccttcaccagataatgagaaccgggagatcgctgacctttctttttgttttttgcagctctaaatgaagacggaacgtacagagataacgttttcctccgtgtggtgcgtgtttttttgtgtttccacgtcgtccttttttgggggggggagggggggtgttgtttttgtttgtttgttttgcatgaaaaccgcgagctctgctaatcgcgaacccgcaatagatcggagaggcgtacatcccgattgctttcaggatggccgcccaggctgatccctcggccaagctctactacaacgactacaacctcgagtatctcggacccaaggttgagggtgctgcccgcatcgtgcgccttgtccagcagtacggcgttcgcatcgacggtgtcggctatcaggctcaccttgtcactgagcccacccccactcagtccacccccacgccgtccgaggaggacctcatcaaggctctgcgtatcaccgctgacctcggtgttgatgtcgcgtacaccgagattgatatccgcatgcgcactccgtcgaacgcccagaagctccagcagcttgcggatgcttactaccgcgtggctcgctcgtgcatgaaggtcccgcgctgcgttggcatgaccatttgggtaagtccaaacctcccgtgacagaggcactccgaccaagcgctaacttcgtgtgtagggcgtcactgaccggtactcgtgggttcccaacaccttccgcggtgagggtgatgcgctcctttgggacagcaactaccagaggaaggccgcttacaacgccttcctgcgcggtatccaggagcccgttaactaa

SEQ ID NO: 2 - DNA, 964 bp, Scytalidium thermophilum
atgcgtcctcaggttgggcttcttctcctgccggccctcagcgcccatggcattcgcatcatccagtccaacgacgatgggtgggccgaactttatgtgaggtctttccatgaggctttgttggcttccggtcacgatgcggtcttgtccgctcccgcggaaaacaagtctgccacaagtaagtatatcttgacttctcaacgctttctcccaagcaactgtagcatcatcctgacgccacacaggttctctcgatatcgagccgagtccccggaaatcgcggtgccagtatgacagttgtcctgtgaccaacgcccctattggacgcaacgagtcctcgccccggctcaattgggtcaactccttcccggtcacctcgatccgctacggtatcgacttcatcggtccccagttctggaacggccaggatgccgagctggccgtcacgggtcccaacgtgggcagcaacctgtacgtccaggcgccgttctcagggacgatcggagcagccgtctttgcagcaaaggaaaggaagattccggccatcgcgttttctggtctttctggcggcaacttggcatggaacacgacgccagtccccgaacgcagcacgctctatgccgaactggccacgatcctgacgaacgccgtcattgagagcgggaagccctatctgcccgaggacgtcttcctgaatgtcaacttccccacggttggaaacaagtgcaacaaggccagtcagttcaagtgggtgctcagccgcatcaacatcgggctgttctcggcccctgatatccagcactgtggttccacgcggttgccgatggaggcagcggttgtcctgtctgacggctgctacatttcggtcagtgtgggcgatgcaagggacaagacgacagcgccaaaggagaagcaggccatcgtgagggataagctgcagggtctgttgacctgtttgccatga

SEQ ID NO: 3 - DNA, 1809 bp, Scytalidium thermophilum
atgaaggcggaatccttcgccctcttcctctcggcccttagtggtctcaccgtcggggcttcagcccaggaacgcgagccgcggacctgggggttcgttccgggacttttaaagccatgggtcgattcaagaaggctccaggcagatatcaaaacagagaagtaggtacacatccaacattgaccgccccgccatcagatgggttcatgtaatgctaacattgacctgacaagcctcgtgaagaaccttcaggtcctgaacgacattgccttcgccaatggaggcaaccgcgccttcggcctaccgggttacgccgcctcggtggactatgtctggaagaagatctccaaagtgccgggcacccgggcttggaaacaggactttgacgccctcttcagccaggtactctcgatcagtctcaaagtggatggcgaggacatctatgtctacggcctgtcctattcgccatcgacgccccctgaaggcatcaccgccgagattgtggccgggccggaaggcgctgcgggctgcaacgatgaggcatatgcagaccttgatgtggctggaaagattgtcctggttcagcggttccgctgcccgactggcggaacgttggcaggccgccttctcccggctgctcgtgcgggcgccgccgcggtgatcatctaccacgacctgacgaccaatgccaccgcgggttccctgtctgctccgaatccggagcacgttcccggcggattcatcaacaaggtcgatggcgagcgcatcaaagcgcgactagacgctggggagaaacttgaggcctattttcaacaaacgcagaccgttgagaaccggacaacccagaatctctttgtcgagaccatcgatggagacccggataatgtcattgtggtatgcaacccggtttcgtgttgactaacaggctcggtaaaaagaaatgagatctgacttctggtttggacagcttggtgcacatttggacagcgttcaggcgggtcccggcatcaacgatgatggtgagcatggttccatgacccagattcatgggagttcttgagctaatcgtcttgcaggatccggcacgagcttgattctcgagctcttcctcgcgttgagcaagtaccgtacccggaacaaggtgcgcttcgcatggtggggtgccgaagagaacggactgctgggctctaagcactactgctcgactctcgacccgcgcgaggccaaccggattcttgcgtacctcaacttcgacatggttgccaaagggtacattggcgtcagtgacacggacggcagcacgcacggctccgtggcaccccctggctccgaggtcatcgaacgcctcttcaatgactattttgccagcaagggcatcactgtcacacctgccatcatgacgaacggtagtgattacgcttccttctggagcatcctcaacaagccctttggcttccttcataccggcactggcgtggagcaggacccgtgctaccaccaagcatgtgacacgatcgacaaccctgatcccgagacgcacaccaagaacgcaaaggtaagtcgcacccttggtgtagccagcacacaagccatggagacggtgaatctgacattttcgtctggcaggctgcggcgcatgtcctgagcattctggccatggatggtacacgccttattcccaagggtcccccgattaacgcgacaacattggctgccatgcggacacgtgatcttacgcccgatcacgcccggatcgaagacctggaggcaatgggcgagagacatctcggatgtggccatgacatttga

SEQ ID NO: 4 - DNA, 656 bp, Scytalidium thermophilum
atgcagctcaagaccgccctcctctcgctcctcgcggccgtcgcttcggcggccccttcgggcaagtcctgcccggctccggtgcgcaagttcggcatcatggcgctccgctcggcgtcgcccatccatttcgccagggtctcggccacccagaatacgttggttctgaacctgcccgacgacaaacaagacgcgcagtgcgaggacggtcaggcgccctcgtcggccaccttctacatcaaggacgaggagctgtacctgtacggcaagaacccgaagcagtggcttgttgccgaccgctccggcatgggtaagtggaagaccgagaaaaaatcagggatgatgtgtgggcacagaaacactgacgctctcgataataaataggcctgggcatcctgcagtaccacaacaagacctccgacacccccagcgggcggctggaggttaagggctgggctatcgacgagaacgacaacctcacgttcaatggcaacggtctccttgcctgcccgagcacgaccgacgacacgtggtttatccggattgatgtgggcgttgagaagccccacggcatcgagggctgcctcgggtttagcgcccggactgtgactgtcacggatccggtcaagtgcacttacagtctgtatagcgcttag

SEQ ID NO: 5 - DNA, 1677 bp, Scytalidium thermophilum
atgctaggcttgaaggtcttgtgtctctccgccgtcgtggggacggcggtctctgtcccgcacgcgggcaatcttccccgtcaggccagcactttcaccaaccccgtgctttgggaagaccacccagatctcgaggtgttccgcgtcggctcagtattctactactcctcgtccaccttcgcctactcccccggcgcgcccgtcctcaagtcctacgacctcgtccactggacgcccgtcacccattccgtgccccgtctcaacttcggctccaactacgacctccccagcggcaccccgggcgcctacgtcaagggcatctgggcctcgacgctccgctaccgccgctccaacgaccgcttctactggtacggttgcgtcgaagggagaacctacctctggaccagcccaggcggtaacgcgctcgccaacaacggcgaggtgcccccctcggcatggaactggcagcacaccgccaccatcgacaactgctactacgacgccggcctgctcatcgacgacgacgacaccatgtacatcgcgtacggcaacccgaccatcaacgtcgcgcagctttctcccgacggcacccgccaggtgcgcgtgcagcagcgcgtctacgcgcacccgcagggccagacggtcgagggcgcgcgcatgtacaagattcgcggcaactactacatcctggtgacccgccccgccgacgcagagtacgtgctgcggtcgacgacggggtcgccgttcggcccgtacgaggcgcgcacgctggtgtcgcggatccagggcccgctggccaacgccgggttcgcgcaccagggcggcatcgtcgacgcgccagatgggacgtggtactacgtcgcgttcatggatgcgtatcccggcggacgcatccccgtggtggcgccgctgcggtggacggcggatgggtggcccgaggtggtcacggattcgcaagggaggtgggggacgagctatcccattccagttcgcggagcaaagaacgcgacggaggggctggcaagcacggatctggacgagttccgcgggacgaggttcagcgagcattgggagtggaatcataacccggacacgagcaagtttacgttgctaggaggtaacgagggcgggctcatcctgcggacggcgaccgtgacgggggatttgtttgccgcaaggaatacgctcacgaggaggattgcgggccccaaggccagtggaatcttccggctggatgtgcgcgggatgcgcgacggtgaccgggccggcgctgtgctgttccgggatcgtgcggcgtacatcggggtgtggaagcagggcaacgaggcgaggattgtcatggtggacgacctgcggttgaacgaggatggttggaggacggcgtccaccggcagagtggccgccaacggtccggtgatcgacacgaacgctcagcaggatatctggctgcgaattgatgcggacatcacaccggcgtttgggacgaacacggagcgcacgacgacgttctattacagtattgatggtgggaggacgtataccaggctgggccctgcctttgcgatgaccaactcttggagatacttcaccggataccggtttggagtgttcaactttgcgaccaagagtcttggaggtgaggtgaaggttaaggggttcaagatgaacatgatctag

SEQ ID NO: 6 - DNA, 873 bp, Scytalidium thermophilum
atgaagtcctttattgtctattctctccttgccgcggtggctacggccttgccggccccggcgccgatgcctactcccgtaagccctattactgctctagtcaagctgaggggttctcgcaaggattattatgcatgaggataacctccaatgctaacatggacgttttcatatccagccgggcattccctcaaaatcaacggcccagtcccagctgaacgccttgacggtcaaggcctcctatgacgatggcaagtataagcgcgacctgttccctcactggaacaccgtcagcgggacttgcaacactcggtaggttgatctttatgtggttgagattctcagcagaacgcagtctgactgtcgcaacagcgaatatgtcctgaagcgcgacggggtcaacgtcgtcaccaactcggcctgcgctgccacctcgggcacatggtactcgcctttcgacggcgccacctggactgcggcatctgatgtcgatattgaccacatggtgcccctgaagaatgcctggattgtaagcttctgctcaccctccagctgtttagctgacagggttcttgtcaaatgaattattgagacctatactcacactcgttgataatgcagtccggcgcaagcaactggacctcaaccaagcggacacagttcgccaacgacatcaacctgccccagctgtgggcggtcacggacgacgtgaaccaggccaagggcgacaagtctcccgacaagtggaagcctcctctcacctccttctactgcacctacgccaagagctggatcacggtcaagtacaactacggcctcagcatcacgtcggccgagaagtcggcgttgactagcatgatcaacacttgctga

SEQ ID NO: 7 - DNA, 1560 bp, Scytalidium thermophilum
atggcagcttccattctctacacggtatcggtgttgcttctcggtcttgttcaccatgtggctgccgctgccttgccccagcccacgccgcacgacgatggatgcgtacaccttcccatcattcactccaccaatgtcaacttcttctccggcaagcgcggcatccagatggccctggccaaccgctccgacatcgcctactatgcccagcttagtatcgggacgcctccccagccggtgtttgtgcagttggacacgggatccttcgagctgtgggttaacccggattgctccaaggtcaggggcgccgacgctctcttttgcgagcgggtaggacaatacgacacatctaggtcgtcaaccgtgacctcgctgggcacaagcaagttcctcaagtacggcatcggctcggccaatatcagctacgtgaccgacaccatcacgctggccggcagcgccacttcccttcgtaacgtgcagttcggcgtcgctacctcatcttccgacactttttcaggaatcttgggcatcggctacggccaaggtatcgctacaaagtaccccaatttcgtcgaccagctgcacgaccaaagcgccatccgcgtcaaggcgtatacgcttgcactcgggagcaaggacgcccgcgaaggtatcgttgttttcggcggcgtcgatacggctaagttctcgggcaagcttgcccgcgttcccattatccccgccgaccggtcgcctgaccgtgtgccgcggttctgggttgacctgcggtccatcaccctcacccctccgagcggcatctcccgggtgtatgaggactcggctcgccccgtgtttctcgacagcggttcgaccatgactcttctaccgcgcaaccttacggcggcaatcgcgcgggatttcggcgccaatgagccagattcgaacgggttctacagaatagactgtgccttgacgcagatgagcggcacgctggattttgcgtttgacggcgtcacggtcaaggtgccatataaggagctcacacgtgaggtgccgacgaatcctcccgcgtgtttccttggtatcatggccagtgacaagttcaccttgttgggggatacgttcttgcgttcagcctacggtatgtttttgatcattgagagtctatggccgaggcactagacactaaccagcgagatcatagccgtattcgatcttgagtctgactccatatggctctctcaggcgactaactgcggttcctcacctgccgccctggacgacatcaactccttggcaaccatcacgggggattgtggcggaagtggcgtggtggactcatcgaccagcgtgcccacctcgacgtccgaggcgattcaaaccggcgtggaaactggaggccaggccgggccagtatcacagacctctccgggagggaggacgccgcagggtcagacgggtacggatgggacagcctcgggggctgcgttaccgttgctgccgacgggtttgggaagatgggtgaggagttgggcgttgctgttcgtgtttcaaagggtagtccttacatgcatgtggtga

SEQ ID NO: 8 - DNA, 971 bp, Scytalidium thermophilum
atgagcatgccccgacccctctcgttcggtttctcatcggggttcctgggtaaaccatcgccaaaaccaaggcaaacctcattctttccctcaccaccatctccacaactctcaagcgtcttagatctgcctgcatctatcacccagtatctattacccagtatggggcggttcgtctccgtctgggccataatcgggcttgctggcgtagtcctcggcgatctcctcgactgcggaccggctaggtatgacccagcgcaggtaaggcacacttcctctgggccaacatcattgccatgacactgacctgggttcatgtacaaaagtacgtgtgctgggacaaccagtttctgtgtcccgtcgttgctggagagccgttgtcacactgcgctggtgcatgctacagcaagttcatgtacacgtgcacaaacaacatcctcacccttctcccaccccaagacacaccgttcaccctaactgtcgataaccccaatatcctcatccatggaaagcccgtcactgcttcgggactgcactggttactcaacggcgagacgagcagctactgtcccactgttgttccgagggagacatgtcccccggggaacatcacagtcatggtcgctagcggcggcagcgtcgccatgagcgtcatggttcctggcgggcagcaagcctatctggatccgtactggaatatgaagtacacacaagcgcactcggcatacatcccacctggtagcctcacgactgggttcggggcctacaaggggggtggcttcgtcaatctcaacggcaatggctggggatgggttgcttgcccaccgagggcgtcaggaggcggcgggacggcgtggaatttggttgcaaagaacgcaagcacagcagacctgctgaaggactgccacgcggttaatctaaagatcaacccattgccggctggcacctttggtgcctggcagtatacctag

SEQ ID NO: 9 - DNA, 1325 bp, Scytalidium thermophilum
atggccgctctctttctccctctccttctcctcgtccccctcgccgccgccgcctcccttccccctctccccctccatacctcctcccgatggatcctcgacgccaacaaccaccgggtcaagctccgctgcaccaactgggctggccacatggagacccatctgcccgagggtcttcatcataaatccgtggaccacatcacgtcttggatcgccgcccagggattcaactgcgtgcgcctgacctacagcatcgaccaggcactgaacccgaaccggaccgtggctgccgctttctccattgctgcttccgctgctggggtaagcgtgaacgacatgaacaacttcagggatagggttgtgcaaaacaacccctggatcaacccccaacaaacgacgacgagaaacgtgatcgagtatatcgtcgcgaagctggcagataaggggatcatgacaatcctcgataatcataccagttcggcaaagtggtgctgtaacatagacgatggaaacggctggtgggacgccggcgcctactacaatcattggaacagtcgagacttcaagacgaatgagtggctagccggtctccaggcgatggcggcgtgggccaagggccggaaaggcatcgtgggcatgggcctgcgcaacgagatccgcgagttcctcctccagggcatcctcaacggacgcgaagactggtaccgcttcatcaagcaggccggcgacctggtccacgccaccaacccggacgtgctcatcatcgtgggcggcacgcagagcagcacggatctgctccacatcaggtcgcggcagctggacaccagcgggtgggcggggaagcacgtctgggagatgcacgcgtacagcttcaccgtgaccttcccggacgcgctcaagaattgcgacgtgaccaaggtgcagtacgggctgtttgacgggttcgtgctggagcagaacaagccgtggacgggaccgctgtttctgagcgagttcggcgtcggcatggaagggggcccgttcgatgggctgtccgagaaggatgaccggtatctgaagtgtttggtttcttggtgggtttacttgtcgctcgtctccagggcaacattctcgactctgaaggaaagaactaacctcgtcataggatggagagcaacgacgccgactgggccgtctgggccatccaggggagctattatgtccgtgacaagattcctgatagggatgaatcctggggtctgctgaagcacgacttctcagactggcggaatccgaaattccctgccatgcttggaaagatgtggaacgtgacccaggggccgtga

SEQ ID NO: 10 - DNA, 2072 bp, Scytalidium thermophilum
atgctaccgaggagggaggcgagtggagggacgtccacttccaccgcgaggatcacggctcagttgctgctgtccttcctcgccctctcgccgtcgcccgttgccgctgtcgcaaatgcaccagcccagccccaggctgttcttcctccgggcgcagtaatacccgagcagccacaaccagttgcacccggagagcacagctttgtatgttctgacagctgctgtcgtgttcatgtgtcgctccgcatcgagtagccggctaacgaaatctcctgctagaccctccgccacattttccatcatggcacctacaagtacccgaatctccatcgcaagaaggatatcgaccccagcgtctccaatgtgtggctcgccgccgaggatggcttcgaggccgaacccctaccgccactccgcgcccggagcaacggcgtgcgcatacaacgactggtcgatcgccgacccagcgtcgtcgatcccatggtagcccacgcacgccggtttgggtacgcgaacgttctcgcgccttcagcttggaccctcgacgaggtcccggcgcccgatattaccgaccgcgacaccatcctgacgcttgcctacatggcatccgatgcctacgtgcagagccctgatgaagccgactgggacgacgttggtggcggctttaaccggagtgtcgactttggctgggagagcgacggcctgcggggacacgtgtttgccgacgacactaactcgaccatcgttatcgggctcaagggcacgtcgcccgccgtgtttgatggcgagggaacgaccaccaacgacaaggtcaacgacaacctcttcttcagttgttgctgcgcacagcagggtccatggacatggcaccaagtatgcgattgcgccacgggcccctaccagtgtaacaacacgtgcgttgtccaggctcttcacgaagagaaccgctactaccaggccgcccgtgaactttacgccaacgtgaccgagttgtaccccaattccaacgtgtggataacaggccactcgttgggcggtgctgtcagctcgttccttggtctgacatacggcgtgcctgtggtgacgttccaggcggtgcccgaggccctcgccgccggccgcctgggccttccggtgccgccgggcatcaatcccgacatcccgcagacacgcgagtacacgggcgcctaccactttggtcataccgccgaccctatctacatcggcacctgcaacggcgccacagcctcgtgctcgtttggcgggtacgcccttgagacggtgtgccacacaggctttgagtgtgtgtacgatacggtcggcgacaaggggtggcgcgtgggtattggtacgcacaagattcgcgccgttatccgcgacgtgattctcaagtacaacacggtgcctgagtgcaagcggaagcccgaatgccgcgactgcggcagctggaccatgtacgagagcaacggtacagaaacgacgaccacgtcggccaccagctcccctacgtccaccagcaagacgcgcacacgcaccgagacgtgcaagactccaggctggtggggttgcttggacgaaacaaccacagcgacgggcaccaagacgtccgaggtgactcctaccactacgtcgaccacgacatgtcatactccgtatgtgacattgaacccctgaaagatgtgatgacagtttgctgacaaggtatttccagaggctggttcgggtgcagggataagaccactaccaccacaaccacgccaacgtcgacgacaacaaccactacaacgacatgcctgactccaggcaggttctggggatgttacgacgaaacgacaacagcggaagagacggcggcgcccacggtcaccacgacacgcgagctcagcagcaccagcaccatcacctccccgccgagcctgcccagcacttcgactccgaccagcgcggcgccgacgacgagtccaacgtgtgttgaccgggcgtggtacggctggtgcagggagtgggcaggtgatgatggcgagaacggggatgatgacgacgaacaggtgaataagaaggaggatatgtag

SEQ ID NO: 11 - DNA, 1515 bp, Scytalidium thermophilum
atgcgcacactctcaacgttgctcacagcggcggcggtggctacggcagccaccgtcagcccgcgacagtcgggcaccatcaccgtcaacctgggccaaaccttccagcgcatcgacgggttcggcttcagtctggcgttccagcgggccaacctcatcaccaacatgtcggacaagaccaagcaaaaggagctgctggacctgctcttcaacaagaccacgggcgccgggttcaccattatccgtaacggcatcgggtcgacgcccaactccaactcggatttcatgaataccatcgccccgaacaacccgggcggacccaacgcgacgccgcagtatgtgtgggacgggaaggatagtggccagctgtgggtgacgcagcaggcggtgagtttgtatggagtcaagcaagtttatgcgagtgagttgctttcccctcccgcggcacagacttgagagtgtacctaggtattgacctcatatcctttcctcctccgcctagatgcttggagcgctccgggctacatgaagaccaacgggcgcgacaccaatggcgggactctgtgcggcatgcccggggctttctgtgcgagcggcgactggaggcaagcgtatgccaactacctggtgcagtacatccggttctaccaacagtctggcgtcaacatcacccacctcggattcctcaacgagcccgactacagcgccagctacgcatccatgcaagccaacggcaaccaagcagcggacttcatcaagatcctcgacgccacgctgcggcgcgaggggctgagcgagcaggtcggcatcacctgctgcgactcgatgggctggggcaaccaagccaacatgatgaacgccatccgttcccaaggcgcagagggcctgctcaaggccgtcacgactcacacgtatacgggcgctccgaacgggccggtcaactaccgcgcgcctctctggttctcggagcagtgcgatctcaacggccagtggacaaccgcctggtacgcctttggcggcgcgggcgagggcctcacctgggccaacaacatcttcaacgccatcgtcaacaacaacgcctcgggctacctgtggtgggagggcgtgcagtggccgaaccccaacaccaacgagaagctgatccgcgtggacaacaccaccaacacgtacgaggtgtcgcggcggctgtgggcgtttgccaactggagccggtacgtcaagccgggtgcggtgcgcgtcggcacgtcgggcgcgccgggcgggctgcgggtggcggcgtttaggaacgaggatggcacgatcgccgtggtcgccatcagctccagcggatcgccggtgaatgtctcgatccggctgtcgggtggaggagttggcggcgcgtcggcggtcagggcgtacgtgtcggataacacgaggaactgtgagaacacgccggcgtcggtgggcgcggatggcagcatcactggatcagtggcggcgcggtcgatcacgacgttttatatactgccggcataa

SEQ ID NO: 12 - DNA, 1946 bp, Scytalidium thermophilum
atggcttcattattacccttacgctcctgtctttctttcttcctcttcttcctcgttgccatccagcccgtcacagctgtttggcctgcccctaagaactttaccaagggcaacacggttttgtatctgcaccaagcggtcaaaatcacttacaatggtgatcctgtatgctggtcttcctcccacctctccacctcttcctcccctgtcgcatcaccacaccacctgtgctttgagaagggctatgatactgaaactggaggtttcctctaccaacagctcagctacacctacggctatgtcccgcgggatatcaccagcaaggaggtggtgcaagccggcgtgtcaagaaccctagatggcatcttcggctccaagttcgtcccttggaaactccataaacccggcagccagttcgagcccgacctgcataagggccagaaatggatttccacattcgagattgtccagacggcgaaggacaagccgagcactttcaagccccttgctggcgaggtggatgaatcgtacaagctgtccgtcagcgctgagggcgccgccaagctgaccgccgcctcgtccattggcatcctccgcggcctcgagactttctctcagctcttctaccagcactcggcaggcaccttctggtacactccctatgcgccagtcgaggtggaagactctcctcagttcccgcaccgcggcatcttgatggacacggctcggcacttcttccctgtagaggacatcctgcgcaccatcgacgccatgtcgtggaacaagctgaatcgtctccatatccacgttaccgactcccagtcgtggccgctcgtgctcccctcgatgcccgaggtctcggaaaagggcgcctatcacccgagtcagacttactccccaaccgacatcgagaatatccagagatacggtgcgatccgtggcgtcgaggtctatttcgagattgatatgccgggacacatcggtgtggtggccctttcgcaccctgaactcatcgtggcgtacaatgagctgccgtaccattggtggtgcgcccagcctccatgcggcgcgttcaagctcaacagcaccgaggtggacaagttcctggaaaagctgttcgatgacttcctgccccgcgtggcgccatacgcagcttacttccacacgggtggcgatgagctgaacaagaacgactcgatgctggacgacggggtccgctccaactcttcagacgtgctgcagcctttgttacaaaagttcatcgatgcacagcacgggcgtgttcgtaaggcagggctgacgcccgtggtgtgggaggagatacctctcgaatggaatatcaccatcgcagacgacacggtcgtgcaggcatggcttggtgagcagtccgtcaagaagctgacggagaagggtctcaaggtcattgacagcaactacaacttttgggtaagcaactgcagctcaaaactccctacgtactcgaccgttccccaaactaattattctttcttactcagtacctcgactgcggccgtgggcaatggctcaactgggacaacggcgcggccttccagctcggctacccctttaacgactggtgcaatccgaccaagagctggcggcttgtctactcgcacgaccccgtggcaggactgaccccggagcaggccaagctcgtgctgggcggcgaggtggccgtctggagcgagaccatcgactcgaccaacttcgacacgctcgtctggccgcgcgcctccgccgcgggggaggtcctctggtcaggcaggatcgatttcgcgacaggccagaacaggagtcagttggacgcggcgccaaggctgaacgagttccgggagaggatggttttgaggggcgtgcggagctcgccggtgcagatgactttctgtacccagggtaagccggaggagtgtgagtacgctccgtga

SEQ ID NO: 13 - DNA, 1332 bp, Scytalidium thermophilum
atgcggctcctcaactcgctcaccttgttgagcgctcttcatgcgccgcttccggtcaaggctgggtcggagcaacgacacttgcaacaacaggaacagcagcctatgcaaaatgtcgacgtcacccatgatgagaggcttactgggcgagcaccgccgccgccgctacaaagcacagaaccaccaggtgtctcaaaacccctcttttcctctctcgagcgagccgcccgcctcgtcgacatctcctactgtgtcggcacaaccggcatctcgccgcccttctcatgcgtctcgcgctgcaaggactttccatcgctccacctagagcggacctggaataccggcgtcctaatgagcgacagctgcgggtatatcgcggttgaccacggtccccagggcgccacagacgacggcaaagaaatcattgtcgccttccgcggaacgtacagcatcaccaacaccatcgtggacctgagcaccgtaccgcaggagtatgtcccttaccccggcaatggcgacagggacgacgatcccaacgaccagccctccgatgatcccccgccccgctgcgccaactgcaccgttcataccggcttcatgtcctcctggcgcgccgcaagggatgtggtgatccctgccctccgttccgcgcgcgaccgccatcgtggttaccgtgtccatctgatcgggcacagcctaggcggcgccgtcgcggctctcgcggccctcgagctccgcctgggcctggggtggaaagatgtgcgtgtcaccacctttggcgagccgcgcgtcggcaatgccgcgctcgcgaggtacatcgatgccgctttcggcttgaacgccacggccccggggacggaggacattcagtaccgccgggtaacgcacatcggtgatccggtcccgcttctgccgctgactgagtgggggtaccggtcgcatgccggggaggtgtacatcgccaagtcggacctgccgccgggccccggggatttgaggttgtgtcgcggggatgcggaccccgagtgtatggccggggcggagacggaggattggttgggcaaggcgatggggtggttacgacggggcaggaagacttggtggttaggtggtccgaggcaagaggatgaggtagttgtggaaaacgctggggagttgggcccgagagggttcccggctaggttgaagctctggcagctcttatttgcgcatcgggattacttttggaggctgggactttgtctccccggaggagacccggcggattggtggagggaaaagtacaacttcaccgagccgatggatgttgggctggaggtgggagatctttaa

SEQ ID NO: 14 - DNA, 2348 bp, Scytalidium thermophilum
atgctgcatctccgccgatccctcgttctccttcctctcttctacttcgtcaacacactcgctgtcgctcagtacagcggttacgactacggcttcgatgtccaccagctggtcaagcggcagattggtcgccgttccgacctggtcgttaatgaaacgactccggacgacggtatcaggatccgtcaagagatccgcgagctcgaaaaggaccaagatctctggaccctgtacatcctggccctcagcatgcttcagttcaccgaccagtcgtatcccttgtcgtactattctctcgcgggtttgtgtccccccttaatctcctcttccgtcatacatcttccacagtttccagcataaccgtgggaaatatgagctgtggtaagggatccggtcggctgatagttccctcccaggaatccatggaatgccacatgcgacatggggcggtgtgaaccccgtgcccggtagtgaggacttgggatactgtgctcactcttcggtgcttttcccgacttggcatcggccatacatcgccttgtacgaggtatgacagactatcttccttggtccttagtgaagggagtggtttgtgagatggtgaattatgatcgagtcagactgacatgaaacggatagcaaatcttacacgggctcgtccagatgatcgccagcttctggaacgacaccgaacgaccacgctaccaagctgccgctcgccgattccgccagccctactgggacttcgcagctcctcctccggaaggagagagcgtacttccttggagcgtgggaggcagccagtatgtggacgttgacgggcccaatggccgtcaacgcatcgcgaatccattgtacacgtactatttccgccctctggatccagacgccttcacgtttgggccggtgagtttcttcctgttctctggcatatattctggactggcgtcgctgacacacaatgaggatagtggaatgaatggacaaagactctaagattcccgtccagcaccggtccagatgcacaatctaacattgccctcgtcgctatgaacctggaccgcaaccgtgctgccctggcccagagaatctacgcattgttctcggccaatgacaattacacgacgttcagtaacaacgtggacggcagctacctggactcggtagaatccatccatgacaccatccatacacttgtcggcggttacgggaacgacagcgatcccacccatcctggacacatgtctttcatccagtggtctgcattcgaccccatcttcttgctccatcactgtaatatcgaccgcatctttgccatctggcaagctcttcatcccgactcctgggtcgagccgggagtctctattctcggcacgtacaccacgcccaaaggcggtattgtggactcaaccaccccgctgacgcccttctatgagactgctaatggcagcttctggacttcagacagcgtccgtgatcacacaaagttcggctacacatatgccgagctgattctcagttcatccagcagcagcggcggcagcagcaacagtaataatcgtctggcgctagcccatagcaccaagaaggccgtgaaccgcaagtacagctccttcagccctgcgtccgtctttctctgcgagcttcgttcacatggtgtccgtcaagaggatggagataccgacaagccagcttcactctcgtcccttctcgccaaacgcctgcccgggaagaagacgaagaacctaccccgctctctgctgggtagcaaactcttcgccgccagcaccgatggaagcgggattaactaccgcgagtggactgcccatgtgattgttggccaacaggccgttgaccagacagggacggtcagtctctaccttcccaacgaggccgtcaacggcaagtcgaataacccgcgcgattggcctgccgagtccttcgttggaaccatgggcgtcttcaccaccgccagacagcagcagcaccccgagcagggacagcatccttgggcacaacagcatgccaaccctgatactaaaagtccccacgctgtccccgtgtcgggcaccgtcccgctcacggccacactgatggacaagcttgcgtcgggccggctcgagagcctcgagcccgagcacgtggtgccctatttgcgggaagcgctgcggatcgcggtgcaaaggccgacggggaaggtggtgagcacacagctggagagccgggaggcggggtgcggtgtcccggggctcgagattcgcgttttgagcgcggtcgtcgaggcgccgtggagcgaggacgagttgcctaagtggggagagaggaggatggagttggtggtgtgttga

SEQ ID NO: 15 - DNA, 1728 bp, Scytalidium thermophilum
atgaggatcgcagcatccacagtgctgctcggcgccgcctcggcgtcgtttcaccagcaggcccaacatgtgctctccaacttcgataacatgaagcccatctcggagtcatttgactccttgggcgacatggccagcgctcctctggaggcgctggagaaggcctttggcaccatgagcgccgaggccaaggccgtctgggaagagatcaagctcctcgtcccagagagcgccttcaagcagggctcgtggttcagcaagcccaagcctcacacccgtcgccaggactgggaccatgtggtcaagggcgccgacgtccagaagctgtgggtgcaggacgccgacggccagagccaccgcaaggtcggcggccgcctcgagagctacgacctgcgcgtcaaggctgttgatccctccgtgctgggcatcgacaccgtgaagcagtacagtggctatctcgatgataatgagaacgacaagcacctgttctactgtgtgtatcaccctgcttcctttccccatactgtctgtgtttcagcctcatgctgatgtttgtccttagggttcttcgagtcgcgcaatgaccctgagaacgaccccgtcatcctttggctgaacggcggccctggatgctcgtccctgacgggcctgttcctcgaacttggcccctcgtcaatcaataagaagctccagcctgtgaacaacccgttcagctggaacaacaacgccagcgtcatcttcctcgaccagccggtcaacgtcggctattcatactcgggcggctccgtgagcaacacggtcgctgctggcaaggatgtttacgccctcttgaccctcttcttccaccagttccctcagtatgccaagcaagacttccacattgctggcgagtcttatgccggccactacatcccggtctttgccagcgagattctgtctcacaaggaccgtaacatcaacctcaagtctatcctcatcggcaacggcctgacggacggtctgacccagtaccagtacttccgccccatggcttgcggcgagggtggctatcccgccgtcctcagtgagtcggagtgcgccagcatggaccgcgctctccctcgctgcacctccctcatcgagagctgctaccagagcggaagcgtgtggagctgcgtgcccgcctccatctactgcaacaacgccctgatcggcccgtaccagcgcacgggtcagaacgtctacgacatccgcggcaagtgcgaggacagcagcaacctctgctacagcggtcttggctacatcagcgactacctcaaccaacaatccgtcatggacgctctgggcgctgaggtctcgggctacgagagctgcaacttcgacatcaaccgcaacttcctcttccagggcgactggatgcagcccttccaccgccttgtccccggcatcctcgaggagatcccggtcctcatctacgccggcgacgccgactacatctgcaactggctcggcaaccgcgcctggaccgaggccctcgagtggcccggccagaaggccttcaacaaggccgaggtcaaggacctcaagctcgccggcgccagcgaggagtacggcaaggtcaagtcctcgggcaacttcaccttcatgcagatctaccaggccggccacatggtgcctatggaccagcccgagaactcgctggatttcctgaaccgctggctcaacggcgagtggtttgccaaggagtaa

SEQ ID NO: 16 - DNA, 652 bp, Scytalidium thermophilum
atgggcctccttgcgaacctcaccctcctcctggccgctgcctcggccgttatcgctgaggacaaggccgccgtgcccaagatcaccagcatcaagttctcgggcagcgggtgccagaaggaccccgccttctctggcacctttaacgaccccaaggttaccttcagcgagttcgtcgcgaacctcccgggcacgagccagactgtcaactgccaggcccacctccaggccgagggtgccagccagggctggcaagtcgctgtcaagagcaacaccgtccgcggccaggccgtgctgcagcccggcacctctctcacccacttcaccagcgtctacttcagccaggatcccgccaagactgtgagtattttcccacatggaatcatatcttttgggagatgacgcggatgactgactccctgtccaggaggtcttcaagggcacccttgcgaacaacggcaacaggaccgtcacccaggccgtcgttctgaccggcaagtcggacaacaacaaggtctggtcgccatgcatcggcaaggacgggtacactggtatcctcaacatcaacttccgcgctgttctctctggtgaaggcagggcctacttcaaggccaacactgagcagtgggacgtcgagtggaggaagtgctaa

SEQ ID NO: 17 - DNA, 1331 bp, Scytalidium thermophilum
atgaagcacagcgttcttgccggtctctttgcgacaggcgcgctcgcccagggcggtgcatggcagcaatgtggtggcgttggcttctcgggctctacatcctgtgtatctggttacacgtgcgtgtacctgaatgagtggtacagccaatgccagccgcagtcgaccacgttacggacaacgacaacgccaggggcaacatcgacaacaaggtcggccccggctgctacctcaaccactccggctaagggcaagttcaagtggtttggcatcaaccaatcctgcgccgagttcggcaagggagagtatcccgggctctggggcaagcactttaccttcccctcgacgtcgtcaattcaggtatgttgtgaagaaacggaagggagagagggggggtacaccatgaggtacaagagccaagtgttgactggttatatagacgcacatcaatgacggcttcaacatgttccgtgtggccttctcaatggagaggttggcacccaaccagctgaacgccgcgttcgatgccaactacctccggaacctgacagagactgtgaatttcatcacgagcaagggcaagtatgtgatgcttgaccctcacaacttcgggcgctattatgagagaatcatcacggacaaggccgccttcgccagcttcttcaccaagctggccacgcactttgcgtcgaaccctcttgtcgtctttgacaccaacaacgagtaccacgacatggaccagcagctcgtcttcgacctgaaccaggttgccatcgacgccatccgcgccgcgggtgctacctcgcagtacatcatggtcgagggcaactcgtggaccggcgcgtggacgtggaacgtgaccaacaacaacttggcggcgctacgcgacccggagaacaagctggtgtaccagatgcatcagtacctcgactcggacgggtccggcacgagcacggcctgcgtcagcacccaggtcggccttcagcgcgtcattggtgcgaccaactggctcaggcagaacggcaaggttggactgctcggcgagttcgccggcggcgccaactcggtttgccagcaggccattgagggcatgctcaaccacctccaggagaatagcgatgtctggacaggtgcgctttggtgggcgggcggcccgtggtggggtgactatatctactcgtttggtaagttgatgtttggcagctcggcggcgggcgtagcacacggcagaaagatgatatttccaatgctaacacatcttcgccgcagaacctccttcgggtattggctacacctactacaactcccttctcaagaaatacgtgccatag

SEQ ID NO: 18 - DNA, 988 bp, Scytalidium thermophilum
atgaggtggttcgggcgcgcgcttcttctcgcctcattggcggtgtcgacggtgacggcggagctcagtttcgtggcgaccgtgaagcaggacggcaaggaggtggatgcgtcgaagttggacttcaagccgatccctccaattcggcatcggaggcgaggggcgcaccgtggcggacggactgggcaagcagagcagcagccagaggcccgggacttgatcagctacagctccaactggtgcggcgcttcacaacacacgtccgacaaggccgacgcgatcaagaatgtctcgggctacttccaggtgccggatttgcgcctgcggccaggaaacccgccgccgcagttcgccgcggcgtggattggcattgacggcgccgagtgcaacacgacgctgctgcaggcgggagtgacgacggtggtgagtagtctttgctgtggtgtctcactcatcaatgatgaaccgacagactgactgtccgatgcaggtcaactccaacggcgggcagagcgcttcggcgtggtgggagtggtatccggaggcggccttcagcattgatgggctccgggtcaagccgggcgagtggatccaggtggacattacggcgtcgagcccgacgaacgcgatagtgtaagtgtagtatcctctggcgtgatgaaccgatagatgctgacccgactggagcagtatcatcaccaacattgaccggggcacgtcggtgacgctgcacatcaacaacggccccaagctgtgccgggtggacgccgagtggatcgtcgaagacttctacgagtcggagaagcaggtgccgttcgccaagttcaacgacgtctggttcgtcaacgtcggggcgcgtaccaacagcggcaagcggatcggcgtcgacggcgcggccatggtccacctccaggacgagaagggcaggacgctctgctcagccgagcgcttcgacaacaacaactttgtcgccatttcccatgactaa

SEQ ID NO: 19 - DNA, 2659 bp, Scytalidium thermophilum
atgaaggccctgactagaaggctggcgagctttctcgccatcaccggggttgtcggcttggagtatccgaattgcatcaacggaccgttggccaacaacacggtatgcgacgtgaccgcggcgccggcggatcgtgctgcggccttggtcaaggccatgacggtggccgagaagctggataacctcgttgagtatgtcttcatattgcgccatcctcagggttctcagtcattcatgctgacacggctgtcactagcatgagcaaaggagctccgcggctgggcctaccgccatatgcctggtggaacgaagcacttcatggcgtcgccctatcccctggggtcactttcaatccactggggtctgacttctctaatgcgacctcgtttgcaaacaccatcaccctggcggccgccttcgacgacgacctagtgtaccaggtggccagcgccatcagcactgaagctcgggcatttgcaaacgcagggcttgccggactcgactactggtccccgaacatcaacccgtacaaggacccgagatggggaagaggacatgaggtgacacctcgtcaggagtccttgtatattgttgaacgaggcaggctaacaattccaactagacaccaggcgaagaccctgttcgcatcaagggctatgtccgggcgttcctagccggcttggagggcgacggtcccgtccggagggtcatagccacatgcaagcattacgccgcctacgatctggaacggtggcaggacctcacacgacaccagttcaacgccatcgtatcgctccaagacctgtcagagtactacatgcctccgttccagcaatgtgccagggactccaatgtcggctccatcatgtgctcatacaacgctgtcaacggcactcctgcctgcgccaatacctatttgatggacgacatcctgcggaagcattggaactggacaggccataacaactacatcaccagcgattgctacgccattcaggtaacacgcggtccttgggtcccattactcttctctggcagcttgacttactctccctattagaacttcctccccagttggcacaactactcccaatctcccgcggaggcggttgctgctgctctcaatgctggcaccgacaccatctgcgaagttgccgggtggctaccctacgccgacgtcgtcggcgcctacgaccaaggtctcctctccgaagccgtcatcgaccgagccctgcgccgtctctacgaggggctcgtccgggtaggctattttgaccctccaacctcctcctccccagcggccgcctaccgctccctgtccgccgccaacgtaagtaccaccgagcaccagctcctcgctctccagtccgctctggacgggatggtcctcctcaagaacctcaaccaaaccctccccttacgcgacgcaatcccgttcccccctttcaccaccaccgctgcccaagtagcaatcatcggccactgggctgctcccaacgcccacatgctcggcggctacagcggcattccgccctacctcctgtccccgctccacgccgctgagttgctccaactcaactacacctacgcccccggcgcacccgtaatcaccaacgccaaccccgacacacccgacacctggaccaccccagccctcgccgccgcctcttcggcctcgtacatcctctactttggcggctctgacctgtcccttgcgcgcgaagacctcgacagggacagcgtctcctggccgcgcgccgagctcgagctcatcaccaccctctcctccctcgggaagcctgtcatcgtgatccagctcggcgaccagctcgacaccgcaccgctgctctccaacccgaatatctctgccattctctgggccggataccccggccaagcgggcgggttggccgccatgtacaccctgctcggcatctcctcgccggccgggcggctgccagtaacccaatacgccgaggagtacaccaagcgggtagcactgacagacatgcgcctgcgcccggacgcgcaaaaccctttcgatctcagcacgccggtccatctccggcccaacactagcagctcgttccctggcaggacataccgctggctcccgcacccctcctcctcctcctcttcctcatcatccctcgtaaccctccccttcggccacggcctccactacgcccccctccgcgccaaattcggcatcttcaccaccctctccctcaccaccgccgacctcctctcctcctgcaacttgactcttcacaacaaccaccccgacctctgcccattccccctccaaatctccgtctggacgaccaacctctccccatcaaacggaggtctcacgaccgactacgtcgccctcgttttcgtcaccggcgaatacggccccagaccctaccccgtcaaaaccctcgtggggtacacgcgccttcgagccatcgggccgggggagaccaaggcggccttggtggacatcaagctcggggacttggcgcgggtggacgaggccgggaatcgcgtcttgtatcctgggccgtacaagtttatgttggatgtcgcggaggacggaggcggggtggatgaggtggagattgaagtgacgggggaggaggtagtgttggagttttggcctcagccacaggggtga

SEQ ID NO: 20 - DNA, 1751 bp, Scytalidium thermophilum
atggcaaaggctctgaaatactttgcttggggcattgctgcccttgcctcgggcgccgctgccgctccttactgtgctccccagccgtcgacaacctctcaagagcctacgagcactccgtcgcctgtgccaggtccgcggacatttgaagcggaggatgccatcctcacgggcacgagggttgagtcgagcctcgccggctactctggtgtgtttgcatctactgaacatccttggtgggatattaagcggaaatgcctagactaactcgttctctgctgcttaggtaccggatatgtagcgggcttcgacgagcccaatgacaagatcacgttccatgtggacagcgagaccacgcggctgtacgacctcaccatccgcgtggccgccatctacggcgagaagcgcaccaccgtcgtgctcaacaacggcccggcaagcgaggtttacttcccggcgggcgattcgttcgtcgacatcgctgccggccaggtcttgctgaaccagggtgacaacaccatcgacattgtcaacaactggggatggtaggacatattgtgccgagaccgcgtcgcaagatatcccaggctaaccccatcaacacacaacaggtacctgatcgactccattaccatcaccccctccgccccgcggccccctcaccaaatcaacccctcccccgtcaatcctgccgccgacgacaacgcgcgggcgctgtacgcctacctccgctccatctacggcaagaaaatcctctccggccagcaggagctctcctgggcggactggatcgcccagcaaaccggcaaaacccctgcgcttgtgtcagtcgatatgatggactactcccctagcagagtcgaaagaggcacaagaggtaccgccgtcgaggaggccatcgagcaccaccggcgcggcggcatcgtctcggtgctgtggcactggaacgcgcctacggggctgtacgacacgcccgagcgccggtggtggagcgggttttacacggacgcgaccgacttcgacgtcgcgagggcactggcggatacgaccaatgccaactacacgctgttgatccgggatatcgacgcgatcgcagtgcagctcaagaggctgcgtgatgcgggcgtgccggtgctttggcgcccgctgcacgaggccgagggcggttggttctggtggggagccaagggtccagagccgtgcaagaagctctgggggattctgtatgatcggctgacgaactatcacgggctgaataacctgctgtgggtgtggaactcgatcctacccgagtggtatcccggagacgaaacagtagatattgtcagcgcggacgtgtatgcgcagggtaatggggtgagtttgatgcccacgttgatgatcatgttgggtttacgaagatactaaccgttcccagcccatgtcgacgcagtataaccagctcatcgagctgggccaggacaagaagatgatcgcggcgaccgaggtcggagccgcaccactcccagacctgctacaggcctacgaggcgcattggctgtggttcgctgtttggggagacacattcatcaacaaccctcagtggaactcgatcgagaccttgaacacggtaagcatgcttctctcgcactcttttctgggacaaagaatggaaagaacttgcctccgctgacattgtggtttcatagatctacaatagcgactatgttctcactctcgatgagattcaggggtggaggaacacgcaatga

SEQ ID NO: 21 - DNA, 1451 bp, Scytalidium thermophilum
atgaagctcacgacgccgtggcgggctgcgactggcctgttgggtaagtgttccgaatacttcgtggccggagtgtaaactatcaactaacactccttaccctgccgccagccgttgctagccaggcggccgcaaagacaattcagtactgccctggaaatgcggacgggttatgttttagcatcgccgtcccgacttcctccgcaagctccgggtctggaaacatctacttccaaatcaaggctccggcctctctgacgtgggcagccctggggacgggcagcacaatgcccggctccaacatgttcgtcgtgtaccgggacggccagggcaacgtgaccatttccgcgcggcgggctcagggctacaacaccccgctccaggacacgagcgagcaggcggcgcggctgaccttgctcgcgggcagcggggtcaacgaggacggatccttcacggccaatgttgcgtgcgccaactgcgactcttgggccaccggctccatgtccctggcgagcaccgccgcgccgtggatcggcgcctggaggcccggtgaccccatcagcacgacggacgccaactcgcgcatccctcctcatgatccggatggcactacccgcttccaggtcgacctgacgcaggcaaccatcaattctgatagcaatccgtttgtgagctccagctctggtgatgaagacagcgatgagacttcggacagtaacgacaacaatgataacagctccaacagcagcagtagcagtggtgttgtcgagttgggaagcaccatgagggacagggcagtgattgcacacggcgtgatcctagcactcgtcttcgccgtgctctacccgaccggttcgctgatgatgccgctcgtcaagaagtggtggttccatatggcctggcagtcgttcagcttcgggctcatgtggggaggattcgggatggggattggcatcgcgaacgagcgcgattcggtaagtttcgtctgctctcacccagcattgatcaaatcaagtcaagccaagccgagcgactgaccaactctctcctctcttcttccacagctcttcaaaacaacccacacgaccttcggcacggtggtcatcgccatgctcggcatccaacccatcctgggccatctccatcaccggtacttcctcaaacaccgcagccggggcgccatcagctacctgcacatctggtacgggcgcatcctcatgatcctgggcgtggtcaacggcgggcttgggctgcggctggcgcgcgaagaggagggttacgtcattgcctacagcgtggttgcgggcgtcatctttgccgggtacttcgggtacaaggctgcgacgacgctgacgaaggcgagcgaaggggcagacggagacggagacgaggccaaggagctaagggcaaggagcgagttgaggagagctcggcgtaacgaatccgcctga

SEQ ID NO: 22 - DNA, 1721 bp, Scytalidium thermophilum
atggtggcatcttcgcttgtgctcctgacggcccctttggcactcgcccctggggcgtgggcactgccgaacctgctcaacctgggtctcagccttggtagcggtcaggttgctgaggtctcgtgtgaggcggtcacagtcacggagacggtctatctgccagaaccaacggagaaggcgacttccactgaaacggcgagcagtgagaaaacaaccgcatcgccgaaaccagaaactcagatcacggcgtttgtgaatatcacagcgccaaaaaacaacacaggctttgcgggatatcgaaatgccctctatttcactaactggtctgtcttgtttaccaactttattggtctgagcgagcgaccaaggagctgactgatcattcagggggatctatggcgccgacatgcaaccacaagacattccggcagaccaagtgacgcatatactctatgcctttgccgacattgggccggatggagaggtgtaagtgggcttctagactgccttccgagccgcatactgacgctatcatagtaaatcgtccgacagctggtccgacacggacaaacactacgaaggagactcgtggaacgacgttggtaacaacgcctatggttgcgtcaagcagctgtacatcctgaagaagaagcaccgccagatgaagacgctcctctccatcggtggctggacttattcgcccaagttcgcgccagtcgctgccacggcggctggacgcaggcgcttctgcaaatccgctgtcaccctcatgaaaggtaagcaccccttcaaggtggattctgcatcctagctgttcagctcacatatcaaacccttccatcgcagattggggtatggatggcctagacattgattgggaataccccgccaacgcgcaggaggctcaagattatgtcgaccttctgaaaacctgccgtgctgccatggactcttatgccgctaagtacgcaaaaggacaccatttccttctcaccatcgccgcgcctgcggggccaaagaactacgacgtcctcgacattgaagccatggacccgctcctcgacgcctggcacatcatggcctacgactacgcaggcagctgggactcgacatcaggccaccaagccaacctcttccactccgagtccaaccccgaagccaccaagttcagcaccgaacgggctgtcagggattacattgcccgtggcgtgccctcgcgcaagatcgtcctcggcctgcccctttacggacgccagttcgaaaacaccgagggtcctggcaagccgtacaacggcattggctctgaagggtctctgcaaggccagccggggatttggctgtatcgcgacctgcctcgtccgggggctgaagagttctatgacgaagaagcgggcgcggcatacagtttccaaaacggcaccggtggtggctggacaggctggaacaagaacaccaatggcaagggcaggatcagtaagtacggagggggaaccatggtctcgtacgacacactcacaagcgcgaggaggaaggtggagtaccttttggagaacaagctgggtggagcggtgttttgggaggcagcgggagacaagaagggtgacgagagcttggtggcagcagtcaggcaagggatgggaaagctggagcagacgaagaactggctgagttatccggacagccagtatgagaatatccgggccgggatgccggggagttag

SEQ ID NO: 23 - DNA, 5221 bp, Scytalidium thermophilum
atgaagctgttcattcccttaccgtttctcctcctatattggttgatatgtggtgttcttgccaataccgtgcgcgatgaggctgtggccatccagccaaggtccgtacaggctcaccactcaaacggcatcacgcttgaggttcgcgacgaggatgatgaatccgacatcgagaagccccctcgtctggccaacgccactcaggcggacatcgaccgtgctcgtgccattatcaatgctgccatgaaggagttggctgtccgcaacaaggctcgtcttgaccaccctcttcgcaataactaccagctgcggcctggttcagggaagagaaagcggaatgatccaattcccgtcgaagatgcgccacctctgttcaacgtcaccgaggacatcgccgctgccgctgcccttgttgctgaggcagatgcctacgaggaggtcaagagcaacagtaccctgaggcgtcgggccaatattttgaggcgggcccgcgaaagcaactactggatggcgaacaggaagaaactgggcagctggccctttggcaacaacccaagcagtttcaccgtcttccgtgatgttaccaaatacggagccaagggcgacggtgtgacggtaagctatcctggctcgtgtgagagtgtgtgcggactagatctgacctggcaattattactaggacgacactgaagccatccggaaagccgtatccgatggaaacatgtgtgggcctggatgttatagctcgacaaccaagggtgccatcatttactttcctcctggtacgtttccttcattcagcctctgactgacgtgtctcactaaaaccaattaggcgagtatcttgttagcgggacaatcgagacgtactatgggacacagttcatcggcgatgtaagttcttaccaggttgagttcactggtggtgaatctaatgtcctcgactccacgactgtactaaccctggcctcctccaccggaaatagcccaacgaccgtcctgtgatcaaggcagcgtcgtcattcgtgggcctcggcgttatttcgaccgacaaatatgttgaaaatggcggaattggctctgatggaaacgcgaagcagtggttcatcaacaccgcgaatttctacaggcagattcgcaacttcgtgatcgatatcactgcaacctaccccgatgcttatgtctgcggtcttcactaccaagtggctcaagccacgagcctgcagtttgtcgagttccgcgcgaggaccggcacaacccagcagggcatctgtaagacaccgttctccttgatccaagttttgtgacatgcaactaacattctgcttaacagtcgccgagaacggtagcggcgggttcatgagtgaccttgtcttcaacggtggaaactttggtatctgtacgtctccagttcccgctcgagacttacattccttgccaatcttttagactaactggacgttcagatggtggtaaccagcagttcacatcgcacagactcacattcaacggtctgaccactgctgttcagctgatctgggattggggctgggtaagacactgctgccagcgccagccttggtggtcatgggacgatgaataggtactaactcaagaacaggcttggaagtcgatctacatcaaaaactgcaaaactgggttcaaactgatctccgaggacggagttcgcaataccggctctctcttactcaccgactccgtcttcgacggcgttgacacagccatcttgaccttcccagcacaagccaagttcggcgacggcacaacgggtcttacccttgacaacatcaaattcgtcaacaccaagcaaggcattgtcgacacagagggcacttcgtatttgggaaccagttccgatatcgacacttttgttctgggacgcatttacgtcgaccagaacaaactcgaagccctttccgtagcctaccgtacaaagcgagacccgttgctggttggggacaacccttggggcttgccgaagagtccttaccatgagagggccaaaccgcagtacgagaagcactcggcatctcaattccggcatgtcagggacagctgcaaaggagacggcaaaacggacgacacccagtgcatccaaaacatcttgaacgacagcgccggcaagaatatcgtcttcttcgatgccggatcctacatcattaccgacaccatcacagtcccgccaggctccgtgattgtgggcgagaactggtctcagcttgtggcctatggcagcaagtttggagatgccacgtaagtgacagccaacatgccaggttcagcaccacgaaagacgtaggaccactattaacccggaaacaggaagccgaggccactcatccgggtcggccagaaaggtcaggttggaaccgtcgagatgcaagatctgctcttcacctccaaaggcccaactgccggagttgtgtttgtggaatggaacatcaaatcgtccggcaacggaggggctgccatgtggggtttgtattcatttgtatttcttttctattttctctctgtttttaacttgtcccatagattgccatgtccgcgttggcggtgccgtgggcaccgacctcactgtcaaggagtgcccagctggcagccagaacgacaaatgcaaggccggtagtgccctcatgcacatcacatctggggcgtcgggttacttcgagaatgtctggctctgggttgctgaccagtaggtttttgcgttcctgctccgcgacacgacacgaactaacgcaacgaacgcagcgacattgacgaccctgattggcaagatgacaacaacttcatggtgagccaaacccggctacaacacaggaggggcctctccatggctaatgctgggtttcttaggaacaatgctccgtctttgtggccaggggtctgctcgtcgagagcaaggcgccagtctggctgtacggcacgtcgtctgagcatgccgttttctaccagtacgagttcttcaacgcgaagcatcttgtggcgtccatgattcagacagaatcgccctactaccaacccaagccaagcatgcctgagccgttcagaaacgcaatcggagctttgcccggagaccctgcctacaggtgtgacaagggcgagacctgcgattcctcctgggcactgcgcatcgtcaactcaagcgatgttatgatccacggagcaggcctctattcctggttcaatgactacacccaggagtgccgtaagtgtacacgcctaagcaggcgcacatacaagtcaccgctgacacatctttcatgttgtagtccagaccgtggactgccaaaagtcattgatcgatcttcaaggcaacttcgggaacgttcggattcacaacctcatcacaatcggtgcggtgaacatgattgagtccgatggcctcacgatcaaggcaaaggacaaccaagccgtggacttccatccgcgctggagccaaatctctgtcttcgacccacgccagttcacagacgcatgcacagggctgccactagataccaaccccgagattcgcgaaggggaatactacgcctaccaagttgacccaagaccccggcattctcagctcacaattgtcaatggatctccgtacgacttcaagctcctgggtgatcatcaataccaaatgctcgactgggactgggtctcagttcctgctggtaagtcagatctgtgctttcacggtcaatattgcgcaccttaaccgggctgctccaaactacctgatgctccagcaggatgctaacgtacatttcctacacaggatcgtcagctcagtttaaaattaactggggttacggctggccggttccaggagactcggctggagaggcctacttccagctcgatggcaccgacaagacgtttcacgtcgaagccgactgggtgggcagcaaacccggggagggtagggtttttctcagctataccaacctcgaaacacgcgacgttcgaaaagggtcgttccttgacctcggctggcccgtcactaacggaaacccaatccagtgggtgctgacgggcagcgaaaagtacggcttctggacaaacctcaaccctccggttacgtggatgcaggccattttggacgtcatcggcgaccgaaagctcaagtatatctgcatgccgggtagccacgacgcagggatcagccgaattgacggccacgctaacctgggcaacgcccagaacacgagaacccaaggcctcgacatctacgggcagctttatcgaggatctcggtggttcgatattcgcccatgcattggtaacggcgggaagtacatgctttgtcattatggtgaaaaggatatgatattccacggcgccaatgggctgtctgtcgatgacatgattgagcaaatcaacaggtatgctggttcaccccttgagttgttacatcagggctagcacaattggccccatctctggacgtagtcattctgacattccttgttcccgcaggttcatggatgagtacccaggtgaattggtcatccttgacgtcaacgacgagagtggctacgatacagatgttccgcacacactcccgggaatgggttactaccgtcttacgacaagacagtggcggcccattatcgagaggatccgcgacggcatcaagaagcaatgcaaaggcttcggaaccggctacctcggcaacattaccctgaacgagttcattggcgacggccagggttgcgttttaaccatcgtccgcaacatcagagcgcccatgcaacctgaaaggggcttatacgtctacggtcaacttggccagaccaatcaatactcggacacgaattccgccagaagaatggggccagatcagcttgcaaaaatgaaactccacagaagacttgggcccgaaggtcacgaagatacccgagatggcttttttatcctgtcgtggaccctgacatacaagcctggtgatctgttgtctctcatggatatggcctccatcgccctcaatactctcttctggcaagcctatcaccagttcacgccctattcttacccgaacgtcctctacgtcgactacctcggtttgccatacgcgctggacaacggatgggatgaacagcaattcttcaatgcgagctcaggccatatgatcgcccttgctatggcggtcaatcttcaaattgccagccaaaactgttatgtgggtggtggaaagatgccggtgtga

SEQ ID NO: 24 - DNA, 1251 bp, Scytalidium thermophilum
atgtacctcctactagcggccgccttgcttggcgccgccgtgctgtactacctctatcggtccgagtcccggctccacagaccctggatccccgacccggagtctcgcaagttcgccgagcgtccgctcccaccgccgatcgacgactcattcctctcgtcgcccaactacaccctgccgctgcgcacacggggccgcgacattgtcgacgccaatggccgccgctttaagctggccgcggtcaactggtacggcggctccgacgagctcttcgtccccggcggcctggacgtgcgtcaccgtgacgacatcgcccggaccatccgccgcatgggcttcaatacggtgcgcctgccctattcggacgagctggtcatcaagaaccccgtcgtggccccgcatctgctgagcgcaaacccggacctggccggccgccgcgccctggacatcttcgctgccgtcgtcgaagccctcaccgctcagggcatcgcagtcatcgtgaatgatcacatcacgactgccacgtggtgttgtggtgctgacccttgcgacagcggctgggcgaatgatcacatcccctccatcttctgccgcgtgcgccagaccgaggaggagtggatcgagcactgggaggaggtcatgaagcggttcgtcgacaacccgctcgtgatcggcgccgacctgcgcaacgaggtgcgcggcctgtgggggaccatgccgtgggagcggtgggcggcggcggccgagcgcgccggcaaccgcctgttgcgcatgaacccggactggctcatcatcgtgggcggcactgagtcgcaaaatgacctgacgggcgtggcgcgccggcccattgtgctcgacgttcccgatcgcgtcgtctactcggcccatgtctactcgtggagcggttggggaagcttgggcgggcgctacgctcagcggacgtacccgagctttgtccagtcgatgcgcaaaaactgggcgtacattgtcgagcaagacattgcgcctgtttggatcggcgagttcggagcgccggtgaaccccggccagggcgacgccaattattggcaaaacttgcttcgatacctcaaggtggtggacgccgactttggatactgggccatcaacccgcgaaagccccacgaaaacgaaaaggagtcgtacgccctcttggaggacgattgggaaacgcccgtgctggactaccggatgaaagacctcgtggagctgatgcgagcaggcctggagtag

SEQ ID NO: 25 - DNA, 2739 bp, Scytalidium thermophilum
atggcccccgggcctctgatgcttgctgtctctgctgtctctgctgcctctacctcgggcagcagttctgatcaattctccttgagcccatctgatcagctctctatccgtctctctttcgccctcgccatggcacgcactgtcgtggacatcaactccaactgggagttccgccaggcagacaaggaggattccaagttcctccctgtcagtcagttcccggccaacgttcacctcgacctcttgcaccacgggttgatcccggaccccttcattggcaaaaacgaactcgccgtgcagtgggtgggcgaggcgacatgggcataccggacgacgtttgtgtcgccgcccgtgccggccggagctcgcgccgtcctcgccttcgacggccttgacaccttcgcggttgtcaagctcaacggtacgaccatcctggagtcggacaacatgtttctgccctaccgggtcgatgtgtctgcccatcttgcccctgaagggaattccaacgagctgtccatcacctttgacagtgcttacctgcgcggctgcgagctggtcgagaagtacccggaccacaagtggggatgctggaacggggatacatctcgtctggcggttcgcaaggctcagtatcactgggtatgtgctttttttgctaccttgttccgaagcaccgctaactctctccagggttgggattggggtccgacgctcctgacatgcggcccatggcggccaatccgtctcgaggtgtacgaggcgcgagtggctgatctcgcggccgatgtagatgttgacaagtctctagaacgtgccgtcgtgactctgacggccgaagtcgagggaccggctgaccaggtccggttcgagttatccctgaacggcaagcaagttgcggctggaactgccgaggccaatgccccgactatctcgttcacactcgacaagccggccttgtggtaccctgcaaggtacggggcgcagccgctgtacgaggtgcgggctactgtgctacgcaatgacatcgagttggatacgataaccaagcacatcgggctgcggcgcgccgagctggtgcaacggccacttgatggccagcccggcacgagcttcttctttgaggtcaacaacattcccatcttctgtggcggcagcaactggatcccggccgacagcttcatcccgcgcattgggcggaagcggtatcatgactgggtcaagcttgtgctcgatggaaaccagggcatgctgcgtgtatggggtggcggcatctacgaggaagaagacttctacaacgcctgcgacgaactcggcatcctcgtctggcaagatttcatgttcggctgtggcaactacccggcatggcctgccctgcgcgattccatcgacgctgaggcacgagctaacttgaggcgactgcgacaccatccttgcatcgtcatctgggcagggaacaacgaagactaccagtaccaggagtcggcggggctcacctacgactacgccaacaaagacgcggagagctggcttgccacggacttccccgcgcgctacatctacgagaagatcttggccgatgcttgcgctgcgctggtgccgcgcaccgcctaccaccctgggtccccatggggcgctggccgcaacacgcatgacgcgactgtcggagacattcatcaatggaacgtgtggcacggcactcaggagaagtggcaggactttgacaagctggtcgggcggttcgtgtccgagttcggcatgcaggcgttcccgtcggtacggaccatcgaagcgtacctgccgcagggccgcgatgacccggaccgctatgctcaatcgtcgactgtcgacttccacaacaaggccgacggtcacgaacgccgcatcgccctgtaccttgcggagaacctacggtatgcgcctgacccgcttgagcagtacgtctacagcacgcaattaatgcaggccgagtgcctggcgtcggcgtaccggttgtggcgccgcgaatggcgcgggccgtcgcgagagtactgcgctggtgctctggtctggcagatcaacgactgctggccggtcacaagctggagcattgtcgattattacctccggcccaagcatgcctacttcaccgtcaagcgcgagatggcgcccatcacggtcggtattgcgcgccgtacacacaagcatcccatccccggggcgcatcgtcattctcgcatcggaactgagtcgcgcacacggatcgaggtttggggcagcaacctcaccctccaggatgcaaatgtcgactgtgtcctgcgcgcatgggatgtcgtaaccggcgaggagacgttctcccagacggtggcctcgggactggtgctgggtgccaatcggtcgaccgagatcgtcgagcgcgatgttcccgtccgcacgccgggggacgagggacgcacggtcgtggccgcatatctcgtgcaagacggtcggcatgtcgcgcgatatgtcaactggcccgagccgctcaagcacgtgcacctccagaagccgaaggcacttgaggcacgactgtcacctgacttcgcgtcagtccacatcagcgcggaagtaccggttaaaggcgtggcgctcgaaaccagcgatgaccgggtcgcgtttgacgataacttgattgatgtggtgccgggtgaggtggtaacggtggctgtacggggtgcaggcgcagacacgaagatcgggacgaggtaccttggtatgtgctaa

SEQ ID NO: 26 - DNA, 1504 bp, Scytalidium thermophilum
atgaagcttcagctgctcgtttcctcgggccttttggcccttgcctcggcggcttccatccaggctccggcgccgcgcaagtcgtacagcggctacaaggtcttccgcgtcgatgttggcagcaatgcggaccggctcaacgctgtcgtcgacaagctcggcctgtcgacctggaagggccgcccccgcccgaacacccaggccgacattgtggtgcctcctaacgtgcttgaggccttcgaggccgaggtcgccggtctcaacaaggtgaccatgcacgaggacctgggtctgtccattgaggacgagaccaccttcggcgtctatgctggtacgcatcctctcgggtccttgagtgatttgatgatagcctgcttatagccattcttttcttagctggctctgccaacgccacgtggttcaactcgtaccacgcctacgccgaccacctccagttcctgaaggacctgcaggcgtcgtaccctacccgctctgcgatcgttacttcgggcaactcgaacggcggcagggccatcacgggcatccacttctggggctcgtccggtaagggcaagccggctgttgtcttccacggcaacgtccacgcccgcgagtggatcaccagcatggtgagttacacggtccctgaatttgctgctagctggggttggagctaactgtgccacaggtcgtcgagtacttcgcctactacatgctgaccaactccgagacggctgaggtcaagagcttccttgacaagtatgacttcatcttcttcccgatcgtcaaccccgacggtgagcttcccaaccgatgtctcggcgcagccactccgaattctaacatgcaacaggtttcgtctacactcagaccaacgaccgcctctggcgcaagaaccgccagaccaactcgggcagcagctgcattggccgcgacatcaaccgcaactggccgtaccagtggtctgtctcgggcggcgcttcgaccaacgcctgcgctgaggactacaagggcaaagctcagagcgatgcccccgagactaccgctctcgccaacttcctccagaccaccaagaggaaccagggcgtcaagctcttcattgactggcactcgtactctcagctgttcatgactcgtatgtgtttccccatcttctcataccaatgcagcatggctaacattcatgttcccagcctatggctactcctgcacggcggtcgctcccaaggactcggagctgcagtctctggctaggggcgtggcgagcgccatccggtctgtgttcggcaccagcttcaagaccggccccatctgcaacaccatttacaaggccaccggcaacagcgtcgactatgccaacgacgttgtcggctccgagtacactttcaccgctgagctccgcgacaccggccgttatggcttcgtcctgcccgccaaccagatcctgcccagcggccaggaagcttgggctggtgttgcttacctcctcaagaacatgaaatag

SEQ ID NO: 27 - DNA, 1185 bp, Scytalidium thermophilum
atgaagttcaacgccatcgcgctgggcttcgtagccccggccaacgccctgctgcgttttggctgctctcagctcacgatccagcgtctggatcccctggtgacgccgggccagaacccgtcgcctcacctccaccagatcatcggcggcaactccttcaacgtctccatgcactaccccgaacacgacctcgttgagcggtctacctgcaccacctgccagtttacagaagacttttcgaactactggacggccgttcttttcttccgtgcgcgcaatgggacgttcaagcgtgtgcctcagctcgcgcagctgggcatggagggcacgaagggtggcatggtatgggtgcccacaaccgtcggagaaggtcacgtgctcaccactggtcctaggtcgtgtactacatgtcagacgctctcttcgacaccgctcaaaggtccacagtgacggccttcaagcccgggttccgcatgttcatcggcgacgccgccgccaacacgcgggatcaagtccgcaagtaccgccagctgacgtacacatgcatggagaactggggatctcgcgctcctgagagcgtcaacttccccaagcgcccttgcaagctgggcatcatggcgaaccaccgcttccctacctgctgggatggcaagaacctcgataccccgaaccaccaggaccacgtaagatcaggcctcaggctatcacttgtttgtcactatgcagctgacacgaaatctccaggtggcataccccgaggagggcaccttcgagtccggcggcaagtgcccggacacccaccccgttcgcctgccgcagctcttcctcgagaccgtctgggacacctcccagttcaacaacgaggaggactggcccgaggatggcagccaacccttcgtgtggtccagcggtgactccacgggctacgccaaccacgccgactatgtctttggctggaaggacgactcgctccagcgcgccatggacgcgcacacatatgtcgttgcgccgatgctcaagacccagagcatcgccgagcagaaccgctgcggcgagaacttcccggagatggtgtttgaggatatcgacggatgtgagtatcgcgaatccttggacatgggctgaggagaggctaaactccagacagggctcccggagctgccgggtggcaatcctatcttctga

SEQ ID NO: 28 - DNA, 6439 bp, Scytalidium thermophilum
atggccgtcctcttccaggtgttgccaatcgtcgtggcggtcgcgatcgtcatccgactgctgttcacaggtcgtcggccaaagggcctgcccccgggacctcctactcttcctgttatcgggaacctgcatctggtaggcttcatccaacttgaggttccacccaggaggccatactcaccttcgacagatgcctaagcgcgatgctcatctccagttcgagaaatgggcgcgggaatatgggcccatctacagcttgatcctcgggaacaagacgctcatcgttctctcgagcgacaaggctgtcaaggatcttctggacaaaaagagcaacatgtactctcaccgtcaggagatgtacattggccagaccctttgcagcggcgacctccgcatcttgatgatgggctacgatgcgcggtggaggatgtgtcgcaagctcgtgcactcgcttttgaacatctcggccgccaagtcgtacgtcccgtaccagatgctcgaaaacaagcagatgctctgcgagatggtgactcaaccggaacgctgcatgtacaacatccgccgctataccaactctctcaccaccaccatggtgttcggctggcgctctaccacctacgacgaccccaagatggtgcaattgttcgagggattttccgagtttgccgagctcaaccagacgggtctggccgccctggtcgacttctttccctggctgcgctggcttcctgacttcctgctgcctgtgcgtgccaaggccaaggagttgcaccgcaaggagaaggccctgtacctcggacactggctgcgggccaaggaggaaaccaaggctggcaccattatgcgctgcttcagtgaggaactcgttgctgtccagaaggccgagggcttctcggatgaccaggcctcttacatcacgggcaccctgcttgaagccggctccgacaccacgtccagcaccctgtatgctttcgtccaggcgatgctgctctacccggaagttcagaagaaggcccaggcaattatcgatgaagtggtcggtcccaaccgtatgcccaccatggaggatgagcgcgacctgcagtacatccgtgccatcgtcaaggaatcgctgcgctggatgcccacaaccatcatgggcgccgtaccgcacgctgttacccaagatgactggtacaacggctacctgattcccaagggcgccggtgtcgtcaacaacgtctgggccatcaacatggaccctgcccgccatcccgatcctcgccgtttcgaccccgaccgttacaaggacgacttccagtcccttgccgacgccgctgccaacccggacgcctccaagcgtgatcagttcaccttcggcgctggccgccgaatctgccccggcattcacgtcgccgagcgcagtctcttcctgggcgtctcgcgcatgttgtgggcgttcgacatcacccccgtgctcgacgcgcagggcaagcccatcctgcccgacccggacaggctcacgcagggtttcgtgtgccagcccgaggagttcccggtcaagattaccccgcgttccgaagcccaccggcagaaggtgattgaggagtggctggccgccgagaaggaatggctggacccggtgaccaagcagtggcgcgtgtgcccgctgggcccggccaaggggaggaaagagtgagaggacgggaacggtgaaggggatgatggattgataccacttgtggagggctttgctaggatgatatggcagcgatgaacttgcttttggatcagctggtgtgatgctgattgggttagcggcgttggggtttgcatgatgtggatttttttggatgaggtattattgccctgtgatactgggatgggtgagatccttgctccggaagtttgagcttcctccatcgtatgatgacaacttggattgctactgtattttgctctcgatcgccgctatagtggcagctgaatggttgttgaccttacctctttgccaagatgcgggcgttatattaaacttcttaccgtgcagtattccaggagcaagctagttgcatgatactacatgtctgtcgaaagaaaaaaaaacaataaaagaaaaaaaaataaatgtcaccgagatctcctctggcttactcggctggaaccagctgaaccaacacttcaaggaatgttggcatgcaaatgaccagactactgaatgtcagcgcagtgaggccgccgtcttacctagctatcacgctggataacctcctcaaccccggagttcttgaggattgaggaaagggcataaaagccgtcacctcactttgtttgagagatacaatctccctgtaggtgagagcatcccagatcgagagtgtgacacgactttccattacgtcctctttcatgctgacccagctgacagttcatactcagccgaggtcatgtctgccagcgctgccaacgaacgtctcttgcaggcgtggagcctcaaccactcccacttttccgccccgtatgtacatacctgtgccgttttgaagaagtcccctgttggtcaccagtctgctaactgcggtattgttcgttctagaccgtaccacagcgagattctcaccgtcaagctgaagagcggcaacatttgctacgtccaccgcaaagtttggtcacggccggaaaggccacacagctgggcttttcaattgtcgataacaccatcgacaccagcttgtacccggaccctgtagtccacactttcctacatttcctgtacagcaattcctacgatcccgagcggttcgaccctccgaatgtctggcacgacgagggagcctgcaaggacatgtccaaatcccggctgatcatcctcacaatggcgcacataactggcgcccgcgacctcctgggacctgtcatcgacaacctacacaagtgggtcaggctgatgggacccgttgtgttcctcaagtccctgcaggaggcctatcctcgggagatcacggccgatcaggcactgaacgaaaaatggagccttgccaacgaccttccgatggtgaaggaggacgagagaatgggacataactgggagtcaacggagtcgttcagagaccgaattcggcgcgagtggggcattttgagggatgaccaaccgcaggcatggcagttgaacggcgagttccacattgtgtgcgagagcttgaccgaggagtacatcaatgcgatggtgagatacactaaattcttgagcccattggtgccctctttggcaagaaggcttgatcgaagacagcatgcccgacatgtgtatggtaggagtgggagtgttgtgaatgaagaactcttgcatgaaactcgggttttggaggagttctcgcttcacttcctgagagcttagatctgcagccaacagagcggaggatccttggtgatcgcatttgatccgacatcatacactctgtctcagaggtcagctgtcgtgctgcaccaactaatgcacaccctcggctatggaacgagctgaacaactctttcgggaaggttatcatgtaggttctccgccagaaatggatcggggaggtgacgccgcctcaatcatctgatcgtcccctgagttccctgtaaccctaaccctaacataaattccgccgccatctcgctgtcttcttacaagccaaaccacctcccatcaagagcgtgtctcaacttgccagagcatccattctgccgcagcatcactcacgcctcatctcaactccgtcgttgctcgcctaaatcatgtctgtcagccctgagctcgagcgtatatggcagagatgagacgtcacacacttccccgaggtcactctgtataagttcccctttgtaaccttgaagtattcctccttgttcagtcagcctttgctatttggcgtgctaatgcctcaatctttgttactagaccctatcaaagtgacatcgtgacaatcaaactgaggagcggcagagagtgcccggttcacggtgggatttggaaaatgccaggcggaaaccttcagatcattggcaacaccgtcgaaatgacagcctatccgaccctgttgtccttacgttcatccatttcctgtacactggaacctacgatcccgcgaggctcgatccccccgaagacgatattgtgaatggctatgatgttgctgttgacctgttcaaaacacggctggtcatggccttggtggctaccctaaccggctaccgcgatgctttctccaagcccatcttcgacaacgttgaggtctggatcagacgcgtgggtccgctccggctgctccaggcgctggaggccgcgtatccatggcccgagaagatcccgagcaatccggcattgcagaaagcgctggcggatttccgtagttacaggatcgtggtagaggaggagaatatggatcctgcgacagggggggtgccattcgaagaccaacttagaacagcattgacgagatccggtcgttcggatgagatcgagagggagatccaaatcgttttttacccagtttcccaagctcgcgaagttggcgacggaggtgtacgtggccgggacacttgagactaccattccggatgtgccgaattagcgaacgcaattccatatgacgcaaggggactggatgagtaccccatctatatttggctggaactgtctatgaacgcaaacaaatacccccccatagatttgagcccctcgtcgctcttttatgaccagatactgtcagctgcgagggagcatgggcgaaggcataagattggggtgttgatatgacatagagcaggaagtactgctattatgtatgttgtgagagtgttgtggacggagctctgtcgcaagagagactcagaattcctgagagttcttgttttatttccttattagactgcccttattatagctgctgcgaagagacgtaactgtgtatccggtgaccataaaaccatgtccactcatgagcatcgtatccatagggatttgggttatcgtgacaaacatgatcatccgcctcgatgtattggcttcgaggcattgtattgggattacctcgtgaaatccttggttttggaggttcgtcagttaccccagccattgtcgcagctgaacgatttgtcatcagttcaccaaggtctctttctatcctaacccgcacttgaagcccagcaccccatgaaccccacgaagtatggctgacaactcgcatgcactcaccacggccccaccaatgccacatggtcacagagccaacggcatggcgatatctcgacctcagctttggaggtgcacaagctaatgcatgccccctccttaacaacgagctgaactcacggttgagggaaggttagcgtatacaactaccccgcctgaagcgtgtcaagattgtgaggccgccttcgtctccgtatctttgatggcctcctctgtctcctggttcctgaacagggccagggcatataagactccatctcgctgtcatctcgcccaacatccttctcgcaagtcagatcatttcagaccaagaagggagtgttacaacttgccagaccgttctgccacaacaaccctcagcctactccaaccgtcacccatctgaaatcatgtctgtccccgaaggcatgcaatccctctatgatgcgtggagcctaccccatcttccatctgacacgctgtatggatctacccccttttagagatttgtttattcgtaggcattctgtgtgctaacaagttcgttatagaccctacgacagcgaggtccttactgtgaagctgaggagcgggaacgtgtgctatgtgcaccgtgcgatttggtcaggacccgaaagccaaaagaacttgccctttccaatggttgacaacaagacggtggacatgagcacatatcccgaccctgttgtccatacattcatccatttcctgtacaccaaggtctactacgacccctcgaggctcgaccctgccgtactcgggccgccgtactacggcgatgggcttgccaagggaattttcaaatcggacttgataatgggcgtgctggctaccatgtctggctaccaggatcagctcttgccgcagatcttccccaccaccacagacttgctcaggcggagaggtcctctgctgtttcttgatgctctgaaagaggcatacccccgggagatcacggccgatccggaactgcaaacagcgttgacagatgcccagaaatacatgattgtgaaggagggccagaagtatattgacaaatgggaccggacaaaggactatgcagattggttctgggagcaactgaacattaatgactggtaccttcgagaaaagatgaagagagaattccaggacctgccgaatctcgtgatgggtgcgtatgcgaaggcgatggtaaaataccttgtcatcgagcccatcggtgccctctttgggaggaaatcgtga

SEQ ID NO: 29 - DNA, 1287 bp, Scytalidium thermophilum
atgcatcttcagaagcttgtctctctccttgccggctcggcgtacctcgccgccgccgcgcccgtcgccgagggtcgggatcctctgaccaccggcctccggctcatcaagacgtcgcccgaagaccccggcgtctgggtcacggaggaggagaagatctcagagtacaccgccaagggcaagcacttcatcgacatcaccgacattactgtatgatttccacccctcagaaaccacagtccagctcgctgacagccacaggacccggaggtccttgccttcctctccaccccggacaccgagtccgccattgaggcccgggccgtcgcctacccgaccagcgccaccaggcagtccgttgccaaccctctgatctcccaggttagcaccagcaacccgcagagctggctccagagcctcaccaagtacgtgtccttttctccaaaacaataaacacttccatgctaacaacacccctttagcttccacaaccgttactaccgcagcagctacggtacgcaggctgccgactggctcttcaacaccgccaagtcgatcgccgccgccagccactccatcaccgtcaccaagttcagccactccttcaaccagccctccatcatcgtcaagatcccgggcaacacgaccgacctggttattgccggcgcgcacttcgacagcacgggcgggtcgtcgaccgctcgcggcccgggcgccgaggacaacggctccggcaccgtcgtcatgctcgaggcgctgcgcgtcctggccaacgccaagttcaagcccaagaacacgctcgagttccacttctacgccggcgaggagggcggcctgcttggctccgccggcatcttctccaactacaagtccaaccgcaagaacgtcctcgccatgctgaaccaggatatggcgggctactcgcccagcggcttgctgaccatctactcggactatgtcgactcgtccctgtcctcgtacgtcaaggtcattgccaatgcctacatcggcacgactgcgagtgacaggtgcggctatggctgctcggatcacgcctcggctaggagcaatggcttcccgtcggcctatgttggcgacgagaagatgtcgaccagctcgccgtacattcactcgtctcgggacgtgagtttgtccccttgaagtgcggagaagagatgataatgttggctaacagctttgcagactatcgatcggatccagtggccgaccgtgctcaggcacgccaagttcaccctcgccttcttggttgaggcttcgtacctctga

SEQ ID NO: 30 - DNA, 1340 bp, Scytalidium thermophilum
atgcgactcacgtccatccttgcccttgcggggttaacatctgcttgggtcgtgccgccccaccaagaaacctccgtctctgatcggcccgggagattttctgtgaagcaagtcccgaacccgaactacgtcccgtgtggccctcttgttcttgccaaggcttacaacaaataccacgtccccattcccgaggagttgagggccgctgtgaagcatgtccgagagggctttgtcaagcgatccaacggcagtgttgaaaccaggccgggcgaccacggcggcgaccgagagtttttgacgcccgtgtctattggcactcccggaaagatcttcaacttggaccttgatacaggctctgcagacatgtgggtgtacagctcactgatgcctgagaatcaagtgaccgaacaaaccatctacgacccagacgagagctccacggcaaaggaacttgacggctacacctggcgtatcacttacggggatggcagccggtccagcggcattgtctacaaggacgttgttaccattggcggcctgaaggtgaagaatcaatccattggcgcggccttgaaggtctcggagtcgttcacgaaggatggcgaaaacgacggtttggttgggctgagttttggcaccctgagcactgtttctccacagcaacagatgaccctctttgagaacctcctggatgacctcgatggccccctctcttcaccgctgacctgcgggcaagcgccagtgagtaatctactcatatggccttctcgaaaccgatgttgttgggcaatgctgacatgatcattcggggaatagctggtcactacaacttcgggtacatcgactcggaagcctatgtgggcagtatctcgtgggtcccagtcaatgaccgccgtggctggtgggagtttctgattcccggctaccgcgtcggagacggttctgtggaggcaacggacctttggggtattgccgacactggcaccacgttgctcctcctccctaagaacattgtgaaggactactaccgcaaggtccctgggagctcgtggcacctgtggtacggtggctacgttgttccatgcgatgttgagatccccaacttctcgatggcgattggcgactctggcttcatgatcgaaatccctggagattacatcaagtaccagaagctgagtcgtgggtattgctacgggggcatccagagctctggccaggacgatgccatcatcggcgatgtcatgctgaagtctgccttcgtcgtctttgatgccgggttgaagcgcctggggtgggccaagaagaaggaactgaactttcccaagtcccaggatgattga

SEQ ID NO: 31 - DNA, 859 bp, Scytalidium thermophilum
atgctcctgaactcggtcatcggctcggccgtcctcctggccaccggcgccgccgcccacggtgccgtgaccagctacgtcattgccggccagaactatcctgggtaggtaacttcgtggaagcgaactcaggcagctcattcactaacacatacatcagctacaacggctacgccccgtccaccacccccaacaccatccagtggcaatggtcgacctacgaccccatctactccgccaccgaccccaagctccgctgcaacggcggccgctcggccacgcagtccgccccggctgctccaggtgacaacatcaccgccatctggcagcagtggacgcacagccagggccccatcctcgtctggatgtacaagtgccccggcgccttcagctcgtgcgacggctcgggccagggctggttcaagatcgacgaggccggcttcaacggcgacggcaagaccgtgttcctcgacaccgagcgcccctccggctgggagatcgccaagctggtcggcggcaacaagggctggaccagcaccatccccaagaacctggccccgggcaactaccttgtccgccacgagttgattgcccttcaccaggccaacgccccgcagtggtaccctgagtgcgctcaggttgtgattactggctcgggcaccaaggagccccctgcgtcttacaaggctgccattcccggttactgcaaccagaacgatcccaacattcgggtatgtgaagcctatttggagttcggctaaggcatgatactaactctaccccccaggttcctatcaacgaccactccatcccccagacctacaagatccctggccctccggtctggcgcggcgagtaa

SEQ ID NO: 32 - DNA, 867 bp, Scytalidium thermophilum
atgaacctcctctccgccgtcctctccttcctcgcgctctctgcagcgccggctgtcgccgtccgcccgtccccgggctgcggcaagaccccgcgcctcgtcaacagcggtagcaccaccacccctctccgcatgaccatcaacggcaagcagcgcgagtacttcgtccggctcccgcccaactacaacaacaacaacccgtaccggctcatcttcaccctccacgccctcggcggcaacgccgcccaggtcatctccggccagggcggctacgtcccctactacggcctggccaatctcgtcaacgacacggccggcgccgtcttcgtcgtccccaacggcctcaacaacggctgggccaaccaaggcggcgaggacgtcaccttcctccgctccgtcatcaccgccgtcgaagacgacctctgcatcgaccaagaccggcgcttcagcacgggcttcagctacggcggcgccatgagctactcgctggcgtgctcgctcgggtccgagctgcgcgccgtcgccgcgctgtcgggcaaccccatgatcagcggctgctcgggcggcaccggcagcgtggcctactacggccagcacgggacgcaggacttcgtgctccccatcagcggcgggcgcgagatgcgcgaccggttcttgcggaacaacgggtgcacgcccggccagcaggaggcgccggatccgccgcgcggcagcaacgccaaggtgaagacggtgtatcagggttgccaaaagcccgtggtctgggtggtgtttgatggacagcacacgccgacgccgagggagaatgggcaggccgatacgtggacgccgagggagacttgggagttctttagccagtttgagtga

SEQ ID NO: 33 - DNA, 1285 bp, Scytalidium thermophilum
atgtggctcaaacccgccctcgcggccctcgccgcgtcccagctcgcctgggcccaggagctgatgcgcttcggctgctcccagctgaccatcgaccggatcgacccgctcgtgaacccgggtagcatcccgtcgccgcacatgcaccagatcgtcggcggcaactcgctcaacgccagcatggaccccagagaacttaacccggcgacggcgtccacctgcaccagctgcacctactcagaggatctgtcgaactactggaccgcaaactgtactattcaccgccccgtcgtcgtcgttgatgatggctatggataaggaggggctgacgctgtgtggcgtaatagtgtatttccgcgctcggaacgggacgttcaagatggtgccgctctttgccaacctgggtctgaacgtcaagggcggaatgacaatttactagtgagttctggcttaaaaaaccaccgtcagtagcctgcttctgacatagcctgtccagtatccgcggctatcaacccagcgcgcgcgtcaccgccttcccgccggtgagtgaacgattcagcgtgtccggcagcacatgcatactctgtgtctattaacgcagctcagggcttccgcatgctcgtcggcgaccccaacaaccgcgaccccaacaaggtgccgcggcagctctgctaccgttgcgagcacaacatgcagcaagtccccttcggcggtgcgccctgcacgggctccgacaccaaggccttcccgcgcgacacgtgcggcggcggctggcgcgtcaccgtcaccttcccgtcgtgctgggacggcaagaacaccgacacgcccaaccacaagtcgcacgtgacgtacccggcgacgggcacgttcgagagcggcggcgcgtgcccgtccagccacccggtcaagatcccgcaggtcatgtacgagatcatgtacgacacgcgggcgttcaacaacaaggccgactggccggcggacgggtcgtcgccgtggtactggagccacggcgacccgaccgggtacggcatccacggagactacgtgttcggatggcaaggcgacgcgctgcagcgggcgatggacaccaagtgcgcgggcgatcggtgcccggcgctcaagcggcagacggatgccgaggccattgcttgcaccaagaagcagtttgcgcgcgagagtattggtgacacggagtgtatgtgtttctctgggatgtggtcagaaggccatgctaactcttgatacagggctcaaggaactccccggcgcgccgcctctggtttaa

SEQ ID NO: 34 - DNA, 908 bp, Scytalidium thermophilum
atggccctcaagtccttcgtcagccttctcgccgctgcaagcagctcgctgttcgtgctctcccctgcccccgcagccgccgaggagctggcgacgtgcggtaccactccgtacttcccctccgaatacacctgctacaacgaccgcacgctttgcccgttccagttcagccttcccaccaagccatgcgccggcggttgctactcgcccgagcagttcgagtgcctgatgccctcgggcaagggcaaggggaagaataacgaccgggacgacctgggagttctgcggccgctccccgaggctaccagccccttcaccctcaccgtctggggcccgcgctccatcttccgcaacatgacggtccgcgcttgcggagggtatctggctgtgggtgccaacgctaggcaatgccaggcctgcactgcggtggggggcacggattgtgagaagtacagcaacgtgacggctctcctgccggatggaaggatggtgagcggacacccctgttatcgttcgactaagcatagctctctttcaggaaagctgaccattcctagaactccggacaccccgacccgcagtactggtacgtcgacccgctctcgggcatcctgcgctacaccgagccggtgccggccaacgcaacggagcccatctggggctcggagtgggcgggccagaacgtcaaggtctacgagaacggcttgttcatctggaaccgcgaggacgcgaagacgcactactggatggcctgcctcgtcacgctcaacggcggcgtccacagcaccggccgctcgtggcgtctgtacgcgaccacgagcatgaacctggagcgcggagactgcgagctggtgagggtcgttgctaaggcggtgggggagaatgatggtgtgtatcagtacttgtag

SEQ ID NO: 35 - DNA, 2823 bp, Scytalidium thermophilum
atgcagatccgcgagttcctcctcgtctggctcgccagcgtgggcgggctggtggtgccggcctccgccgcgcgccgctcgacgcggaacaggctggcgcgcagccttccggagactcacgccgtgcacgagaagcatgagaagcggcatcttgagggatgggtcaagcgggggctggtggacgaggatctgacggttcctgtgcgcattgggttgaggcaggagaatttggacaaggggcatgacttgcttatggagatgtgagttctaggatgagttgagtccaaattcggagctgtccgggagtggattggatgttgggagcgttcctgttcatgcccctcaagcaggctgctgactcttttcgtgcctagatctgatccccgctcgccgaggtatgggaagcacctctcgccgagagaagtggtggaattgttcgcgcccaagccgcagtcggtggaaagggtcaagcgctggcttgtagaggctggcgtcgacgagaggaggctatcgcagtccgcgaacaaacaggtgagctggatgtttaaggggggaggtgttcgagcggctggttcctgctaacacaggactgggacttgcggccgacgtttagttcatccaattcgacgcgccagtgcacgaagttgaggacttgctcctgaccgagtaccacctgttcgagaacgtcgagacgggagctcagagcatcgcctgttctcagtaccacgtccctcacaacatctcccaccatatcgactacatcacgccgggcatcaacctggccacgagggactttgacgacaagatcacgaaacgcatgatcggtcgccgttcgttggttggcgatcttccgcggaagtaccggaaaggaaaagggggtaaaagcggggtgacgtccactgctaccaggccggcggcgacgggggcggcagagggacgcatttccttcgatgcggcggcgaacgggacccaaaagaagaagaagccggagcttgtcacagtggtcacggagagtggaaagcgcaagaagaagtgcaagccgaaagtgccagagccggaactgccagagccggatcacccgggagagctcgaccccttgtttctggtcacggggtcgtgcgcggatgagctgacgccgcagtgcattcgaggtgagtatttacttcagtggctttgtttatccccggatcaagaaactgattgacgctctctcagcgcaataccagatcccgaacaacacgagggcgagcaaggggaacgagctgggcatcttccagagcttgaaccagcactacagccaggaagacctggataactactggaaacatgtcacgcggtaagcgtttctgcactctttctagctcacttctctacggtgactgactgaactgcacagctgggtcccccacggcactcatcccgagcttcggtccatcaacggcgcttacgggccaaccaacgacacaagtaaggccggtgacgaggccgacctcgacttccaggtggccatccctctcgtctggccgcaaaagactgtcctcttccagacggatgatgagtggtatcagagggaccagcagcgggccgaaaccaggtatcctggcttcttcaacagtgagtgttcaccctccttatgaacaatctttgtgatatggttactcactactctctagccttctgggacgccctcgacggctcctactgcacgctcacggccttcaacatgacgggcaactgcaacaccccgcagtgccgcgacccggagtatcccaaccccaacgccgggccggaccagggcgcctaccacggcccgctcatgtgcggtgtccaccgcccgaccaacgtcatctccatcagctacagcggcaccgagcactcgtggcccgccaactacatgcgccgccagtgcttcgaggtgatgaagctcggcctgcagggcatcacggtcgtcgagtcgtcgggcgactttggcgtcggagggcgccgcttcgacacccacggcggctgcctcgggcgcaaccgcaccgtcttctccccccgcgtgctggggaactgcccgtacgtcctcagcgtcggcgccaccaccctcctcgagcctgagtactacaccccgggcacgactcccaagctgaccgaggtcgccgcggagcggttcgcctcgggcggtggtttctccaacgtcttcgagcgcccagcgtaccaggacaagcacgtgcgcgagtactttgagcgcgccaacatcacgcacttgggctacaacgcgacgggcgggcaggggtacgcggcgatccagccgcctcccgaacccgggaagctgttcaacctggcggggcggggatatccggacgtgagcgcgctcggggagagtttccgggtggtgctgcggggttggccgaaccgggtgcacgggacgtcggtggcgacgccgatttgggcgtcgatcctgacgctgatcaacgaggagaggctggcgagagggaagagcacggtggggtttgttcatccggttcttgtaagtgggattaattccgtttcgcctgagagacagcgagagggagagaatgaggggctgacagtcggtaactagtatgctcaccccgaggtgttcaacgacataaccgtcgggtccaaccccggctgtggcagcgatggatttccggtcaaggagggatgggatcccgtgacaggattggggtaagtcctacatagcctgacatatctcggcatcaaattgcggacgaggagaggagccaacggactaacggttgatgcaggactccaaattatccaaagctgctcgagctgtttttgagtttaccatag

SEQ ID NO: 36 - DNA, 1082 bp, Scytalidium thermophilum
atggttcaaacttggggaatggttggggctctctcccttttaccctgcctcagtcatgttcatgccttgcctgagcaatgcctcggcgtgtgtgtgaacagccatgatccgtccatcattcggcggggggatggcacatacttccggttctctaccggcggccgaattgccatccataccgctccaaacattaccggaccatggacgtacagaggagcagcccttccaggcggctcctcaatcaacctgcctgggaatcaagacctctgggtatgctgacccgtgccccttgccgtttaaaacaacagctcacacatattgctgccaggcccccgacgtagcccaagtcggaaatcaatactatctctattactccgtcagcacctttggttcacaaaactccgccatcggtattgcccgatcaaccagcctagatgccgggacttggacagaccttggctcaacgggggtggtctccaaccccagcctgccgtacaacgccatcgacggtaacctagtgaatgaggaagggaccagcaactatttcctcacgttcggaagcttctggcaaggaatccacagggtgcgcgtcacgccgaccaaacaacacggcagcccgtatcaggttgcgttcgaccccagggacccggccattgaagggccaacagtcttcaagaatggcgagttttactaccttttcttctccaagggctcgtgctgcggctacgacaggaacaggccgccggcgggcaaggagtaccggatcatggtctgccggtcaacttctccggttgggcctttcgtcgacaaacagggccggtcatgccgcgacggcggcggcaccttggtgcttggaagccatgactgggtgtatggcccgggtggccagggagtctaccgggaccccgtacttggaccggtgagttttcgtggccccgatgtgtggcactggagcggtgtagctaatctgtgaacagatcttgtactatcactacgttgatactcggattgggtttgctgacggccagaaaaagtttggttggaatcgcatcaacttctcgagcggctggccggttgtgtga

SEQ ID NO: 37 - DNA, 823 bp, Scytalidium thermophilum
atgctcaagtctgctctcctcctcgcggccgcggccgtttcggttcagtcggcttcgatcccgaccatcccggcaaaccttgagcctcgccagattcgctcgctctgtgagctgtacggctactggtccggcaatggctatgagctgttgaacaacctttggggcaaggacaccgccacgtccggctggcaatgcacctacctcgacggcaccaacaacggtggcattcagtggagcaccgcgtgggagtggcagggcgctccggacaacgtcaagagctacccctatgttggcaagcagatccagcgcggccgcaagatcagcgacatcaacagcatgcgcacgtcagtgtcgtggacgtacgatcggaccgacatccgtgccaatgtcgcttatgatgtcttcacggctcgtgatcctgaccatcccaactggggcggcgactacgagctcatgatctggctcgcccgctatggcggcatctaccccatcggcacgttccacagccaggtcaacctggctggtcgtacctgggatctctggactggctacaacggcaacatgcgtgtctacagcttcctccccccgtccggcgacattcgtgacttcagctgcgacatcaaggacttcttcaactaccttgagcgcaaccatggctacccggcacgggagcagaatctgatcggtatgttcattgtaattccaggtcggcagcggacttgtactgacgttgagtgtcgcagtctaccaagtcggaaccgagtgcttcacgggcggtccggccaggttcacgtgcagggacttcagggctgacctgtggtaa

SEQ ID NO: 38 - DNA, 945 bp, Scytalidium thermophilum
atgatgaggtccatctatctcggtctggcagcagcactctgctggacaggcgcactcagcgtcaacctcgacgcggcgaaggatggcattgatgtggtggctctcgctgcgcaacgccgtgccctgaaggctcgctttggggccagccacgtcgcttcccttcttggtattcgccaatcgggtatccaatgtggtcccagcgctggcagatgcccgaacgatctgtgctgctccgactacggttggtgtggtgattcggtcgatcactgccacccactcttcgactgtcagccccagtatgggtattgcggatggccgaggctgcctccgaccaccaccgttgttccgactactagcagcacctcgacgagcagcacttcgacgactaccaccatcactccgagctcctcgtctacgtcgacgacaaccacctctcagtccagcaccagcagcactagcacctccatcatccccttccctacgggcgagctccaagtgaccaccaacggccagtgcggaaacaacaccgtctgcatcggcaaccccaacttcggcccttgctgctcgcagcatttctggtgcggttcgtccatggagtactgcggccccggttgccgctcggagttcggtgcctgtgtcggcattccgggcctgccgggctaccctgcgggtaatgaaactagcccggttacaagcgccgttcccagcagcaccaccaccacctcaaccaccaccaccagcaccactacctcggcggcaccgtcgttcacccttccgcctggccagcgctctagcaccgacggtcgttgcggcaacggcgtcaactgccttggctcacccttcggacgctgctgcagtcagtttggctggtgcggtgatggtgatcaatactgcccgtacatcgtcggctgccaacctgagttcggttactgcgacccacggtag

SEQ ID NO: 39 - DNA, 2612 bp, Scytalidium thermophilum
atgaggtttctcctcgccctctgggcggtcctggccgtcgtccaggcggcctactggatggaagacctcaagcgtcagggcgtcgcaccctacagcattgtccctgagtacaaggttttccgcaatgtgaaggattggggagccaaaggagatggaggtaagcctaccagcactctcctgcttggaacctggctgaccacttttctagtgaccgatgacacgatcgccatcaacgctgccatcagtgacggaggccgctgtggcggtaagacctgtgccggctcgaccactactccggcaattatatactttcctcctgggacgtacatcgtctccaaccccatcgtcggctactactatacccagatgatcggcgatcccaccgacatgcctgtcatcaaggcttcttcttccttcccgaccggccttttggccatgattgagacaaatccttaccagagcaatggcagtaagtggagttttatcactacttaattccattacctcactgacagtgtctcctccttcgcagagctcaacttccagtccacaaacaacttcttccgccaaatccgcaatcttgtcttcgacatcaccgatgtcccgggctcggcagctagccttcactggccttcgtcccaggctactgttgtccaaaactgtgtcttcaagatggcgaccggagtcgatctagaacacacaggcatcttcatggaagagggcagtggaggtctcatggccgaccttgttttctacggcggcaaatatggcgcccagttcggcaaccaacagttcacgatgcggaacttgagcttttacggctcggatactgccatccagcaaatctggaactggggctggacctataaatcgctcaacattgtcgactgccgcgtgggtatcgacatgtcgtcgacagatatcggctccgttaccctccttgacagcacgttcagcaacgtcgaaaaggctatagtcacgagccgcgctcccgggaacgccactggacttgggtcgttggtgatcgagaatgtggagtacaagaacgtcccgacagtcttggagagtgctgatgggcaacccatccttttgggagatggaaatggcgtcgtttacgacaccggttacgcgatggcaagtgtccgccacaccttttccaacacaagttgctaaccatctcgagacagggcaacacctatgcccccaggggaccttcgctggtcgaaggccgttcgttcgacttctctcagcctgcccacctgaagcatggggatcgttattacgaacgctcaaagccgacctacgaggacgtgcccgcctcagcatttgtttctgctcgagatgctcatgctgccggagacggggaaactgatgataccaaggctcttaatgagctcttccgggctgcggctggcagtctggccatcgtcttcctggatgccggacactacaaggtcaccgacaccgtctttattccccccaacattcggattgttggcgagagccttgccacagtgatcctgggggttggcgagaagttttcagatcccagcaacccacggcccgttgtcaaaattggcgaacctggtgacgtcggcttcgtcgagatcagcgacgtgattgtgtccacccaaggcccgaccgctggcgccatcggcatccagtacaacctcgagacccaagtttctgacgacctttgcagcggaggccaaaccccctccggcctctgggacgtccacgtccgcatcggcggcttcacgggatcctccctccaagtcaacgaatgcctcaagacacccgagcaattcaactacatcaaccccaactgcgtggctgcgtacatgggcatgcacatcacgcccaccgcgcgcaacctgtacatggagaacaactggatctgggtggccgaccacgacattgacgactggaacgcgacgcagatcagcgtctttgccggccgaggtttgctcgtcgagggcagccgccgcatttggctggtcgccagctccgtcgagcactttgcgctgtaccagtaccagctcgtcaacgccgaggacatctggatgggccagatccagaccgaaacgccctactaccagcccaaccccctcgcgccgtacccgtttaccgagcgcaatgaggcgctccacgacccggactttgacgccgcgtgcgtgaacgacccgacctttcccggcggcgcgccctgcgccatggcgtggggcctgcgcgtggtggattccaaaaacgtggtggtctttggcgcggggttgtacagcttctttaataactactcgaccgcctgcagcacggtagagtccggggagaattgccaggccagaatcttttcggtcgagcagagctcctcattttcattatcatcatcggcattgttgtcgtccagagatgacagcggcgatgatgatacggccgtagaggtgtacaacctcaacacgatcgggtcggtgagcatggtgacgttgggaggcgaggacatggcgacgtgggaccagaacagggccacgtttgcgagcacgctggcggcgtttaggtcggtgccaggtgataatgataataatgatgatgatgaggtggaagcggagagggtttga

SEQ ID NO: 40 - DNA, 3458 bp, Scytalidium thermophilum
  misc_feature (424)..(3073): n is a, c, g, or t
atgctgtacagcaccgttctcctgggcgtgttcgccatgaaggcggccgctctcccgcaggcagtttgggtttgcggtaacgggtaagtatctatcacgcatacctgctctccgacctcatggacccccctatctcctccattggagacgtatggctaaccatggatctgttgtagtgtcgtcgaccctggcgaggaatggtaagcgtttacaccttcgaccatggctctttctgaaacagacattaactcgttcgtcagtgatctgggctgggggcgcaacggcgcgtataatagcggctgcagtttgaattgtaagacggtgctgattatcgagcaagtgtgcggcaacggcgtcgttgagggtgacgaggagtgtgacgacggtcctgacaacggcaaggacacctccgactgtaatgccnnnnnnnnnnnnnnnnnnnnnnnnnnnnnnnnnnnnnnnnnnnnnnnnnnnnnnnnnnnnnnnnnnnnnnnnnnnnnnnnnnnnnnnnnnnnnnnnnnnnnnnnnnnnnnnnnnnnnnnnnnnnnnnnnnnnnnnnnnnnnnnnnnnnnnnnnnnnnnnnnnnnnnnnnnnnnnnnnnnnnnnnnnnnnnnnnnnnnnnnnnnnnnnnnnnnnnnnnnnnnnnnnnnnnnnnnnnnnnnnnnnnnnnnnnnnnnnnnnnnnnnnnnnnnnnnnnnnnnnnnnnnnnnnnnnnnnnnnnnnnnnnnnnnnnnnnnnnnnnnnnnnnnnnnnnnnnnnnnnnnnnnnnnnnnnnnnnnnnnnnnnnnnnnnnnnnnnnnnnnnnnnnnnnnnnnnnnnnnnnnnnnnnnnnnnnnnnnnnnnnnnnnnnnnnnnnnnnnnnnnnnnnnnnnnnnnnnnnnnnnnnnnnnnnnnnnnnnnnnnnnnnnnnnnnnnnnnnnnnnnnnnnnnnnnnnnnnnnnnnnnnnnnnnnnnnnnnnnnnnnnnnnnnnnnnnnnnnnnnnnnnnnnnnnnnnnnnnnnnnnnnnnnnnnnnnnnnnnnnnnnnnnnnnnnnnnnnnnnnnnnnnnnnnnnnnnnnnnnnnnnnnnnnnnnnnnnnnnnnnnnnnnnnnnnnnnnnnnnnnnnnnnnnnnnnnnnnnnnnnnnnnnnnnnnnnnnnnnnnnnnnnnnnnnnnnnnnnnnnnnnnnnnnnnnnnnnnnnnnnnnnnnnnnnnnnnnnnnnnnnnnnnnnnnnnnnnnnnnnnnnnnnnnnnnnnnnnnnnnnnnnnnnnnnnnnnnnnnnnnnnnnnnnnnnnnnnnnnnnnnnnnnnnnnnnnnnnnnnnnnnnnnnnnnnnnnnnnnnnnnnnnnnnnnnnnnnnnnnnnnnnnnnnnnnnnnnnnnnnnnnnnnnnnnnnnnnnnnnnnnnnnnnnnnnnnnnnnnnnnnnnnnnnnnnnnnnnnnnnnnnnnnnnnnnnnnnnnnnnnnnnnnnnnnnnnnnnnnnnnnnnnnnnnnnnnnnnnnnnnnnnnnnnnnnnnnnnnnnnnnnnnnnnnnnnnnnnnnnnnnnnnnnnnnnnnnnnnnnnnnnnnnnnnnnnnnnnnnnnnnnnnnnnnnnnnnnnnnnnnnnnnnnnnnnnnnnnnnnnnnnnnnnnnnnnnnnnnnnnnnnnnnnnnnnnnnnnnnnnnnnnnnnnnnnnnnnnnnnnnnnnnnnnnnnnnnnnnnnnnnnnnnnnnnnnnnnnnnnnnnnnnnnnnnnnnnnnnnnnnnnnnnnnnnnnnnnnnnnnnnnnnnnnnnnnnnnnnnnnnnnnnnnnnnnnnnnnnnnnnnnnnnnnnnnnnnnnnnnnnnnnnnnnnnnnnnnnnnnnnnnnnnnnnnnnnnnnnnnnnnnnnnnnnnnnnnnnnnnnnnnnnnnnnnnnnnnnnnnnnnnnnnnnnnnnnnnnnnnnnnnnnnnnnnnnnnnnnnnnnnnnnnnnnnnnnnnnnnnnnnnnnnnnnnnnnnnnnnnnnnnnnnnnnnnnnnnnnnnnnnnnnnnnnnnnnnnnnnnnnnnnnnnnnnnnnnnnnnnnnnnnnnnnnnnnnnnnnnnnnnnnnnnnnnnnnnnnnnnnnnnnnnnnnnnnnnnnnnnnnnnnnnnnnnnnnnnnnnnnnnnnnnnnnnnnnnnnnnnnnnnnnnnnnnnnnnnnnnnnnnnnnnnnnnnnnnnnnnnnnnnnnnnnnnnnnnnnnnnnnnnnnnnnnnnnnnnnnnnnnnnnnnnnnnnnnnnnnnnnnnnnnnnnnnnnnnnnnnnnnnnnnnnnnnnnnnnnnnnnnnnnnnnnnnnnnnnnnnnnnnnnnnnnnnnnnnnnnnnnnnnnnnnnnnnnnnnnnnnnnnnnnnnnnnnnnnnnnnnnnnnnnnnnnnnnnnnnnnnnnnnnnnnnnnnnnnnnnnnnnnnnnnnnnnnnnnnnnnnnnnnnnnnnnnnnnnnnnnnnnnnnnnnnnnnnnnnnnnnnnnnnnnnnnnnnnnnnnnnnnnnnnnnnnnnnnnnnnnnnnnnnnnnnnnnnnnnnnnnnnnnnnnnnnnnnnnnnnnnnnnnnnnnnnnnnnnnnnnnnnnnnnnnnnnnnnnnnnnnnnnnnnnnnnnnnnnnnnnnnnnnnnnnnnnnnnnnnnnnnnnnnnnnnnnnnnnnnnnnnnnnnnnnnnnnnnnnnnnnnnnnnnnnnnnnnnnnnnnnnnnnnnnnnnnnnnnnnnnnnnnnnnnnnnnnnnnnnnnnnnnnnnnnnnnnnnnnnnnnnnnnnnnnnnnnnnnnnnnnnnnnnnnnnnnnnnnnnnnnnnnnnnnnnnnnnnnnnnnnnnnnnnnnnnnnnnnnnnnnnnnnnnnnnnnnnnnnnnnnnnnnnnnnnnnnnnnnnnnnnnnnnnnnnnnnnnnnnnnnnnnnnnnnnnnnnnnnnnnnnnnnnnnnnnnnnnnnnnnnnnnnnnnnnnnnnnnnnnnnnnnnnnnnnnnnnnnnnnnnnnnnnnnnnnnnnnnnnnnnnnnnnnnnnnnnnnnnnnnnnnnnnnnnnnnnnnnnnnnnnnnnnnnnnnnnnnnnnnnnnnnnnnnnnnnnnnnnnnnnnnnnnnnnnnnnnnnnnnnnnnnnnnnnnnnncggcgttgtcgaagatggtgaggagtgtgacgacggccccgacaacggcagcgctacctccacctgcgacgcgacctgccgcctcaaggacacgggcagcggtggcacatgccagacgtgcgaccccaaccccttcctcaaccagtgcaccatcaccacctcgtgcatcaacacgcatccctacggcaagtactactgcgcctgccgcgccgggtaccgcgccgacggcctcgccccaacgaaccctcgccagttccgcctcaagttcatcggccaggagtaccgggtgtttgttgcccccggcatcgagtgcaacacgttgtgcacgaacccgttcccgggcccggattcgtgccaggaggtgccggtgggtgaggggtgctga

SEQ ID NO: 41 - DNA, 858 bp, Scytalidium thermophilum
atgctgtctctgtcgactcttgccctggccggcctcgccgtcgttggcacacaggccacgccggtcgaggtggctcgccgggcgacccctaccgtctaccttgccggtgacagcaccatggccaggatgagcggccagcaccaaggtgagttgtgctgccaatgatccttacgtcactattacagagagaagcttacacctgcaccaggctggggcgagtatctctcgcgctacatcaccctgcccgtggtcaacaaggccatctcgggccgctcggcgcgcagcttcaccaacgagggccgcttcgccgagattgagcggctgctgcagcgcgacgacatcgtcatcatcgagttcggccacaacgacggcggctcgcccaacaacgccaacgacaacggccgcagcgcctgcggcggcaccaactacgaggtctgccgctccggcaagacgggtgagctcgtctacaccttcaaccagtacattgagacggcggcaaggtccttcatcaacaagggcgccaaggtcatcatctcgtcgcagacccccaacaacctctgggagggtggcacgtattacggcggtgccccgccgcggttcgtcccgtacgcccagctcgcggcgcagagggtcggctatggcgcgagctttgtggatcacttccaggctgtggcgaacatgttcaagaggttgggcaaccaggcgacgaacgccctcttcccggtcgatcatacgcacacgagcccgtacggtgcggacctggtctgccaggcgtttgtccaggcggtgtggagggactttaatggcacgacgccgctgaagcagtatgtgagacagccggtgccgaatgtgttttga

SEQ ID NO: 42 - DNA, 1104 bp, Scytalidium thermophilum
atgaggaccgtcttcgccgccgcactggcagcactcgctgcccaggaagtcgccggccatgccacgttccagcaactctgggttgacggaaccgattatataagtgccccccctttctcgtttccatccgatatcatgacgctgacacccccagcacggcagcacctgcgtccgcctccccgccagcaatagccccctgaccgacgtcaccagcagcgacttcgcctgcaacatcggcggccggcgcggcgtgggcggcaaatgccccgtcaaagccggcggtgtggtcacgatcgagatgcatcagcagcccaacgaccggaactgccgcagcgaggccatcggcggcatgcactggggtccggtgcaggtctatctcagcaaggtccccgacgcgtcgaccgccgagccgacgcaggtgggctggttcaagatcttctccaacgcgtgggccaagaagcctggcggtaactcgggcgacgacgactactggggcacgcgcgagctcaacggctgctgcgggcgcatggacgtgccgatccccaccgacctggaagacggcgactacctgctgcgcgccgaggctctggcgctgcacgccatgccgggccagttctacatgtcgtgctaccagatcaccatcacgggcggcacgggcaccgcgaagccggcgaccgtccgcttccctggagcgtataccaacaacgacgccggcatccgcgccaacatccacgccccgctgagcacctacatcgcgcccggcccggaggtgtactccggcggtaccacccgggcgcccggtgagggctgcccgggatgtgccaccacctgccaggttggctcgtcgcccagcgcgcaggctccaggccacggcacggccgtgggaggcggagctggtggcccgtctgcttgcaccgtccaggcgtatggccagtgcggtggccagggatacacgggttgcacggagtgcgcggtaagttgcgacttttcttggaagtaggatcgcaaatggaacggatgcgctaacacttgtgggtgcaggatggcttcgtttgccgcgaggtctcggccccgtggtactctcagtgccagcctggtttctaa

SEQ ID NO: 43 - DNA, 822 bp, Scytalidium thermophilum
atgctgtggacttcacttgttgggctgctcgcggccgtcggcactggcaagtgatccctaatcatactcatccgaggcgggagcacatgaacatcatgatcatgattatgctaaccgccctctagccacggcgcagtccacgcccaatgcccgcgtttacgaccccgacacgggcctgaccttcacatccaacttccagctgtacaaggccgacgggcgcggcatcacctaccgcatcgccatccccgagggtgctgagtactacacgtccttcgacgtcgtcgtccaggccatcctccccaacgacgtcggctgggccggtctcgcctgggcgggcaccatggtgcggaacccgctcctcgtcgcctggcgcaacaacaacaaccaggtcgttctctcctcgcggtgggctaggtacgtaccttatcaatcccctccatgagcctagggcgtcctcaattcgtcgccaaacttgctaaccacctcatcctctcttccagctcctacaccgccccccagccgtcgagcgcggcgcagtacacgctcatccccgcaggcaccaagaacaacgggacgcactggcagtacacggcgctcgtccgcggcgtcaccgcgtacgaggcgaccccgggcgcctggcggtacctgaacccgcgcggcggcaaccgtctcgctttcgcctactcgcccaacaagccgttcaaccccaacgaccccaactctggctttacgtatcacgaggtccacggctactggtcacacgacttcgcgggggcgcagaaccccaacttcaatgagattgttcagcggttgacggtgtaa

SEQ ID NO: 44 - DNA, 927 bp, Scytalidium thermophilum
atgacctccaaagtcatcatcgtcaccggcgccagccgcggcatcggcttggccgtggccaagtccctcctggcagcgtcccacaaggtggtcctggtatctcggtccgccgagaagctccaggaactcaaagatgcttatcccaaccaggttgcttttctcgcggccgacataacagcggacgatgtcagtttgcccagacttacctgacttccctaccaatggatgttgacaactgatccttacactatccccagacagctcaccgcaccaccgagcttgccgtgctcacctttggcaggctggacggcgttgtggtgaaccacggcgtgctttcccccattacccgcctcgctgactcctcggtggaggagtggaagaagctttacgatgccaacctgttcagtgccctcgctctggtgagtatccccgggccagcccctgaaccaatgcatctagtagcagcaaatggatgaaagctatcggcttatgtatcccaaactaacacctccaaagacaaaatccgccatcccccacctccgcaccgcccacggccggataatctacgtctcctccggcgccgccaccggcgcctacgttgcctgggccgcctacggctcgtccaaagccgcgctgaactcgctcgccaaacacgtgggcgtcgaggagcccgatatcacgaccgtggccatcagtccgggccgcgtggacaccgacatgcagaaggagctgcgcgagaagggcgcggccatggcaaagaaggactacgagggattcgtggcggactttgaggaggggaggcttatcaagcccgagtttgccggggcgattattgccaggttggcgacggatgtgaaaacggagttgtcagggaggtatttcaagtgggatgccccagagttggaggagtatcggaaagggctgtga

SEQ ID NO: 45 - DNA, 666 bp, Scytalidium thermophilum
atgaagaccaccaccaccgttctcgccgccctggccgctcccgcggccgccctcaacccctgggctcgccatgagaaccacccgaccctcaccctcacggttcccgagccgcccgaggtgacgacctcgacctggacctggtcccccaagtggccgcacaagtccaagacgaccaaggagcccagcctgaccaccagcaccatctactcgaccaccaccttcaccgtcacctcgtgcgagccggccgtgaccgagtgccctgagccctccaccgtgctgaccaccgtggtcatccccgtcagcaccaccgtctgccccgtcgaggaggagcccgagcccactcctgagcccgagcctactcctgagcccgagcccgagccgaccccggagcccaccccggagcccccgacgagcttcgagaccgtgactactcctgaggttcctcccccggtggagaccggcgtcgaggagcctgagcagcccgaggagcctgaggagcctgaggagcctacgcccaccggctcgttcgttgagcccccgccgaccccgactgagaccaagaccgtggaaccgcccgtcgtgacggccggcgcggtcagcggcaaggttgtgcagaaggccggcgcggcgttggcgggtattgccatcgctgctgctctgctttaa

SEQ ID NO: 46 - DNA, 3064 bp, Scytalidium thermophilum
atgttcaccaagactctcgccgtcacggccctcgccgtggcccctaccctagcctctaccgccgtcaacgtctactggggacagtcaggcacagaggagcagagactcaggaccttctgtgagaccggcagcttcgaatatgtcaccgtcggcttcatcaacaagtcccccgagcaggacccgtcgggtctgaactaccccggaagcgacttcagcgttcattgcggcggtgacgtgtacaagaactccaacggggacccatcgtaccttcagaaccgttgcggtcggatcgctgccgatgtccggtactgccagagcttgggaaagaaggttctgctctccatcggtggcgactggaatcctccgcaggccaactacaccatctccagccctcctgagggagagtacttcgccgacttcgtctggaaggcttttggtccctacgatccctcgtcgaccacgcctcggccgttcgatgataactacatcgcggatgccggtgaggatgagcactttgtgttcgatggttttgacttcgacatcgagcacaagttcggtaagcaatctccgttccaacggttggttaactgtgataatatgaaactaactggccacagacgaccaaaccggctatgtcgccatggtcaggaggctgcgttacctgatctcccaggagaccagcaagagcttccttctgacggcggcccctgagtgccccctgagcgaccagtggtttaagatgaagaccatcatccaggagggcgagttcgacgcgctcttcgtccagttctataacaacccgagctgccatggtgttgataacaacaacttcgacgcctgggtcgcccacctgcagtcgacggcgagcaaggatgccaaggtcttcattggtatccctggaagcaaggatgccgctggctcgggctacctcactcccagtgaggttacaaccttggtcaacaagcacaagaacaaggttgcctttggtggtgtcagtatctgggacgtcgtgtcgggcagcgagaactgcaatggccagccgtactacgagtttgtccacgaccttgttgttggcactcctgcgttgactaccagcagcgccgccgcgactcccacgtcgctgcccacgggttgcgtccggtatcacacggtggtggcgggcgagtactgctacctcatcatgaacgcctatggcttgattgaggccgaactgcgggagctcaacccatccctggatggaggctgctcgcttttccctggtcagcaactctgcgtcaagtggggtgtgatcacgaccacgtcgacgaccgctgtgccgacgaccagcactacaagcacttcctcgtcgagcactacacaaattactagcagcagcacatcgagcgaagagcccatcaccacgtcaaccgttgggtcgaccactacttcggaggccgaatccaccaccacttcggaggccgagtccagcactacgtcggagattgagtcgaccacgacttcggaggctgagtcgaccactacttccgaggttgaatcgaccacgacttcggaggttgagtccaccgcgactacggaggttgagtcgagcaccacctcagaggccgagtcaagcactacgaccacctcgtctacttcgacgacccctgaatcagtcccaaccgagactcccgctgatggtgagcctgagacatcctccacttcctcgtcagcgacgaccacgtcttccacaactactgcggcccccgtggagacggacatcactgaggacccggaggagtcggaagaggaggaccccctgccttcaactacgacatctgctgtggagactactagctccgaactcccgagctctacccagagtgtggaggagatcagcagcacgactaccatcgacgtgccttccagcactccttcgtccgagcctgaggaggatgaagaatgtgaagaggacgaggaagaacccctgccctcgactacctcgaccccggcggcgaccacgccctcttcgacgaccgccgcacctgtggaaacggacatcaccgaggatccggaagagtcagatgaggaagagcccctgccttcgacaaccttgacgtctgctgttgagcttaccagctctgagctcccgagctctacccagagtgtggaggaaatcagcagcacggcgaccaccgatgtgcctaccagcacgccgtcgtccgagcctgaggagggcgaggagtgtgaggaggatgaggacgaggaagaggaacccacagcctccaactcggttgtcgagaccgcggccccgtccgtcaccgcctcgttcaccatcaccccatccgagtccaccaccgcggccgtctctccctctaccactgagtccgctgctcccatcgaaaccgtcgacgacggtagcgacgacgaaacagactcggaggatctcccaacacccacgcccaacccgtccttcattgtctcctctttcctgcccgaggatattaccaccagcaccatcagctggaccacctccaccatctactcgaccacgacctacaccatcacctcctgcccgccgaccgtcaccaagagctgctccacgggccaggtcgtgaccgagaccatcgccgtgaccaccaccgtctgccctgtcaccacgactgccgcgcctaccacccctgagccaacctcccctggcggtagtgaggaagaggaggaggaagagaaagagacggtgacggacacggaggcgcctcagccgactgccaccacgacccctgtgcctggtggtagcgatgacagcaacgatgacgaggaagaaaacggagatgatgttgaggagagcacgtcgaccgcggcttcgtcgtggtttgtcgggatcccctcagtctcgaccagcttcaccacgttcaccgttccggccgagactgccgtgccgatcgtgagcacgggcagcgtgaagccatcgaccacgacgacgctgccacccccggttgtgacggccggggctggacggaacgttggcgtggttggcggtgttggagtcgtggtggcggcggttgttgcggcggtgatggctgcttga

SEQ ID NO: 47 - DNA, 1938 bp, Scytalidium thermophilum
atgaagacttcggtctccttcgtggcgctcgccgccagcgcctctgctactgtaagtggtcccagttcttacacaaggtgtcatggagcacatcactaacacgtcctccagttccttaatgcccctgccttcccctggcctggcaacatcgacaacgtctgcactccccagcagcttcctggcttcaactgggcggatctggactttggtgacttcttcaactacaaggacttcatcttcaagggctggaagtgcgaggatgccactggcaagcggagccgcatcaccccgcgcacctttggcaaggtgatcggcggtatctgccaccctgacaagttcaagtcgccctcgttcggctgcggccccaacctcgacaagttctccctgggcaagatcgtggtccagcccgagttcgataccgatctcgagttccactacgacatgcccgatggcagcgtctgcaagcaccgtagcaagtgcagcaagaagggcaccaccatcgtcaacaaccaatgcggcggcgccaagaacgtcaccatcatctacccgccccagcccaacaagcccaagccgacctgcagcatcaaggttcccaccatctccttcgactgcagcacggcctcgagcaccaagcctcccaagaccaccaagactagcacgagcttcacttcgacctcgactgtcctgaccaccacctcgtcggatttcaccctgagcaccaccatcagcagccctgatgttgccacctcgaccagcaccttgccgggcgatgttgactcgacgacccccgtccccatcaccgagaccagcactggtatcgtccctggcacgagcaccaccgactctgagaccagcccggtcgagaccacggactcggtgtcgcccaccgacagcaccagcgtcgacgttagcagcagcactgagagcaccagcgagaccaccggcagcgtgtccactgagactcccgtcacgactgagatcaccgagaccctgaccatcaccaccagcttccagtccacctcgaccatcttcaccaccagcactcagaccatcactcagtgcgagcccaccaagacggactgccctggcaactcggtcaccactgtgatcgtcaccatccccgtctcgaccaccatctgcccggtcaccgagactctcaccacgaccaccgtcctgaccaccgagacgagcagcaaccttcccgtggatactgccacccccagcgatggcgtcgacactggcagcagcacctcggctgatgtcgtcgtttccacctcgtcgggcgttgtcagctccgtctcccccgtccccaccctcgacgtccccgagctggtccctcgctgcctgaacaccttcatcttcaccactggctgctcggacaacactgatgctgcctgctactgccctgatgccgtcttcgtcaagaacgtctacgactgcatgtacgcccacggcacgaccgacgccatcatcgctgaggccatcgccttcttccagggcatctgcggcaagtacctgccccagaaccccggcattgccaccgacgccaccgtcaccagctacatcaccgtgaccgccaccccaagcgtcgcgcccatctcgacgaccgtcaccctcatcaccaccaccgtcgtcccctgcaccgacgaggccggcagcgagatccccagctccagcaccaccgtcaccatcagcaccagcatcgaggtgccgcaggtcgacttcaccagctcgtcgaccgacgtggtcatcgtccccatcaccagcagccagtcggtcgtgctccccaccgacacgggcatcatcacccccatcccgaccgacaccaccagcactgtccgcccgacccagagcatcgtcaccgccggcagcggcaaggcgggcgtcagcctcggcttcgccgccgcggtcgctgctgtggctgcccttgctatgtaa

SEQ ID NO: 48 - DNA, 1669 bp, Scytalidium thermophilum
atgagaggccttttcgctctctcgctcgcggcctgcgtcgctgctgcgccgcgcgccagcgtcgacaccatccacagtgatgccgctcccattctctcgtcttccaacgccgagattgtccccaactcgtacatcatcaagttcaagaagcatgtcaaggacgacaaggttcaggcccaccatgcttggatccaggagattcactcgaaccgtgaggcgcagcgcgccgacctccggaagcgtggcctggttgatgacgtcttccgcggcttgaagcacacctacaagatcggctccgacttcatcggctactcgggccactttgatgacgaggtcatcgagaaggtccggaggcacccggatgtaagtaaccacatgcattgctttcactggtttaacccacgttctaattccttctctccaggtcgagtacattgagcgcgacagcgtcgtccataccatgcgctacgttgaggaggagagcaagtgcgacggtgacgttgagaaggctgccccttggggtctggcccgtatctcgcaccgggaacgcctcggcttctccaccttcaacaagtatctctacgcctctgagggtggtgagggcgttgacgtctacgtcattgacaccggtaccaacatcgagcacgtcgacttcgaaggccgcgcccactggggcaagaccattcccgccggtgactcggatgaggatggcaacggccacggcactcactgctcgggcactatcgctggcaagaagtacggtgttgccaagaaggccaatgtctacgctgtgaaggtgctccgctccaacggctctggtaccatggccgacgtcgtcgccggcgttgagtgggctgccaagtcgcacctcgagcaggtcaaggctgccaaggacggcaaacgcaagggcttcaagggctccgtcgccaacatgtcccttggcggtggcaagacccgtgccctggatgatactgtcaacgctgccgtctccgtcggtgtccacttcgctgtcgccgccggcaacgacaatgccgatgcttgcaactactcgcccgctgctgctgagaaggccatcaccgtcggtgcctcggccatcgatgacagccgtgcctacttctccaactatggcaagtgcactgacatcttcgcccctggtctgagcatcctgtccacttggatcggctccaagtacgccaccaacaccatctcgggcacctcgatggcttcgccccacattgccggcctgctcgcctactacctgtctctgcagcccgatgccgattcggagtacggcatggccaccatcacccctcagaagctcaaggacaacctcatcaagatcgccacccagggcgctctgtctgacattcccaaggacactcccaacctgctcgcctggaacggcggcggctgcaacaactacactgccatcgttgaggccggcggctacaaggttgagcgcaaggccgatgataagtcggacaagttcgacctcgatgatgctgtctcgcgtcttgaggagatgatcgagaacgacatcgatgtcgcctcggataaggtcgccaagggcgtcgccaacctccgctccaaggccaaggagttctccaagaagatccacgagctcgtcgatgaggagctcaaggacttcttggagcaggtcactgcctaa

SEQ ID NO: 49 - DNA, 1631 bp, Scytalidium thermophilum
atgttgatgaagacggcgttgacggcccttttgggtctgtccgtgattaccgaggctgccagcccccaccatcttaggccgcttaggtccctgaaccggcgacaagacgtcaatgctagcaacttcaacggaggtaatcggttcggcggtaacaacaatggtggcaaccggttcggtggcaattttggaggcaaccgcaacaacaacaacggaggcaacaacaacaatggcggtaacaacaacaacggaggtaacaacaacaataacggaggcaacaacaacaacaacggcggcaacaacggcaacaacaacaatgccgcgtccgtgacttgcctggcgcccaacgccatccagactggttctcagtccactggtcagcagggcgatgtgcccattgatggccaggtcaactctgccacgtaggtcaacttgcttcccggccattgctcatctgatgctgactcgtcctagtgacccggccaacttcatcaacttctgcgctggtcaggtcttgaccaacggtctgcagaaccgggatggttcttgcaacggcattcgtacgtggctttcgatactcgaccctcaaatgatacttgctaacattctgagcagcgatgggcaaaatcccggctttcgacaagatgatctcgactgtcatcttgaaccctaagaatggcgacaacctccagcctctcaccaacttcgacatcacgatccaggtcaacaacatgcagcttggtttcttcaccaacgccacgagcacctactacgctgctccccaggatctgaacggccagggcttcgttatcggtcactcccacgtctccgttcaggataccggtggcaccaccaacccgaccacccctctcgatcccaccaagttcgccttcttcaagggcctcaacgatgcgggcaatggtcagggccggctcaccaccactgtcacgggcggtcttcccgttggttgctaccgtgtttgcaccatcactagcgcttccaaccatcagcctgtcgtgatgcctgttgcccagcgtggtgtccaggaggactgccgctactttgctgtcggtggtggttgccaggacctgaacaacaacggcggcaacaacaacggcaacggcggcaatggtggcaacaacaacaacaacaacaacggcggtaacaacaacaatggtggtaacggcggcaatggtggcaacaacggaggcaacaacaacaatggcggcaacggcggcaatggcggcaatggaggcaatggaggcaacggcggcttccggaacaggttcggaaacaacggcggtaatggcggtaacaacggtggtaacaacaatggcggcaacaagaacaatggcggaaacaataacgctggtgcccggaccgctggcgttgccagtgcttctggtgccattggtggcatcgccgccccggccattgagaatacgaacgaccccgttcgcccgttccgggttgatggcaacacgttcacctccaaggccgacgccgcccagcgcgcctgcgccatccagaacaacgcctgcgccagtgccgtcaacagcgggcaagtccagggcaagacggttcccgactgcaacgcgcaagaagcccaatgccgcgccgagttgagtgcttaa

SEQ ID NO: 50 - DNA, 705 bp, Scytalidium thermophilum
atgaagctcctcccaaccctcgccgccattgcggccaccttggccacggcggatgcgcactacatcttcaacatcctgtacgtcaacggccagcgcatgggcggcgagtacacctacgtgcggcgcaactccaactcgtacttcccagtgttccccgacatcctcaactccaacgacatgcgttgcaacgtgggtgccagaccgggcaacacccagaccgccaccgtcagggccggcgacaggatcggcttcaaggtcttcaacaacgaggtcatcgagcaccctggtcccggcttcatctacatgtccaaagccccgggcagcgtcaacaactacgatggcagcggggactggttcaaggtttacgagaccggtctctgccgcggtggtggcaacgtcgacaccaactggtgctcgtactacaaggaccggctcgagtttaccatcccgcccaagactcctcccggcgagtatctggtgcgtatcgagcatatcggtctgcacgagggccacgtcaacagggcgcagttctacatcacctgcgcgcagctcaagattgaggggcccggcggcggcaacccgaacccactcgtgaagatcccgggcatctacagggccaacgaccccggcatcgcctacaacaagtggaccaacaacccggcgccgtacatcatgccgggtcccaaggtgtgggatggcaactaa

SEQ ID NO: 51 - DNA, 1114 bp, Scytalidium thermophilum
atgcgcgcgcttctgtctactctcctcctcggcctcgcgacggccgtcgatgccctccagtacaagggcgtcgactggtcgtccgtcattgtcgaggagcgggcgggtgtccgctacaagaacgtcaacggccaggagaagccgctcgagtacatcctggccgagaacggcgtcaacatggtgcggcagcgcgtctgggtcaacccgtgggacggcaactacaacctcgactacaacatccagctcgcgcggcgggccaaggcggccggcctgggcctctacatcaacttccactacagcgacacctgggccgacccggcacaccagaccacgccggcgggatggccgtccgacatcaacaacctggcctggaagctgtacaactacaccctcgactcgatgaaccggttcgccgactccgggatccaggttgacatcgtctccatcggcaacgagatcacccagggcctgctgtggcccctgggcaagaccaacaactggtacaacattgcgaggctgctgcactcggccgcgtggggcgtcaaggactcgagactgaaccccaaacccaagatcatggtgcatctggacaacggatggtgagtcccttttccgcagacaaaaaatctccgcgtccaggactgaagctgactcagactccaggaactgggacacccaaaactggtggtacacgaacgttctctcccaaggccccttcgaaatgtccgactttgacatgatgggcgtgtccttctaccccttctactcggcctcggcgacgctggattcgctgcgccggagcctcaacaacatggtgtcgcgctggggcaaggaggtggccgtggtcgagaccaactggcccacgtcgtgcccgtatccgcgctaccagttccccgccgacgtccgcaacgtgcccttctcggcggccgggcagacgcagtacatccagagcgttgcgaacgtggtgtcgtcggtcaacaagggcgtggggctgttttactgggagccggcgtggattcacaatgccaacctggggtcgtcatgcgctgataacaccatgtttacaccgtcgggtcaggcattgtcgagtttgtcggtgttccagaggatttaa

SEQ ID NO: 52 - DNA, 1380 bp, Scytalidium thermophilum
atggccaagatcaggctaaagtctctccccatgagtcttgtggctctcctcggcctcatggcctgcggttcattagcgtcatcttcctcctcctcggattcatcatcatccgcttcaccctccaactccccgtccgccgaggtggagatgatctgccataccgacaaccctgaagaatgctaccccaaagtcttccaagccaccgatgagttccaagtggtccgtccggaccaggatcttcctccaggcctccatgtccgtctcaacatcaacaccggactgagggaagccaagatcaacgtgcctggcgaacaccgcccggatctcgaaggcctccccgtggactcggacgtcgttgtggtcgagcccaaccctccaaaacccgagatccccaaaaacgccccggcctacgacccggatggcaagatcaaagttcccaaaggagacggcgccggcgaggtcagcgccttctacaagaccctgaccatcctgaaaaagggtctcgacgtggacggcgccctggagatgctcgaggacatctcccacgacatctactacggtctcaagatcgccgaggactacgacacggtccacgagctcttctgcctctccaccaccgaggcgacagacgaaaccaccctccgccgcgcccgcctcgccaccctgaccctttcatccacggtgcaaaaccaccccaaggctctcaggcaaatcgaaaaccactggtctcaactctcctcctccctctgcccttcctcctcctcaactcccaagcgaaccaccccgctcggcacagccatcttctccctcctcccgcctactccagaaccaaccaccgaagccgaaacaaccaccgaaacaataacaacaaccaaccacaccacgctcctccccgacccctccctcaccaaaatccgcgtcaccctcgtcacggggcttctcaaatccccgactctccgcgcccagttcctcgccggcgaaggtccctcccacgtcctgcaaatcctcatctccccgctcccctcccacctcggcgaggacgccgccgccgcctgggccgccacccagcgccgcgccgcgcagctgctgaccgacaccttcctcgacgccgacatgggcgccgccctcggggagtggccgtccaaagggctgaggcagctgtcgcataaggagtgcgcggcgctgtttgaggtgaatggcggggatgtagcggttgccgtggccaggggccgtgaagaggagtgcctggactggcacgtggagaggttgaggaagcagtttaagagggatggcgatcattggagtcatgatttgggtaagaagttggcggaggcgaggaagaacaagaagacggggaagaaggagaaggaggagttgtga

SEQ ID NO: 53 - DNA, 2677 bp, Scytalidium thermophilum
atgagaaaccttcgacatatcctgcaccacagcctcctcctccttccaggggctacagctctctcggccgaggagtggaggaagcagtctatttaccaagttgttactgatcggttcgctcggactgatctctcgacgacggcagcctgtcggacagctgaccaaatatactgtggtggaacatggcgcggcctgatatcgaaactcgactacattcagggcatgggcttcaccagcgtatggatttcccccgtcgtgaagcagatcgacgggtactctcccagccacgggtaggtggaggtcacgatatcaaatatctgtaagcatcgttaaccagccttagtgccgggtaccatggatattgggcccaagacatctggtctctgaacccggcgttcgggacggaacaggacttaatagacctctctcaagcacttcactctcggggaatggtgagaccattggccttgctgatagatgagacttaggcttgtctctaactccagagctgatgttagttcctcatgctcgatgtcgtcacaaaccacatgggctatatgggctgcagctcttgtgttgattacagccaatttaaccccttctcatcagtgtgtccccccgtctcggttgtatgattcaaaagagatcatcggctaagcagagcggcagtcttcatatttccactcgccctgcactatcgactacaacaaccagacttcagtggagatgtaggtcgctatcacctggaaggactggacgtggcttagttgcagccatctttgcaatgaatgactaacaaaattccaagatgctggcaagggagcaccaccattgtcaggtatggaagagcatcaggccccgtccctctcctctgtccacatcaggggttatgtcaaagaaacgcgctgacgagcatgtgcacagccttccagacctacggactgaggagtaagcaatgtcagctagtcttcagactcttggatccgtctactgactcgaatcccatgcgatcagctcgtttgtaaggaacacctggaaccaatggatatcacacatcgtctcaaaatattcggtgtaaggcagtcccagatctcatcgataagcactgagtggttgcctaactcctgactttgagccagagacgggttgagagtggatagtgcgaaacacgttgaaacgtccttttggcctggcttctcaaccgccgcgggtgtctttatactcggcgagatatatcacggcgacccggcatacctggctccttaccagcagcacatggacggcgtgctagactatgccacgtaagtgtcactcatatccatggacagatggcctgtgtcctgacaccggaacagttattattgggccaagagggctttccagtctccgaacaacacgctgggcgagctcgtcggtggcctcaataccatgaggaacgtggctcgagatctcagtctatatggatcattcctcgagaaccacgatgttgagcgttttgcgtccttgactcaagacaaagcgctcatcaaaaacgtaagcctggactccgatccttgttctttcgcacccagttgttgagtctggtgctcacgatatcattggcgtggcaggcaattgcgtttaccattctcaaagacggtatgtgaataccgatactccctgaaattgcctgacgcagctcaccgtttgatcaggaattcctattgtgtatcaaggtcaagaacagctctattctggtacaggaattccaagcaatcgagaagccctctggctgtctggataccaaacggactctgaactctatacatggatatcgaagctgaataagatccgatctcgggccatctctgaggacagcagacacgtcacttatatcagccaaacgatatactccgatgaccataccatcgccattcgaaaggggcactcgggatatcagttggtcagcatcttcaccaacattggatcctcgaaatcaacgacgattacgctcacttcttcggctacgggatttgggcacaacgaagtcttggtagatgtcataggatgtgtcttgttcaccgcagattcaaggggtggactagttgttggtctcttcaacgggttaccaagggtgttgtaccctagaagccgtctcctcaggagtggcatctgccccgagttaaccgacacagttaccacaaagaccgaagcacctggaacaacgatctcgacagcgacatcgagctcgacaataggtgagcgcgcttgtgtcaacttcggtaccaacgctggtcatgactaacagatacttcagccacagcaacctgcacgatgacgagtgtggccgttactttgaacgtccttgccactactagttggggcgagactatcaaggtgtacgttcttggagctcagggttgaaggaattattgatactgacgaggaggcgaacagggttggcaacactccagaacttgggagctggagtccaggcagtgctgttacccttggtgcatcgcagtacataccaagcaacccgctctggtctggcacaatcaagcttcctccaggagtggtggttcagtacaagtttattcgggttggttcttcggggacggttacctgggagtcggatccaaatcgtacactcaacgtcccttgtgctgctacaacaatcagccatacgtggagatag

SEQ ID NO: 54 - DNA, 5182 bp, Scytalidium thermophilum
atgtggtctagagcgaagactgggacagcggccctcgccttgtgtgtcaactttgtggactcagtcctctctcttgacaataccattcccaatcccgccttatcacgcaatgatccagagctgttcgactgcccgttgccatgtgtggagtacgacaacattcacacatggactcgatacttctcggtcagccgcctcgagcgctgcaacaagcccatgttgctccaattctcgaccacgcaattgctggatgacccggccaccaccgtcctcatccgtgtttgcactctgacatcgccatcggtgtcgggggacgttcctgaagctggcttggtcgaggtggaaaaccccaagaagtctgaagctctgttcgaccccaaactggactccgctgcttcttgtgtccttgcgacggcagagagcgatggcgacctgcatgtggccatttccactggcgacaactccggcgtagaggttagcgttgcggccggtctcctggagggtatcaaggccttcttcgatgaccctaacaactgcgatgagaactttgtctttgcctggcataatgggacagtgggggctgcctacattggcgctgctcttggaaagcccagcattgtgtcagctctcgacatcttggccaaccacctccaggacaataccgccttcctctccaacctcactgtcgctcagctctgcagcagcgagcggcagcgggaccgcagcatcggtattgccattgacacgacggctgaccttgctggactccaacgaacggcactggggtggagtcagggcgactgcgtcgccgtggatgggactgaactccaggccaccaatgcaatcgacgggctgaagatctttgagattgatgtccttcactccagcagcccccttcgcaagcgggacacctgcgattatatccaagtccaaccaggggatggctgttgggccttggctgatcgttgcggcatctcgctgaacgacttctacacttacaacccggatcccgacctctgttccacattggcagtcgatgactatgtgtgctgctcagaaggagacccgcacacaccgtcaggaccacaaccctttccgaacggcacctgccagtatatccaagtccagccgggcgaaggctgctgggatctttccgtcaggtgtggcatctctctcaacgacttctacgacaacaaccctgatcccaacctctgttcgaacatcctacctgacgactatgtttgttgctcctcaggcacgccctacacgccaccgccgccggagccccaaccggacggcacctgtgccacccacctcatccagaacggcgacacgtgtgccgagttggccaggaggtaccacgtcaccgtcgaggatttggaggactggaacgccggcaagacatgggcctggaccaactgcagcggaatgctccttggctacaacatgtgcatcagtcccggctacgccccgttgccgccccctcagatcgatgcccagtgcggtccgttggttccgggcactgagctcccgagcaaccggagcatttcgctcgccgacctgaatccatgccccctcaacgcctgctgcagtaactggggtttctgcggtccctttccagcccactgcgagattcacgcgccagaagggggcggcccgggaagcaagctgcctggatacatgagcacttgcgtttcaaactgcggcacggacatcaaggtcaacggtccagctcctgcgtccttccagagggtcggctactaccagtcgtacaactttggtcgcccatgcctttggatgagcgctaagtatgccaaccctggcggagcttacacacaccttcactgggcttttgccgagatcgaccctaatggctggcatgtggtcatcaacgatccgtacggccagtgggaggatttcaaggctctgacgggcgtaaagaaaatcatcgcgtttggcggctgggcctactcaacggagccggcgacctacaacattctccgccaggcaattatcgaccacgcggacgatttcacgcagaacatcgccgagttcctcgaggatgagggtctcgatggtgttgacattgactgggagtaccctggtataagattcctgacttcccgccgcatggccgcttcatctcgctcacccgtaaacccttatgacctctaggcacctgacatctatgtcaatggccaacccattggccaggagaccgacggcgccaactacaaagacttcctcacgctgttgaagtcaagagttggctcgaccaaatcggtgtcaatctgtgccccagcctcgtactggtacctgaaggcctacctcattgctgaaatcgcggacgagatcgattacatcgtctacatgacgtacgacttgcatgggcagtgggactatggcaacgtcaacgccttcgactcatgtccctctgggaagtgcatcaggagtcatggtgggtcccctatacctctgtaactctggaggtcttgaagacatgggagcatcagctgacgacatgaaaacagtcaacttgacggagacgcggaccgcattgtccatcagtttgtgacccctattcctcgaccttttgatcatccatgatgctaactggcgtctcagttaccaaagctggtgtaccgaacaggaaggtctttgtcggcgaggccagttacggtcgctcgtttcacatggctgatcccgagtgctggggtccgatgtgcgacttcactggcaccaggatggagtccgacgcaacgccagggagatgtaccaatacggctggatacatttcgatggccgaggtctacgaaattctcaagtacaacggcagctttgcggaattgttttatgatgattcctctgacagtgacatcatgttgtacaacggttcgtccttccctgtctctggtcttttaatgtattattgacatcggacgtcaggggactatatcagtttcatgtcgcctgggatcaaggaaacgcgccgagaagagtggcaggatttgcattttgcgggtaccgtggactgggctgtagacctccagcgctttggcgaagacgatatgaacgcgactgccacgaggcccgtcgatgagaatggcgagggttgtatccatggagatgatctcaccttgaactctgacgatctttgcgttttttcatgtcgactgggcttctgcccggagctcctgtgcgaatgcacggaggtcggcgagttgaaccctctcccaccggagaagtcggtcaacatcagcgacatcatcgcccgtgacgaggacgacatcacactgacccagctctgtcgctttgcctgcaagtacggctattgtcccggctctgtttgcacgacccgcccacaaatcgagactgtgcaggacattccgaaggaacgtttgcccgacttcaaagaacagttcaaaaaccagtgcaccatctcggatgaccccaagtacagagaagcctgggagatacagtgtcgaaatgtctgccgagacgtcctcgagcaggccgaaagagagggcaggacgaccaactacggctgcgtcggtatctacccgctcgatgacccagacccttggtatgttcaggatatcactggggtgagatatatcatgggcaattgcagttgtgacaactggcttgcgaacgagtttgccaacatgattcttgaagcactgcctgctattggtcagatagggtacgtgttgacactgagcaagccgcccccctttcccctcctcccccccaaaacaacaacaacaacaacaacaacaacaacaacagcaagatatacatatatacctatatatattttagcaaccatcgtactgacaacattcgagttgcggtattttgatgtcatccttccgttcaatcctcaagcttggcttgaatttctttactggtggtgctggcagagcaattgacgccggctcgggtaggtgatcatcacactttgcaatatccatggacccctgaacccaaagggccaattcctcatgtatgctaatgctaaccccggctattagatatgcttctctcggctgctcaaatggcttcatacctctatgatgaggaagaggaccctgcaggagccttcgaatggtggctgctgccgtgtggcggaagcacccttgtgccgcaggacgtcagagatgtgttcgacattctgacatcgattggcgattttgggggttcgagctcctttaagccgccaaagaatctaggaaaaggctcggggaggaagggtgacgacggcaacccgaccggaagtgccagatccgtgtcccgaccatcacccaccagaacatcgtcggcgtgcctaccgacgacgacaagacacagtagccagaagaacattgtctctgtcataacatgcaactcaaaatcccagaccataacgactgtctacgtcgccacctccgttactccggcagccaccgcgacaacatcctacgtcaggagggtgtgcttggagaggtggtctcaggcatgctatcactacagctcggcaatctcgagacacccggattgggctgagcttccatgtccggcggtagcaatgacgactagcaaagatcgcgggagtggtgggagggcaacaagagtttggttcagccaacatagcggcaaggggtggcagagcccggaacatcgcccatacaccaaagactgcgctagggacgaatacccccctgtgtatctgctggacaaaagtcacacagcgatgatcaaaggcggtattgattggaccggacaagcgatccgctatctgcctggcggcgagaattcgggtgcgggaagcatgtggaaggggatgtgtttcctgccccatttcaacaacatgcccaaccacgaattaatctcgagagtcgtgaacggtgtctccacgaaaatagtgccaaggggcaccgtgaccacaattgaggccatgatcatcgtcgacgtccatcctgtgttcacgatcacaagctgggagcacacgctcattaaatcactgaccaatgacggcctcaatgacaacggctgttggccaagcgattacgccccccttgaccctgggtttgcgctcctgacgttcgacccatactacgggttcccgacccccacgccacctccgtacaattaccggctccctataccgacggcgaccagcacagcgactacgacaccgtaa

SEQ ID NO: 55 - DNA, 1621 bp, Scytalidium thermophilum
atgaaggcagctatcttgagcgccgccgcggccatggtcgctggcgtgagcgcccgttctcacggccaccgccacgctcaccggatgctggaggacaggtctctgagcgacgagacgtgcggctgcacgacggtctactcgaccatctacggcaccgattttaccagtatgtgtttggcatagagggagatccttgagacggtcaaggaactaacaccagatgacagtcgttcccggccccaagccgacgagcaccgtcgatgccgtcgtcactcctacccccgagcttccgacccccattgctcagacctgcccgactcctggcacctacacgttcccggcgaccaccatcgtcgtgaccgagacgacgaccgtctgcgccgcctcgaccactgaggttccggctggcacccacacccttggcggtgtcacgaccgttgtgaccaccgccaccacggtcgtctgccctgttgccaccaccgagacccaggacggcaccgtcaccagcgtcatcaagaccaccaccttcgtctgccccgagcccggcacctacaccattggccccatcaccaccgaggtgcccgacgtcacgaccgtcgtcgttcctgtcgtcaccaccatctgcccgggtacctacaccgcccctgaaattaccacaaccatcaccgccaccaacaccgtcatctactgcccgttcacctcggttggtgccccggagccgacctctgagcccacttcggcccctcaggaggctcccgaggctcctgaggagccgtctgctccggctgcccctgccccgtcctctaagactgtccctaccggcaagggcaagcactgggccatgacctacactccctacactgaggatggcaactgcaaggcggcctctgaggtcgattccgatgttgccgccattgctagcgctggtttctccaccctccgcgtctactcgaccgactgcaacacccttgagaacgtcggtgctgcctgccgtaagcacggtctccgcctgatcgtcggtgtcttcatcggcgcccacggctgctccaacggcagcccgagcgttgacgaccagctcagcgctctcaagaactgggacggctgggacctcgtcgatctctgcgtcgtcggcaacgaggctctgttcaacggcttctgcaccgtttcccagctcaccagcctgattgagcgcaccaagtcggagctcgcctcggtgtacaccggccccttcaccaccaccgacgtcgtctccgcctggcagaacaacgatgtcacgcagctctgcgccgccattgacgtcgtcgcctgcaacgcccacgcctacttcaaccccgacaccaagccgaagcacgccggcaagttcgtcaagggccagctggccatcgtcgagggcatctgcaacaagtccggtctcatccttgagactggctggcccaatgccggcaagtgctacggcgttgcctgcgctggcccccaggagcaggccgaggccatccactccattgaggacgaggttggcgacaaggccgtcttcttctccttccggaacgacaggtggaaggcccctggcgactgcaactgcgagcgcaactggggctgcgctgaggtcttcggcctttaa

SEQ ID NO: 56 - DNA, 1020 bp, Scytalidium thermophilum
atggcccggccttctatcgggcttttcgccctgattcccctcatcatgggcattctcgccgttttccccgtcccctcacaggcttcccagtaccgactcgtggacgtgtacaactggaagaacttcttctccgccttcgacttcttcactgattccgatcccactcacggcttcgttcagtacgtcgacttcccgaccgccaatgccaccggtctcgcccggatcgacaaccgcaagatctacctcggcgtcgactacaccaccccaacgaccgccgggcgcgcttccgtccgcgtgtcctccaaaaaggcttacacccatggcctgttcgtcgccgacatccagcatatgcctgcgggtgtcggccctgcgggttcctgcgctctgtggcccgccttctggagcttcggcccggactggcccaactcgggcgagatcgacatcatcgagggcgtgcacaaccagctcttcgacatggtgactctgcacacgggcccggggtgcctggtgcgcgacacgggcggcgcccgccccgggacggtcctcatgcgccaggactgcgaagggttcatggggtgcagccagtggaccgagacccccaacacgtacggcgcgcagttcaacgccaacggcggcggtgtgttcgccatggagtggaccagccggcacatcaaggtctggttcttcccccgcaacgacgcagtcgccatacagctcgccgatccggagcactctgtctctgctatcactcctccttctcgtcgtcatcgtcatggccatcgcagcttgaataacctcaccatcgacctgactgacaccttctcgcccgccggccataaccaaacggataataatgatgacgcctattcgagcgcgcccgccatgatgaacccatctctctggggccaacctctcgcctctttcctcgcgagcgacacgtgcgatttcgaccagcacttccggcagcacaatctcatcttcgacaccacgttctgcggcgactgggccggcgcgacctag

SEQ ID NO: 57 - DNA, 875 bp, Scytalidium thermophilum
atgcagctccccctgaccacgctcctcaccctcctccccgccctcgcggcggcccagtccggcagcggccgcaccacgcgctactgggactgctgcaagccgtcgtgcgcgtggcccggcaagggcccggcgcccgtgcggacgtgcgaccggtgggacaacccgctgttcgacggcggcaacacgcgcagcgggtgcgacgcgggcggcggcgcctacatgtgctcggaccagagcccgtgggcggtcagcgacgacctggcgtatggctgggcggccgtcaacattgccggctccaacgagatgcagtggtgctgcgcctgctacgagctgaccttcaccagcgggccggtggcgggcaagaggatgattgtgcaggcgagcaacacgggaggcgatttggggaacaaccactttgatattgctgtacgtcacatccattcttgttcttctcctcctccgtacatgccatgccattagaagtgtactgacagcttgatcttacctctctccagatgcccggcggtggcgtcggtatcttcaacgcctgcaccgaccagtacggcgcgccccccaacggctggggccagcgctacggcggcatcagccaacgccacgagtgcgacgccttccccgagaagctcaagcccggctgctactggcgcttcgactggtgcgtttccctctttcctctctcactgtctttgctccctggacagggcagacgatgggaagaagttgttttccccttgagtgctaactaactcccttttctcaccttcgataggttcctcaacgccgacaacccgagcgtcaactggcggcaggtcagctgcccggccgagattgtggccaagagcggctgctcgcgttaa

SEQ ID NO: 58 - DNA, 1992 bp, Scytalidium thermophilum
atgcagctccgagctctcctcccgctcgccctcctctcctccgcctcggccgagcccatcaggataccgccccgcgcgccgaatcatgaacgctccctctctatccgcgcgagtcctgacgcacctagtggcagctatgcgccggccgtggtggaatgccccaaggagaagcccgccctccggcgcgccaacggcctctccaagagcgaggccgactggctctccaagcgccgcccgctcaccgtcgagcccatgaaggagttcctcaagcgcgccgccattgacggcttcgacgccgaggcttacatcaaccaggtcgccccggacctcaagaacctgcccaacatcgccatcgccgtctcgggcggcggctaccgcgctctcatgaacggcgccggcttcatcaaggccgccgacagccgcacaccgggcaccaccgacaagggcggcatcggcggcctgctccagtccgcaacctacctctcgggcctatcgggcggcggctggctggtgagctccatctacggcaacaacttcaccaccatcggcgacctgcaaaagggcgacccggaaaccgggctctggcgcttcgacaacgacatctttgacggcccggacctgccgggaattttcgacacgggcaggtactggcgtcgcatctacaaccaggtcagcagcaagaaggatgccggcttcaacacctccatcaccgacttctggggccgggcgctgtcctaccagctgatcgacgctcccgagggcgggcccgactacaccttctccagcatcgccgacgacgaccacttctccaagggcgaagccccctttcccatcctcgtcgccgatgcccgggctccaggcgtcaaagaaatcaccctcaacgcctccgtcttcgagttcaacccttacgaaatgggctcctgggacccgaccttctacggcttcgcgcccctccgctacctggccagcaacttctccaatggcgtcgtccccaaggacggccactgcgtccgcggcttcgacagcctgagctacatcttcggcacgtccagctccctcttcaacgccttcctcctgcaaaacatcacctcggtcgacggcgtgcccgacgtggtcatctcggcggtcaccagcatcctcgagaccctcgacgaggaaaacaacgacgtcgcccagtacgcgcccaacccgttctaccaatggctccccgccaccaaccccaccgccgactccctgcagctcgacctcgtcgacggcggcatggacctgcaaaacatcccgctctacccgctcctccaagccccgcgcgccgtggacgtgattttcgccgtcgactcctccgccgacacaaacttcaactggcccaacggcaccgccgtccgtgccacctgggaacgcaccctcctccccatcgccaacggcactctcttccctcccgtgcccgacgacgtaacctttgttgccaaagggctcaacaaccgcccgacctttttcggctgcgacatcgccaatttcactttgaccgagggtcaatctcctcccccgctgatcgtctacctccccaatgccccctacaccaccttctccaacgtctccaccttcgacccgtcctacccgctcgcgcagcgcgactccatcatcctcaacggcttccacggcgcgacccagggcaacggcacgctggatgagcagtggcagacgtgtgtcgcgtgcgcggtgctgtcgcgcagcctggcgcggacgggcaccgcggttcccgccaagtgtagggagtgttttgataagtactgctgggatgggacggttgcgaacgcgcaagaggccgggatcgtgccgacgggcgggggtggggagtaccagcctacgccgaagatggggtgggatggggtggatgcgaacacctctggggctgctgctgcggggttggggaagaataaatggtgggtagtgatagttgggttgggtgttgcgggggttgtggctttgttgtga

SEQ ID NO: 59 - DNA, 3794 bp, Scytalidium thermophilum
atgacaacaacaaccttgttactcctagccatcatggccatcttcgcccagacggccatcagcctctccgttcccagggcctcggatgtcctcaaggtcgtcggcgtctccatccagcggcaggctccgcggaatccagtccatcgtgacaggctgaggatgagaaagagggactcgtttactgctggccttgacaatgccgtatgtattgacaatgacgccaagcttctcctccccgttgatgatatgatgacaatgatcgtgacgatgatgcaaaagcaacctggaacctactaacctctcccaggaaactctctactacatcaacgccaccgtcggcactccccccgtctcggtccgactccacatcgacacgggcagcagcgacctctggttcaacacgccttcttcctccttctgctcctcctcctccaacccctgcgccgccacgggcatgtacgaccccaacgcatccaccacgtcgcagtacgtcaactccaagttcaacatcacctacgtcgacggcaccagcgccagcggcgactacgtctccgacacggtcaccgtcggccctcagaccctctcccggctgcagttcggcatcggctactccagctccaaccgccaaggcatcctgggcatcggctacagcgccaacgaggcgcaagtcacgcgcggcgggctgccggcctaccccaacttccccgagcagctggtcaccgacggcgtcatcaactccccggcctacagcatctggctgaacgacctcgacgccagcacggggagcatcctcttcggcggggtcgactcggcctactacactccgccgctgatgtcattgcctgtcgaaaagctcaaggacggcaaatatcgcgagttcatgatcaccctcaccggtctcaccctgggcaacctggcgctgggcaaaggcgaatccctcgccttagcattcctcgtcgacacaggctccacgctgacctacatccccaaccgcctcgccttcgaactcttttccgctctcggcgcatcgtacgacgaagccaacggcatcggctacgtcccctgctcactcgccagcaacacgagtgcgagcttatccttcgcctttactactcctaccatctccgtcggcttcgacgagctagtgctggacgcgtacacctcatccgacggcagccggccgcgcatgcccgacggttcccccgcctgcctcttcggcgtcgcgcccgcgggcacggggacctacgtcctgggcgacacgttcctgcggtccgcgtacgtcgtgttcgacctcgccaaccacgaggtggcgatcgcgccgacgaggtttgatttgaccaaggacccggcggcgttggccgcggctacggctcccgggtcgagtaccaccgtgaaggagattgggaaagtcggagaggatggcatccccggggcgacgagggtggagaatccggtcagggcgacggaggggttgaaagggggaaggacgtcaggggtgccgccgagcgggatggcgaagtcggtgggggagggaaagggggtgatgtggaaggcggtgggggttgttgtggtgggtttggtggtgggtttgtagatctagggagggaggtggtttgacgcatggtgctgtttggtttggttgcggttcgggttggcttgatcttttatatttttctcattcttagatatagaaatagaattgtaaatatcagccgagagagagggtgaagtgcccacaatactcgaaaataaaaattgtaaaaaagaagaaaacagacttgacctctgagaccgtgattgtggccgttcctgtgatgacggcatgtacatacttggtgacgtaaatgctacctacctgttggacaatgtgccaggtcatacctgaggtgaacatgatgtactacttgctgtcggtaaccgaaggcaccaggccgatgcaggatgtgaggctgtcattttgacatcggtttgtcatcaactgtatttctgattcacggatcgagtcactcaactcttctgaaggacagaaaaaaaatacacaggcagccttaggctgcagcgacaaaccggcgatatttctgccttgaaaaaggagccaatcccagacggtcttgatgactaataacacccctgtcagccattgatgcctgttgatgggcgagccaagcccctgacgaccactcgccacagcgggagctaagtgctagccgaaccttaactgaacctctggctctgcaccaaagcccagggcaccgcgggcgtcggccagctgccgaccacttacaaacgaaataaattcatcccactttcccttctcggccaccttcaccacctcgacgaccttcaccaccaacacctcacaacaacaaccacaacaacctttcacctaagtccatttcacaactccgccaactcggtcatcgtcaacatggcatacggcaggaacaaaaccctcctcactccccctagcatcgacaagggcaagcaggacaagtcggtcgcctttcctccaggcccgaccgacaccgtctcggccctgcgctggtcgcccgtgtccaaccacctggccgccgcctcgtgggacggtaatgtctatgtctacgatgccaccgttgccacgaagaccgagtccatcaagcccatcgcctctatccgcatcggcgcccccgtcctcgattgcgacattagcaaggtaagtcacacatgaaactcgttcgaagacgcatcgcccccggtcgatcgatcccaccgtcgcgccgaggacctgccgatccgatttttcctcgatctctcttacgcgaaccgaacgaacgatacgaaccgttcctttttgcacaggtatggcgacggtgcggaagtacctgtcttttcagcagcatctcactaacccctcactcacttcaggacggaaccctcgccgccggcgcttctgccgacaaaaagatccacctcctcgacatgccgaccggccaagcgatggaaatccggggccactccaagccggtgcgcagcgtgcgcttcatcgacgtgcccttcgccaaccagcccatggtcgcctccgggtcgtgggacaagaccatccgctactgggacctgcgccagcccaaccccgtcaccaccatcgaccttcccgagcgcgtctacgccatggacgctagtcccaagttcctcgccgcggccaccgccgacaagaacgtgcatctgatcgacctccgccgcgacaactacaaggtctggaacacggtcgaggacccgctcggattgcagcttacttccctttccatgacggcggatggctcgcgctgggccgtgggctgcatcggcggccgtgctgttgtgcaggggtccgatgacaagatgtaagtccctttccctttcccaactcaaccaccacgaccaacaaacgaacgccatcccaccgccacagagaaaacttcagcaagctcaccttccgatgccaccgcgagccccaccctccccagcccaaaaccccgaccgacgtctactcggtcaacgccgtcgccttctcccccgccgacaaggacgttctggccacggccggcggcgacggcacctttgcggtctggaacgtccagcgcaagatccgcctccgggctccgttcaaggtggaaaacgaccaccccatcaccgccctcgccttccgcacagacggcaaggcgctcgcctacgccatgggctacgactgggcccggggctacctgggcaacaagaacgcggggaaggagggggagaacaagattgtgttgcatgtgtttggggaggagttgaagtag

SEQ ID NO: 60 - DNA, 1338 bp, Scytalidium thermophilum
atggctatccgccgccgccacaccatcccggccacctttctccttctctccgtcctcctgcttctcaccttcatccacccaaccctcgcggcctgcgagtgcggctacctcgccaccatccgccccgacctatccgacccatccacccataccaccgcgctcttcaccgacatcctcgaaaccgacttctcccgcttactcccacccgccaaccaagatggtgaccccagcagcagtatcgtcggcaccgacctcgcaaagtacaccccggactgggcgccgcaggcattcaacctgacagcgaagcgggcgcgcggtgagtatggggagatgtttgacgtgggcaacgtacgagtcgtggacccggcggcgcagggccgggggatggccggggacgggaggacgttggagctggtggtcaggaaggggttggtggacgggatggtgcccgtcgcggaggtggatacgaggaggttggatgtcgggtatgggacgtttcgggcggtgatgaaggttccgggggtgaaggggacttgtgcagcgtttttttgggtgagttgttcttttgtttgtttttgttttgttacttttttggtgtgttattggagtatggatgagtctgtggatgcttggttgtctggtctggtctctcctgtcttccgtcttcaacatcttagtcaaaggatcacccaactccctgtcctccataaccatctcccctcctcctcctccttctcctcctcctcctcctcctcctcttcctcctcctcctcttcctcctcctcctcctcctcctccttctcctcattctcctctccttttaatattaatcccctcccctcctctccagtaccacaacgacacgcaagaaatcgacatcgagttcctctccaaagacttctccccctcccgctcgcacttccccgtcaacctggtgctccaatcccgccgatccgccgaggccggacacgacgcttccggcacagaaaactttgtccaaaccaccctccccttcgaccccaccgccgacttccacgagtaccgcatcgactacctcccggggatggtcgtattttacgccgacggcgcgcccctcgccaccatgacctccgcatccggcgttccgaccaccgcgggccacttgatcctctcgcactggagtaacgggaacccgctctggagcgggggcccgccgagggaggatgcggtgttgaaggtgaggagcgttaaggcgtattttaattcgtcggtgacttctgttttggggaggagggatggggtcggggagacggggaagtgccaggtgtgcaggatcccggatgtgatgccggggaataa

SEQ ID NO: 61 - DNA, 2740 bp, Scytalidium thermophilum
atgaggaccgcgtctcgtcttgttggcgccctcgcggcgacggcagcgtgtaagttgtcttcagcttgtagcaccagcacttcctcaagtgtgtactaacagccgatcgatctagtcctgccgtctgccctggcccagaacaatgccccgaacaccttcactgaccccgacaccggcatcaccttcaacacatggggcctctctcccgacgacccccggacccagggcggcttcacctttggtatggccctgcctgagaacgccctcagcaccgattcttccgagttcatcggctacctggtacgttgcccaaccctaccacacctcttcccgaatccctcctgctgatacacctccgtttaggaatgctcctcgcccgacggccatggctggtgcggcttctctcttaacggcggcatgcccaactcgctgctcatcacggcctggccgcacgaaaacgaggtctacacctcgctgcgccacgccaccggctacgccatgcctgacgtcttcaagggcgacgccgagattacacaaatctcgtccaagatcaacggctcccacttctccctcatcttccgctgccagaactgcctgcgctccgacacgggcggcgcccctgcctccaccagctccggcttcctcgttctcggctgggtccaggccttcccgtcccccggcaacccgacctgcccggatcagatcgagctcgagcagcacaacaacggcatgggcatctggggcgccgtgctcgacggcaacgccgtcagcccgtcgtaccccgagtgggcggccctggcgacgcacgtgcccgaggccgtttgcgacggcgagggcggcggcgaggttgagggcgtgcccgtccccgaggacgccgagtttgattacattatcgttggcggcggcgccggcggtctgccactggcggaccggctcagcgaggcgggcaagaaggtccttctgattgagaagggcttcgcctcgactggcgagcacggtggcagcctgggcccggagtggttggctggcaccggcctgacgcgcttcgacgtccccggtctctgcaaccagatctgggttgactctaagggcatcgcctgcgaggacaccgaccagatggccggctgcgtgctcggcggtggtacggcggtcaatgccggtctgtggttcaagccgtactcgctggattgggattatctcttcccgtccggctggaaagctagggatgtgcaggcggccatcaaccgcgtcttctcgcgcatcccgggcaccgacaccccgtcgatggatggcaagcggtactaccaggagggctttgaggtgcttgccagcggcctagcggctggcggctggagccgggttaccgcgaaccaggctccggatcaaaagaaccggaccttctcccctgcgcccttcatgttctcgaacggcgagcgcggcggcccgctggccacgtacctgcgcagcgccaagtcgcgccccaacttcaccctgtggctgaacacgtcggtgcgccgcgtgatccgccagagcggtcacgtcaccggcgtcgaggtcgagccgttccgcaacggtggctaccagggcgtcgtccccgtcacccccgtctcgggccgtgtcatcctgtccgcgggcaccttcggcagcgctaagatcctgctgcgcagcggtatcggccccaaggaccagcttgaggtcgtcaaggcttcggagatcgacggtccgactatgatctcggaggactcgtggatcgagctgccggttggctacaacctggatgaccatctcaacgtaagtgacatcaagagacaaacatcgaggagagagtaagagaagaagactgacagactcaaagaccgacaccgtcatcctccaccccaacgtgagcttctacgacttctacgaggcctggatcaaccccatcgagggcgacaagaaccagtacctcagcagccgcagcggcatcctcgcccaggccgctcccaacattggtcccatgttttgggaggaaatccgcggcaaggacggcatcgtccgccagctccagtggactgcccgcgttgagggcagccttggcactcccaatggccgtacgtgtccccgtttccccaacccaagttgccccatatccgttactaacaacctcccagaagcgatgaccatgtcccaatacctcggccgcggcgccacctcgcgcggccgcatgaccatcaccccatccctcaccaccatcgtttcggacgtcccttacctcaaggaccccaacgaccgcgaggccgtcatccaaggcatcatcaacctgcagaacgccctcaagaacgtccccgggctggagtgggctcacccagatcccgccatctcgccgcgcgagtacgtcgagagcatggtcgtctcgcccggcaaccggcggtccaaccactggatgggcacggccaagctgggctgggacgacgggcggaccggcggcacggcggttgtcgatctggacacccgcgtgtacggcacggataacctgttcgtcgtcgacgcaagtatcttccctggcgtcccgacgacgaatcccagctcgtacattgttacggctgcggagcacgcggcgcagaggatcctggcgctcaggactccccaggcggtgcccaagtggggacagtgcggtggtaggcagtggacgggcagcttcttctgtgagaagggcttgacttgcacgccgcttaatgagtggtattcgcagtgcctgtaa

SEQ ID NO: 62 - DNA, 1057 bp, Scytalidium thermophilum
atgaagtccctgacctacgccgcgctggccgccctctgggcccagcagaccgctgctcatgccaccttccagcaactctgggtcgacggcgtcgactacggcagccagtgcgcccgcctgccgccgtccaactcccccatcgccagcgtcacctcgaccgccatgcgctgcaacaacggtccccgcgctgccgccaagtgccccgtcaaggctggcggcaccgtcaccatcgagatgcaccaggttggtttccttgaagtgttcccctaccacacatacagaccgtggctaacacacccacccttagcaacccggtgaccggtcctgcaaccaggacgccattggcggtgcccaccacggccccgtgatggtgtacatgtccaaggtctctgatgccttcaccgccgacggctcgtcgggctggttcaagatcttccaggacggctgggccaagaaccccaacggccgcgttggcgacgacgacttctggggcaccaaggacctcaacacctgctgcggcaagatgaacgtcaagatccccgccgacatcgcccccggcgactacctgctccgcgccgaggccatcgcgctgcacgccgccggccccagcggtggcgcccagccctacgtcacctgctaccagctcaccgtcacgggcggcggcaacgccaacccgcccaccgtcaacttccccggcgcctacagcgagcgtgaccctggcatcgccgtcagcatccacggcgctctgtccaactacgtcgttcccggccccccggtctactcgggcggcagcgagaagcgcgctggcagcccctgcgagggctgcgaggctacctgcaaggtcggctcgagccccagccagactcttgctccttccaacccggccccgacctctcccgccaacggcggcggcaacaacggtggcggcaacactggcggcggctgcaccgtgcccaagtggcagcagtgcggcggccagggctactcgggctgcaccgtctgcgagtctggctcgacttgccgcgctcagaatcagtggtactctcagtgcgtgtaa

SEQ ID NO: 63 - DNA, 3067 bp, Scytalidium thermophilum
atgacacccttgggagggcttttgtgcctcctcgccggcatccctctgtcggctgtaacggcacacccgtcgagggatgaggtacgcaaaacttggtgaagcataattccaagttccttccctttccctctttcctcccgtctcctggggcatccaacagagttacggagttcagggccatactctccttcagttccacccggctctctggactccaaccctcgcttgctctctactcctcactgaacaagttcaacctgtttcgtatctctagaccgtgcagcatttcgacacaatctgtggtcaagatgcgagctctctcatcagcctgctggctgcttatctcaacagtgagcttgacaaccgctaacgggaatcaccagcatgtcggcaggaatcttaatcatcatcatcatcgcagccagagagagcttgcctcttcacccccctcctatccctcaccatggatggacccaaaggctgcagagtggcaggatgcctacgttaaggccaagaagttcgtttccaagctgaccctcctcgagaaggtcaacctgacaactggcgttgggtgagtctccgcttctctctcctcggtgagaaatgtttgttgacgtgagcagttgggagtctgagcaatgtgtgggaaacactgggtctgttccccgtctgggtcttcgcagcttgtgccttcacgactcgcccctggggattcgaggtagcgactacaactcggccttcccctcgggccagacgactgcagccaccttcgaccggcttctcatgtaccgtcggggctacgccatgggaaaggaggcaaagggtaaaggaattaacgtcctgctcggcccggtggctggccccctcggtcgtatgcctgctgccggcagaaactgggaagggttctcgccggaccctgtccttaccggtgttggcatggccgagacgatcaaggggattcaggatgcgggtgtcattgcctgcgcaaagcacttgattggaaacgagcagggtgagttgtgagcctccgacgcacgtcgaacacattaggttgacccaggccacagagcatttccggcaggcaggcgagggcggattcaacaccaccgaggccctgtcctccaacatcgacgacaagaccatgcatgaactgtacttgtggcccttcgtggacgctgtgcgcgccggcgtgggctccgtcatgtgcgcctacactcaagtcaacaactcgtactcttgccagaactcgtacgtcttgaaccacttgctcaagaacgagcttggattccagggttttgtcatgagcgactggcaggctcagcacgcaggcgtttccgccgcggttgcgggtctcgacatgtcgatgcccggagataccacgtttaaaaccggtgtcagcttctggggagccaacctcactctggctgtgctcaacgggactgttccgcgttatcggatcgacgatatggccatgcgcatcatggctgccttcttcaaggtccacaaggacattcacctcgaccccgtcaacttctcattctggacgcgcgagacatacggcccgcttcattggggcgcccaggatggccaccagcagatcaacttccacgttgatgttcgggaggatcatcatttgctcatccgggagattgctgccaagggcactgtcctgctcaagaacacgggcggtcttcctctgaagaagcctaagtttattgctgtcattggtgacgacgccggaccgaacccctatggccccaacggctgcgccgaccgcggctgcaacaatggcaccctcgccatgggctggggctcaggcacggccaacttcccgtatcttattaccccagacgctgccctccaggcccgggccctccaagacggcacccgctatgagagcgtgctgaccaactacgccccaaatgaaaccaaggcactcgtatcccaggccaacgcgacggcgattgtctttgttaatgcgaactcgggcgaggggtacatcaattttggcggcaatattggcgaccggaacaatctgactctctgggggaacggcgacgatctggtcaagaacgtctccaggtggtgctcaaacaccattgtcgtcatccactcgacggggcccgtcttgctcacggactggtacgacagccccaacatcaccgccatcctctgggccgggcttcctgggcaagagtcgggaaaagccatcgttgacgtgctttacggcgacgtcaaccccgccgggcggactcctttcacctggggcgccacccgggagagctacggcgtggatgtcatgtacgagccaaacaatggcgatggagcgccgcagcagaactttgacgagggtgtctttatcgattaccgctacttcgacaaggaggatacacacgtcatctacgagttcggacatgggctcagctacacaacgtttaactattccaacatcaagattgagaagcataatgccaaaccctacaagccgacgacgggcaagacgaaacccgcgcccacatttggccaggacgatgaatacggctatgctggccacgagaaatatctcttccccccaagccccttccgccgcatcacgaattacatttacccatacctcaactcgaccgacccacacgaggcatcgctagacccgcactatggtcagaccgccgagcagttcctgcctccaggtgcacttagggccgatgagcagccccttctgcgagcttcaggcctgcaccaacccggcggcaacccagggttgtgggacgtgctgtataccgtcacggctgacatcaccaacacgggctccgtcacgggcgacgaggtgccgcagttgtacgtctccctcggcgggccgcaggatcccaaggttgtcctgcgcgggttcgatcggttgatggggatcgggccgggcgagacgcgtcagttcatggcgcatcttacgaggcgcgatttgagcaattgggatccggctcttcaggattgggtggtgagtgggcataagaagaaggtgtttgtggggaagagtagtaggaagttggagttgagtgttgagcttccgtga

SEQ ID NO: 64 - DNA, 1035 bp, Scytalidium thermophilum
atgccaccaccactactggccaccgtcctctccttgctagccttcacccgcggcgctctttcccattcccacctagcccacgtcatcatcaacggccagctctaccatggcttcgacccgcgtccaaaccaaaacaaccatccagcccgtgtcggctggtccacgaccgccacagatgacggcttcgtcaccccgggcaattactcccatcccgacatcatctgccaccgcggcggcgtcagcccgcgcgcccacgctcccgttaccgccggtggcaaggtccaggtccaatggaacggctggccgatcggacacgtcgggccgatcctgacctacatcgcgccgtgcggcggactgccgggcgccgaagaagggtgtacgggcgtggacaaaaccgacctgcggtggaccaagatcgacgactcgatgccgccgttccggtttaccgacgccaccaagccagtctctggcagagcgcagttcccgataggccaggtctgggcgacggatgcgctggtcgaggcgaataatagctggtcggtggtaattcccaggaatatcccgccggggccgtacgttttgaggcaggagattgtggccctgcattacgcggcgaagttgaacggggcgcagaactatccgttgtgtctgaacctctgggtggaaaaggggcagcaggatcagggagagcccttcaaattcgatgcttacgacgcgagggagttttacagcgaggaccatccaggtgtgttgattgatgttatgacgatggttggaccgagagccgtgtaccggatacctggaccgaccgtggccagcggtgccacgagaattccgcactcattgcagacgagcgccgagacgtgggtggaagggacgccggtggccgtgacgagggcgacggaaacggttcagatggagataactacgacacctgcaggtcagggagccggtgtgaggacagctacccctgccatgccgacaccaacagtgacgaagaggtggaagggaagatttgagatgggtaggccatga

SEQ ID NO: 65 - DNA, 3163 bp, Scytalidium thermophilum
atgctcataaagcggtgcctcgcgctgccgtacgcgctcgcgagcctcccggcactggggctagcgctccttgaagagcgcttcattgctttcgacgtcgatgtcgccgacaaacccaccgcaattagcatcaccaatgcgcagatcgtagtggcagaggacgatttcatcggggtgcacatcgccgccaacagtcttgcccgcgacttggaggctatcacaggcatcccgagggcggtcagcaacgcgaccttgactgatatttctgtggtcgatgacacggatccagttatcatcgcgggctctttgaactcatcattgatccgcgacttaacttccgagggtctgattgattcttcagaaattgaggggaaatgggaagcgttcaagacgacagtgatcacagtcccctcgtcagggcacaaacgagccctggtcatcgccggtagcgacaaacgaggtaccattttcggcatccacacactggcagagcagagcggacaaagcccctggcattggtgggcagatgtgccacctcagaaacacgagcagctgtttgccctcaacaagacgacggtccatggtgagccttcggtcaagtaccgcggcttgttcatcaacgatgaggagcctggcttgaacaactggtgggcacgccggaataacgcaacgcggtatcctctcaactcggagttctactcgcacgtgtttgacctgctgctccggctgaaggcaaacttcctctggccagcgatgtggaactcgttcacacctgtaggtctaatatctccgcgaatgtgggcatcagaatagcttctcacaagcctcacagcccccgggaaacatcttcttcacggacgaccctcgcaaccagcagctggccgatgattacggaattgtcatttcaacagcacaccatgagccaatgcacagggcgaccaacgaatggaacgtgacggagcttggcccatgggactggtccaagaaccgggagaacataacgaagttcttcgacgaagggattgcgcgcgcagggaagaatgagagcttgatcaccatcggtatgcgtggtctcggagacgaggctgcacagacagagaacgccatcaagatgctggaggaggtgttcgccgtgcaacgaggtatcatcaagaaataccacggatccgaggacgcattcccccaggtatgggctctgtacaaggaggtcacgacgtactacgacagcggactcaacccaccggatgacgtgacaatcctcttcccggacgacaatcaaggccaggcctaccgactgcccaccggaaacgagacaacgagacccggcggcaccggattctatttccacctccagtaccttggccttcctcgagcatacaaatggcacaacagcaacaaccttgctaaggtcctcaaggagctgttgcatgctcatcttcgaggtgctaaccagatctggatcatcaacgtcggtgaccttaaacccatggaactgcctctcactttgtcgatggatttagcatggaatgcttcgagcatctcgttcgagagtctcccagaatacgtggcgcagttcgtggcgagggagattggtccagacattgctgaagaggttgccgaggtgctgatggaacattctcgtctggtcggcatgcgccggtatgagcatgtcactcatgacacctactcaaccctgaacttccacgaagccgaaagagtactcacccgatgggagcagctcgctgcccgggtgcgcgacctggctacgcgagtcgaggaagcccgtcagccggccttctttcagttggtgcagcagcctgtcctcgccggagcacacttccatgccgtggctatcaagaccgccttcaactaccgatatgccttggagaggcgcaactcagccaatcttctcgcgtctcaggttctcgaggagtttgaagctgcgtacgacctgagggaggagtgggatgccatgctggatggcaaatgggccgacatcatgctgcaagccgtctacgacgcggtcgaagaaccgaaacgctgggccaacccctcgagagacatcgccgtgaacctgtcctacgtgcagctcagacaaaacatgcaaccatctctgggcaatctcgggatctacgccgagggctcgaccagccccatcaaccaaggccgctgggccgagagcgttgacgcgtccatgcccaccaccaactacggagccgtcctcccgcagatagacccctacggtccgccggtcagacacgtcgacctcttcatgcgcggcgactaccgcgtgccgatcgaatgggcgctggatccgatccccgttccctggctctccatcacgccgaccaacggcaccctgcacaaagaccacccagaccagcggctcaacatcaccatctcctggccctccgttccgaccgatttcaacgataccgtcctcgtcggcatccgcgccaagccctcgcgcatcccgtacttcgacctcatccgcatccccgtcctcaaccgccgcacgccgcccgacttcaccggctttcctgaatccgcgggctacgtctccatcgaaggcgcacactttgaccggttcctatccaccgttgctgcacctcctagtagccttaacaacaacaccaaagccgaccacccacgcgtcggattcgcccacatcccccacctcggcacgcgcagcacctcaggcagcctcgccctccgccccttccacgccgcgcgggaagaccaggaatccgcgcgcgccgcggtcgccgtgttccccttctacctcttcacgcccgccgacaacctcgtcgcgacggtgtacatcaacgcggggctggacaccgaccccgcgctcaagatggaattctcgctaaccgtcgacgcggcgccggccaacttcacccgcgtgttgggcgactacattgaagtgcccgcggccggggcgatgccgcccgagtggatgccgcaggtgatggatcaggtgtggacgaagagggtggaattggggagggtggagcagggagagcggtggttggtttggaggacgaattcaccagaggtgtatctggagaagattgttttggataagacgggggagaatgtcggggcgagttatcttgggccgccggaaacaaagtgggtgagaggggagtttggggagtga

SEQ ID NO: 66 - DNA, 1023 bp, Scytalidium thermophilum
atgcacgtccaatctctccttgccggagcgctcgctctggctccgtcggcgtctgctcacttcctcttcccacacctgatgctgaacggtgtccgcacgggagccttcgagtatgtccgggagcacgacttcggcttcatgccgcacaacaacgactggatcaactcgcccgatttccgttgcaacgaggggtcctggcgtcatcgccgcgagcccaagactgccgtggtcacagctggcgttgatgttgtgggcttcaacttgcacctggatttcgacctgtaccatccgggtcccgtaactgtaagtatttgcgtcaggacggacatccctgggtcgttcactaataagtctcttaccgcagatctacctctcccgcgcccccggtgatgtgcgcgactacgacggctcgggtgactggttcaaggtgtaccagctgggcacccgccagcccttcaacggcactgacgagggctgggccacttggaagatgaagaactggcagttccgcctgcccgccgagatccccgcgggcgagtacctgatgcgcatcgagcagatgagcgtgcaccctccttaccgtcagaaggagtggtacgtgcagtgcgcccacctcaagatcaacagcaactacaacggccccgcgcccggcccgaccatcaagattcccggagggtacaagatcagcgatcctgcgattcagtatgaccagtgggcccagccgccgccgacgtacgcgcccatgccgggaccggcgctgtggcccaacaacaatcctcagcagggcaacccgaatcagggcggaaataacggcggtggtaaccagggcggcggcaatggtggctgcaccgttccgaagtggtatgtagaattcttcactattatcatgagatgcagcgttggacttgtgcttacacctagaacaggggccaatgcggtggtcagggctacagcgggtgcaggaactgcgagtctggctcgacatgccgtgcccagaacgactggtactcgcagtgcctgtaa

SEQ ID NO: 67 - DNA, 459 bp, Scytalidium thermophilum
atgcgcctctcctctattctcaccatcatcaccgccgctttcacttccagcatcaccgctattcccgcttcccccaacaccgacaacaaccccatcaaaaccctccaagtccgcgagggcgaccactgctacgaatcgaccttccacggcgagaccttcaacggctccgccttgatcaccgactgccagcagctcgccgacagcctcgacgggaacctgagcaaggaggtcgacaagtacgagcgtccctacgccatccacgggacctgcaagttcttggtgtacaacaacatccggccctaccactacatcgccagggtcggcgatcaggacgtcaaggacatcattcgcgactcgatcagcaagtttggccgcgatggacgcgtgggtgcccgtggtacgatgaggtgcaatccggggaatcaatatgtttcgtggtctattcggcgggagaattag

SEQ ID NO: 68 - DNA, 2358 bp, Scytalidium thermophilum
atgatattctcaaagctcacgtcgcttctcctcctagccgtgggcctaagcgccccggccctggctgccccgactccccggcaagagaccggctggtggctggccagcatcccgcgtcagggccgcccagccttcaacccggatccgaactacaaggtattccggaacgtgcgcgactacggtgccaggggtgacggtgttacggatgacacggacgccatcaacgcggctatcagcgacggcaaccgctgcggttttggttgctcatcgcagacgacgacgccagccctcgtttacttccctcccggaacctacctggtcagccgccccatcatccccttctactacacccagctcgtcggcgacgccatttctcttccgaccctcaaggccgcccccgactttgccggcatcgccgtcatcgactcggacccctacgacgacactggccgcaactggtggaccaaccagaacaacttcttccggcaggttcgcaactttgtcatcgatgtgacggccatgcccctggagtcgggcaccggcattcactggcaggtggcccaggcgacgagcttgcagaacatcgttttcaacatgcgcaccgacggtggcgaggccaaccagcagcagggcatcttcatggacaacggctcgggcggcttcatgtcggacttgaccttcaacggcggtcgctttggcgctttctttggtaaccagcagttcacgacgcgcaacctcaccttcaacaactgccagacggccatcttcatgaactggaactgggcctggaccttccatgacatcaagatcaacaactgccaagttggcatcgacatgtccaacggcggacctggggcccaaaccgtcggctccgtcctcgtcttggacagcgagtttaccaacacgcccatcgccgtcaagaccgcttacgacccgtcctcccctcagaccaacggcacgctcattctcgacaacgtcgacctcactggttctgcccagggtgttgtcaacgtcgacggcgccacgatccaggccggtaaccaaaaggttgccttcttcgcccaaggtcgtgcctatggcggcccagaggcggctggcgcgcccactgttggccgcgcagtgcagtctgcgctcgaccaggtccagaagcccgacgccctccttgacccggccacgggcaaggttttcacccgcagcaagccgcagtacgagaacgttcccgtgagccagttcgtcagcgtcaaggccaacggtgccaagggcgacggccagaccgatgacacggccgccatccaagccatctttgaccgcgccacgcccgaccaggtcgtttacttcgaccacggcgcctacctcatcaccagcaccgtgcgcgtgcccaagaacatccgcatcacgggcgagtcgctccccctcatcctcgccgccggcgacagcttcttcaagaaccaggacgacccgaagcccgtgttccaggtcggccagccgggtgacaagggcgccgtggagatgtccgatctcatctttggcaccgccggggcccagccgggcgccatcctaatcgagtggaacctggccggcgaccagcccggcgcggccgccatgtgggacgtccacgtccgcattggcggctacgccggcacccagctcgagctggagcagtgcgccaagaaccccaacgtcaccaaccccatcccggagcagtgcttcggcgccttcatgatgatgcacgtccccgcgggcggcagcgtctacctcgagaatacctggttctgggtggccgaccactcgctcgagcccgaggcgcgcgaccagcagatcgacgtgttcaacgggcgcggcgtgctgttcgagggtgacggccccgtctggggctggggtaccgcctcggagcactcggttctgtacaactaccagttcaacaacgcccgcaacatctacctcgcgctcatccagaccgagaccccttactaccagggcaacccggacgcgacccagccgttccgtgtccaggccaagtacgccgacccggactttgccgcctactgcaccggcgagcgcgacacgccgggctgcaagcgcgcgtggggcgtgagggccatcaacaccaaggactcgttcatctacggcgcgggcctgtactcgttctttgacaactatgctcaggagtgcctggcgacggagtcgtgccaggaccacatggtatcgctcgagcaaggcagccaggtgcacttttacggtctcagcaccaaagccagcgtcaacatgctgacggtggacggggctggcgttgcgttcgatcgggataacaggaataacttttgcgccacgctggcgttcttccacccaacggcataa

SEQ ID NO: 69 - DNA, 1479 bp, Scytalidium thermophilum
atgagctccctcatgcttccattcatggctggctccggcaacccggtccacggcccgcccgatgcgccctgccctcgcatcccgccggggccaggtcgcatcgacgacacccaaccactccgtcatggtgaggtttgcgagggtccgtctgtcaacatgacttggtctcgcccaacataaagcgacctcgcgccgcccctccatcctcagctcgcctgggtcctgcctctccctcctcaggcacacgcttcccactgccgacttgtatctgcccgtcaagatgcatctcgcttcgtcgctctttctgctcgccactctgcccttcggcttcgctgctggcaagggcaagggcaagggcaaggacaacagcgatgttggcctcgacgtcctggccaagaaggccggcctgaagtacttcggtgccgccaccgacacgcccggccagcgggagcgcgccggtcttgaggataaatatcccgagtatgacaggatcatgtggcattcgcccgagttcggctcgaccacgcccaccaacggccagaaggtcagttgcagtcccagtcccggtgcaccacttctctggatagtatcaatactgacatgctccttcagtggctgtttgttgagcccgagcgcggcgtcttcaacttcaccgagggcgacgtcgttgcctccaaggcccgccagcacggcaagctgctgcgctgccacgctctcgtctggcacagccagctggctccctgggtcgaggagaccgagtggactccggaggagctgcgcaaggtcatcgtcgaccacatcaccgccgtcgccggccactacaagggccagtgctacgcctgggacgttgtcaacgaggcgctgaacgaggacggaacctaccgcgagagcgttttctacaaggttctcggcgaggagtacatcaagcttgccttcgagaccgccgccaaggtcgaccctaaggccaagctctactacaacgactacaacctcgagtggccctcggccaagacggagggcgccaagcgcatcgtcaagctcctcaaggacgccaagatccccatccacggcgtcggcctgcaggcccacctcatcgccgagcagcaccccacgctcgacgaccacattgccgccatccgcggcttcacccagctcggcgtcgaggtggctctcaccgagctcgacatccgcctcaagaccccggccaccgaggagaaccttgccctgcagcgcgaggcctacaagaacgtcgtcggcgcctgcgtccaggtctgcggctgcgtcggtgtcaccatctgggacttctatgatcccttcagctgggtcccctacttcttcgagggcgagggtgctcccctcctgtggttcgaggacttcagcaagcaccccgcctactacggcgtcgttgaggccctcaccaacaagactcgccgctcgaagcgcagcatttcggaccgccgggccaagctcctggcttaa

SEQ ID NO: 70 - DNA, 798 bp, Scytalidium thermophilum
atgaagtccttgctcctcgcacttctctctgtctccctagccttggccaagccggcggtcatcctcccaagagcacccaacccacccaaggctctaccccaaaaggcgacagctaacgacttgcgctggcagccagtgcttgactttgacaaggacggctgctacaacgtgccggccatcgatgctgagggaaacatcgccaaaggtctccctcacaattacaccggtctctccagcgactgccgcgacgcctccgatctcgataacaacaacgtctactcccgccagcggtgcaacaacggttggtgcgcatacctgtacgattactacttcgaaaaggacgtggctgtagcccacgtacaaaacatcggtcacaggcatgactgggaacacgtggttgtctgggtgcgcaacaacaaagccgagtacgtcgcggcgtcacggcacaacgggtacacgatcaataaggcgagcgacgtccgttggctgggcacccacccaaagatcatctaccataaagacggcgggctcacgcacgcctttcgattcgcgaaggccgccgacgagaaaattgaagaccacaagggtgtatggttccgaggggctctcgtttcgtacaacgggttcccgtccacggcaatccgagacaaactatgtgcttacgacttcgatgaagtgacgattgcgttcaaggatgccgaatttgcgggcaacctgaggaaagccaagcccaaagagatcaagaactttaatgtgggctgggatgatccggctactggttccccggggtttccctag

SEQ ID NO: 71 - DNA, 1059 bp, Scytalidium thermophilum
atgcgtaccgccacagctcttgccgccgccgtctgggctggcgctgtcgccgccctgccgacccagacgcggtctacgactctcccgagcagctggaaatgggtttctaccgggccgctcgtcttccccaagaacgacgaacgcaacatcgccggcatcaaggaccctaccgccgtcctgatcaacggcacctaccatgtctttgccagcacggccaagtccgaaggctacaacatggtgtacttcaacttcaccgactttgccgaggccaacaacgctcccttctactatctcgaccaagcccctctcggctacggctaccgcgcggctccgcaagtcttctacttcgagcctcacaaactctggtacctcgtctaccagaacggcaacgccgcctactccaccaacccagatatcaacgacccctccaagtggaccgcgccggaggtcttctaccccaacggcatgcccaagatcatcgcagacaacatcggcaacggctactgggttgacatgtgggtggtctgcgatgatgaggaggatccgaacaaggcgctctgccacctcttctcgtccgacgacaacggccatctttaccgctcgcaaaccaccctcgcccagttcccgcgcggcatgagcgagcctgagatcgtgctgcaggacacccagaacatctacgccctctgggaagccgcgtgcatctaccgcatcaagggcgccgagggcacccagaagtatctcctcctcgtcgaggccatcggccaggaaggtcacaggtacttccgctcgtggacgtcggatcggattgatgggcagtggattcctctggctgatactgaggccaacccgtgggctggcgaggcgaatgtggtgtttgagggccagaagtggaccaagagcatcagccacggcgaagtgatcaggaccttgacggaccagaccttgacgctggatctgagcgagccgatccagttcctgtaccagggtgtggatcctaatgcgcagactgagtataacgccctgccgtggaggttggggttgatcactcaggtgttgtaa

SEQ ID NO: 72 - DNA, 1446 bp, Scytalidium thermophilum
atgcgcttctcggttttcacagcggccatcgccgcggccttctcagcatgctgcgctgcagcctcaccggccgtgaactatgtcaactcactcattctgcaacgggccgaccctcacatcgtcaagcacactgatgggtggtactacttcacggcaacagtccccgaatatgaccgcattgtcctgcggagggcacaaaccatccaaggcctgcaatcggcgcccgagacggtaatctggcggcgcaaggccttcggcgtcgggagcgggcaggtgtgggccccggagctgcactacatcgacggccgttggtacatctacgtcgcgctgggagtgtccgggcagtggcgcatccgggcgttcgtgctggaaggcgttggcgcaaacccgctgacggcctcgtggaccgagaagggcatcatccaaactaactgggacaccttttcactggacgcaacaaccttcgtggccaacggcacgcggtatctcgtctgggcgcagcaggatccttcgcgcaacggtgagaactccagcctgttcatcgcgccgttgcaaaacccctggacgattcgcggaccagccgtcgccatctctcatccggacttgtcctgggagcgaattggctacaaagtcaacgagggacccgccgtcatccagcgcaacggccgcatcttcctgacctactcggccagcgccacggaccacaactattgcatgggcttgttgacggcccgggccgatgccaatctgatgaaccctgcctcgtgggtgaagtcgcaacagcccatcttcgtgagcaacgcggcaaccaaccagtggggtccgggacataaccagttcacggtctcggaggacggcctcagcgacattctcgtctaccacgaccgcggataccgtgacatcaacggcgacccgctcaacgacccgaaccggcggacgcgggtacagaagctgtactggcgtgacgacggcaccccggactttgggattcccgtgcccgacggcccgacgccggtcaggctccgggttgctgcaaatggcgcgtcgagtaatggtgcatatgtccgcttttacacgacgacgggatcggggaacttgaccggaactgcggcacttcccgatacgcaattcaagctcgtgagcccgggtcttgcgggcggggatagcgtgagtctggagtcaacgagcaaccccggtacgtatgtgcggcgggtgagcggaaccacggcggtgcagtttgagcgagggacggcactgaacaccgctgcgctgcgggcatcggcgagcttccggagagtgccggggctgtccgactccgggggagcggtgtcgtttgagtcggtcgagtctccggggcaatatctcaggttggatccgaatgggcgtttgtccgtggcgtcagtggctgaggggactcaggggaggtcaaccttttatttggagtag

SEQ ID NO: 73 - DNA, 928 bp, Scytalidium thermophilum
atgaagactctcgcatccgccctcattgccgcgggccttctggcccagcacgccgctgcccatgccattttccagtttgccagcagcggtggcactgactttgggacgtcctgtgttaggatgccggtgagtgaacgggtgcccctgaacatgtgttgctcacgaaacaaggttatgttgactctaaacagcccaacaactctcccgtcacgagcgtcaccagcagtgacatggcttgcaatgttggcggatctcgcggtgtatctggcatttgcgaggtgaacggtaagagttctcctcagccttttctctgtcaagcactaaacagcactcgctaaccatttcaatctcagccggctccgacttcaccgtcgagatgcacgcgcagcccaacgaccggtcgtgcgccagcgaagccattggcggcaaccacttcgggcccgtcatggtgtacatggccaaggtggacgacgcgacgcaggcggacggtgcgtcggcgtcctggttcaaggtggacgagttcggctacgacgccggctccaagacatggggaaccgacatgctcaacaagaactgcggcaagcggacgttccgcatcccgagcaagatcccgtctggggactatctggtgcgtgcggaggctatcgctttgcacaccgcgggccagccgtcgggtgcgcagttttatatgagctgctatgtgagttcttccatgcttccccttgtggtgtcacggtatagaagatgctaatatctcccacagcaagttcgtatcaagggcagcaacaacggtcagcttccggctggtgttcggattcctggcgcctacagcgcgacggacccgggcatcctcgtcgatatctggggtaatggtttcagccagtacactattcctggccctcgtgtcattgatgggagctttttctga

SEQ ID NO: 74 - DNA, 1536 bp, Scytalidium thermophilum
atgcgttctgtttcccttcttgcggccgctttcgcgccgctggctacggcacacacggtctttacagctcttttcatcaacaacgtccaccagggcgacggcacttgcgtccgtatggctaagcagggcaacctcgccacccatcccgtcagtctgaacagcaatgagatggcctgcggtgggtaggccccgttcctcgagcagctgatctcgaactaacatgttgattcttgaactccaggtcgcgatggccaacaaccagtggcatttacttgcccagcacctgcgggagccaagctgaccttattgtttcgtatgtgggcagatggctctcagccaggttccatcgacaagtctcacgttggtcccatgtccatctacctcaagaaagtctcagatatgaacaccgactcggccgcagggcccgggtggttcaagatctggagtgagggctacgacgctgcgacgaagaaatgggccacggagaaactcatcgccaacaacggtttgctcagcgtcaacctacctcccggcctccctgcaggctactacctcgcccgccacgaagtcgtcactctccaaaacgtcaccaacaacaaggccgatccgcagttctacgtcggctgtgcgcagctgttcgtccaagggttgggcaccgccgcctccgtacctgctgacaaaaccgtttccatccccggccatctgaaccccaacgacccggcgctggtattcaacccctatacccaaaacgctgcgacatacccaagcttcggcccaccgctcttcttcccaagtgctgcttcggcgggatcaaacaaggcccagtcaacactcaagcaaacctccggcgtcatcccctccgactgcctcatcaaaaacgccaactggtgcggccgtgaagttcccgactataccaacgaggcgggatgctggacggcggcggggaactgttgggagcaggctgatcaatgctacaagacagccccgccatcgggccataagggatgcaagatctgggaggagcagaagtgcaacgtcatccagaactcctgtgaagcgaaacggttttctggcccgccaaacaggggggtcaagtttgctgatatggatgtgaatcagcctgttccgtgggcgatccccgaggcagtgaatgctggacagcagggggaggcggttgttgttgacggcacaacgagctcggcggatgagaaggcgagcgagaatttgacgacatcgtctctaccgacgccgacgcctgcggcagaggaaaacgagaaggaggatgaaagactgactcttgatccgaccctgacggaggacgagtcgtttttctcagttgagccaacgtctgagcctactggtgttcaggttgaggtgcctttgacaactgtggtcctcctgccaacgctcacctcatctttgaattcattgccaaccccgacctcaatttcccagccggctcaccccggaagaccatgcacaggtcgccgtcgtaggccgaggccaggttttccgaaacacccgcgcgatttttaa

SEQ ID NO: 75 - DNA, 998 bp, Scytalidium thermophilum
atgaagttcctcagctacttctcatccgcgctcgccctcctgggcagcgccgtcactgcgcaccccgtcttcaacgagttgatgacgccggtggcgccgttgaagcgcgctacgggagctttccagcaggttcccaacttcggacccaacccgtcgggggctaagttcttcctttacactcccaaccggattgcggagaaccctgccatcgtcgtggccattcactactgcaccggcacggccagggcgtactacagcgggtcgccctatgcgcagcttgctgaccagaagggcttcattgtcattttccccgagtcgccctacagcggcacctgctgggatgtctcgtcccggtcgacgctgacgcacaacggcggcggcaacagcaacgccattgccaacatggtgacgtggacgctcgagaggtataacgctgatcccaagaaggtcttcgtcgttggcgagtcctcgggcggcatgatgaccaacgtcatggcggccacgtacccggagatgtttgccgcgggtatcgtctactcggggacgccggccgggtgcttctacagccagagtggtgccgtcaatgcctggaacaacacctgctccaatggccagatcaacagcacgccggaggtttgggcaaaggtaagagcccggcacatgattttagatattccgtgagcaagtactgattctattctcagatggtcttcgacatgtaccccggctatgacggcccgcggcccaagatgcaaatctaccatggctcgaacgacaatatcctccatgccaacaactacagggagaccatcaagcaatggtgcggcgtgtttggctacgatcccaaccggccggatactacgcagtccaacacccctcagtggggttacaccacgtacacctggggtaacggccagctggtgggtgtttatgctcagggcgttgggcacagcgtgccgctccgtggacaggacgatatgaggttcttcgggttgtga

SEQ ID NO: 76 - DNA, 1607 bp, Scytalidium thermophilum
atgcggttcttgtcacttactgttgtggcgacgctctcgcgcctagtttcagcttctttgcagatcgtgcctggagggacctggaccacagtaagcatgcacccgacttgaaggtgaccgtggtgcccaaatttgacgtattaaactaatcgtcgcagtccgacggcgagcatctccaagcacacggcgccgggtttgtttacgaaaatgggacatactacatgatcggcgaggacaagagcggcggccacagtttcactaatgtcaactgctatgcctccacggacttggttcaatggaccaaagtcggcgccttgttgtcgcagcagccgtctggggaccttggcccgaaccgcgtggtcgaacggccgaaggtgatctacaacgaccgcacacggaaatatgttttgtggatgcacatggatagcagcaactatggcgaggcgcgcgttgcggtagccactggcgatagcgtgtgtgggaggtaccagtatattcggagtttccaaccgtgagtgttggccatcttccgcaacatggtgacaaaggtcgttggctaattaaactgcggatagacttgggaggcaaagccgtgacatgggcttgttcaaggatgatgacggcaaaggctacctactaactgaagatgttcgttctccaactcccgagcaacccttgtcctgacagatactaacccctccctcagcgccagcacggcctccgcattgtggccctctccgacgactacctcaaccccacgcaagatgtcttttcatggcgtctcgaaggcggaaaccgcgtcgaagctccggccatggtcaagctcggcggcacatattacctcttcgcaagcatgatgacgggctgggactccaacgacaaccagtacacgacagccacaaacctgcgcgggccgtggtctccgtggaggaagttcgccgactctgggtccaatgtcagtctcctgtcgtcgatccttagtgcacgcctgacactgtctaacatcttaccaacagacttacaactcccaaaccacttacatcctgaaaaccagcgagaacagcgccatctacatgggcgaccgctgggtcaaggacaacctgatggctagcacctacgtctggcttcccttacaaatcagcggcacgaccgtgaccatgaagaaccgcgtcaactgggtccctaccaaccagcccgccttctggacagccggccctaccgagacccaatacgagggcgagaatgcgatctatggcggcagagcgcgcactgtcgattgttctcagtgctcaggcaagcgggcggcagggtacatcggcgggccggatcggggcaccgtcacgttcaccggcattcgcagcgacatcgacggtatgaccacaatccggatcaagttcctcaatggcgacagcacaccccgctacgcctgggtgcgggtgaatggagatgccggaaggaaggttgctttcctgactgcgaggggcgatccggcgagcagcacgctccacgtctccttgaggaggggcaacagtaacaccatcacatttgagggatacaacggcggttggggcccggatattgaccggctgatggtgccagtgtcttag

SEQ ID NO: 77 - DNA, 1404 bp, Scytalidium thermophilum
atgcgcgtttctcttgcgatcctcgcctacctgctcagcgccgccggcgcctcgcccgtcccggagctcgagccccggcagtccggcaaccccttctccggccgcaccctgctggtcaactcggactatagcagcaagctcgaccagacgcgccaggccttcctgtcccgcggcgaccagaccaacgctgccaaggtcaagtacatccaggagaaggttggcaccttttattggatctccaacatcttcctcctgcgcgacatcgacgttgccatccagaatgcgcgcgccgctaaggcccgcggcgagaaccccatcgtcggtctcgtcctgtacaacctccccgaccgcgactgcagcgccggcgagtcctctggcgagcttaagctctcccagaacggcctgaaccggtacaagaacgagtacgtcaacccgttcgcccagaagctcaaggccgcgtccgacgtggagttcgccgtcatcctcgagcccgatgccatcggcaacatggtcacgggcaccagcgccttctgccgcaacgcccgcggccctcagcaggaggccatcggctatgccatctctcagctccaggccagccacatccacctctacctggatgtcgccaacggcggctggctcggctgggccgataagctcgagccaagtatgtgatatcctcctcccccctccttactagcaaagaaccaccacatactaacccctccaccagctgcccaggaggtcgccgccatcctccaaaaggccggtaacaacgccaagatccgcggcttctccagcaacgtctccaactacaacccctattccaccagcaacccgccaccctacacctcgggcagcccgtcgcccgacgagtcgcgctacgccaccaacatcgccaacgccatgcgccagcgcggcctgccgacccagttcatcatcgaccagagccgcgtcgcgctcaacggcgcccgcagcgagtggggccaatggtgcaacgtgaaccccgccggcttcggccagcccttcaccaccaacaccaacaaccccaacgtcgacgccatcgtctgggtcaagcccggcggcgagtcggacggccagtgcggcatgggcggcgccccggccgccggcatgtggttcgacgcgtacgcgcagatgctgacgcagaacgcccacgaggagatcgcccgcggcgccgccggcagcggtggtggcaacaacggcggcggcaacaacaacccgtccccgaccaacccgaccaacccgggcccgaccagcaacccgggcggcggcaactgcgcgagcaagtggggccagtgcggcggtcagggatgggccggcccgacctgctgcgaggctgggtcgacttgcacccgccagaacgagtggtactcgcagtgcctgtaa

SEQ ID NO: 78 - DNA, 1324 bp, Scytalidium thermophilum
atgcctctcgctctatttcatcttgccctccttctcttctgggccccatacaccgctgccgccccatccaacaacatccagaaacgctccttcaagctcgaccgaatccggaatccaaacttccaacgccatgggcctcggcagctcttgaacgcctatcagaaatatcgcatgcccattccccaggacctcttgaatgccctggagaccggcgacgaggatgccacttctgaccaccggcccgcttcagcgagcagctttagactcactgaggccagcggctccagcaccggcagggtcccggccacgccagccaacggaggcatcgagtacgtttctcccatagagattggtggtcaaacggtccatgttgccatcgactcaggttcggcagatctttgggttttcagtaccctgcttccccctttcgccagagccggccatcaagtgtacgatcctgctcgctctgcttcatccagagtcctcccaaacgccaacttctccatctactatggagatggcaccagcgcctcgggcgttgtggttctcgatacagtgaatgtgggcggtgcgtatgtgaggaaccaggccgtgcagatggccaactgggtctcggcaacctttgttcaggacaagagcctcagcggcctcctcggtcttgctttctccaagctcaacacggtgaagcccgttcggcaagccacgtttttcgaaaatgtcatgcccttccttgcccagcccctctttaccgctgatcttccccacgacgccgtcggtgcctttgagtttggctacatcgacacaaacaagtttgtgggccctctgacctgggtccaagcagatacagctatgggcttttggcaggtctcgacctccttttttcgcgtgggtgacgtcgagacccagcacgcacctggacaggccatcatcgacaccgggaccacgctcatgttggtttcccaagaactcgttgatggctactaccagcacgtcccagacgctcacaggagccccgtctatggcggtatcgtatttccctgcaacacgactctgcctgatctttggcttgacgtgggcggcgttcatatggctcgagtccgaggttctgacatcaattttggtccgctcaaagatggatgtaagccggtcactccaaataattgtgctgttcaggtcatggagctaataacctatcgcagtgtgctatggcggtctccagcgaactacctccccgttgcaaatatggggtgacatcttcttcaggtcgcagtttgtcgtttttcatgggggtaaccactcgctgggactggcacctcgtgcctga

SEQ ID NO: 79 - DNA, 2264 bp, Scytalidium thermophilum
atgggtatcttcggtctcgcattgctggccgccgcggccattgcccgggccgcgcctaactgccctgtggtgccccgccaggcatcgggcaccgctgcttgggatacggcgtacgcctcggccagagccgccgtggcccggctttcccagcaggacaagatcaacattgtcaccggtatcggttgggagaggggcccttgcgtcggcaacacggcgcccgtcaactccatcggctatcctcagctctgcctccaggacggtcccttgggtattcgcttcgccacgggcacgaccgcttttacccccggtgttcaggcggcgtccacctgggatgttgacctgatccgccagcgtggtgagtacctgggcgcagaggctcgtgctgtcggtgttcacgtgctgctgggtcctgtggccggcgccctcggcaagattcctcatggtggacgcaactgggagggtttcggctcggacccgtacctcgcgggtatctgcatggctgagaccatcgaggccattcagtcccagggtgtccaggcctgcgccaagcactacatcgtcaacgagcaggagtggatgcgtgagacgatgagcagcaatgtcgacgaccgcaccatgcacgagatttacctgtggcccttcgccgatgccgcccactccaacgtggccagcttcatgtgcagctacaacaagatcaacggcacctgggcctgcgagagcgacagcgtccagaacaagcttctcaagcaggagctcggcttccgcggctacatcatgagcgactggaacgcccagcacaccaccgtcggctccgccaacagcggcatggacatgaccatgcccggcaccgacttcaacggcggcaacgtgctctggggcccgcagctcaacaatgccgtcaactcgggccaggtttcgcgcgcccgtctcgacgacatggccacccgcatcctcgccgcctggtacctggtcggccaggataagggctacccgcaggtcaacctccgcctcaacgtccagggcaaccacaaggagaacgtgcgcgctgtggctcgcgacggcatcgttctgctccgcaacgagggcaacatcctgcccctcggccgcccgtctcgcatcgccgtcgtcggctctggtgccgtcatcggccgccacgcccagaacggctgccaggacaagggctgcaacgacggcgccctcggcatgggctggggctccggttccgtcaactacccctacttcgtcgccccctatgacgccatccgcgagcgcgccagccgcgacggcacccaggtttctctccacagctccgataacaccaacggcgtccagaacgtcgtccagggcgccgacgtcgccatcgtcttcatcacggccgactcgggcgagggttacatcaccgtcgagggccaccccggcgaccgcaaccacctcgacccctggcacaacggcaaccagctcgtgcaggcggtggccgcggccaacaagaacaccatcgtcgtggtgcacagcacgggccccatcattctcgagaccatcctcaacacgcccggtgtccgcgctgtcgtctgggccggtctgcccagccaggagaacggcaacgccattgtggatatcctctacggctcgacctcgccgtcgggtaagctcgtgtacaccatcgccaagcgccctgaggattacggcgtcagcatcgttcgcggcgatgacaacttccgtgagggcgtgtttgtggactaccgctggttcgaccagaacaacatcgagccgcgcttcgagttcggcttcggcttgtgtacgtcattacttaatttccctttaccctgaaacgtacgtactgacgcattcttcttccagcctacaccaacttcagctactccggcctctccatcacctccaacgcgcgcgctggcccggccacgggccagaccatccccggcggccccgccgacctatgggagacggtcgccaccgtcaccgcccagatcaccaacacgggcggcgtcgccggcgccgaggtcgctcagctctacctcaccctgccgccgactgccccgcccgccggcccgcgtcagctccgcggcttcaccaagctcaagctccagcccggccagaccggcacggccacgttcaagctccggaagagggatctcagctactgggatgtcggtcggcagcagtgggttgtcccttcgggcaggtttacgattagtgtcggtgctagctcgagggatattcggttgacgggcagcattgatgtttaa

SEQ ID NO: 80 - DNA, 1586 bp, Scytalidium thermophilum
atggtcgaccactcgggaacattgtctgtttcgtcttcggaggctcggaaggtgctccgtggtggtgtgaagggggaggtgaaggaaggacataagaaggcggccgtgatcgcctcctcgctggcttggggcttcttcttggtcaccgtcgttcacggcctgggttgtagatcgtcctgctccctagaaaccagtcactcattcataatgcgttctatcgctctcgctcttgctgcggctccggccgtcctcgcccagtcccagctctggggccagtgcggcggcattggctggaacggccctacgacttgcgtctcgggcgctacctgcaccaagatcaacgactggtatcaccagtgcctgcccggcggcaacaacaacaacccgcccccggccacgacctcccagtggacccctcctcccgcccagaccagcagcaatcctcctcccaacaacggcggcggtggtggcaacactctccatgagaagttcaaggccaggggcaagcagtacttcggtactgagatcgaccactaccacctcaacaacaaccagctcatggagattgcccgccgtgagttcggccagatcacccatgagaacagcatgaagtgggatgctactgagcgtaagttttgcctcatatgaccccttgacacatcaggcgcgaggctgactgccttcacctacagcgagccgtggcagcttcagcttcggcaacgctgaccgcgttgttgactgggccacttccaacggcaagctgatccgtggccacactctcctgtggcactctcagctcccgcagtgggtgcagaacatcaacgaccgcaacaccctcacccaggtcattgagaaccacgtcaagaccgtcatgacccgctacaagggcaagatcttccactatgacgttgtcaatgagatcctcgacgagaacggaggcctccgcaacagcgttttctctcgtgtcctcggtgaggacttcgttggcatcgcgttccgcgctgcccgcgccaccgaccctgatgccaagctctacatcaacgactacaacctggacagcgccaactacgctaagacccgcggcatgatcaacctggtcaacaagtgggtttcgcaggtacgttgctgtgctcgttttcctcttcccccccttttcccttgaagccatcaccaaaccctaaccctctccaccgcccccctatcgtccacaccatttcatattgccggtgcgcagttcgctgacattctctgcttttcagggtgttcccattgatggcattggcactcaggctcacttggccggtcccggtggctggaacccggcttctggtgtccctgctgctctccaggctcttgctggcgccaacgtcaaggaggtcgccatcaccgagctcgatatccagggcgctggtgccaacgactacgtcaccgtcgccaacgcttgcctcaacgtccagaagtgcgtcggtatcaccgtctggggtatctcggaccgcgacagctggcgctcgaacgagaacccgctgctctacgacggcagctaccgcccgaaggctgcttacaacgccctgatgaacgctctctaa

SEQ ID NO: 81 - DNA, 1662 bp, Scytalidium thermophilum
atgcgtaccgccaagttcgccaccctcgccgcccttgtggcctcggccgccgcccagcaggcgtgcagcctcaccaccgagaggcacccttccctctcctggaagaagtgcaccgccggcggccagtgccagaccgtccaggcttccatcactctcgactccaactggcgctggactcaccaggtgtctggctccaccaactgctacacgggcaacgagtgggattctagcatctgcactgatgccaagtcgtgcgctcagaactgctgcgtcgatggtgctgactacaccagcacctatggcatcaccaccaacggtgattccctgagcctcaagttcgtcaccaagggccagtactcgaccaacgtcggctcgcgtacctacctgatggacggcgaggacaagtatcagagtaggttctatcttcagccttctcgcgccttgaatcctggctaacttttacacttcacagccttcgagctcctcggcaacgagttcaccttcgatgtcgatgtctccaacatcggctgcggtctcaacggcgccctgtacttcgtctccatggacgccgatggtggtctcagccgctatcctggcaacaaggctggtgccaagtacggtaccggctactgcgatgctcagtgcccccgtgacatcaagttcatcaacggcgaggccaacattgagggctggaccggctccaccaacgaccccaacgccggcgcgggccgctatggtacctgctgctctgagatggatatctgggaggccaacaacatggctactgccttcactcctcacccttgcactatcattggccagagccgctgcgagggcgactcgtgcggtggcacctacagcaacgaccgctacgccggcgtctgcgaccccgatggctgcgacttcaacgcgtatcgccagggcaacaagaccttctacggcaagggcatgaccgtcgacaccaccaagaagctcaccgtcgtcacccagttcctcaaggacgccaacggcgatctcggcgagatcaagcgcttctacgtccaggatgggaagatcatccccaactccgagtccaccatccccggcgtcgagggcaactccatcacccaggattggtgcgaccgccagaaggttgcctttggcgacattgacgacttcaaccgcaagggcggcatgaagcagatgggcaaggccctcgccggccccatggtcctggtcatgtccatctgggatgaccacgcctccaacatgctctggctcgactcgaccttccctgtcgatgccgctggcaagcccggcgccgagcgcggtgcctgcccgaccacctcgggtgtccctgctgaggttgaggccgaggcccccaacagcaacgtcgtcttctccaacatccgcttcggccccatcggctcgaccgttgccggccttcccagcgatggcggcaacaacggcggcaacaccaccgtccagcccccgcccagcaccaccaccacctctgccagcagcagcaccacctcggctcctgccaccaccaccaccgccagcgctggccccaaggctggccgctggcagcagtgcggcggcatcggcttcactggcccgacccagtgcgaggagccctacacttgcaccaagctcaacgactggtactctcagtgcctgtaa

SEQ ID NO: 82 - DNA, 1358 bp, Scytalidium thermophilum
atggtccggtccttcgccgccctcctcgcggtagccgccgtccgggtggccgcccagacagaaaccaccacctctgagctgccatggccaactgacaatctgcctacctacaatggcacggggccgaccatgctccggttcggttgccaccagctcgtcattgaccgtattgatcctctcgtggctcctggccaggtgccttcgcaccaccagcaccaggtcgtcggcggcgatgccttcaacccgaccttgccgtacacagacctctcggccctctcgtcctgcaccacgtgcagctacagcgaggaccgttccatgtattggacggccaacctctacttccgggcgcgcaatggctcgtacaagcgcgtcaagcagatccccaactactccgacatcttcacccacgacaccttcatcaaccggaccaatggcggcatgaccgtctactacgtctcccctggccagaaccaggtcactgccttccctcccggtttccgcatgttcgtcggcgacgccatgctgcgctccccgccgagcagcccttacgatttgaccacccagaactgctaccgctgcttcaccggccccaactttgaaggcgacatttaccgcccgtgcaccgaccctgccgtggatacgatgcacctccctaacaagatgtgctggggcatccgctccaacattgtcttccctacgtaagcttctttcctcccagctcctatgtcacttcctccagctaattccccccacagctgctgggacggcgtcaacctcgactcgcccgaccacaaatcccacgtcgcctaccccgtcgaagggccgcacgtcttcgacggcatcggcaccgccgagacctgccccccaacccacccggtcaagatcccccaggtcatggtggagatcatctgggacacgacgcccttcaatgacccagacctgtggcccgaggacggctcgcagcccttcgtgctcagcacgggcgacacgacgggctacagccagcacgccgactacgtgttcggctgggagggcaacgccctgcagaccgccatggaggccggctgcttcatgggcaactgccccggtctggccgtgcagacggtcgaggaggccgccgagtgcgttgtcggtgaggttgctggggatgattatgatggctgtatgtttttttcccttccattttgattgcggatgaaacaaatactaacggtcgagcagggctggatgagctccccggtaacccggttcagccgcctgtgaccaccaccactactgcggcgccagagccaactggcaagggcaagggcggcaagggaaagaagggcaagaagaggtccttgatgtggtcggcctga

SEQ ID NO: 83 - DNA, 1474 bp, Scytalidium thermophilum
atgcacaagtcccataccgttgccgcggctctcgccgctggcttccgcttggcagcagccgctccttgcccaagtggtaatgccggagccccatccgcatccgactacctctgggttgccagttatcccatcatctggaaccaacagggcaagctcatcacccttcaactcgacgggtcaaacctcaagacgatcgacgcctcggatgcctgcggcacccatcctgcgtgggtaactcaagccggcgacactctctactgcgtcaacgagtggtggggtggtgcaaatggcacactctcgaccttgagcgtcggcagcgacctgagcctcacgaagctgggcgaggctaagactcttcctgggccggtgagcacggctctttatggcaaagatggccatggtctggctgtcgccaattagtgagtacatgcatatataataccaaactttggaaccagctccttgggaagagcttggcgattggtcccagcggtgctaaccacttccccagcgctggaagcggtatcaacgcctacaacgtcgaggatccgtcggccattcagttgctccagaccgaatattatggttctcctggcgacaaccagccgtcaccccaggatgtggcgcatcctcaccaggcagtcgttgatcctacgggagagttccttgtctttcccgatctgggtgccgacaggatccgcgttttcaaggtgaaccaagagacgctcgcgctcgagaccaaggtgcgtcacgtgcttccactttccccagttccctgtgaagtaaaccatggtttggccctgagagctaaccccaggataggagggtttcgtgtatccgccagaggagcgtggcactggccctcgtcatgtcgtcttttacaaggccggcgacaagaccttcctctacgtcgcctgcgagctcaagaacctcgtccagggtttcgccgtcgaatactcggatggtgatttgaagctcacccgtatctttaacaccaccactcacggtgatgataagccacttcctgccggcaccacggctgccgagatcctcctctctgtaagcagcccctgctcaatgaggtggtttacacatgcacagaactcaaaaaactgacacacttgcccctccttgccaacagccggacaacaagttcatcacggtgtcgtcgcgcaacgaaaagtccctcgagttcaccctcgccgacggcaccaccgtggcctcggaccccctcgtcacattcaagatcgacccggcgtcgggcgccctggaattcgtccaggaggcccccgccggcggcgtcaacccccgccacttctcgttcaacaaggacggcaccctcgtcgccagcgccctgcagtccgacagtcgcatcgtcgtctttgagcgcgacgtcgcgacgggcaagatcggcaaggccattgccgagggcaacgtcgagggattccccaactttgtcatcttcaaggagtaa

SEQ ID NO: 84 - DNA, 936 bp, Scytalidium thermophilum
atgaagctcctcctccccgccctcctggctctggccgccgagtccgtctcggcgcactacatcttccaacaactcaccgtcgccgggaccaagtaccccgtgtggaagtacatccggcgcaacagcaatccggcgtggcttcaaaacggccctgtgaccgacctcgcctcgaccgacctgcgctgcaacgtaggcggacaggtcagcaacggcaccgaaactctcacagtccgcgcgggcgaccagttcacgttccacctcgacatggcggtgtatcaccagggcccgacctcgctgtacatgtcacgcgctccggggaaggtggaggactatgatggcagcgggccgtggtttaagatttatgattgggggccgacggggaataattgggtcatgaggggtatggtttcccctaattattattgttccttggggcatcatgtggtggtgctggtgacgatgataagagtgatgagaaggacctggctgacgacctaaaacccgatcagattcgtacacgtacaacatcccccgctgcatccccgacggcgagtatctcctgcgcatccagcagctgggtctgcacaacccgggcgccgcgccgcagttctacatcagctgcgcccagatcaaggtcaccggcggcggcaccaccaacccgacccccacggctctgattccgggagcgttcagggctacggatccggggtacactgtcaacgtaagtcaacctttgagcaacttcatatcaacctcatgggtgttgttcaatgggtgggaaggttggctgacacggccgggaaccagatctacaacaccaacttggccaactatgttgtgccgggtccgcgggtggtaagtcattcccgaggagtgttgtgcaataccaatttgagaatgaggtgagatgctgacagagcctagttctcctgctag

SEQ ID NO: 85 - DNA, 1476 bp, Scytalidium thermophilum
atgagccggctcctgacggcattccgccgctgtctctcctccgtcgccaccaccgcgccgtccccaggaccaactaccaccacagtcctacgatcatccgtctccgcgtcgagcatagctgctgtcactgctgccagcatggtcgcatacacgagcgccgtggccgttctcgacccggctggtgacatccccgaggatggccgcaacaaaatccaccatgtcaaggatggctccgggaagacagtcaagttccagaacccgtacccctcggctgcgagggagacgtcgccatggagtattgcgcctaagatcctttggtaggcactcccccctcctggtctatctgcgttgggataactaatgcatgctgactctctacccaggctcaccatcaccggaaaactaaagatgcccaaacccgacccttccaagcccgagacgttgggcgtcagtgtcgtcacccccaatctcccctccgcagacgcaacccgcaccccaccctcgaaactccgcgccacttggctcggccatgcgtgttacttcgtcgagttcccctcagggctacgcgtgctcttcgaccctgtttttgagtcgcgttgcggtccgcacggcatcctcggtcctccacggtacacaccgcctgcatgctcgctggctgacctgccgcccgtcgacgctgtgattatttcgcattcgcactacgatcacctctccctgggttcggtcaagacgttggctgcgaggaatccacaagtgcagttctttgttgggctggggctggcaaagtggttccgctcgtcgggcattgagagggtgacagagatggattggtggcaggatgcggagttgacgttgacgaagaaggaagaagggcgagaagcgaaggcggaggaggggaatcagggacaacagtcaacaacaagcccagatgtttccaaccctgcctcaacaactcccaactccattaccgctcgcatcacctgcctcccctgccaacacgcttcgggccgcaccggcttcgatttcgacaccaccctctgggcctcctggtccgtcaaatccggcgacaaatccgtctggttcgccggggacacgggctatcgcctgcacaccgccgactcggccgaagaggcgcacaaggacgacaacacacccgatgtggtaatcacgcactgcccgcagttcaagcagatcggggagctccgcgggccgtttgatctggccctgatccccatcggcgcgtacaggccccggtatttgtttagctggatgcacgccgatccgtacgacgcggtggatatctttcgggatacgcggtgcaggagggcgttgggcatgcattggggcacgtgggtgctgacgtatgaggaggtggatgagccgccaaggttgttgaagaaggcgttgaaggagagggggttggaggaggaaggggtgtttgaggtttgtgggattggggagacgagggagttttag

SEQ ID NO: 86 - DNA, 2101 bp, Scytalidium thermophilum
atgaggctcctcaccttcacatcgctacttgtcctaaccgccgcgcacccggcgcgctactcaaaatggaggccatcatgctcggagattgagacgccgtcaccgtcaagcgaagcatcgatcactacagaccctccagagcccagcactactactcccgtgatcacgcacatattttcatacatcagcacctcgtctgctgagcctaccgggtcatggattcctcccgaggagaccgatagcactgcttcggaatcgacaagctcatccgcagagaatgagatctcgacgcagtccgacgcgacgtctgtttcgacagtttctactgagattagcaccactgaagaaccgccgacgaccacgttcacggagcctgagacatcgaccctgtctgaagagccgtcaacttccgaggagcctgttaccactacgtcggcttctgaggagccaacgactacgccggtttctgaggagccaaccactaccccagtgtctgaggagccgacgactatgccggtttctgaggagccgactactgtgccaacgtccgaagaacctaccacggctgttccgacttccgaggaacccactgctgtgccgacatctgaggaacccaccactgagccgacatcagcgccaacggctagtcccacatgccccgagcccgggactggtccacggcggttcaaggggtccgtctccgatgtggccaacatcggctttgccacgctcaacggggggtgagtccgctcaaaagagtgcccggccatggaagaatctggattgacaaggttgcgctgcgcagaacgaccggcggagctggcggtaaggtggtcgtagtgtcgactctgtccgagttctcctcggctgttagcgagaagaacacggagcctgtcatcgtcgtcgtcaacggcaccatcaccggcaacaccaagatcaaggtcgggagtaacaagaccattatcggcctgccgggctccggtgagtaccccaggaagatcaacaacaacaccctgttaagatgagagttgagcctgatatccggaaccgcaggcttcgtgggaatcggcctcaccttcaaaaaccagcgcaacctcatcctgcgcaacatcgtctcctccttcgtcgaggcggccaacggcgacggcctcaccatcgacgccagcaccaacgtctgggtcgaccactgcgagttcttttcgactctggctgtcgacaaggacaagcacgatgggctggtggacgcgtcccacggggcggactttatcaccatctctcagtacgccaccccttcgagcgatgccatgccccctacctgtgtgttttccgtgacctaaactaactgtcccctccagcacctacttccacgaccactggaagggctccctcgccgggcacaacgacaacaaccacgccgaggacgtcggcaagctgcacatcacctacgccaacaactactggtacaatatcaactcgcgcggccctctgttccgctacggcactggccacgtctacaactcctactatacagggtatgtcctcccccctctccctctcctcccccgctcaacccaactgaccaacccaaaacagaatggcctccgccatcaactcccgcatgggcgccaagatgctcgtgcaaaacaccgtattccgcaacgtcaacgtgcccatcacgagccgcgactcgagcgagctgggctacgccacggtgcttgacagcgatctgggcggacggtacaacgacgcgcccgaggcggccatgggcgtctgcgagatcgggtatccgtatacgctgattccgacggagaaggtcgctgaggttgtgcagaagacggcgggcgcggtattggggttggtggagtttgaggaggacggggagggggagtgtttggtgagtgaggaggaggtggaggaggttgcgggggcgaggagggtttgtggggaggaggaggaggagagtgatggggaggagggtgaggaaggtggtgaagagtgtgacggagaaggtggagaggacggtgagggtggtgaggaggagggagacggggagaatggtgaagagggtggtgaggaggacggtgaggatggtgatgagtga

SEQ ID NO: 87 - DNA, 1032 bp, Scytalidium thermophilum
atggtatccttgggcttccatcagttgtttctatgtccgtttcccctagctgaaccctagaccagaacatacaagctgacctacttccagatttcgtcgcagcatccctccccgccgcctccgctctcccagcccttgctcccaaagacaccacctcgcaagagtacatcgccaatggcgtccctctccgcatcatgcctctcggggcatccatcacctacggcatgggctcgtccgacaacaacggctaccgcgccgagctgcgcagcatgcttctctccccgaccaccaacctcccgcacgccgtctccgtcaacatggtcggctcgcgacgaaacggcgccatgatcgacaacgacgtcgaaggctggtccgggtaccggatcgaccaggtccacgcggtggccaaagcctcggtgcccgcgtggaagccgaacctggtgctggtgaacgcgggcaccaacgacgctgcgcaaaaccacgacatcccgcacgccggggagaggatggagcagatgctggccgacgtctgggtcctcagcccgcgcgcgacggtgttgctgagcacgcttctgctcaacaccaacgaggatacggagaggaacgtggtggagatcaatgagcagtatgccaagctggcggagaagctcagggaggagggcaggaggatcgtgctggtggacatgcatggccccgaggggccgctggctgaggatctgccggataatacccacccgtcggatgaagggtacaggaagatggcgaggctgtggtacaagggcatcgaggaggcgtccaacatggggttcatccagccgccggaggccgtggatgggctgccggacgacggcgaggtgcaatatagacgcggcgcagacgcaaaggggggcgcggtggatgcggcttgtcactacctgtttgggatgggcggtgcgtgtgattcgttgcttggtgttgctatgggtgcggtcgacttttcttcctcggggccttctagaatggttgggttgggttccggtttgggttggataa

SEQ ID NO: 88 - DNA, 849 bp, Scytalidium thermophilum
atgaagttcatccacatcctcggcgctgccggccttgccgcatcgctgcccagcgaccctgtggttggaagaaacgataccagagctttcaacgaaatccataatgtccatatccagcaaggcatcgtccggaatgatctggtcaacggcaatcctggatcctgtcccaccgccatcttcattttcgctcgcggcacgagcgagtttcttaacatggtacgttcatctctttgattgcggagtttgcccggctctattctctttccctgcccaaaccatgtctcgccatccttgatgatgacatatcccatccaacatgcctcgacatggctgacagtaataccaaatctccgccagggggtcgtcgttggtccgctcgttgccaaaaccctcgagaacaagatcgccaacatggccgacgatgccaccctctgggtccagggcgtcggcgtcccttacacagcaagcatcatcgacagcgtgagccctctccgcacctcgcaagacgccatcgacaaggcgatcgagctcttcaacagggccaacgaactctgcgccgacactccgatcctagcagccggatataatcagggaacggcggtgattgcccgcgctatagaagacctagaccagtctgtgatagaccagatcgccggcgtcgcgctgttcgggtataccttgaaccgccaaaacagcggcctgatcccgggatttccggaagaacggacgcaggtgtattgtaggtggtttgacctcacatgccgcggcgtactggtcccttactcgtcgctttatctgcatgaggcgcaccatgaaggtccggactttttggctgggcaacttccctga

SEQ ID NO: 89 - DNA, 749 bp, Scytalidium thermophilum
atgaagttcttcgctatccttagcaccgctagccttgttgctgctctccctgccgctgtcgactcgaaccataccccggccgctcctgagcttgttgcccggcagctcggagccatcgagaacggcctcgagcgcggcaacgccaacgcctgccccgacgccatcctgatctttgcccgcggctcgaccgagccaggcaacatggtccgtccatccctcctctcccccttcccttccatcaaccatgacactaacccatccaacagggcatcaccgtcggccccgctctcgccaacggccttgagtcctccatccggaacctctggatccagggcgtcggcggcccttacgacgccgcgctggccaccaacttcctgccgcggggcacctcgcaggccaacatcaacgagggcaagcggctgttcgcgctggccaaccaaaagtgccccaacacgcccgtcgtcgcgggcgggtacagccagggcgcggcgctcatcgccgccgccgtcagcgagctcagcggcgccgtcaaggagcaggtcaagggcgtcgccctcttcggatacacccagaacctccagaaccgcggcgccatccccaactacccccgtgagcggaccaagatcttctgcaatgttggcgatgccgtctgcaccggcacgctcatcatcaccccggcgcatctgtcgtacacagtcgaggcgcgcggtgaggccgctaggttcctgcgggatcgcatccgtgcttaa

SEQ ID NO: 90 - DNA, 1437 bp, Scytalidium thermophilum
atgaaggcctccgtgctcgccttgttgctcccggctgtcgccgctcgctttgtcgagcccaacgagccgaaccgcgtccatctctaccccaacggcgtccccgagtcttccgaatctgtcgagaagtatcacatcgagctggctccgggagagacccgctgggtcaccgaggaggagaaatgggagctgcgccgcgtaagtgttgcgccctggatgcgatattgtgtgtcactggcccttaatacagtagcgctgaccctctccctccagcaaggcaagcgcttcttcgatatcaccgaccatcccgacctgggcgcccttcgcgcgaggagcctagctaagaagaaggccgtcttccctcccaagccggcccttcagcccgaggtcgagccgctcctagccaacctgtccaagtccgagatggaaacccatctgaccaagttcacatccttccacacccgctactacaaggtgtgtccgtcccaagacatttgcgcctcgtacctttactccttgctaaccagcctcagtccgaatggggccgcaaatccagcgaatggctcctccagcaggtccggagcaccatcaaggacgccggcgccgagggcctcgtcaaggctgagccgttcaaacacccttggggccaaaactccatcatcgccaccatccccggcaagaccaaccagaccatcgtgatcggcgcccatcaagactccgtcaacctgtggctacccaacatcctcgccgctccgggcgccgacgacgacggcagcggcaccgtgaccatcctcgaggcgttccgcgtcctcctgcagtccgacaaggtgcgcaacggcgagagcgagaatacgatcgagttccactggtacagcgccgaggagggcggtctgctcggcagccaggccgtcttctcggcctacgagcgcgccggccgcgacgtcaaggccatgctgcagcaggatatgacgggcttcgtcaagcgcacccttgaggcgggtgagcccgagagcgtgggcgtcattgtggactttgttgaccccagcttgactgatttcatcaagaaggtcattgaagaggtatgctccagctttccttgaacttgcacccccttcattcagacgtttactaaccacccaatcacaacagtactgctccatcccctacgtcgagaccaagtgcggctacgcctgctctgaccacgcctcggcctccaaggccggctacccctccgccttcgtcatcgagtccgccttcgagtactcggacaactacatccactccacggaggatgtgattaagcacctgtccttcgaccacatgctgcagcacgcccgtatgaccctggcttttgcctacgagctgggctttgccgactttgccgcgctggaggcgggcgaggagggacagacgggaccggaccattcggattcgttgtag

SEQ ID NO: 91 - DNA, 1156 bp, Scytalidium thermophilum
atggtcgcctcatcgccgttcaagggcgctctgctgctggccctcggtggcctctcgcagcgggccgcggccgcttgtactcgcaccatcaccgcccagccgggcgactcgtgcgcatcgcttgctcgggccgccgggatcaccatgaccgacttcctccgctcgaacccggacgtgtacgactgcaacaacctcatccccggctacgcctactgcgtccaaggagtcgcggaccccggcagcggcggctcccagcccatcagcaaggatggccgatgcggcgggggcgtcacctgctccaactcgggcttcggcgattgctgctcccaggccggctattgcggaagcaccctcgaccactgcggcaccgggtgccagccgcaatggggcgtctgcctcggccccggcggcggcagcagcagcagcgctagacccagcacgacccccggcggcggcaaccccggcggcccctcgaccgtgaccgtcacagtgacccggaccaccggcgcgtccaccgtcacaacgacgcgcaccgtgtcggcgtcggccacttcgacagtgagattgacaagcatcattaccagtgtgtcaaccatcacctctgtttctacctctacgcgcttagtcacggccacgacgtgcgttggctcaccgactactgtccgtacaacagcgacgccctcgccgaccggtcgccccattatcccgggcacgccaacgaactgtgagtatctccgtctggcgcaaactgacgcttctgtgggagaaagaagaaaaagggggttggaatcaggatcagtgatgacgctaattcaccctctcaaaataggctggagttacgaccaaatcctcaccggcgattcatgccgcagtttggcgcagaggaacggccttactttgttggacttgtaagtcaacccggacaatattaacattgcggatcatactatgtcaaggcgcggaactggctaacacgctttgcttttgctttttgcgacagctatgccatgaatcctcaggtaagtcaccatcctccgcatttccctctgataacgtgtccctacgttttataaacagaacagtttctgacatgacatggcaacagatcgattgcgacaggttgctggttgggtggtacgtctgtgtgaggagataa

SEQ ID NO: 92 - DNA, 1005 bp, Scytalidium thermophilum
atgttctcgacattcattttactgctctccgctgccgctgccgcggtggccggccccatccagccgcgcgcagctcgcacgtcccctccgccaggttgcctcgtggtgggtggttcaggccagtacagaacagtgcaatccgctgtcgatgcgctgagcaagacgtctacgtccccacaatgcatcttcatttacagaggcacgtatcgggaacaagtctacatccctcagctcaaatctccgctctccgtctacggcgaaacaaccgacacctcccactactgggccaacacggtcaccatcacccaaggtcggagtcaggacgactcgcccaacaacgacgccaccgcgaccctgcgcgcgcacacccccgacttgaaggtgtacaacatcaacttcgtcaacacccggggcaagggctcgcaagcactggcgctgagcgcccagaaagaccgccaagggtattacgcctgccagttcaaggggtttcaggacacggtgtacgcgaacgacggcacgcaggtgtacgccaggagttacatcgagggcgcgacggatttcatctttgggcaacgcggcaaggcgtggtttgacggcgtggacatcgcggtggtggcggcgagcacaggatacatcacggccaacgggcgggattcgagttccaacccgtcgtattttgtcatcaacaggtcgagcatcacagcgaggcagggggatgtggtgaacaggggcgcgtactacctcgggcggccgtggcgcgcgtttgctagggtggtgttccaggacacgttcatgacgaatgtggtgaactcggctggttgggcgatttggaataatggggatccgaggacgagcaatgttgagtttgacgagtataggaaccttggcgaaggagccaacggggctagagcgaactttgcgaggaagttgtcgagcccggtcaggattgagacggtgctcgggaatgactataggtcttgggtcgacacttcgtacctctcttga

SEQ ID NO: 93 - DNA, 989 bp, Scytalidium thermophilum
atgcgtctccctacctctctcaccctcatagccgccctgctcgtcccggccatctcagcctgggacgccccctattacgatggctggcaccttgcctggtcggatcctttctggggaccggcgggtaccttccccgacgaagccagttggaacatcttggacatcaacctgcacgtcaacaacgaactccaaacgtaccggcgcgacagtcgcaacgtgcagattagcggagggggcaccttacaactggtcccctggcgggatcccgtgttccaatggacctcgggccgcgtcgagtccaagtacacttttgtcccgcacgcggggaagaggacgatggccgaggctatgatcaggtttggcggcaatcctatacacaccaaaagggggctttggccggcgttttggctgctgggggattcgatccgacagggcacaccttggccggcttgtggagaagtggatatcctggaaacggtgaacgggttgttgacggggtatgggactgttcattgccatagtgagtgttcccgcgtcaaggagttctaacgaacgaacgagctggggctgactgacattgcgaagtgtaccccggcggcatttgcaatgagccccacggccgaggaggtccggtgggcataccgagccaggactggcaccgctggcgcgtcatctgggaccgcacgtctggcgactggagggccgaaactataacgtggttcatgaatgaccagcagtttttccaagtccgcgggagcgacatcaacgactatgaggtctgggctagcttgtctgcgaggtccttgtacttcattctgaacgtcgcggtgggcggagactgggtgagtaatactgtcaacccttccctatgaggtaacatcaggagactgacagaccttttccagcccgggtatcccgatggaaatactcaagacgggtatggagccatgatggaggttggctatgttgcccaatactacagttattga

SEQ ID NO: 94 - DNA, 874 bp, Scytalidium thermophilum
atgacgcttcgctcgctcttcctcctgtccgccgcgaccatcctcgggcccatcagggcctccgccgaggaaatcctcttctgcggtacggcaccttactacccgtccgagtacacgtgctacgacgggcacttcctctgtccgcgcttgtacggacaggcgacgctgccatgcggcggcgcgtgctacagcccggacatgtactggtgcgacggtgcgcagcaactgcagcttctgccgcgcatggcgcagggaacacccttcaaaatcgtcgtgcaaagcgacgtcccggccctcaacaaccggcagttggaggtgtgcggactgcagtttcgcgcggggcctgatgcgcaaacgtgcgtgtactgcttcaacgcgccgccacaatatgtttgctcggagtatcagaataagacggttcttctgccctcagggtctatggttgagtctcccgtttccctgtattaccacgagagtttaggttgacgtagcgatagtctgtgagcgttcccggtggacagtactggttcgttgaccagaccaacggccgcctgaggaccacagcagccgggaaggccgcaggagagggattgaacctggccggctttggtgttacgagtatgtcgtcctgctgctgtgtgaatattgctgcaatatgagaacaatctgctgacagacgccgatattagtttaccacgagggatacttctcgtatgatggaaccagccactggcttgcctgccgggaacctggaaatgccgaagtttatggcatctttgcacccatcccgggttctccggagggctgccatcggatcaagcttgcgacggagttgagcacggtgcccaaggagggtgcttattcgtacacttga

SEQ ID NO: 95 - DNA, 1101 bp, Scytalidium thermophilum
atgcgcttctcctggatcatcgctggcgcttcgctcgccctggccaagcccaagaaggctaactttgacaccttggtcacgtttggcgacagctggaccgacaacggccgcctgggctactacatcaacaatggtggcaaggcaccccctccgggtcagatgcaccccgagtcgaccgagacggcgagcggcggtctttcgtgggcccaatatgccgcccgtgatgccaacgctgctctcagggactatgccgtcggtggggctgtgtgctccaactcgatcgtggcgcgccacttcgccatgatcaaccggaccttcccagccattgtggatgatcagctgccgtccttcaagaccgacatcaagttcaaatccttgtatccccaccggacggcggacaacaccgtgtacgcggtgtggatcggcaccaacgacctcggctttgacgccttcctgtccgactcgcaggcgcccggcaagaccatcagcgactttgtcagctgcgtctttggcgtcctggacgagatctacaagacgggcgggcgacgcttcgtggtgctcaacgcgggcccgctcgagctcacgccgctgtacgcccacccggacaacggcggcacctatgacagcatgttctggactaccaagacgcagtacaacattacccagtactcccaaaagatccgcgagttctcgaccagcgtcaacaccatgtacgagtacggcctgcccgtcatggtacagctcaagaagcgctggcccaaggccacggtcgacctgtttgacgtgcacagcctattcctcgacatctaccagcggccgaccaagtacctgtcgaagccgtacaacgtcaacagctactaccaccagtgcgagcctgcgggcagcccgtgcgtcgacctgcctggttcgctcgacggctatatgtggttcgacgagttgcacccctcgaacaagacgagtaagttggcatccatcccgaaagcccgccgggcgtgagaccttgctagagctaacactgggttgtatctaggcgctattgtggccgagcacttcctcgatgtggtcgcgggtcgctccaagtatgggactcgactgcagtga

SEQ ID NO: 96 - DNA, 1253 bp, Scytalidium thermophilum
atgctcttcaagaacactcttgccggccttgccctgctcgcgggcctcgcggccgcccatccgggccacaacgtggctcaggaggctgccgagcgccgcgagtacctccagtcggtcaagcgctcgtcgctcgcccactgcgccgacaagctgcgtgcccgcggcatcgaggcccgcaacattgctcgccgtaacgctgtcgtcgagaaggctcgccagaagcgcggcatcaccaagcgcggcttcgaggacgtgctcaacaccgaccatgacaagactggccagggcttcagccgcaacaccgacccggagacgctgttcgctgggtacaactcttgcctgctgaccccggagacgaccgagggcccgtactgtaagttagatttccttcatctagtagtccgccctgttcagggtcgctgactcactatccagatgtcgctggcgagctcgttcgcgagaacattgtcgaggaccaggccggtgtgccgctcctcctcgactaccaagtcgtcgacatcaacacctgcgagccgatccccgacgtgtacgtcgagatctggcactgcaacgctaccggcgtctacggcggtgtcgtcgcccaaggcaacggcgactccagcgaccagaccaacctcgacaacacctggctgcgcggcatccagccgaccaacgaggacggcgtggcgcagttcgagtccatcttcccgggccactacgtcgggcgcaccacgcacatccacatcgccgtgcacgccaacgcgacgctgctcgccaacaacacgcttggccacgagacgtttgccagccacgtcggacaggccttcttcgaccaggcgctcatcgacgcggttgagaaactggcaccctacaccgacaaccgccagccgctgaccaccaaccgcgccgactggatcatggcgcaggaggcgggtactgatggcgttgaccccgtcatggagtacaccctgctcggcgacaagctcgaggacggcctgttcgcctggcttgcgttcggcgtcaactcgacctttgtgcgcaaggtgcagccggccgtgctcctgggcccggatggcggtgtcccgaaccccaacggtggcttccccggcggcggtttccccggcggtccgggcggtcctgggttccccggcttcccgagcgggttcccgtctggcttccccacgggcttcccgaccggtttccccggcttccctcagccgactggcgctccggctccggcgccgaccccttaa

SEQ ID NO: 97 - DNA, 2460 bp, Scytalidium thermophilum
atgttgctccatcctcgtcttgtcgctggcctggctgcactatgggctgccgggggagctaacgccgcttgctcatccaacctcctggtagatgattttactcgatggacgactggccttaacaacctcgactggcagaacggaggtgagtacctatatttgtagccagccttccagccatctccatccagcgagctcgcagactgactgcttccccagatgatgggtccatgaacgccattgccgcttcggccggccgtgttgtcttcatccccaagagcgccaattcttatttctacgaatcttttgagtgcatcctggctgcgaccgagggctatgccagcgtccagttcacggtcgaggggccggcagggggctcgttcgtcctcgaagcacagactacctcgagctgcgcagcagaccgttcaacatacaagagctcgtggtactatgtcgacggtttgacgggccagcgacagacaataaccctgcccctgagcggattcagcgatgatcccaacacgaacgcccttgtgggcttggtttggggttctttctcgcaggcgggggtgcaatggtctgttggcaacatcacgctggtttgcagcaaccctgccccgaccacaggtgagagagcttgatgttgtactcggagacccagtccattggaaactgacagtaatagcggccccgacgacatcgacagtcagacaatccaccacagccccgattaccactggcactggcagcccgtcttcgtgcccgcatcggctgattgatgactgggagtcccagtcccgcctcaccttcctggggtacaacgccatgggccaagcgtctggagacgatggaaccatgacttcggtggtggtcagggacaaccgcctgaacctgactccgcggaacgcaaactcgcacttttggagccagttcggctgcctcgatgctcgtacgtacgggggcatctcgttccgcgttcgggccgcgcgggggacgaccttttccatcacgctgggctacgtgaactcgtgcggtgccagcaccgtccagacggtcacgcgcacgacgacgcagctggggtggaccttcgacggcaccgagcgtctgtactcgttccccttgtccgccttcgccggcctcgacacctccaagctggccatgatctatttttccggcttcaacgggggcgtggcgtttgggcccatggccttctactgcggttcgacggcgtccgagtacaacctgcctcaggccccgatcccaagccccgttacgcggtcaacatcggccgtcaacgtgccagccccgacccaggcgctcgtcatcgacactttctccaaccaggcaagaaacaacctgggcgcgtggcacgggtctgacgacgacgccgccatggggatcacctttggcaacaacgccatgaccatccaaaccaacgactcggatctgtcgtggtacacgcagctgcagggcggctgcgccgacatccgctcctacgccggcgcctacctgcacatcgccttcaccggcagcaacaagttcagcgtcgccctgcagcagcacaacgccctctgcgacgaaaccatcaagcccttcccggaaacctgggactcactcgaggctgcgcgctacctcgccacgcccaatgacatctacatgcccctcaaccacttccacatcaacttcacccgcgccatcggcttcgcactcaagggtttctacaccccgaacccgacgaccatcaccaaaatcgaaatcgtcccctccccgccggcaggctaccgcccgcccaccaaactcgcctcggggaaactcgtcttcgcctgcacccgccccaactcgatcgccttcgccatcgacgacggcgccccgcacttcacccgccgcgtcatggacatcatcaaccaggccaacatcaacgtcaccttcttcaccgtcggcttaccgctgctcgactccagcaacggcctcgccgccgcgtaccgcgagatggcggcgcgcggccaccagatcgcgctgcactcgtacacgcacccgaagatggaaggcctgccggacatctcggacatcgactgggagtactccaactccatcggcgcggtgcggcaggtgttcggcgcgagcggcgtgtcgagctacttccgcccgccgttcgggacggagggggcgcgcatgcgccagcggctggcggcgaacttgggggacccggagccgtacattgtgaactggagcatcgatgtggaggattggttgtgggcgatgagcgacacgccgtataagcagctggatgcgttcaagcgggatttggagaagggcgggaatctggtggtgatgcattatttgtatgagtcgacggtggagttgttgcccgagtttatcaggttggcgaaggcgacggggaagaggttgatgagggtggatcagtgcttggaggatcctagggcgccgccgttaacgtag

SEQ ID NO: 98 - DNA, 781 bp, Scytalidium thermophilum
atggtccgtcacgccgccctcgccgctctcgctctcctccccttctccctcgctcaagtcaccgtctcggaggactttgagtctggttggaaccaagcggaatggcccacgtatgcccctgattgcagccagggcggccgcgtcagcctcgacagcagcacggcgcacagcggcaggaactcggtcagggtcgatggtgctggtggctactgcgggcacatcttctttggcaccgacaagattccgagtggtgacctttacgtcaggacctggctgtacgtctgatcaataaggtgcactggaataactgcattgctaaccttgattaccccgttccagtaaggcctctcgtgccttcactgacgcccatgtcaccttcatcaccatgccagacccggcccagggcaccaagaagcacctccgcatcggcggccagaacaggatcctgatgtggaaccgcgagcaggacgacgctactctcccagaactctcgccgcagggtgttgcttcctccgctcagctccccgcgaaccagtgggtgtgcttcgagtacaaggttggcgccgatgggtccattgagacatggctcaacgacgctcccatctccggcctgacgtacggccccggagtcagcaacccgtatgccaaccagtggcagaggagcagcatcaggcctcgtccctcggccgtctactttggctgggaatcgtacggcggggactccaacactttctggtatgatgacattgtcatcagctcgtctcggattgggtgccagtga

SEQ ID NO: 99 - DNA, 893 bp, Scytalidium thermophilum
atgcttgccgaaactgtcattaccggtctgctgctggcctccagtgccgtggcctatccggctcccaaccccgtacagttcctcaagcgggctcccgaggcgggcgtcgtcatccaacggtgcgccaacccgggccagctggccctggcgtacgacgacgggccgtaccagtacacctcgcagctggtcgatatcctcgaccgcggcggtgctaaggccaccttcttctggactggcacgctgtacggctgcatctacaaccaggctgcggctgtcaggaaggcgttcgcctctggccaccagatcgcctcgcactcatggtaagttggcactgtacacagtatatgttccctgctggaaattatcctgtgactaattaattctctcctataggagccatggctacatgggcaacatgaacgagcagcagatccgcagcgagatgacgcgtctcgaggaagctctcgtcaacctgatcggcaagaagcccgcgtacatgcgcccgccgtacctccagaccagcggcgtcttcctgcccaccatgcgcgccatgggctacaaggtcatcaccaacgacgtcgactcgggcgactggaacaaccagtccccgcagcagagccagcaggccttccagcgcgccggcaccagcgggcccggccacatcccgctcatgcacgagacctacgccagcacggtcaacacccttactccttggctgatcaactgggccaaccagaacggcttgaagcttgtcactgttggtatgtactccctgatacaaccacctttttgggaaacacaagctgacgagatatgtagccgagtgcctcaacgatgccgagggcatgtaccagccgggcaacttcactggcaatggccggaactattgctaa

SEQ ID NO: 100 - DNA, 791 bp, Scytalidium thermophilum
atgaagttcttcgccaccatcactaccctcttcgccggcctcgctgccgccatccccgtgactgaggtcaactctcatgagctcgacgagcgccagctcgcccccagtggccacgaagtcgagatcaggggcgtcagctacggcggcagcggctgccccggcggctccgtcggataccaaatctctgacgaccgcacgaccatcaccctcctgtacgatgaattcatcgcgcaggccggaaagggcatcgagcccaaggatcgtcgcaagaactgcaacctcaacctgaagctgcattatccccagggctggcagttctccgtcttccgcgccgactaccgcggccacgtgacccttccggagggcgccaccggcaaggctactgccaactacttcttttctggcggaactggacaggtgagtacatcataatcacttcagttgacgtccacaaaccccgtctgctaactcctacctctccagatcaccaccaagggcgagtggacgggccccatcgacgaggattatcttaagcaggacaacttctccctcattagctacgctccctggtcgccgtgcggcttctcagggatgctcaacatcaactcggccatccaggtcaatccgctccgtctccaggagccggccctgctgacggtgcgtccctctctcccttgctcggacagtaagcccagtgtactaacacatacactatcctacaggccgagtctacagaccttaccttcaagcagatcgcctatctgcagtggcgcaagtgcaagaagaactaa

SEQ ID NO: 101 - DNA, 1317 bp, Scytalidium thermophilum
atgggtcgcctcttcacctcgacaacgctggccctcctagcagccgccccgggcttcatccccggtgtgcaggcgcaagccccgttgtacgggcagtgcggtggcatcggctacacggggccgacgaactgcgtcgcgggctccgtgtgtacagcgtggaatgactggtaccgtaagaacatgcttggcggtgaagagaagtagggtcagaggcttatactgtcatagaccagtgcgttcccggtacctcgaccagcagtagcacgtcaacctcgtcctcaacctccagaaccaccgtcgtgaccaccactacaacccctgtgaccacatcgacctcaacattcagctgggtctccacgtcctcatcgacgttcaccacagccaccagcaccaggacctcaagctcagcactcccaaccaacacgggcgacccgtgttcgctgaagttcctcattaccttcggtgactcatactcccagacgggcttcgatatcacgggcaccaagccttcgacaagcaaccccttgggcaacccgccgctgcccggatggaccgccagcggtgggctgaactgggtcggcttcctggcctcgcagtacaacacgtcgacgctgctcgtctacaactttgcctacggcggcgccaccaccaacgcctcgatcgtcgagccctatcgcgaggatgtgctgagcttcattgaccaggtctccctgttcagcggcagcattgctagcaagcccagctacgccccgtggggcgacaacgccctcttcggcgtctggatgggcgtcaacgacgtcggaaactcgtggtggaaggaggattatgaagagatcctggagagggttatggacagctacttcgggcagctgcagatcttgtacaacgccggcgcacgcaacttcgtcctgctcactgtgcctcgtaagttgctgacctgctacacacatctcggaagtcatttgactgactgaccaacttgccccagctatccatcgcacgccgatcatgatgcttgagtcggcagaggtgcgggctgccgaggcagcggccatcgacaagtacaatgaggctctggccacccggcttgcggctttcaaggccaagaacaacgacatctcggccaagattgtcgacactgccgtccccttcaacaaggccctggacaaccctgccgcctatgggatccccaacgccacgtgctggaacaatgacggcacgtcgtgcttctggttcaacgactatcacccgggtgttacgatcaacagatttgtggcccaggccgtggcggatgcttggaaggatagctacttttga

SEQ ID NO: 102 - DNA, 1394 bp, Scytalidium thermophilum
atgaagctactactcaaccttccctccctcctgggagtcctgtgcgcctcaacgctcgctgccgccgcaagcctcactcagatcaccacccccttcggccccaacccccagaacgtttccttctacatctacgtccctgacaccctccctccgaacccagccatcctggtaaacccgcactggtgccacgggacggcgcagcaagcatacgcgtactcgcagtacgcaaccctggcctcgcgtcacggcttcatcgtcatctacccgggcagccccaactcggccgaccagtgctgggacgtgtccagccgggagacgctcacccacgatgccggcggcgacagtctgggcatcgtcagcatggtgcgctggacgatcgaccggtaccacgccgaccctcggcgcgtgttcgtcacgggcgtctcgtccggggcgatgatgacccaggtcctcctcggggcgtatccggatgtgttcgccgcgggagccgccttcgcgggggtgcccttcggctgcttcgccgcgccggggaataactcgggtcagcacggctactggaacgcggactgcgctgaggggagagtggtacgctctgccgaggaatggggtgaccttgtgagggccgcatatctgggataccacgggtggcggcccaaggtgcagctgttccacggcacgaacgacgagattgtcagctacgtgaaccatgttgagggcgttaagcagtgggccgacgtcttggggctggacgagaccgccccggcagctgtggtgaaagacacgccgttgcccgggtggacaaagactgtttatggcgaagggggatggctggaggcttacagcgccgagggcgtgccgcatgatatccgtgtccaggagaccacggtggtcgagtttttccagctcgactgcgcaggaaccggatgcttctcttggggtcagggcagcccaaatggtggatcgtcatctggctccgtcacaccgatattatcgacatcaaccgccgtgacagctccacctccgtcaacgccaacaatgctcagtacagcaaagacgcagagaccagaatccattacgtcgaccacgaacacgggcgatcagacaccaactccgaccacgcctaccgctggttgcacaactcgtgttggcggtgtcccgttgtgggcgcaatggtaggtatcccctgatattcgaagtttaggtaacaatggctgacgattgtatcgtagtggtggtatgggatatattggtcctcagcagtgcgcaaacggcgtgtgcaagtcgtataacccgtacttctcgcaggtgagtaacgagtctctgtgatccgacgtctctagcgactcctaactgatttgtctccggcgcagtgcgaaccgacctcgtgcccgtga

SEQ ID NO: 103 - DNA, 1412 bp, Scytalidium thermophilum
atgaagttctctctccttttcgccgcggccgtggcagacgttgccctcgctggcaagaaggttcctggcccagacaaggacggtcgctacaccatctctgcgaagggcatcaaggctcaggtatgttatgcgaggaagaggctaccatatgtcggactcactaataaccgaaattcagttcatcccttatggcgccaccttgaccaacctgtacgtcaaggacaagaacggcaagccgattgatgttgtcctgggctacgatgatgttgactactaccgtcagtataagccctctccaacaacataataatcatagcgcataactgacatgttaaccagccatcgaccccggccaccccgtgtacaacgccattcccggacggtacgccaaccgcatcggcaacgggcagtacaccatcgacggggtgacgtactacacggaaaagaacgacgggcccaacacgctgcacagcggcaccaacaactggtcctaccgcttctggaacgtcacggccttctcgcacgactccatcaccttcagcctcctggatgagtccgagtcctcgaaaggattcccaggccgcgtcgaggccaatgtgacgtattcggtcagcgaaaacacgtggaacatcaagatcacggcgcgctcgttggatcagaagacgcgtatgttcacacttctcccacgatcccttccctattccctccccatttcagcctaaacatgccacgtattgacccatgcctccagccatcctcctcaaccaacacacctacttcaacctcgacgcctaccgcaaccccgcgaccgacaagatctgggaccacctcctctacctcccttactccaagcgctacctggccgccgaccaaggctccctgcccaccggcgagatcctgaccgccgaacccgggtccatcaacgacttcgcctcctcgcccagcctcaccgtcggccacgcgcgcgaccagcccggcttcgagggtaactgcggcgccaacggcgcctgcgaagggtacaacggctactggctgatcgaggacgcgcccaaggacgcggtcgtggtgaccctcgccagcgagttctccggtgtcaaggcggagttgaggacggatcaggccggtgtggtgctgtactcgtgcaactggagtgatgggagcgcgaagctgaagaagacgcaggggattaagggcaagcatgagacggtgacgaggagcagctgtatcgcgatcgaggcgcaggattggccggatgggattaatcagtgagtttcccccctctccccattttctgaattttatggcgctgacatagagtttctagcccggagtggaaccggctcgagcaccagatctttgggcctggacagacgtacaactgggaaagctcctggacatttggtttgctctga

SEQ ID NO: 104 - DNA, 1031 bp, Scytalidium thermophilum
atgaggctccctcaagtggcttccgttctggccctcgcggcccaggtccacggtcacggctacatctaccgtgtcaccgccgacaacattgtgtaagcgccctcagattccggacctcttcctacctggtggctaaccttctctcaactcttcagctacccgggatacgacatctatgtcgaccccctccttcaaccgcccccgtaccgcattgcctacggtggtggccagacgggtcccgtctatgatatcaacagcaaggatatcgcctgccagcgcgtccacagccccgctccgggtctgattgcccaggctcgcgccggcagcaacatcaccttctggtggtcgcggtggctgtacagccacaagggtcccatctcggcatggatggctccgtatgagggcgacattgccgatgtggacgtcaacgagctcgagttcttcaagattggcgaggagttccacgatgagaccggcaagtgggcgacggagaagctggtcgacgaccccgagggcaagtggaccgtccagatccccgcggatatcaagcctggtctctatgtcgtgcgcaacgaggtaagcttcatccctcccaaggggttccatcacatagttcatgcctagtctaatcatcatctcccggatagatcatcgccctccacttcgctgtccgcatgcctcccttctttgccgccttcacccccctcggaccgcagttctacatgacctgcttcgccttcaacatcaccggcgacggcacggccactccccagggctacaagttccctggcgcgtacagcaaggacgatccggccctgtggtgggatctggaggagaacaaggacccgtaccccggcgccggccccaagccccacgtctcggcctacgatgtcgacctcgtccccaacgagttgtacatcgtcagcccgacgaacaacgctacggctgatgagctctactgggaggcccagaggcaggcgcttgctgcccaggcggcgacgacggagtacttcgattccattggtggttaa

SEQ ID NO: 105 - DNA, 478 bp, Scytalidium thermophilum
atgaagttaactcttcttctcgccacctcggccgcctttctgggtgttgcctccgctcttcccaccgacaccgaggaggtcgcccccaatggtatcggaaaagtcacctggttctacccaggccttggtgcctgtggcaagcggcatacccaaaacgacatggtggccgcactcaactcgcaagtgagtccttgcttccgtcttcgcctgtcgcctttcttgttggtttctgacatctttgcttccataacaggagttcgaccggtatggtccccgaaacgaccccagcaagaacccgcgctgcgggaacatccttcgcgtcacctacggtggcaagagcgtcgacgtgaccatcgtcgaccgctgcgaaggttgcgtcaggggcgggatcaacctcagtcctgctgcgttcggaaagcttgccaacctcgacgttggggtcatttacgccgactggcgctggatcaagtgggattaa

SEQ ID NO: 106 - DNA, 477 bp, Scytalidium thermophilum
atgttcgccaacaccatcaccttccttctcgccacctcggccgctcttctgggcgctgccgcggctcttcccaccgctgaggccgacaaggcactctctcccagggctgacggaaagttcacctggtactaccccggcctgggtgcttgtggccagtggaacagtgagaaccagctcgtcgctgccctcaacgcggctgtaagtcgtctcgccaccttttcttcgatgatttattcctaacacgttggttctactatacaggacttcgacccctacactcccaacggcaatcctaaccggaattctctctgcggccgccgtattcgtgccaactacaatggcaagtccgttgaggtgaccgttgtcgaccgctgccctggttgccctaggggcggtcttgatctcagccctgccgccttccagcgccttgcccacctcaatgcgggcgtcatctatggcaactggcagtggatctaa

SEQ ID NO: 107 - DNA, 2586 bp, Scytalidium thermophilum
atgaagagcctcctgctgctcgcggccattggcctggccgccgccgaggacggcctcgctgcgtggttgcggtacgctcgcatcgacaaccctaagacctgtctcgccaaactcccgtccaccatcatcaccctcaacgccaccaagggtcttcccgtctacaccgcaggcgaggagctcggcaaaggcatcgatggaattctgggcaagaggctcgagatcgacgagcgcgatgagaatggcaagccccgcggcggaaagaagcctgccaaagacagcaacaatgccatcacggtcggcacagtggcggcctacgccaaagccaaccccaaggaagccgccaagctgcccaagctgggtgacgacggttactatctcagcgtctcccgcggaaaggctttgatcctcggccagaacgagaggggcacgctgtacggcgcgttccggtggctgcagctgctcggccagggcaactgctccgacttcactctggcgtcgaccccggatgctcccatccgctgggtgaaccagtgggacaacctccaggacggcggcacgcacggcagcgtcgagcgtggctatggcggcgactccatcttcttctgggacggctacgtccggcccgacctcacgcgcgccaggctgtacgcgcgcctgttggcgtccatcggcctcaacgcggttgtggtcaacaacgtcaacgcggacccgcgcacgctgacccctgagttgatggacggcctggcgcgcattgccgacgagttccggccgtacggcgtgcagctcgccctggcgctcaacttcgcttctccgcagaccctcggcgggctcgacacgttcgacccgctcgagccttcggtccaggcgtggtgggacaacatcaccaacgagctctaccgccgcatcccggacatggcgggatacctggtcaaggccaactcggagggccagccgggtcccatgacgtacaaccgcacactggctgacggcgccaacatgttcgcgcgctcgctcaagccgcacggcggcatcatcctgttccgcgccttcgtgtacgaccaccgcaacctcaaccagacgctgtcgtggaaggcggaccgcgcgcgcgccgccgtggactacttcgacgggctcgacgacaagttcgacgacaacgtggtggtgcagatcaagtacggcccgatcgacttccaggtccgcgagcccgtgtcgccgctgtttgcgcacctcgtcaagacgcccactgccatcgagctgcagattacccaggagtacctcggccagcaggctcacctcgtctacctcgcgcccatgtggaaggaacttctcgactttgacctgcgcgtcgacggcaagccctcgcgcacgcgcgacatcatcaacggcagccgcttcaaccgcaagctgggcggctacgccggcgtcgtcaacgtcggcacaaacaccacctggctgggcagccacctggccatgtccaacctgtacgcctacggccgcctggcgtggaacccgtctgaaacctccgagggcatcctgagcgagtggatctctctgaccttcagctcggaccggaaggtccacgacgtcatcacccgcatgtcgatgctctcctggcccgcctacgaaaactacacgggcaacctcggcatccagaccctcaccgacatcctgttgggccactacggccccaaccccgcgtcgcaggacggcaacccgtggggtcagtggacgcgcgccgacgaggacagcatcggcatggaccgcaccgtgtggaacggcacgggcttcgcggggcagtacccgcccgaggtcgccgagctgtatgagcaccccgaaaccaccccggacaacctgctcctgtggttccaccacgtgccctacacctacgtcctcaagtccggcaagacggtgatccagcacttctacgacgcgcactacgccggcgcagagaccgcgcaaaccttcccgcagctctggcaaaccctcaaaggccgcaagggcatcgacaaggagcgctacgagcatgtcctgttccgcctgacctaccaggccggccacgccatcgtctggcgcgacagcatctgcaacttctacttcaacaagtccggcatccccgacgagctgggccgcgtgggcaactacaagtaccgcatcgaggccgaggccatgcagctggacggctacgtgccgtacgacgtgtcgcccttcgaggcggcgtcagggaccaaggcggtcgtgaccaagaccaactccaccgtcggcaccgtcagcgcggtgctcaaggacctcaagacgggcctgtacgacgtggcggtgaattactacgaccaggccatcgggaattcgacgtgggatctgtacattgacaggacgcacgtgggccggtggaagggagatctcgagtacatcctcggccgggcgccgtcgccgtacattgacgggcagacggcggcgagggtgacgttccccaaggtgcagatcaagaagggcagcgtgctcaagattgtgggccggccggacggggaggagccggcgccgttggattatgtgtcgattttcccgcatggaaaggggattgtggattga

SEQ ID NO: 108 - DNA, 1032 bp, Scytalidium thermophilum
atgaggcccttctcactcgtcgctctggcgacggccgtcagcggccacgccatcttccagcgcgtgtcggttaacggcgtcgaccaaggccagctcaagggcgtccgcgctccctcgagcaactaccccatcgagaacgtcaaccaccccgactttgcctgcaacaccaacatccagcaccgcgacggcaccgtcatcaagatccccgccggcgccaccgtcggcgcctggtggcagcacgagatcggcgggccctcgttcccgggtgacccggataacccgatcgctgcttcgcacaagggtgagttcccatagatagatctcttctctcccgaccccttgtatcctctcataactaaccacctcaatcccccaggccccatccaagtctacctcgccaaggtcgacaacgccgcgaccgcctcccccaacggcctgcggtggttcaagattgccgagaagggcctgtcgggcggcgtctgggccgtcgacgagatgatccgcaacaacggctggcactacttcaccatgccgcagtgcatcgcgcccggccactacctgatgcgcgtcgagctgttggcgctgcactcggccagcttccccggcggcgcccagttctacatggagtgcgcccagatcgaggtcaccggctcgggcaacttctcgccctccgagacggtcagcttccccggcgcctacccggccaaccacccgggtatcgtcgtcagcatctacgacgcccagggtaacgccaacaacggcgggcgcgagtaccagatccccgggccgcggccgatcacctgctccggcggtggaagcaacaatggtggcgggaacaacaatggtggtggaaacaacaacggcggcggcaacaacaacggcggtgggaacaacaacggtggtggtaacaccggcggcggctcggcgccgctctggggccagtgcggcgggaatgggtataccggcccgacgacttgcgccgagggtacttgcacgaagcagaatgattggtactcgcagtgcacgccttag

SEQ ID NO: 109 - DNA, 885 bp, Scytalidium thermophilum
atgctaccctcacttcgcctccccctcccccgccgcctccgccgccgcagaatggccgtcctcgccctcgccgccctcgtcaccctcctcctcatcctcccgctctacagcatctacaaacccccctccctcctcatccgctacctctcccaccgctggaccgacgtcctcttccgcgtctggctgccgtcggaccaaaaactcgtcgccctcaccatcgacgacgctccctcacagcacaccccgtccatcctcgccgcgctggccgctaacggcgcgcacgccaccttcttcgtcatcggcagccagatcaagggccgcgagcacatgctgcgcgagatcctgcgcgccgggcacgagctggggaaccacggcatgcgcgacgagccggcgacgaagctggggacaagggagctgatccggcagattgtggaggtgcagagggcgattgaggatgcgtatcgcgctgaggggctgcggccgcccgcggggccgacggcggacgagttggagaaggagatggatgacgcggtcagggacgtggaggaggatatgcatacttcgtggccgggacatgggtcgaggaggttgaggaggtattataggcccgggtcggggttctttagtgaacggattcggggagtggcgaggaggctggggtatcgggttgtgttggggagcatttatccgcatgatgcgcagatttggtggtcgtggttgaacgcgaggcatgtgttgagcatgttgagccctggagggattgtggtttgtcatgatcggaggagttggacggagccgatgctgaggagggtactcccggccatggcgaaaaaggggtataaggcggtgacgctgagtgagttgttggatcagactaccgggtga

SEQ ID NO: 110 - DNA, 1158 bp, Scytalidium thermophilum
atgggcctgagcttcaagaccctcctgtcgctcgccgccgcggcgggcgccgccctggctgctcctcccaagccgtccccgttcttcctcaaccacactatctataagcctccgagcacggcagatcgtatcatgtaccctcgcattgccgagctccgcgacggtactctcctggtcacggccaacgtgttcggcagcagcttcttcggcccaggcgccgacggcagcctggcttccttccccgtcttcgagagccgcgatgagggccgcacctggaagtggatctccaacatcaccgaccaggtcaacgggtggggcatgaacgcgcagccggcgatcctcgagctgcgccggcccatcggcgggtatcgcccgggcacggtgctcgcggcgggcaacagctggagcggcagcgggacgcgcatcgagctatacgccagcaaggacaagggccgcacgtgggagtacgtcagccgggttgccgagggcggcaggcccaacacgaccaacggcgccgaccctgtgtgggagccgttcctgctgcactacgaggacgagctgatcgtctactattccgaccagcgcgaccctaagcacggccagaagctggcgcaccagcggtccaaggacctcaagaactggggccccgtggtcaacgatgtcgcctactacgacgagtacctggcgcgcccgggcatgacggtcgttgccgagatcccgccgctgaagaagtggatcgtggtgttcgagcgtcccatcggcaactccagctcgcacggcgtcaactaccccgtgcactaccgcatcgcggacaagccgaccgagttcgacaaggccgagtctattccgatcgttattgacggcacctttgctcccaacgcgtcgccgtatgtggtgtggacgccgtatggtggcaagaacggtaccatcattgtttcggacgcggataatagcgatgtgttttacaaccgccgcggaggcgacccggctgcctggaagcgggtcaagacgggacaacgcgaggcttatagccgcgctctgcacatttttgagaagcacccggagaggctggccatcattggcggcgacacgttcgacggcagtgagtatgagctgaccttgggtgtcctggatctgaagaagttgctcaaggagtaa

SEQ ID NO: 111 - DNA, 3539 bp, Scytalidium thermophilum
atggcgccgttcaaggcgtatctcatttccctccttgccgcggctggcaccgtcctggcgcatccgagggagtatatcccccggttcagccaaaagcagatcgactccggggaagccctgagcgtcctgaacaagatcgccacggccaatgcgtacaagaactttggcggccattgcaacaagtctaatgtcaaaatccggcgggagtggcgtaccattcccaaaccccagcgtcgtcagttcatcgctgccgtcaagtgcatcatggcaaagccgagcaatcttccacctggcgaggtccctggggcgaagtcgttgtatgacgctcttgtttgtaggtcattcccattcctttcccatgactgttcacagctatgtgatgaaatccagttactgacaagttcatccgacaaggggctcacgccgaccggactgggtactctcacatgagcgggacgtttttgctcttccaccgatactacttgcacacctacgagcgcgagctggagcgatgcggctgggacggcggcctgccctactgggaatggggtctcgacgccgacgatcctcggaagtctccggtgttcgacggctctgacacatcgctcgggagtgatggggagttcatcccaggtcgcgaaccccaggtcctcgacttcccggggttcgacgagcccttgatcctcccacccggcacgggcggcggatgtgttatgaaagggccattcagcgacatggttgtccgtctgggaccctacaatatcgatccacgcgatccccttccggtccatcccattgaaggcagggaggacaatccacgttgcttggacagggacctcaactcgtgggcgttacggaggtggtccacttttcacaacacaacgacgatgattctgagacatgatagaatccgtgagtttcacggagagttggtacgtgagccagctgaatgacgttcgatgcatcttcactgcgggaaataatgttgatgactcctctcaggaaggagacccacgagtccagcgcgagccgagcggacctcatggcggcggtcattctggcattggcggactggcgaataatccagtaatctcaccgtatgatccagctttctggctcacccacaaccagctcgagcgcctctattggatctggcagatgctggacttgaagaatcgacaggtgcgtggccatggatgttgttgttgccgtgtgctggtctgtcatcatatagacgctaactggttgctcaggaggttcatggcacagggacatacatgaacatgccacccagcccgaatgtaactgttgaggacacgatagatctcttaccgcattctgggcccgtgaagttaaaggacttgatgaactcgattgctgggacaccgctatgttatgtcttcgtttaagggtgcattcgtcgtagcaaacatcaagtcaggtagactctggcttatgggctggctagaggatgttcaactggagggagaattccgtcggggatgcgagctttgaatcggagtcagcacggaacggagtctggaggccttcgttatctctccgcgcgtcaccaaatgaaaacaccgacggtgatgtaactgtgtggtagcaactggatggtgtacgtggctatgtcggacctggattcgctcacaggtttccgggctgccggctcaagtcgcagcggaagctcagcaaccgagttcttggtgcagcctgatggatattaacttgaattgtttgtggggatccgttgtatgcagatggtacagcacatgtctaagggcctaggaagctcaggtatcctcactcagaaggagataaagagcagtctcattgtgtttttgctccttcgtcatgcccaacggtttccagtcatcctcgcaatgatgcgttcatcaatccttctgctggccccattcgcagggctcgcctcctcccagagagttggcacactcgtatcagagagacatcctcccctccgctggtttcgttgcatcgccgacggatcctgccagcccgttgatggtgagcttgtcctagacgccaactggcgctggttgcacgaagtgagcggcactcggagttgctacgagggaaactcctggaacagcgacgtgtgccgcacatcgcaggcctgcaccgcgaactgcgcattggagggagctcagtatcgcgagtacggcatcatcgccccagcgacggcaagcgacaatacgtcagtgattcagaggctccgcaccaacctggactcccgttacaacaagggctcgcgcatgttcctgcttgagtcccgaaatcgatatcaaacattcactctcctagaccatgagctggcattcgacgttgacttgtcgacggtggagtgcggtatcaacgccgcgctgaagttcgtgccgatggacgccgatgggggtcaggcgcgagataagggaaacgaagctggcgcggcatacggaacggggtactgtgacgccagttgtccgcgagacctgcactttgtcccggaacgaggcgccaacgttgagcagtggactccgtcaaacacagacccgaacggcggccaggggtattggggctcgtgctgtccgcagatgagcgtttggaactccaacgtccattccttctcggtgtcgactcacacctgtgcctatccgggacgtgaagagcaaggtccctggatttgtgaagggcaggcaggctgtgaccctttctacatcgaccccgaagaacgcggccgactgtcttgtgattacttcgggtgcagctttaacccatatcgtatgggaaatccatggttctacggcaagggaaagcagctggataccactaggaagttcacgtacgttattcccctttcaggtgcccctgggccatgctgagactcaaccgtatgagctaatacatttcaaccgcagtgttgtcacgaggttctcagaaaccaacgtcacccagtttttcgtccaagatggccgacgcatcaacgtaccaacaccctttggactgcctggcctcccccctgaggctggcttgtcagatgacatgtgcttcacgcaaccggcggttttcgaagaacgtggtcggttcaccgagatcggtggttggctgaagcatatcaagcagattttgacacagccgatggtcttgacattctcgattggagttgacgtgagtcaccagttgtctatctacttcaagagttgttcgcaatcatcatatgccctgacacaaacatgtgattaatgcgcgactaattttctttctcttctcaacaaccagcacttgacatggaacacctggctagactccatctacccgccatatgacccggcaacaacgccaggtcgagagcgcggcccttgtccagttgaggaaaacgacccgcggagtgttgagcagaagaaccagaacgcgtacgtaccaggcgcatgatccacgcccaactctgagatgcaaggtctaatatccaggcatgacccaggcaagtaatctggtcaaacatacggtttgggcccatcggctctacggtgaaactttga

SEQ ID NO: 112 - DNA, 2165 bp, Scytalidium thermophilum
atgattctctttccagttgcgctgctcctcagcctcatactctctccgtgtgcggcagcaccggaggcgtacaaagtcttaaaagcaccgctcgacacaccctggacagaccagggtcgccagactccatgggcggccacctaccctcggccccagctccgtcgcgacgcatggttatcactcgatgggatatggacctaccagccggcgtcgtcggatggtgacccgcagcctccgagactgccactccagaaggaagtgctggtgccatcatgcattgagagcgctttgtcaggaatccaggaaatgggcgtgacgaatatgttgtttggcactcaatttacggtgccaccccgctgggccaacaaccaccgggtcttgctgcactttgaggccgctgactatgaggcgactgtttttgtcaacggcgctgtggcgggcacgaatcgcggcggatatacgcgcttctctatggatatcacggacaaactcaccaatggtccgaatgaaatgtgagtgttgtcctcagacacccggccattgcaaggcccaaggttactcacttagctctagacatgtcttcgtctttgatcccacggacgacgctagcatacctcaagggaaacagacaaagaggctgtcgcatattttctacacgccatgctcgggaatttggcagagtgtgtggatcgagacagtccccgtgaactacatctcgggacttgatgtctcggctgacatgactggaaatggtatctctcccttgtcgagcaatatctccaaggttggcgatagtgacactccatgttagtcaccgtaactgtccgcaccaacaagcaacaagaaataccagtggagattcacctcatcgatctaaagactggggaagatgttgccgcggagcagcggatgtccgaccggacattctggtttaaggtggactcccctcggctgtggacacctgactcacctacattgtacaacatcacggtcaagatgggcgatgacttcgtcacgagctacacggcctttcgcacgatttcggcaggacgggtcaatggagtcctccggccgctcctcaacggccggtttgtcttttggttcgggccgcttgaccaggggtaggatctagctccctccagtgacctatcttaccaccagattgagctattgccttgaagacattcattaacaacatggccacagctactggcccgacggcatctacacccctcctacccccacggccatgatccgcgacctacagctgatcaagcagctgggcatgaacatggtgcgcaagcacatcaaggtagagcccgaggtgttctacgaggtatgcgacaggatgggcctgctcgtcatgcaagacatgccgtcgatgcgtgtgtttgaccatcaccgtcccacggacgatgagcaagccgagtttggccggcagctcgaggtcatcattcaccagctgcgcaatcatccaagcatcgttgcctgggtcatctacaacgaaggctggggccagatcacggattacttccccgagtttgagctgacggagcgcgtccggaaactggacccgaccaggctcattgatgccaccacaggttggcacgatcatggagcgggtgattttcatggtgagtctcctaacacatcttcatcctcactaaattgacagacatggaagataatcaccattacgccgagccgcaatgcggaacaccctggttctctctgcccaatgttggccacgatccgggaagaattgccatccaaggtgaatttggcggcatcgggctgcgaccaaacgcagagaagtatgttcacaacaccctctctcattgccgaatctcatggtcagaaacccaagctaacctcactccagcgtctggccgctccgcccagccatcaacacaatcaacgagacatacgagatccattccaacatcgaatcataccactaccgcgcgagggtgttgctccggctcctacgcgagcaggtccagaagtacgcgtgcagcggggccgtctacacgcagacgacggacgtcgagggtgaagtcaacgggctgatgacatacgatcgacgggttgtgcgcatcgacgaaaaggcctggaaagaggacattgctgcgctcttcgaggccgcgaacggccgggccatgtga

SEQ ID NO: 113 - DNA, 1090 bp, Scytalidium thermophilum
atgaagggacttctcagcatcgccgccctttccctggcggttggtgaggcttcggcccactacatcttccagcagctctcgacgggtggcaccaagcaccccatgtggaagtacatccgccagcacaccaactacaactctcccgtcatcgacctcgcctccaacgacctccgctgcaatgtcggtgcccggggtgctggaactgagaccgttacggtcgctgctggctcgagcctgaccttccacctcgacacccccgtctaccaccagggccctgtgtcggtgtaagtagaagttctcagacgaaccaccaatgtcggcagataatttctaactccgatgtccagctacatgtccaaggctcccggctccgtgtcggactatgacggcagcggcggctggttcaagattcaggactggggcccgaccttcaccggcggcggcgccacctggaagctggatgactcctacaccttcaacatcccctcgtgcattcccgacggcgagtacctcgtccgcatccagtccctgggtatccacaacccctggccggcgggtatcccccagttctatatctcgtgcgctcaggtgcgcgtcaccggcggcggcaacgcgaacccgagcccgcaggtgtcgatcccgggtgccttcaaggagaccgaccccggctacactgccaacgtgagtttccatccatgctacatatcccttttacgctctcgatcccatgactaacccgcccctgaaaagatctacaacaacttccgcagctacaccgtccccggcccgtcagtcttcacctgcagcggcaacagcggcggcggctccaaccccagcaaccctaaccccccgaccccgaccaccttcaccacccaggtgaccaccccgaccccggtgtctccgccctcttgcaccgtcgcgaagtggtacgtctatggaaaaaaaaatctcctccagtccggacatgagaaaactaacatgaacgaaaaacaggggccagtgcggtggccagggctacagcggctgcaccaactgcgaggccggctcgacttgcaggcagcaaaacgcttactattctcagtgcatctaa

SEQ ID NO: 114 - DNA, 1267 bp, Scytalidium thermophilum
atgaagctttggtcgtttgctgccgccgcagccgctgtgggaagcgtgagtgctttcaacctcccacagtttgcacaagatgccattgactctggcctggctctcgctgcccttaatggtatcgccttggtgaactcagccacaaggttcgggggctcttgcaacattgccaacgtcaaggtccggcaggaatggtgagtcaccttgtgccaactcccaatcactgatcagaggactaactcttcccctaggagacatctgtccgcaacggcgcgcaagaagtacattgccgcggtccagtgcctcatgaccaagccaagtctcctccctgagggcgtagctcccggctcgaagtctctctttgatgactttgtcttcgtccacctcaatcagaccttcttcatccaccagacgggcaacttcctcatctggcaccgctacttcttgcacatctacgagaagaagctcaaggaggagtgcggctttacaggcaccctcccctactgggaatggggctacgacgtcaatgatctccgcgcctcacccgtgtttgatggctcggacacgtccatgggcagcgatggcgagttcgtccctggcggcccgatgtcgatagaaatcccattcaacccaggacccattgttttggcgaagggtaccggcggcgggtgtttgttcaagggcccctttaagggaatgcagatccgtctgggcccagcaacgcagcctgacccgacccaggacaacccgcgctgtctgagccgggatttgaatgtcgatgctggacggcggtttgccaccttccgtaacacgacggaaactatcatccattcgccgaccattgagatcttccgcaccacgctcgagggtgatccgaactacgtccccatgtctcttggaattcacggaggtggtcacttcatgatctcgggcgatccgggagcagatgctttcatctcgcctggtgatccggccttctatctccatcatggccaggtcgatcgggtatactggatctggcagatgctggactacgagaaccgcagagtaagcattatctccagtattcactgactggataacttgaggctaatgtaatatatagggcgtgttcggcacgaacaccttcctgaatttgctgccgagtcccaacaccacggtcgaggactacgtcgacttgggacacctggctcctcccatcaagatcaagaacctgatgagcaccattgggggcgaggggtcgccgctgtgttatctttacctctga

SEQ ID NO: 115 - DNA, 1755 bp, Scytalidium thermophilum
atgcggatatcaacagccacggctgtccccgccgtcctggcactcgcactctctctgctcccgacagcgagctgcgctggtgtcccacaccccgagccccggttacctcatgatactgccgccgcagctgctcctcccgtcgagcgctccggccccgtcttcccgttcctaagatggcttcgtgacagcgccgttgaggccgtctttggtaaaccctcgtcgtacaagccaaagactcggcagccgcccgccgccaccatccgctcccggtaccgcaacgacgtcgtgatccgattcaatgtcaccacttcagaggaggagggcgccctcgcacgggcgacggaacagatgctgttagatgtctgggccttcacgcctgactttgtggatattcgaatggccaaggatgatgtgccctctctgctctcgctgctgcctaagtccttggagccgtccgtcttgattccggatgtggccgatgccgtgtgggcgacgtttccgtcagcagaagaagacgggttgtctgtgctccttgaatcgagttttgcggcctctcgtaaggcgcggaggcccgtggatggagtgggggatattttcttccagaactatcagcccttatcggtatgttaggacgggttgatccctcttgtgccttctttcgtacttacgcttcctgcaggtgatcgagagttggatgcggttgttggaagttatgtttccgtccatcgcgaacttgaccagtatcggcaagtcgtacgagcgcagacacatctatgccttgcgcgtaggtgctggtagcaaggcctcagattcaagcaacccccgcaaggcgattcttgtcacgggtggtgtccacggccgagagtggatttcgacgagcaccgtcagctatcttctttggtcggccattacgctgtacgacaatgagcccttcattaccaaactcctccaggagttcgacataattttcatccccgtcctcaaccctgacggctatgagtacacctggcaaacagaccgtctctggcggaagtcgagacagcagaccaaggttcgctactgccgcggcatggaccttgaccactcgttcggttatggctgggacgcagtcgagcgcgataccgatccttgctcagagagctatggcggcgagaagccgttccaggccaccgaggcgtcccggctggcccattgggccaagaaccaaacccagagcggaacccagatcgtggcgcttcttgacctgcactcgtactcgcagcagatcctttatccttacgcttacacctgcgcggtcgacccgcccaactttgagaacctcgtggagcttgctgtaggccttgcaaaggctgtcaggctgtccagcggcgagagctacacagtctcttctgcgtgtcagggggccgttcagctggaaaagggcacaagcaactctctcacgcgtctcgagacgagcggtggagcagctattgactggttcttccgtatgtttcctctctgttcatctcttgctttggatacgggctaacatccttcgcagacaagctcaagacacgatacagctaccagattaggttgagggacaccggcagctacggatttttgctcccccctgaccagatcgttccgacgggagaagagatgctgagcatgcttaagtaccttggtgatttcctcctcgggaacaatgggatcgaggggccgttccagcaacgcccattagggagcggacatgacctcaggaggaggagatga

SEQ ID NO: 116 - DNA, 1173 bp, Scytalidium thermophilum
atgaagtgtttccttgtcacctgcctttccctggccggtctggcttttgctgcccccaagcccaaggcagcaaccgttgctggtggtaagttgatttccgtccctctcacttcaacgttgctattgctgacaactccaaggcgacattactccggctctgctgcaaaccttccacaagtacctgcaatggtctgaagcggcgggctgcaacaaccagaagccagctggtgcgaccgtcacctgcgagcctggccagtgctatctgttcgagccccacaatgctaccgttgtcgcctccttcaggttcgtttctaaatatatgcctgcaagggttaccaagtttggctaacgaaagactcgagcagcggtgccctgctcgacacgaggggctttgtcggagtcgaccatgtggacaagatcattgtcgtctcctatcggggtaccacctcagtcaggaactggattgccaagtaagatagctcctctctgctcttagtccgaatctcctccactaacacagaaaacagcatccttttcgctcaaagctcctgtgatctggtcaagggctgtctcgtccactcgggcttctatggctcctggaacgaggtcaagtcggccactctgaacgccgtcgcccaggccaagaaagccaacccgacctacaaggtcattgtcacgggctactccctcggcgccgctgtcgccaccctcgctgccggctacatccgcaaggcgggccacgacgccgacctgtacacgtacgcctcgccgcgcgtcggcaacctcgcctttgtcgagttcatcaccaaccagcccggcggcgagtaccgcatcacccacaaggacgaccccgtcccccgcctgccgcccatgatcttcaactaccgccacaccagccccgagtactggctccgcgagaacgatgatggcgtcgtcaccccggacgaggtcacctactgccccggctactccaacacggactgcaacggcagcacgagcggcctcgacgacaccaatcacggcggctacttccagatcattactggctgcggcgtccccgtgatgccctggaagcgcgacctcaccgataaggagcttcaggagaagcttgacttctgggcgcagctggatagggagtatgccaagactcttcacgagaacgggcagcagtga

SEQ ID NO: 117 - DNA, 2874 bp, Scytalidium thermophilum
atgggtcatcacactgccaccgtatgcctctggctcgccctgggctccttgacgcccgtctcctttgcccgcgttgtcgagccccgcgatcctgttcctcaagggtatcatgctgcttcctactaccccgcgccccatggcggttgggtcagctcgtggcgcgaggcctacgaaaaagcctatgcactggtgtcgcagatgacgctggctgagaaggtgaacatcacatcaggcgttggcatttatatgggtacgtactcctcagaatttccttttgcggcgtccgccagttgcattctgattactgacaacggcggcagggtcagtaccgaggagattggatcgcccaattgtcaattgatattcgaagacagcccgctgacaaaccatgtagaccctgtgtaggaaataccgggagtgtggatcgtctcggcttcccccagctctgcctccaagacagcgctctcggcgtcgcctccgccgacaatgtcacggcttttcccgctggcattaccaccggtgccacctgggacaagcagttgatgtatgcccgaggcgtcgcgatcggcaaggagttccgcggcaagggcgccaatattcacttgggtccttcggttgggcccctcggccgcaagcccttgggcggccggaactgggagggctttggctccgacccggtgctccagggcaaggccgctgctctgcacatccgcggcgttcaggagcagggcattattgccaccattaagcaccttgtcggcaatgagcaggagatgtaccgcatgtaccatatttttcaggagggttacagcgccaacattggtgagtataacctagttccaaccagaagaagcgcctcggttgacaaagccttcagacgaccgtactctgcatgagctctacctctggcccttcgcggaggcagttcgtgctggagtgggagccgccatgacggcctacaatgccgtaaatggctccgcttgttcccagaacagttatctcattaatggcattctcaaagatgaactcggcttccagggattggtcatgtcggactggctcagtcacatctcaggcgtgagctcggctctggccggtcttgacctcaacatgccaggcgatacaaacattcccttgtttggtaacagtctgtggcagtacgagctgactcgtgccgtcctgaacggctccgtgcctgtagacagactgaacgacatggccacgcgcgttgtggccacctggtacaagtttgggcaggataagaaccacccacggcccaacttctcgtccaacactcgcagccgtgacgggcccctgtaccccggcgcccttttttctcccagcggtcaggtgaattggttcgtcaacgtccaggaggatcactatcttgtcgcccgccaggtggctcaagatgccatcacgctgctcaagaataacgacagcctcttgcctctggacgctggggaccttactggcggcaagctcagcgtcttcggcactgacgcccaggtcaaccccgatgggcccaactcctgcctagcacgggcttgtaacaaaggcactcttggcatgggttggggctcgggtatcgcggactatccatacatggacgatcccatcggagccatccgcaagcgcgtccccgacgtcaagttctacaacacggacagtttcccgtggttctttggcacgccggaggatgacgaggttgctatggtgttcatcagctccgactcgggagagaatacgctgacagtcgagggcaaccatggcgaccgcgactcggccaagctgagggcatggcacgacggtgacaagctcgtgcagaaggtggctgagaaattcaagaacgtaatcgtcgtcgtgcatacggttggtcccctggaccttgagccgtggattgaacttccctcggtcaaagccgtcctctttgcccaccttcccggccaagaagccggcgagtctctgaccaacgtcctcttcggcggcgtctcgccgagtggccacctcccctactccatcactcgcaaggcctccgacctgcccgacagcatcgccaacctgaagggtttcacctggggccaagtccaagacacctactccgaagggctctacatcgactaccgctacctgcaaaagcactcgattcagccccgcttcgccttcggccacggcttgagctacaccagcttctccttcaccaatgccacaatccgcgccatcactacccccctctccgtcaccccgccagccccgccagccaccaggcccgcctcggtcgtcgctaaatactccaccgacatcccgcccgccagcgaagcctacgagcctgcaggcttctccaggatctggcgctacctctacccctggctgtccaaatccgacgccgacgccgcccacgccatcggcacgagcaagtccaaaacttacccctaccctcccggctattccaccgtgcagcgcgcgtctttccctcccgccggcggcggcgagggcggcaaccccgcgctctgggacgtggcatacgaggtgacggtgcgcgtcaccaacacgggcaagaggcccgggaaagcctcggcgcagctgtatctgcagttcccggaggggatcgagtacgatacccccgtactgcagctccgggatttcgagaagaccaaggagctccagccgggcgagagccaggagctgaagctgacgttgacgaggaaggatgtcagcgtgtgggacgtgaggaggcagaactgggttgttccgacggcgattgacgacaagaaggggttcacggcgtgggtgggcgaggcgagtgataagttgaaggtggcgtgctacacgggtgaggggaggtgtgtggagggggcgaagcagccagtttga

SEQ ID NO: 118 - DNA, 3030 bp, Scytalidium thermophilum
atgcttgtctcggggtcgctgtcctcatggacagcttgcctgggcttgctgtctgccctctctgccacatttgccccggcaggtatgggatgatctgacaaccacaccattgtcctgactctcgtagctaactgtcctctagtggctgtcaaagagcatgactggaagaagtgccaccagtctggcttctgcgctcgcaaccgcgccttcgccgaccatgccctcaccgccacctcgtgggagtccccttacaacatcctcgccgacgccggctccttcaaggacggccagtaccagggtgtcatcctcaagaccatcaacgacgctggcgagacggttcggctgcccatcaccatctcgtttctcaagtctggaaccgcgcgtgtcaccgtcgacgaggagaagcgccaaaagggtgaaatcgaactccgtcatgatagcaaggcgagaaaggaacgctacaatgaagccgagaaatgggtcattgtcggcggcctggccctcgacaagaacgccaaggttgcgcaccaagacaagaaccaactgaccgtcaagttcggtcccttctccacttttgaggctgttatcaacttctctcccttcagcatcgacttcaagcgggacggcgagacccatatcaagctcaatgaccagggtttgctcaacattgagcattggaggcccaaggtcgacaagcctgctgagcccgagaaggaggacgacggaaacgacacccctgatgaggaaggcaaggaggagcagacggagaaaaaggaggagccaaagaaggaagacgagtctacctggtgggaggagtcgtttggcggcaacaccgacaccaagccccgcggccctgagagcgttgccctcgacatttccttcatcggctacgagcatgtctttggtatcccgtcccacgctggccccatggctctcaagcagactcgcggcggtgagggcaactatgaggagccttatcgcatgtacaacgccgacgtcttcgagtacatcctcgacagccctatgacgctctacggctcgattcccttcatgcaggcccaccgcaaggaatccagcgtcggtgtgttctggctgaacgccgcagagacatgggtcgacatcaccaagggcaaggactccaagaaccccaaggccctgggcgtcgagtccaagacaagcacgcgcacccactggatgtctgagagcggtcttcttgacgtctttgttttcctcggccctacgcccggggatctgctctccaagtacacggagcttaccggcacgacagccatgccgcaggaattcgctatcgcctaccaccagtgccgctggaactacatctccgaggacgatgtcaaggaggtcgatgccaagatggacaagttcaagatgccctacgacgtcatctggctcgacattgagttctccgacgacaagaagtacttcgcctgggacaagcactccttcccgaccccgctcgagatgggcaagcatctagcgagccgcggccgtaaactcgtcaccatcaacgacccgcacatcaagaacgtcgccgattacccggttgtgcaggagctcaaggacaaagatctcggcgtccacaacaaagacggcaagctcttcgagggctggtgctggccgggctcgtcccattggattgacggcttcaacccggcggcccgtgaatggtgggtgtctctcttcaagtacgacaagtggaagggcagcatggagaacacgttcctctggaacgacatgaacgagccctccgtcttcaacggccccgagaccaccatgcccaaggacaacctgcactttggcaactgggagcaccgtgacgtgcacaacctgtacggcctcaccttccacagcgccaccttcgaagctctcaagagccgcaagcccggcgagctgcgccgcccgttcgtccttactcgtgccttcttctccggatctcagcgcgccgctgccatgtggacgggcgacaaccaagctgattggggtcacctggcgtcctcgatccctatggttcttaaccagggtatctcgggcttcccgttcgcgggtgctgatgttggcggcttcttcggcaacccggacaaggacctgcttactcgctggtaccaggccggtgctttcagtccgttcttccgtgcccacgcgcatatcgattcccgccgtcgcgagccctatctccacggcgagccgtacacaaccatcatctctgccgcgctccgcctgcgctacagcttgctgccggcgtggtacacggctttccgccacgcccacctcaacggcgcgccgatcctcaagcccatgttctacacgcactggtccgaggaagccgggctcaccatcgacgaccaattcttcctcggcaccaccggcttactggtcaagcccgtcacgcagaaggaccagacgacccagaccatctggatccccgacgacgaggcgtactacgactacttcacctacgagcgcatcccgacggtcaagggcaagaacgtgaccgtcgacgcgccgctcgagaagatccccgtcctcatgcgcggcagccacatcttcccgcggcgcgacatcccgcgccggtccagcgcgctcatgaagtgggacgactacacgctggtggtcgccaccagcgcgaaggccgacgagcccgccgacggcgatttgtatgttgacgacggcgactcgtacgactaccagcagggccagtacatccaccgccgcttcacgttcgacccggctgagggcacgctcacgtcggccgactttgagggccgcaacgtcgcgagcatcaaggagggcgagtggctcaagaagatgcaccaggtcggcgtcgacaaggtgattattgtcggcgcaccggcgagctgggcgggcaagacgacggccaaggtgcagagcgagggccgcgagtgggaggtcaaggtggagttcacacccgcggagaaggggaaggcggcgtttgcggtggtgaggaagttgggagtgaagatcggggcggattggaaggtggtgttttga

SEQ ID NO: 119 - DNA, 1203 bp, Scytalidium thermophilum
atgctcttcaacttcctcaaggcttcggtcctcgcggccacgctggtctcggcccagaccttcactgactgcgatcccaccaagcgcggtaagtcaaatgtctggccaactcttttggtcgtcaacagttgctgatatcctctagatgactgccccaaccccaaggccgtcggcgccaaggttgtcgacatcgacttccgcaagggcgccagcgacttcttcaagcctgccatcggcaccaccctcaagtatgacggcaacctcggcgccgtcttctccatcacgaatgagaagcaggctcccacccttagcagcgaaaagtacatcttcttcggccaggtcgacgtgacgatgcgggcttcgcagggcgtgggcatcgtcagcagcttcgtcctgcagtcggacgacctcgacgagatcgactgggagtggctcggtggcgataacttccacgtccagcacaactacttcagcaagggctgcaccgagaactacaaccgcggcggtatgaccgacgtccacgaccccatcggcaccttccacacctacacgatccgctggacccccgagaagctcgagtggatcatcgacggcaatgttgtccgcaccctcgtcaacgacggcctgacgggctgcgacggctacccccagaccccgatgcagatcaagctcggcaactgggtcgccggccgcagcgatgctcccgagggcaccgtccagtgggctggtggccgtaccgacttcaagcaggctcccttcgagggctactaccagtcgatccgtatccaggacttcatgggtggccagggcgccacggacgccaccgagtaccactacaccgaccgcagcggcacctggcagagcatcaaggtcgtctacaacggccaggagacgggcaacagcaccaccaccacctcgagcactagcaagtcctcgaccgccacctccaccaccgcggctagcagctcgaccgctggcaccaccctcaccaccgtgaccaaggctagcaccaccactgacgcctcgacgtccgctagcactgccggccagttcgatgccaccctcgctcctagcgcgacccagtccgaggaggagactgccaccacgagcgagcccgctctcgttactggcgctgcccctcgctcgggtgccaacttcgccgctgttgtcgctgctgctctgctcggctacctcgctctttga

SEQ ID NO: 120 - DNA, 1244 bp, Scytalidium thermophilum
atgttgtggactcggcttgaacggtttgttgccgtcgccggcttcgtcctcctctgggccggcctgacctccggcctggccatcgacattccgggcgtggcaaagcgtgccgacccacacctggcagggtaccttggcgtgttcttcctgggagccgatccctacgtctacttctacctcagcaacggcaacaacccgctctctttccgcgcgctaaaccgcggccagcccatcatcaggccgacgaaagggaccggcggagtccgggacccaaccatcgtcccgggtggtggagccgaggccggcaagaagtggtatatcatcgggacagatcttcacattggcaaggtgggtgaggaccgaagaatgcgtggcctgccgtcgggattctgaccccaaggcagacaaactgggatgcggctcagcggacgggatctaggggtatcttcgtctgggagagcaccgacctcgtcaactgggggaatgagcgcctggtggtggtagaggatgcctcggccggcatggtctgggctcccgaagctatttgggatcctgcgagaggtaagtaaatgtccaagccgaccttctcggggctgaaccaactataacaaccacatacaggtgaatacctcgtccactgggcatccaaattcgtaagcctcccctccccttccgttcccccctaacatccccaaccatcctgacactgtccttttcatcagtatcccccctccgacccatggcacacgggccccccctccaacatccgtatccgctacgcctacaccaaggacttccgcaccttctccgcaccgcaaaccctcatcgacaagaaccccaccaacatcatcgacctgacgtacctcccgctcaacggcgacgtcaacaactcgaccgcgtttttgcgcttcatgaaggacgagacgcgcaaaaccgtctttgccgaagtctcgtacaacgggctctttggcacgtggacgcgccccggcggggagggcgccatcatccagagcggcgtcgaagggccggccgcgtactgggacaataccgtcccggggagggtgcatttgctgttggatcactacggcgcggacgggtacaggccgtatgtgagtgacaacccggcgagtaattcgggctggagccagagcagcatggcgagctggccgaggaatttgaggcacgggagtgtgctgccggtggatgcgaggttgtatcaggctttgagttcgcggtggggttaa

SEQ ID NO: 121 - DNA, 1092 bp, Scytalidium thermophilum
atgcctcgcttcaccaagtccattgtctcggccctggccggcgcttccctggtcgcagcccacggccatgtcacccacatcgtcatcaacggcgtgctgtacccgaacttcgaccccacatcccacccttacatgcagaacccgccgaccgttgtgggctggaccgccgccaacaccgacaacggcttcgttgctcccgaccagttcgcctcaggcgatatcatctgccacaaccaggccaccaacgcgggcggccacgccgtggtcgcggccggcgacaagatttggatccagtgggaccagtggcctgagagccaccacggccccgtcctcgactacctcgcctcctgcggcagctcgggctgcgagtcggtcaacaagctcgacctcgagttcttcaagatcggcgaaaagggcctgatcgacggctcctccgcgccgggccggtgggcgtcggacgagctgatcgccaacaacgccggctggctggtccagatccccgccgacatcgcgcccggccactacgtcctgcgccacgaaatcatcgccctccacgccgccggccagcccaacggcgcccagaactacccgcagtgcttcaacctcctcgtcacgggctccggcaccgcgcggccgcagggcgtcaagggaaccgcgctgtacacccccaacgacaagggcatcttggcgggcatctacaatgcccccgtctcgtacgagattcccggccccgcgctctactccggcgccgccaggaacttgcagcagagctcgtcccaggccacgtcgactgccacggctttgactggggacgcggtgcctgttccgacccaagcccccgtcactaccacttcctcttcttcggccgatgccgctaccaccacctccaccaccgtccagccgccccagcaaaccaccctcacgaccgccatcgccacgtcgaccgctgctgctgccccgacgaccaccaccggcaacggaaacggtggcaaccggcccttcccaacccgctgccccggcctggctgggctcgggttcgacaagcgtcgtcgccagctccgcgctgaggagggtgtgcaggtggttgcttga

SEQ ID NO: 122 - DNA, 2668 bp, Scytalidium thermophilum
atgaagggcttctcagccttgcagcttctcgctgctgtggcgggcgccacggcagccacctggaagaatgtcaagacggacggtggcggcggcttcgtccccggcatcatcttccatcccaaggccaagggcgttgcatatgctcgcacagatatcggcggtctgtaccggttgaacgaggatgattcgtggacgcccgtcacggataacctctctacgaacgagagatggtaagccatctcccaggtatgcatcacatagtttgcgtccatctaacacacaagcacaggggacactggggtatcgacgccgtcgccctcgacccgcaggatcctgacaaggtctatgccgccgtcggcatgtacaccaacagctgggacccgaacccgggcgccatcatccgcagctccgaccgcggcgagacctggacgtccgtcgacctccccttcaaggtcggcggcaacatgcccggccgtggcatgggcgagaggctggctgtggacccggccaactccaacgttctctactttggtgctcgcagcggaaacggtctttggcggagcacggacggtggcgcgacctggtccaaggtgacgtctttcaccaacgccggcacctacatccccgaccccagcgatgttggtggctacaatggcgatatcatcggccttgcgtttgtcaccttcgactcgacgtcgcccgtcatcaacggcactacctcgcgcatctttgtgggcacggctgataccatcaccgcctccatctacgtgtccaatgacgccggcgccacctgggagccccttgccggccagccagggaagtatctcccgcacaagtgcaagctgcagccggatgagaaggccctctacatcacctacagcgatggtgctgggccttacgatggcactgacggcgcagtctaccgctacgaccttgtgaccgaaacctggaaggacatcactcctgtgtcgggcagcgatctgtactttggcttcggtggcctggctcttgacctgcagaacccgggcacgctcgtggtggctgctctcaactcgtggtggccggacacccagctcttccgctcaacagactcgggtgagacctggtcgcgtctctgggagtgggcgggttatcccgacatgaacctctactacagcatcaacgtgagttgtcccactggatgtcgtgttgtcaaccaaaactgacccctcttcaacaggccaacaacgccccctggatcgaagccggcttcctctcccaagacagcaaaaagctcggctggatgatcgaagccctcgaaatcgacccccacgacagcgatcacttcctctacggcacgggtctcaccctcttcggcgggcacgacctcaccaactgggacacgatccacaacatcaccatttcctccctcgcggtcggcatcgaggagatggccgtgctgggcctcgcctccgcgcccggcggctctgagctcctagctgctgtaggcgacaactgcggcttcacctaccccacggccaacgatctcgacaccgccccctccgaaccctggatgaacccgcaatgggccacctccaccgacgttgactacgcgggcaacgacccctcgcacgccgtccgcgtcggctccgggacgggcgaccagcaggtcgccatctccaccgacagcgggaagcgctggacccggcaccccggcgccgacaccgccacgtcgggcggagccgtcgcgtactcggcagacggcgacaccattctttggtcgtcctccaacggaggcgttttgcggtcggaaaaccaaggccccttctcccccgtcgcttctctcccctcgggggccgtgatcgccgctgaccggcgcaacaactccgtcttttacgccgcgtcgtcgtcctcctcgggagctaaattctatcgcagcaccgacgccgcggcaactttctcctcgatctccatccccgccttcaccgctgctggcgccaaatcggtcagagacatcgctccgcaccccgtcatcgcaggcgaggtctgggtgagcaccgacaagggcttgttccgctccgtcgatttcggcgagacttttactcccctcgggcagggagtgttgacgttgacggagcaggtttcgcttggcaagggcaaaggagatagttggaacgtgtacgcctttggcgtgggtccgtccggggccaagttgtatgcttctgcggacgcggggcagacgtgggtggatatccagggcgagaggcagggattcggagcgatgggggcgaatcgggtggtgggcagcgggaatttggaaggggtggtgtatgttgggacgaacgggcgcggggtgttttatgcgacgattgagttgcctgggacgggtgggccgacgacgacgacgagtagtgcgagtgtggtcccgactacgttggttacgtcgacagtcgggggaagcagcactgcggtgacgacgacgacgaccacgacgacgagtgaggtttcgagcacgaccgagagtgttgctagctcaaccagcacgacgacaagctcagcgccgacgcccacagcagttgcgaagcagtgggctcagtgcggagggattggatataccgggccaacgcagtgtgaggagccgtataggtgccatgagtggaatccgtggtacttccagtgcatctcgtga

SEQ ID NO: 123 - DNA, 1560 bp, Scytalidium thermophilum
atgatgattgcccccgccagcaaacgctccccatctaccctggcagcggtcctggcgacagcatgtctgctgtcctcccccagtccggccaacgcccaggccgcatgcccaaataacctgactccggcctacaatccccccgtcgtggccgagggttggaaggcccagctcgtggccaccggtctctcgcgcccgcgcggcatcaagttcgattcggccggaaatctgctggtcgtcgagcccggcgtcggcttgacccgcctgacgtttgaggactacgggggcacctgcttggtggtgaaggagaagaagacgatcattcccgagccgggggtaagttgtcttggaccattgttaaggcagagaagaccatctaacgcctcccagctcaaccacggcctggatctctcggacgacggcaccacgctgtacgtctcgacggtggagtatgccgaccgctacacctacgacgcggccaccgccaccgtctccaaccgcacgcggctcgtcacgggcatgagccacgcgacgggaggccactcgacgcgcacccttctcctctcccgcaagtacccggaccttctcctcgtctctcgcggcagcgggcccaacatcgacccgctcgcgcaggacgtctccaccggcgtctcccaaatccgcgccttcaacgtctccgaggccgctctcgccgcgaacggcgggcagccctaccggtacgccacctcgggcaccctcgtgggctggggtctccgcaacagcgtgggcgtgggcgagcaccctctgaccggcgagatctggtccgtcgagaacagcgccgacaacatcttccgcgcgggcgtcgacgtgcacgaggacaacccgggcgaggagctcaacttccacggcgtgcccgtcccggacgaggacaaccccaacccgttcctcggcgccaactacggctacccgctctgcctcgccctctggaacacgaccgacttcccgaacatcgactccctgaccgtcggcaagcagttcgccctcaacgacaccaccgcctccgacgagtggtgcgacgccaacaccacccctccccgcatcaccttccgcgcgcacaccgccccgctcgacatcaagttctcccccgccggcgaccgcgccttcgtcaccttccacggcagctggaaccgcgaccagcccgccggctacagcctgagctatctcgactttgacacaaccaccgcccagcccacggcccccgccaacagcctcgacgcggtgcgcaacattctctcggcgcccgacgtgtcgatctgcgcccgctggggaggcggcccggcgtgtctgcgcccggtcggcctggcgtgggacgcgagcggggagaggctgtttgtgtcgagcgacgcgacgggcgaggtgtgggttgtgacgcaggccgctggaggagatggcggggaggtgacgagcgtgacgtcgagagcggcgggtgtgaggagggcgacgccggtgccggctaagtttgggaggggatggatggttgtgggcgcgggtgccggtgcggggatggcgggttggatgcggtga

SEQ ID NO: 124 - DNA, 2631 bp, Scytalidium thermophilum
atgcgaatcctaacggtagtcctggccgccgccagtctcttgacaacagtcacgggctattggcttaacgaaatcccccgtaggcactttgtctctctccgcatcctcgaagaacagtgactgacgctctctagaccgagggtacgcgccctttgctgagcccaactacccagtatttcgcaatgtcaaggactatggcgccaaaggtgcgaacatgttcagcccaatccggccttttcctagtcttgaggacgaaaggctaacagaagcaggcgatggcagcaccgacgacacggcggccatcaacgctgccatcctcgccggcaatccgtgcaacgagggatgcgtaagtgcctccctcatccgcttcagagggcgcttgctcaccgtgtgtccaggcatccaccaccaaaacccctgccattgtctacttcccgcctggggtgtacctgatctcatcgtccatcaagccggcgtactttactcaactcattggtgaccccaatgaacggcctgttctcaaagccacgtccaacttccagggcttcgggctcatcgacggaaacccgtacactaacatgggccatcagacttggacatcagtcaacctctttttccgacagatccggaattttgtcatcgacaccagggccattcctgcaaacttgccagcgaccgggattcactggccgactggccaggctacgagtctgcagaacattgtgtttgagatgccaaccgaccctaatgttgtccatgttgggctcttcatcgagaatggtagtggcgggttcatgacggatctcactttcaacggtggtaacagaggcgcggagctgggtaaccaacagtacacgatgcgtaatctccgcttcaacaactgcaagaccggtgagctcgtgcctcctgaaccactgcttacctatactgaattacagcgctgacttgaaccagccatctaccaaatctggaactggggatggacttactctggcctggaaatcagcaattgcggcattggcatcgacatgtcagacatcaactccgagatcaacagactcaatgtcggctccgttaccctcattgacagcaccttcaggaacacagatgtagccatcaaaaccggctggggaccaaacactctcccttcaaccgccaacagcctgatcctggagaacatccttttcgagtcctgccctgttaccatccagggcgccggcaactctatcctttttcccggcgccggcggctccagccaatggatctctgcctggggcatcggtcatgggtacaccaccaccggcggcccaacgtatctggaaggcgactccatccctgccgccccgcgtccaccggtcctgaccgctcccgatggacgattctacactcactcgaagccgcaatatcaaactctcacaaaggacaatttcctttccgtccgcgcttttggcgctgtgggcaacgcacaggcggacgacaccgacgctctccaacgcgccatcgacgccgccgtcacccagggaaaggttctcttcctggattacggcctataccgcgtcacgtggaccatccagatcccgcccggcgcgcggatcgttggcgaatcgtaccccgtgatcctctcctccggcccatttttcgccgacatgaacaacccccgtcccgtggtgcaggttggaaggtactccggtcaacccggacgggcggagctcgtcgactttatcgtttccacgcagggtcggcagccaggggcgatcgggatcgaatggaacctggccagcccgacaaacgagcccagcgggatgtgggatgcgcacgtccgcatcggcgggttcgagggcacgcagcagcaggttgcagagtgtttgaagcagccaggcagtccggaagtgaagccgcagtgtgtggtggcgttcatggccatgcatgtcactgagaaggccaggggattgtatatggagaatgtgtggctatggacggcggatcatgatattgatgatccacagaacacgcagattaccattttcactggaaggggattgtgtaagtgtctccaagtttcagttttccctcactgcttgaacaacagaaaatgttgaccagacatttcctccagacatcgaatccgaaaccggccctttctggctctggggcacaagcagcgaacaccacgtcctctaccaataccaagtcgccaacacgcgcaacatcttcatgggccagatccaaaccgaaacgccttatttcatgcccatccccaacgcgctggtgcccttcccctcggacgcatgcttcaacgacccggacttcgagaccagctgcgacaatgtcgagggcaactgcgccgcctcgtggggcctgcgtgtcgtcgactcgcgcgacgtgctggtctacggtgcgggcctgtactccttctttgacaactactcgaccaactgctcgaggtgggagaccggggagacgtgccagcagaggatcgtcagcgtggagggggaggcagagaacgtggtagtgtataatttgaataccatcgggacgagggagatgattacgagggatggacagagggtggcatggtttgcggataatgagaatacgttcgcgcagaatgtggcggcgtattgggcctag

SEQ ID NO: 125 - DNA, 1687 bp, Scytalidium thermophilum
atggagctccgagctgccatccgcctgctcggcgtcgccgcgtcggtcttcgcccccggcgttctcggtgcgtttggttacagctcgtccgggggtaactatgtcatcgacgccggctctgcgaatcccctgatcttcacggttagccagtccaactgcgatatccggtccatcaagtatcgcggcgccgagctccagtactcgtcccagggcagccacatcaactcgggccttggctcggcgacggtctcgatcagccagatcaacgggtcatccaggtacatcaaggtcacctgcacgacgtcgaccctcacccactactatgtcgtccgcgagggtgagagcatcatctacatggcgacctacatcacggccgagccgtccatcggcgagctgcgctacattgcccgtctccgcccggaccagctgcccggcgagcatccctacggcgaggtctccaacaccgccggctccagcgccaccgtcgagggctccgacgtcttcatcgtcaacggccagacccgctccaagttctactcgtcgactcgcttcatcgacgaggatggccactgcgtgtacggcggcagcgacctcaagcacgtgtgcatgctgactccccagctcgagtcgtcctcgggcggccccttcttccgcgacatcaactccaacaacgcgggcgcatcgaccaacctgtacttctacatgaacagcggccacgtccagaccgaggcgtaccgcatgggcctgcacggcccgtacgccatgcagttctcgcgctccggcatcccgcgcgccaaaaccctcgacatgtcgtggttcggtgagctcggcatcaccggctacgtccccgcgtcggcgcgcggcagggtcacgggccgggccacgggtgtgcagagcggtctggagggtgtcgtgcactggttcaacaacaacgcgcagtactgggcgcggaccaacgccgacggcaccttcacctcgccgctcatgaagccggggacgtacaccatggtactgtaccagaccgagttcaagatcgccaccaccaccgtctccgtctcggccggcggcactgcgaccaaggacattgccggcaactacttcaccaaccgccgcacgctctggcagatcggccagtacgacggccagcccacgggcttccgcaacgccgacaagttcctgcgcatgcacccctccgacagccgcatgtcgcattggggcccgctgacgtacaccgtgggcagctcgccgctgacggatttccccatggccgtcttccagggcgtcaacaacccggtcacgatcaggtttaacttgaacagcgcccccggggcggccacgctgaggatcgctacaaccctgagcttcatgggcagccggccccgcgcgactgtcaacaactggaccggcccggcaccgccagcgccgacgaagattgatagccgcggcgtgacgaggggcgcgtatcgcgggtatggggaggtgtataccgtggatatccccgcgggagtcctcgtggcgggctccaatacgattaccatcagctcgatctcgggcagcagcggggatcggtttttgagtcccaactttgtaagtcgttttcgttccttgattggtctgggatgagagcgaatgctgactgggcggctgttcacagatttttgatgcggttgagctttacactaattaa

SEQ ID NO: 126 - DNA, 776 bp, Scytalidium thermophilum
atggtcaagttcctcgaaaccctcgcgcaagcagccgctttcctgggccttggtaaggaggaccactaccaccacacgccattgacaacaagaaaactaatgtcgcagcccggaggcagtggggcgccgaatcggaggtctatgaggacccggagaccggcctgacctttgcgtccttcaccaccaaccgcgacgtcaccgtccgcattgccatccccgaccagattcccgacgacaatgtgttcgacaccgtcatccagatcctcgctcccaagagcgtcggctggttcggctgggcctggggcggccacatgacctacaaccccctcgccattgcctggctgaacgggaccagcaacgtcgtcctctcgccacggattgcctagtacgatctctttcccgcttcatcttctcctgggaagacaccttccagacatactgacaccccttccagcggctacttcagccctcctgagcacctcgagtcgagctacaccgtcctcaaggcgggtaccttcatcaacgaaacccactggcaggtcacggccaaggcctcgggcgtctcgcgctggggcgacgagtggattggctacaccgatctcgtgaccgactccgagaccaccttcgcctatgcctggtccgactggcccgtcgacgtccccgaggacgcggccagcaccttcatgatccaccagggtctgggacatccggttttcgatttgaggacggctaagaatgaggatttcgacgccaaggtggaggcgttgctcgagtaa

SEQ ID NO: 127 - DNA, 1053 bp, Scytalidium thermophilum
atgcggaacttcattctccccgtgcttgccggcctcgcggccacggcctccgcccagaaggtcaaagtcagtaagtggccaccgttcctcagccagcccgtcgaagccatgtccaggagacgatggatgttgacatagcggtactccagtgcttctgggtgactccctgactgagatctcctgctggcggcccatggtctggaaccagctgatctctgccggtctggccgacaaggtcgatttcgtcggcagcatgaacggcattggcgcgagctgccccaggcccgccggtttcgacacgaaccacgagggtcactccggctggcaggtctatgatatcgccaggcaatacattaccaactggatgcggacctatcagcccgacattgtccagttcatgctcggcaccaacgacgtcaacattggcaagcgcaacacccagaccatcatcgactcgtacaccatgttgctgaacaacatgcgtgctgtgaacccgaacgtcaaggtcattgtaagtgacgctcttgcgccagagaaggcgcccccatgtgttccggaggattgggagcgctgacccgctcgatgtagatcgacaagatcatccccacgagctggagcgacgcgaccatcgaggctgtcaacagcgccatccccggttgggtccagcaacactcgactgcccagtctcccatcctgattgccgactgctctcgcgccaacggctacaccaatgccatgttggctggtgacggcgtccacaccaaccagcagggtgacgacttcattgccaggcagattggtcccaagctgatccagcacatcaacgaccacctgggcggtggcagcccatcctctacctcgggccccgttgtcaccccgacgactctggccaccatcacgactcctgctcctcctgctcagccgacccctccgcctcagcagaactgctcgcctcgttggggtcagtgcggcggccagggctggtcgggcccgacttgctgctctgagggcacttgcagggcgcagaaccagtggtactctcagtgcatctaa

SEQ ID NO: 128 - DNA, 1105 bp, Scytalidium thermophilum
atgcggtggagccacctaacgttcctcggcgcggctctcctgtgcctctcccaagctgcgctgggtgagctcatcttctccgtcacggcgacccacaagggcaaacctatcccgaaggaaaagatccagctcaagcccttcgagttcggcatcagccgcaacggggagtcgaagcaggtctggacgtccaagagccgtaaggtccgccgtgccaacccgaccgccaccagcgcaaactggtgtggcgccgtcaagagcacgagctcgagcagccagatcaccaagattcatgccttgtaccaacatccaggctgcagcattcggtcgggcgtaaatagctacccgcaggcggtggctccttgggtgggtatcgatggaaatacgcatactggcgcattgttccagtcggggacactttgcaaggtaagtggtgatgtttgtgggttgaatgttagacaaatgctaatatctgacgctagattaacaactcgaccggcattgctgagtatgaggcttttgcagaaaaccaaggtgaagctacgctgacaaactgattcttagacacgaggcctggtggcaatgggtgcctgcagcggcatacaccatctcatctctgacaggtaagtgtgctcataaagttcaatttacctggtgtattcatggtacgtgactctaacaacttataacaaatccagtcagcgctggtgactggatcgaggtcactatcgaggccacctcaaccacctcaggcaaggtgtaagtctccctactttatcgccccctcagccacaaacaactgagtgacactctcttcttcaacaacaggacaattgccaactggaacaccgccaccgcctacgttgtcagcgtcagctcgggtcccaccctcggaagggttgacgccgactgggttgttgagcgcccctactacggtgcgtccctcgcgcccttcgctgctttcgaggacgtctggtttatcgaagcctacgcggagcgcacatcgggcggaaacctgggcatcctcggcgccacacagtaccagatcccgggcctctgcgccagcgaggagtatgacaacgagtcgcaggtttcatggtcactttga

SEQ ID NO: 129 - DNA, 1746 bp, Scytalidium thermophilum
atggccaagttcttccttactgctgcctttgcggctgccgctctcgccgctcccgttgttgaggagcgccagaactgtgcctcgacttggtgagcaatggtgtttcatggatcgtgtctttggatgtgcggctaacaacctttccaggggccagtgcggtggcatcggcttcaatggcccgacttgctgccagtctggtagcacctgcgtgaagcagaacgactggtactcccagtgcttgcccggtagccaggtcaccacgacctcgactacgtcgacttcgagctcgtcgaccacctcccgggccacctcgaccaccagcgccggtggtgtgacctcgatcaccactgctcccacccgcaccatctccatccctggcggtgccaccaccacggccagctacaacggcaaccccttcgagggtgtccagctctgggccaacaactactaccgctctgaggtccacaccctcgccattcctcagatcaccgaccctgccttgagggctgcggcctcggccgtcgctgaggtcccgagcttccagtggctcgaccgcaatgtcacggtcgacaccctgctcgtcgagaccctctctgagatccgcgccgcgaaccaggcgggcgcgaaccccccgtatgccggtaagtgcggtgtcaccgcctccaaccctaaccctgacccctaaccaccgtaaacaaaacaccacaacaccacatcaccaacatcaccacacatctcccacatcattctggacgcaaattaacgccaaatccagctcagatcgtcgtttacgaccttcctgaccgcgactgcgctgccgcggcttcgaacggcgagtgggcgatcgccaacaacggcgccaacaactacaagggatacatcaaccggatccgcgagattctcatttcgttctcggatgtccgcacgattctggttattgagcccgactcgctggccaacatggtcaccaacatgaacgtcgccaagtgcagcggtgccgcctcgacctaccgcgagttgaccgtctatgccctcaagcagctcgacctaccgcacgtcgccatgtacatggacgccggccacgctggctggcttggctggcccgccaacatccagcccgctgctgagctcttcgccaagatctacgaggatgccggcaagccccgcgccgtccgcggtctcgccaccaacgtcgccaactacaacgcctggagcgtctcgagcccgccgccgtacaccagccccaaccccaactacgacgagaagcactacatcgaggccttccgccctctcctcgaggcccgcggcttccccgcccagttcatcgtcgaccagggccgcagcggcaagcagcctaccggccagaaggaatggggccactggtgcaatgccattgtacgttagggttaggcttacatatttgcgttcgcatggctaacatccttccagggcactggcttcggtatgcgcccgactgccaacaccggccaccagtacgtcgacgccttcgtctgggtcaagcccggcggtgagtgcgacggcaccagcgacacgaccgctgcccgctacgactaccactgcggtctcgaagatgccctcaagcccgcccctgaggccggccaggtgagcaccaaacccgaccaggacaagaaatatacctatgaacaagaagctaaccctaaccctaaaaagtggttccaagcttattttattcagctcttgcaaaacgccaatccgccgttctaa

SEQ ID NO: 130 - DNA, 1437 bp, Scytalidium thermophilum
atgctgtccccggtttttacatcgtctcttcttgtggccctcggcgccgccggggtcagcgcccagcagcgtcagagcctctggggccaatgcggcggaatcggctggaacggcccgaccttgtgtgtcgacggtgcgacctgcacatacatcaacgactggtactcgcaatgtctcccgggcagcagcccgacgacaagcagtactcggatcaccaccactcagcagcagaccaccttcacgacccgcgtctccaccacaaccacagcggcacctccggcgagcacgacgccctcacagcctggcggcggaacttgccccagcattcccagcggcctcggcagccccgtggcaaaccagctcaatgatcccttcaccttccacggaggtgccaaggtgaccagcaaggcagactggacatgccggcaggccgagatcaagcagctcttcgagcggtacgagctcggtacgctcccaccgaagccgtcttcggttaccgccagcttctctggcggcacgctcagcatcacggcgtcggagaacggcaggtccatctccttctccgtcagcattcgcaatatcccggccggcaacggtccccacccggccatcatcacatacggcagcttcggcagcatccccattcctgctggcgtcgcaaccatcagcttcaacaatgacgagattgctcagcaacaaggcggctcgtcccgcggtcgtggcaagttctacgacctctacggcagcacccactcggccggtgctctcacggcttgggcttggggtgtgtcgcgcatcatcgatgctctggagctcacccaggctcagactaagatcgaccccacgcgcattggtgtcacgggctgctcccgcaacggcaagggcgccattgttgccggtgccctcgaaccccgtattgctctgacgctgcctcaggagtctggtgctggtggcgcgggttgctggcgcatcgcggcgtggcagaagagccagggccagaacgtccaggactctactcagatcgtccaggagaacgtctggttctcgcccaacttcaacaactatgtcaacaatgtgaaccagcttcctttcgaccatcacatgctggccggtctcattgccccgcgtgctctctacgtcatggagaacgttgacatggagtggctgggtaaggtctcaacctacggctgcatgggcattgcgcgcaagcaatgggaagccctcggcgccctcgataactttggctactcgcaggtcggcggcaaccagcactgcagcttcccgtcgtcgcaacagggcaacgaactcagtgccttcatcggcaagttcctgctgaacaaccccaacgctggaaacaccaacatcttccgcagcacgggcaaccacaacttcaacatcaactcgtggagcccatggactgtccccaagcttaactaa

SEQ ID NO: 131 - DNA, 1321 bp, Scytalidium thermophilum
atgaagggcgctctgttgaccgctgccgctctcctgggcgtcgcccagggcgcgttcaccaagatgaagctgcagaagatcccactctctgagcagcttgtacgttctcctggttgttcccaccgacgataatgacgatagttgctgatgatacccttgcgcaggaatctattcccatcgacacccagctcaaggcgctcggccagaagtacatgggcgcccggcccaagactcacaccagcgccatgttcgatggctcggtggtcgacaccaactccaaccacctggttcccatctccaactttttgaacgctcaatgtaggctgcgcgcaaaccccaaaccctcaattgcagcagcgccactaacattttgctaccaccagacttctccgagatcaccatcggaacgcctccccagagcttcaaggtcgtcctcgacaccggtagctcgaatctttgggtcccctcggtcgagtgcggctccatcgcttgctacctccactccaagtacgactcgtccgcttcctccacctacaaggccaacggaaccaagttcgagatccgctatggctccggcagcctgagcggcttcgtctctcaggacaccgtttccatcggcgacatcaccatccagggccaggatttcgcagaggctaccaatgagcctggtctcgccttcgccttcggccgcttcgacggcatcctgggtctcggctatgacaccatctcggtcaacaagatcgtgcctccgttctacaagatgatcgagcagaagctcgtcgacgagcccgtcttcgccttctacctcaccgacaccagcggccagtccgaagttgtctttggcggtgtcgactcgtccaagtacaagggcaagatcaccaccattccggtccgccgcaaggcctactgggaggtcgacttcgacgccatctcgtacggcgatgacaccgccgagctcgagaacaccggcgtcatcctcgacaccggcacctccctgatcgccctccccagccagctggccgagatgctcaacgcccagctcggcgccaagaagaactacgccggtcagtacacggtcgactgcagcaagcgcgactcgctcaaggatgtcaccttcaacctggccggccacaacttcactctgggcccctacgactacatcctcgaggtcagcagctcctcgtgcatctccaccttcatgggtatggacttccccgagcccgtgggtcctctcgccattctcggcgatgccttcctgcgcaggtactactccatctacgacctgggcgccaacactgtcggtctcgccgaggctgtttaa

SEQ ID NO: 132 - DNA, 1027 bp, Scytalidium thermophilum
atgaaggccctcaccctcctcgccgccgcgaccgcggcctcggcgcacaccatcttcgtgcagctcgaggccgacggcacgcgctaccccgtctcgcacggcgtgcgcaccccgcagtacgacggccccatcaccgacgtctcgtccaacgacctggcctgcaacggcgggcccaacccgaccatgaagacggacaagatcatcaccgtgaccgccggcagcaccgtcaaggccatctggcggcacacgctgcagtcgggccccaacgacgtcatggaccccagccacaagggcccgacgctggcgtacctgaagaaggtggacaacgcgctgacggattcgggcgtgggcggcggctggttcaagatccaggaggacgggcacagcaatggggattggggcacgctcaaggtgatcaacaaccagggcattcactatatcgatatccccgactgcatcgagagcgggcagtatttgttgcgggctgagatgatcgctctgcacgctgccgggtcgccgggcggtgcgcagctttatgtgagtttcttccttctgttcttcttctctccctttgataagaatagagatccaccacagtcaaacaaagaatactaacctcggcatctactaatagatggaatgcgcccaaatcgaaatcgtcggcggcaagggcaccgtcaagccgcagacctactccatcccgggcatctacaagtccaacgacccgggcatcctcatcaacatctactccatgtcgccctcgagccaatacatcatcccgggcccgcccctcttcacctgcaacggcggcggcagcaacaacggcggcggcaacaacggtggcagcaacccccccgtccagcagccccccgccaccaccctcaccaccgccatcgcccagcccacgcccatctgctccgtccagcagtggggtcagtgcggcggccagggctatagcggctgcaccacctgcgcgtcgccgtataggtgtaacgagatcaacgcgtggtattcgcagtgcttgtaa

SEQ ID NO: 133 - DNA, 1465 bp, Scytalidium thermophilum
atgggtgtcctcagcacgctcgcgggcgttgtcgccctcacgtctgtcgtcttcgtccctgaagtggccgctcagtcatgccccggcgtcaatggccgcttccagccgcgcatgggctccggataccggtacagcgtcctggctaccggcctgagccaacctaggcatctcgttgtcgactcggctggcaacctccttgtggccgaggctggcaggcaagcggtccgccgctttgtgctgcaggatcagggcaacattgtgtgctcctcgtccaactctcagatcgtcagcgggacggtaagctagaagcagtgtttaagatccaaatctgaacatatgactgataaatggccagaccaaccatggcatcgccctcagcgccgacggccggacgctcttcacgtccaacctcgcctcggtgacggcctactcctatgatcccttcacgggccaggtcggccagggccggcagatcatcaccggcatgacgatccagggcacccacccgacccgcgccctggccacctccaagttcagcccggacaccctcatcgtggcccgcggctcggccaacaacatcgacacggccaccacctcccagtcctcgggccgcagcatgatcaagaccttcagcatcagccgcatcatgcagtcgcccgtcgactacacccagggcggcgaggttctggcctggggcctgcgcaacattgtcggcatgactgaggatcccgtccacggcggcttcgtaggtgtctccctgacaattccagatcatgctcacgtaactaacctccccccgcccagtggtccgtcgagaaccagatggacgacctccgcctcaacgggcgcgacatccacaacgacaacccggccgagcggctcagctaccacggccggctcaacgagaccaacaaccggtacaagggcctcaactacggctacccgtcgtgcgtccctgcctgggacacggcgagcgtcggcatcaacggcctgctcgtcggcgcgctcttcaagcccgacaacgtccccaacgtctcgcaggacgagtgctccaacaaccgcatgacgggccgcctgcacttccacgcgcacaccgcgccgctggatatcaagttcaacaagaacgccacgtcggcgtacattgctttccacggcagctggtgagtttttccgtcattagttaatcccactcattgaacatcattcattgactgtttttcctctttctaggaaccgcaaccccgccgacggctaccgcgtcatgcgcgtcgacttcggacccgacggccagcccgttcaccccgtcaccagcaagaccgctcagatccctgtcatggagaactccaacatcggcgcctgcccgttcaactgcttccgccctgtcggcctggcctttgatgacaagggccgtctctatgtctcgagcgatcagtcgggtgagatttatgtcatctacggggcgtga

SEQ ID NO: 134 - DNA, 818 bp, Scytalidium thermophilum
atgaagctcagcgtcgtcctcacaggcctggcggcagccctcgccgaggctcattgtcagtccatacgacagcgaaatccctggatgattacgagactaaccagtcctcctagacaccttccccagcgtcggcaacaccgccgactggcaggtcgtgcgccagacgaccaacttccagagcaacggtcccgtgacggacgtcaactcggaccagatccgctgctacgagcgtttccccggccagggggcgcccggcatctacaatgtcaccgccggccagaccatctcgtacaacgccaaggcctctatctcccacccgggccccatggccttctacatcgccaaggtccctgccggctacaccgccgccaactgggacggcaggggcgccgtgtggtccaagatctaccaggacatgccgcgcattgcggggagtctgacctggcctaccaatggtatgtaatagagtgtctgtctgggataacaaaataaatgcttcgccgctcacctgctcacacactcccttcccaggcgcccgctccgtctcggtaaccatcccccgctgcctgcaagacgggcactacctgctgcgtgcagagcacatcggcctgcacagcgcgagcggcgtgggcggcgcgcagttttacatttcgtgcgcccagctctacgtcagcggcggcacgggtacctggaacccgcgcaacaaggtcgcgttcccgggcgcctacagcccgacgcacccgggcatcatgatcaacatctactggccggtgccgacgagctacacgccaccggggccgccggttgagacgtgctga

SEQ ID NO: 135 - DNA, 1179 bp, Scytalidium thermophilum
atgctgccagcggtgctcctgcttctcgccagcggcctgtccgctgctgcggctttgcaagtcagtgtggacggccaatgcggcggtgaatttacatgtgtcggctcaacctttggcgattgctgctcccctcatggttggtaagtacctgagagagcaaaacacacatatccgaagctatcttcgagctccttactgaccatgagacccaggtgtggaagttcgccagaccactgcggtgctggatgtaatccggactatggcaactgctggggaagctcgtccccagtggcaacctcgactaagccatctatcacggccagcccaagcagcgatagctgccccaacaccgggacggtcctcgtgacagagaccgtcaggcaaactctgactcaaattctcaccagcctcgtcaggtcaacgaccactgtcaccagcgtggtccgctccaccagcatggtcctcgctagttcagccaccaccgcaactgccaccgtcaccgcgaccgcgacgaggcagaccactgccacggtcaccacaaccgcgacatcgctcgccagctccaccaccgtggtgacctccacgtcgaccgtcacctggaacacggccgtcaaccaaaccgtaaccgtgaccagcacctccctcctcttcgagacctataccaccactcggaccgtcgatgccacccgcactcctccgccactgcacgtcacctcgtggcttaccctcacccaaatcgtgaccaccacgtcaaccgcaacagtcaccacctccatccccgtcaccaccaccttgcagccaacttgtcgtgacgtaaccctcaccgcgacgcgggtgaccacaacagtcaccacggccaccgccaccgccgcgccgagcactgtgacgctcatctccgtctcgcgcgtcacggtgcccgcgaccacggttactctgacccaaacggcgacggctacgctgacgcgcacggccacggcgaccgcgacagtcacgcgcacggcgaccaccacggcaaccaccacccggtcgattacgacgacgcaaacggcgacggtgacgcgcttgccgtgggagacggggaccggcggagggaataccttcaccatcttcccgacgggcggcgggccgattgtgacgattattccggggccgattaggcctggggaggcgggtgcgtaa

SEQ ID NO: 136 - DNA, 1197 bp, Scytalidium thermophilum
atggtccatctcgcctccgccctgctcgtcacggccagcgcggccttcgtcgccgctgctccggccagcgagatctttgagcgtcagacctgcccggttcagaacagctacccgaccgtcaatgtggccaagctccctgatccgttcaccaccgcgagcggttccagggtcacgaccaaggaggagtttgagtgccgccgggctgagatcagcaagatcatgcaacaatacgagctcggagagttccctggccccgctgaccgggtcgaggccaacatgagcggcaacagcatttcggtgcgcgtcaccgtcaacggccggaccgtgtccttctcttcgactatccgcaagcccgccggcgccggcccgttccccgccatcatcggcatcggcggcgtctccatccccgtccccagcaacgtcgcgaccatcaccttcaacaacgacgaatggggcgcccaggccggcagcggctcgcgcggccgcggcaagttctacgacctcttcggcaacaaccactcggccggctcgctcacggcgtgggcgtggggtgttgaccgtcttattgacgctctcgagttggtcggcccgcaggcgtcgggtatcgataccaagcgcctcggcgtcaccggctgctcgcgcaacggcaagggtgccttcgtgacaggcgccttcgtcaagcgcatcgcgctcaccatcccgcaggagtcgggcgccggcggcgccgcctgctggcgcatcagcgacgagcaaaagtcgcgcggcgccaacatccagactgccagccagattatcactgagaacccgtggttctcgcgcaactttgacccctacgtccggtccatcaccaccatgccacaggaccaccacttcctggcggccatgatcgtgccgcgcggcctggccgtcttcgaaaacaacatcgactggctcggccccgtgtcgacgacgggctgcatgaaggccggccgtgccatctacaaggcctacggcgtccccggcaacatgggcttctcgctcatcggcggtcacaaccactgcatgttccccagcggccagaaccaggagctcaacagcttcatcaactacttcctgctcaaccagggcagcgcgcccgctggtttcgagcgcagcaccgccaatgtggacgtcaacagctgggctccgtgggccgcgagtgccccgacgttggcttaa

SEQ ID NO: 137 - DNA, 1053 bp, Scytalidium thermophilum
atgaagccctctgtctcgaacctcgccagcctgggcctcgccctggcctctacagcctcggcccaagcaacgtgcgacctgccttccacctaccggtggacatccaccggtccgcttgctgagcccaggaacggctgggtctccctgaaggactttaccactgccccttacgagggcaagcacctggtgtatgccaccacacatgaccgcggcaccacctggggttccatggctttcagcctggtgaacaacttcaccgagctgtccacggcgaaccagatgcccatgaaccaggccacggtggcgccgagtttgttctacttcccgccgaagaatatttgggtgttggcgtatcaatgtacgctgttcttcctcccctctcctcctcctgcccatttcctcaccgctcgctattaacacttattctactcagggggcccacacgccttctcctacaagaccagcaacgacccgaccaaccccaacggctggggtcccgcgcagccgctcttcacaggcagcatcagcggctcgtccacgggtcccatcgaccaggcggtcatcggcgacgacacgaccatgtacctcttcttcgcgggcgacaacggccgcatctaccgcgcgagcatgcccatcgaccggttccccggcaactttggcaactcggcgcagatcatcatgcaggactccaccaacaacctgtttgaggcggtgcaggtgtacaagctccagggccagcagaagtatctcatgattgtcgaggccatcggcgggcaagggcgctacttccggtcgttcacggccacgagcctgtcaggcagctggacgccccaggccgcgagcgagagcaggccgtttgccggcaaggcgaacagcggggcgacctggacgaatgatatcagccatggcgagctgatcagggtcaacgcggaccataccatgacgattgatccgtgcaatttgcaacttttgtatcagggcaggtcaccatggtccggcggcgattatggacagcttccttaccgccctggcctcttgacgctccagagatga

SEQ ID NO: 138 - DNA, 888 bp, Scytalidium thermophilum
atgcgcttctcactccttgtgacggcctgcctctccctgctgccgggcggcgccctctccctgcccgccgcctccaccccaaccaccagcagcagcggcacatcggccccgaccaccaccgccttctcctccctctccaccacttccggctacaacctctccgcgccggccgtcccgcgcttccccatccacccgtcctgcaacgtcaccctgcggcggcaaatcgaccgcgcgttgggggagatggtcgagctggcggcgcacgcgcgcgaccacatcctccgctggggcgacgactcgccgtttgtgcagaagtatttcggcaacaccaccgcggcaggaggcacggcgaccgccctgggctggttcgcccgcgtcgcggaaggggatcggagggatatgctgttcagatgtgacgatccggatcggaattgcgcgacgcaggagggtgggtttgctttccctttgttactctaatacctgatgaagcggacgaaagctgatgttgtttatttccatctaggctgggctggccactggcgcggcagcaacgccactcaagaaaccgtcctctgcccgctctccttcgctcccggccgccggctgcatctcgacagcatctgcgggctgggtcacaccgtgaagggctcgccgctcaacaccttctgggcggtcgacctgctccatcgggtgcttcacgtcccgcgcatcagcgagggcgtggtggaccactttgcggatggctacgacgaggtggtggagctggccaagcgggatccccagctcgcggcgagggatagcgaggcgctgcagttgtttgccttggaggtgtatgcgtacgaggtggcggcgccgggggtggggtgtactggtgatgaggagaaataa

SEQ ID NO: 139 - DNA, 3446 bp, Scytalidium thermophilum
atgttgatcaccaaggctctctgctggctcggccttagcgccgtggcctcggcgctgggccaggagaggatcatctcgaccgacggtcgcaaggccgagcttcaaatcgccggcgacaagatcggccgcggccagatcctcgtgtccagtaacgactactggggcgtcatccgcgccgcgggtgacctcgccgtcgactttggccgcgttacgggtgtcaattacaccctcagcaacggcgagaagggggcgaagccggccgagtatgtgtaccatccagtgaataacaagaataacactcatgtgagtcttttcggtgctgtctacacagccagccttcttacgagtggcctaacatttgcggcagttctctaccaccggcacggagcggttctacggcccggcctactcggacccggagcccggcaagatcgtcatcatcgccggcaccatcggccattctaccgtcatcgacaagctgatttcgtcgcgcgcgctcgacgtgtcggccgtcaagggcaagtgggaggccttcaccagccaggtggtcaagaacccggtgcccgggtgcgccaaggcgctcgtcatcgccggcgccgacccccgcggaaccatctacggcatctacgacgtgagcgagcagatcggcgtgagcccgtggtacttctgggccgacagcccgccgaagaaggccaagaatctttacgttaccaaggccaagaaggttcagaactcgccgtcggtcaggtaccggggtttcttcctcaacgatgagcagccggctttgaccaactgggtcgcgtgagtcttccctttttgtttttgtttcttacatggccctcactgacttgtcttgttgcttccagtgcccattgggaagacacaccctacggtgccgggtacggcgccggcttctacagcctcatcttcgaggtcctcttgcgtctgcgtgccaactacctctggccgacgctgtgggcgtccatgttcatggtggacgacccggccaaccagccgctggcggacgcgtacgagatcgtgatcggcacgtctcacaccgaacccctgatgcgcgcgcagaacgagttcggcaccttctacgagggcccgtgggcgtacaacctcaacaacaagaccatcgacgagtacttccgctacggcgtgcagcgggccaagccgtacgcgcgcaactcgctgtggaccgtcggcatgcgcggcacgggcgacacggccatcgagggcttgggcgtcgagcacatcgtcgagatgctcaccatcctggtcggcaaccagcgccgcatcatggccgagggcctcggcgtcgacgacgtcactaccatcccgcaaacgtggtgcctgtacaaggaggtcatgacgtacctgttcgcgggcttgcaggtgcccgacgacgtgacgctgctctgggccgacgacaactggggcaacgtgcgccggctgccgctgctcaacgagacggaccgcgccggcggcgcgggagtctactaccacttcgactacgtcggcgacccgcgcaactacaagtggatcaacacgatccagctgaccaagacggccgagcagatgcaccacgcctacgcgcgcggtgtggaccgcatctgggtggtcaacgtgggcgacatgaaggcgctcgagatccccatcagccacttcttcgacatggcctacgacgcggagcggtggcacgtcgacagcacggcggaatgggccgaggcgtgggccgcgcgcgagtttggcgagaagtacgccaaggatgccgccgacgtcatgatgcgctacggcatgtacgccgcccgccgcaagtacgagctgctcgagccgcacgtgtactcggtcatcaactacaacgaggccgacgccgtgctggcccagtgggccgacctggtcgcccgggctcaggctgtgtataaccgtttgcccgcggagacgaagccggcgttttttgagactgtcctgcacccagcgcttgcgggcgagattgtccataagattcagatcggcgccgcacgcaacgcgttctacgccggccagcgccgcaatgctgccaacacggtcattaacgaggttctggcccactcggctgcggatgccaacctcacgcggacttgggatgccctgctggacggcaagtggaaacacttcatggaccgtaagtatcttccgaaacatgcctgcgcatatgtacggttaactaacccccgacagaaacccacctcggctacgacggttactggcaacagccgatgcgcaacgccctcccgcctctcgtctatgtccagaccgactttgccgccgtgtccggcgaagtcggcttcggcgtggaaggctccaacgccacggtcaagggcgatgaccggtggcatcccaacacgagcaacgacctcgccgtccccccgctcgagccgtacggcccgtcgatgcgctactttgacgtcttctcgcgcggcgtgcgcgagtgcgcctggtccgccgcgcccgagaagccgtggatcaagctgtcgcagtcctccggcgtcgtcggcggcagcaagcccgaccagcgcgtgctcgtgtccgtcgactgggccaaggcgccgcagggaacctgggaggagacggtcaagattaacctgaccgtgccctgcgacggcagcgactcgtatgggttcgcggacccgcacatcctggtccccgtgcgccgccgcgctgtcccggcgtcgtttaagaagggcttcgtcgaagccgatggccacgtctccatcgccggcgagcactactcggccatcatccccgccgcgaaacccctgcccgaggtctggcgcgtcggcaaacgcgaaagcttgcagaagattaccaagcccacctaccacaagttctcgtcctacggccgcaccggctcaggtgtgggtctgatcccgctcgacgcggagaaactcaccgtcgacacggccccggccctcgagtacgacgtctacctcttcaccaaccactccgctgccaacgtcacgctgcttatttcgcctgcgctcaactacctgggcgagtacgacccgcttgagtacgccgtgtccctcttccccgctgccgacagctcgcctgccccggagcaaatcaagcgcgtcgcgcctgtggggaggacggtgggcaccagcatgcccgcgggatggcagggcgccgtggcggatggcgtttggggccgcacgggcggatacacgaccaccagctttgcggtgccgcgcgagggcgcgtacaagctgcgcgtgtgggcgctgatgccgggagtgattgtgcagaaggtggtgattgatttgggaggggtgaagcagagctatttgggcccaccggagagctttttggtggggagggataaggtgggcgcgaggaatgtgacgagctttttgaacgagcccggggtggtgggaggctgggggagggggaggttggagtga

SEQ ID NO: 140 - DNA, 1321 bp, Scytalidium thermophilum
atgctggtgcctctccttgccttcgtgcccctggcatctgcccaggggttctttggaggactgaaccacctccgtttcggatgctcacagctcactatcgagcggcttgacccccttgtcgagcctggcaaattccctacatcgcacatgcaccagatcattggaggcaatgccttcaacgtcagtatgcccgtcaccgacatcgcctcgctggcgacctgcaccacatgtggcccttctgaggaccgctcgaactactggtaaaccctaaccctagccacaaccccaacccttgagagattggaacgctaaccttgaggcaactaaactacaggacggcgaacttgtacttcaaggcgcccaacggcagctacaagcgtgtgcctcaggtccccaaccggttcttgttcaacgatcgcttcaccacgcagaccgacggtggtgtgactgtgtactacatcagccccggcagagggcaagtcacggcgttcaagcctgtgagttcggagtgtgatagttatggctgattgtgggacttcattgacacaaccaaccactcaggggttccgcatgttcgtcggagacccggcacgccgcactccgttgtacaagtcccagagctgcttccgttgcttcagcgctcccaacttcggcggagatgacctcgctccttgcagcgacagccgccgtgactttgagggcttcccgccccagccgtgccccggcggtatccggtcaaacgtcttgtacccgacgtgctgggatggcaagaacctggacagcccgaaccataaggaccatgtacgtacttcatctcgtcggccctggggaaccccgaactaacatggcacgcaggtcgcctaccccgtgaacgggccctccaacttcctgtcgactggcaactgccctcctagccaccccgtcaagatcccgcagctcatgctggagattgtctgggatacgaccaagttcaacgaccgttcactgtggcctgccaacggccagcccttcgtgctcagcactggcgatcccacaggctatggccagcacggagactacatcttcggatgggagggcgactcgctgcagcgggccatggacgccaacggctgcttcgctgcggactgcggcggtctgaagtcgcagagcattgagcaagccaagagatgcacgatccccaagagagtcagggaagacgtcgatggatgtaagtgccacctcaagcttgaatatcagcaatgtatgacgtagagaacacaacactgacgatttggcagggttcgaccatctgccgggtagggagggtatgcacgacatgtaa

SEQ ID NO: 141 - DNA, 1655 bp, Scytalidium thermophilum
atgcgtttgtcaagcaagtcggcggtgcttgccctgtcggcgacgctcgctgaggcggcgccccagttcggcggcatcttccagcagacgagtacgggagaccacggcccaccttttttcgagaccgtcctctggctgacagacctattttctggacagtgcttcgtttcggctgcgccaacatcgtcattgaccgtgtggaccccctcgtcaacccgggccagatccctagccctcacgtccaccagatcgtgggtggcaacgccttcaacgtgaccatgcccaccgacgacgtcgctgagcacgctacctgcacaacttgctcgttcgccgatgacttcagcaactactgttcgttaccaccgacgagaaccacatggaggaccatgaactaatgccgtgataccaatagggactgccaacctctacttccgtgcccgcaacggctcttacaagcgtgtgccgcagggcagccatgcgtaagtgacaacccagatatggacattgagaacatggcggtaaaggtagatgtttttggatgagtctaagtgactgacgctggtctttggggctacagattccagttcaacgaccgctacagcacccagactcagggcggtatcctggtctactatgtctcggaccagcctggccgcgtcacggccttcaagccagtatgtcgggcctatcctcttcgccagagtacggcatgctgatatgtgttcactagggcttccgtatgctcgtcggtgacccgaacatgcggtctcgccccgacaacaggctgaagcgccagaactgctaccgctgctacagtaagcaatcctcagttcaccctggtgcgtgggcatgtagactgacaacatacagccggcccgaacttcggtggcgacactggcgctccctgcatggatgactctgtcgactccgagaggctgcccaacaaggtctgcccgggtggcattcgcagcaacatcctcttcccaacgtaagtcctccatgacagccacaaaagaagcctcgctgtactgacccaaggacagctgctgggacggcaagaacctcgacacccctaaccaccaggaccacgtaagcctaccctttccttaccttacccctgatcttactcagaccatcgacactaaccccgccatctcaggttgcctatcccaccaacggcccgaccaacttcctgggcaccagcggcccctgcccggcgagccacccggtcaagatcccgcagctcatgtacgaggttgtctgggacactacgcagttcaacaaccgcaacgagtggcccgccgacggctcgcagccgttcgtcctctcgacgggcgacccgaccggtctcggccagcacggcgactacgtctttggctggaagggcgactcgctgcagcgcgccatggatacggccggctgcttcggcgctcagtgcgctaacctccgcacccagagcatcgaggtcggcaggcgctgcaccgtcaggcgtgctgctcacgaggatattgatggctgtatgttttttgcctccctttgtgtcttgtgttttctttcttccttctgtgtgttggcaaaatgaaccaaatgaacaaaaggctaacgctgcgttagggcttgataagcttccgggtgtcgagggcatgccgatgtaa

SEQ ID NO: 142 - DNA, 2402 bp, Scytalidium thermophilum
atgaccaggctgaccaacatcggagtcctcacggcctatgcggccggcgctctcgccggggtcctccccgactgcggcaagccgcctctgagcctcaacaagatctgcgaccagaatgcgagcccgcgggagcgcgctgaggcgctcgtggcagctatgacggttgaagagaagctggccaaccttgtcaggtaaggggtttgactggtaacaccagcgtccagtctgcatctgctccggactaacacaaaatcattagcaaagccgctggcgtcccccgtctgggcttccctgcgtacaactggtggtctgaggccctacatggcgtcgccggtgcccctggcatctcattcgccccccccttcgactatgccacttcattccccatgcccttgatgatggcggcggccttcgacgacgatctcatcgagaagattgccgtcgtcattggcaacgagtccagggcgtttggtaacaacgaccgttctggcatcgactactggacccccgatgtcaacccgtacagggacccgcgttggggccgtggatctgagacgccgggtgaggatgtcctcgtcatcaagagatacaccaagcacctgctgcgtggcttggaggggactagcaagacgcgccgcatcatcgccacctgcaagcactatgccggctacgacctcgagtcgtggcagggaacgacccgccatgactttgacgcgcgcatcacgccccaggagcttgccgagtactacatgcagccgttccagcagtgcgctcgcgactccaaggtcggcagcatcatgtgctcttacaaccgggtgaacggagtcccggcctgcgcttcggactacctcctcaacaaggtcctgagggagcactggaactggactgagagcaacaactacatcaccagcgactgcgaggccgttgccgacgtctccctcaaccacaagtatgctccgaccctggccgctggcactgcgatgtgtttcaacaacggcatggacttgagctgcgagtatgaagggtcgtccgatattccgggcgcatggaacagcggagccctcaacgagaccatcgttgaccgggcgctcgtccgcctcttccagggcctcgtccacggtggttacttcgacggccctacgaacgagtgggcatcccttggccgtgctgacgtcgacaccccgtacgctcgtcagctggctctgcagtcggccattgacggccttgtgctgctcaagaacgaccgcaacaccctgcccttacctctcaggaagggctccaaggtggccatgatcggcttctgggccgacgacgggccgaagctcaagggcatctacagcggcccttcgcccttcatccacacccctgtctgggctgcccgtgaagccggctacgaggtcgccgttgctcctggccccattctgcagacgaatgctgcccaggacaactggactgaggctgccctcgctgcggcgaagaagtctgattacatcctctacttcggtggcatcgatacgaatgctgtcaacgagggtgttgaccggctcaccatcgcttggcccgaggcccagctgactctcatcaacaagcttgccgccttgcgcaagccgctcgtcatcatccagcttggcgaccagcttgacaacacccctctgctcaagctccagggcgccccgtcgattctctgggccaactggccgggtcaggacggcggtccggccatcatctccgttatcaacggcactcacgctcccgcgggtcgtctccctgtgacccaatacccggccaactacaccgagatcgtccccatgaccgacatgaacctccgtccaaacccgagcaccggcaaccctggccggacctacaagtggtacccgcacgccgtccagccgtttggcactggcctgcactacaccactttcgacgctcgcttcgaccgtccgctgccagcccctggaaagccgggtacgccgggcatgaagccggtcgtcctgaagctcaacatccaatccctcctcgcggattgcaagaacacttacaaggatacttgcgcccttcccccgctcgaggtgcaagtcaccaaccgcgggccgcgccacacctcggattacgtcgccttggtcttcattaccgaaaccccaggccccaagcctcaccctctcaagagcctggccacatatggcaggctgagaaacatcaagccgggtcgcaccgagcgggccaagctcgaatggactgtggcttcgctggcgaggcacgacaaggatggcaactcgatcttgtacccaggtcgttacactctggttctggatgtgccacagaaggatgaggtcgttgtggagttgagcggcaaggaagaggtgctggacgtctggcctgttgaccccaacctcaagaactga

SEQ ID NO: 143 - DNA, 928 bp, Scytalidium thermophilum
atgttctctaggcgcccctcgttgctgagcaccctgctgctcgcgctgacatggctcagcaccttcgtgctcgcggccccgtcggcgggctgcggcaagaacccgaccctccgcagccaggcttacaccatcaacgtccaaggccgcaaccgctactacaccctccgcgtgcccaacaactacaacaaggacaccccgtacaagatcatcttcctctggcacccgcgcggcggcagcatgcagaagatcgtcaatggcgaggaccccaaccgcggcggcatcctgccctaccacggtctgcttcccttcgccaacgagaccgccatctttgtcgttcctgagggccagaaccagggctgggccaacatgaacaacgaggacacggccttcttcgaccgtctcgtcgagaccatcgagaacgacctctgcgtcgagaccagcctccgcttctctaccggcttcagctggggcggtggcatgtccttcgctcttgcttgcgctcgccctcagcaaatccgtgctattgctgtcatctctggcggtcttctcagcggttgccagggcggtactcagcctgttgcgtactacggccagcacggtacttccgactcggttctcaatgttcagatgggtcggcagctccgcgaccagttcgtccgcaacaacggctgccagcgtcttgcctacgagcctcagcccaacggcggccgctccgtcaaaacggagtaccagggctgcctccctgactatcccgtaagtacccctacctccaaacacgctgtcgatgacgtggttttgacaaaacgggaaggttcaatgggtgatccacaacggagaccacaatccctcgcaggttgatcagggctcgtcgacgccgtttgcgccgggcaacacttgggagttcttctcgcgcttctccccgaaataa

SEQ ID NO: 144 - DNA, 1713 bp, Scytalidium thermophilum
atgccgtcgctgttaagactggccgtctttggccttgcctttatctcccaagccagcgccgtcatcctacaaaatggccaggttagggaggtacacttcccagataccaagattgatcccaagcactacaccttcagaacgtatcccgccaatgcccctgagatctcgtacaaggggcgctgggactcaaagcatgtatcgtggtggtcgtaagttagcatctccatgcatgaaactggtaagcttgtcacccccctaataatgatcctctcagagccccggggatcaagttcggctatacgggccaaacggttgccatcacctttggcaacctaaccagcaatggcgtgcttgtcggttaccgcatcggcggactcgattggatgttcaccaatatcacggccggtgctacgcacctccttgtgagcccagagactccaggctccgactttgttggccccatccgcccatggatttttgaactgcgcgtcaccaactgggcctacggcgtgcagataaacaaggtccatgtcgctgccggggagaggctcgtcaagattcccgaccattttcgtcgcatcgaggtcatcggagacagcctcgctgcgggcatgtacgctagctacgagggactgtccagctgggcatagtatggcttccccgccccccgtccccccgtccccctttccccccccctttttttctttttttcttttttttctatttgcctgagcatattttcctgagcaccaagagcttactctgagtagcggactgggtgaaggcttgggaaacactgagtactccgtgattgcctaccccggtatctgtgttgcggaccaggagtgctggggaaatccccgcggccaggttcatcaatggttttacacgtcggacacgagttatcgtgcctccgtcattcacggtggtgagtgaagttttgaaggactgcgatcttcgagtgtccgttccttcgttgaccgcaaagaatagataatcccgagccgtgggacttcgagaagcatcccccagccgatcttgtcatcattaatcttggaaccaacgacaacaacgagcataacggcgtctctacggaggcgcacatcgatgcttacactaagctcatccaaggagtccacggaaagtggcctaacgcacaggtcattgtgatggtaagggccccctcacctctctagcctggagaaccgcctcccatacgacgacagccgaccatgttaaccgctacagtcactctggttgggtttctaccaatccggcaacacatacctctcctacgctccacgcggctgggtcaaagagatctacgacatggttcagtggttcaactcggacgactacctgtacaatccggtcgtgtacgatggcgttaccaagaagacgacaaggctcaagcgccgtgacaagccctttgtgcactacttcaacaccacgggcatcctccagcacaacgacatcgccccgcagtggcaccctacggatgttggtgctatcaaggtggcgagccacttgcagcagtttataagaatgaagtttggctgggagctggaggcgacggggcctgagtaggttcactcttatttagttttttctgggttgcgcatgggaactgggtgacgtatgctaataatgtcttgatccctctacagggtgtatcacgaaaccctttactggaatgatgagtcgggatactaa

SEQ ID NO: 145 - DNA, 1062 bp, Scytalidium thermophilum
atggctcccaagacctcgacgttccttgcctccctcacgggcgccgccctcgtggccgcccacggccatgtcagccacatcattgtcaatggcgtccagtaccggaactacgaccccaccaccgacttctacagcggcaaccccccgaccgtgattggctggtcggccctcaaccaggacaacggcttcatcgagcccaacaacttcggctcccccgacatcatctgccacaagtcggccaagcccggcggcggccacgtcacggtgagggctggtgacaagatcagcatcgtctggacccccgagtggcccgagtcgcacgtcggccccgtcatcgactaccttgccgcgtgcaacggcaactgcgagacggtcgacaagacctctctccgcttcttcaagatcgacggcgccggctacgacgccgcggccggccgctgggccgccgatgctctgcgcgccaacggcaactcgtggctcgtgcagatccccgccgacctcaaggccggcaactacgtgcttcggcacgagatcatcgccctgcacggcgccgccaaccccaacggcgcccaggcctacccgcagtgcatcaacatccgcgtcaccggcggtggcaacaaccagccctcgggcgtccccggcacccagctctacaaggcctcggacccgggcatcctcttcaacccctgggttgccaaccctcagtaccccgtcccgggcccggccctcatccccggcgccgtgagctccatccctcagagccgctcgaccgccaccgccacgggcaccgccacccgccccggcgccgacacggacccgactggcgtccctcccgtcgtcaccaccacttctgccccggctcaggtgaccaccaccagcagccgcaccacctccctccctcagatcaccaccaccttcgcgaccagcaccaccccgccccccccggccgctacccagagcaagtggggccagtgcggcggcaacggctggaccggcccgaccctctgcgcgccgggctcgagctgcaacaagctcaacgactggtactcgcagtgcatctaa

SEQ ID NO: 146 - DNA, 1053 bp, Scytalidium thermophilum
atgtatcttctacccatcgccgcgaccgccctagcattcaccaccaccgcatacgcccacgcccaagtctacggcttacgtgtcaacgaccaacaccaaggcgacgggcgcaacaaatacatccgctcgcccagcagcaattcccccatcctgtgggaccacgtaacccacccatccctcatctgcaacatccgcgacgacaaccaacccccgggtcccgcgcctgacttcgtccgcgccttcgccggcgaccgcgtggcgttccaatggtaccacgctcgccccaacgacccgacggattacgtcctcgacagctcccacctcggcgtcctcgtcacctggatcgcgccgtacacggatgggtccgggaccggccccatttggaccaagatccaccaggacgggtggaacggcacgcactgggccacgagccggctcatcagcaacggcgggttcgtcgagttccggctgcccggctcgctaaagcccgggaagtacctggtgcggcaggagattatcgctctgcaccaggccgacatgcccggtccgaaccgcgggcctgagttctaccccagctgcgcgcatttggaggtttttgggtctggtgaggcggcgccgccgcaggggtatgatatcaacaaggggtatgcggagagcggggataagttgtggttcaacatttacatcaacaagaatgatgagttcaaaatgcctggaccggaggtttgggatggtggtgtcgatttggagagcgatgggcaactgaggaaccaggcaagccaaggtgaaccaacacagatgagtagccggaaggagtggtactatttttggtacgggatgaaatgagcgcgcgtttgtgacgatgctgatataggactggaaacaacctggaaagaagcagaggcttgctttggtaatagaacggagaacgtcaggatacctaggtaccttacctatatgagcatacttgatgagcgaccctgagatgtgcgaatctgttcatttgattacgagcaaagtgagaagcagttcatcgtgactctgtattattga

SEQ ID NO: 147 - DNA, 3340 bp, Scytalidium thermophilum
atggacttcatttttcgtcaggatggcaaaccagttgggatttcttccctcatcttcatctgcctctgcgccagtcaagctttctcagcaaacgtcacctccccgtggccgttgctaggaaacggcctccaggaggtggtgcaatgggaccactacagcatcatcatcaacggcgagcgcctcctccttctcggtggcgagatacacccttttcgccttccagtgcccgagttgtggtgggacacgctccagaaaataaaggcaatgggtcttcgcatggtctccatttacactcactggggtttccactccccgacccctgataccgtcgacttcgccgctggcgcgcacaacatttcgcgctttctcgagatggccagggacgtgggcctgtacgtcctcattcgccctggtccgtacatcaacggcgaactcaacgctgggggcatgccgttgtgggtgaccaccggttcccatggcactccacgatcaaatgattctgctttcaccgatgcctggacgccgtacctggacggcataggccgcctgacccgcccataccagatcaccgagcagggaacagtcatcatgtaccagattgaaaacgagtacggttatcagtggcgggatgagcgcaacaaggtacccaatcttgaagctgtgtcgtacatggagaagctccaggagagtgcccgaagaaacggaatcgtggtgcccctcgtgcacaacgggcccaacatcaatactggtgtttggtcaagggattatgacaccgttggcgctggagggaatgtggatatctacggggttgacagctatgtaagtgggcttcatgcccccctccgttcaatgcctgacttttgatgtgttagccccaatgctggtcctgcatcctggaagaatgcggcaacatcaccccctgggccgtgtccgactaccacagccacttccagcacatttccccgcgtcagccatcattcatgcccgagttccaagcaggtgccatgaacccatgggctggcccggccggcggctgcaaagagcggacaggcgtcgacttcgtgaacttctactatcgcgatgccctagcccaacgagttaccatcctgaacctctacatgatctccggcggcaccaactggggctggctctccgcgcccttcatcggcagcagctacgactacggcgctgccatctctgaggaccgcagcattggtgacaagttctacgagatcacgaaccttgctctatttgcccgtgtggctcatgacctggctgccgcggatgttgttggcgctgggaccgagtacaccaacaatcctgccgtgtttgtcacggagctcagaaacccagtaactggagccggattctacgtgctccgtcacgcgaaaactgcctcggattctgaggagcgctttcgaattcgcctcaagaccagtgtggccgaaatcccagtcccgcgactctcagtagcggcggccacgttgagcggccgcgaaggcgagatattggtcacagatttccggttcggccggaaccatatactttactacagtctagccgaagttctaacctacacggtcctagatggcggggagacaaccgtgctcgttctatggactccggcaggtagaattggcgagttctatctggctggcgctggttccgctattttcgttggatcgaaacaagttacgatcgcccccggcgacgatggaatcctggtcggatatgtccaaactgaaggaatgatacccgtcaagtttgataacggggtaacggtgctcttgatcgatcgcaaaaaggcgtacgaggtctgggtcccggtattaacttccgatcctcgagtcccagaggatcaaactggtaggttgatcattttgaaggccatcgcactcggctgttgttcatcgtaatatcctgcccatgattctgacgtctcccgtcagctattatcatcacaccctcccttgtccgctccgcctccctctcctccaccactctttccctcactggcgacaccaacacaacagctccagatgaccggtctatagaaatctttacgtcttctcgtgtcaccgaggtcctatggaacaaccgccccctcaactccattttcacgacaccgtggtccagcattcgcggccttatccctccgccttccggacaccttgctcttcccacgccttccatctcgggatggaaatcccgcgatgccctccctgagcgacaccccgactattcccctaccagcgccgcctgggtcttggcaaacgatacttcgtcttccaatccagcagtcgatagaaccacaacgaccacgccgtatctgtttgcggaccagtacggctttcacaccggtgtcaagctttggagaggggtgtttcgccgtcctgtgacgaacagcactccttcttcgaccggcgacatgccggcggccccaaccggagcgtacctccgcattcaaggcgggacggcgcacgcctgggcggtgtatctgaacggcgagttcattgggtcttgggtggttgatagcagcgtgtccgtatcggagaaggagctgcccttccctgcccggctgcttggtaatgaggagaacgtccttctagtcgtccaggaagacacgggtcacgaccagcttgctgcagcggtgaatcctcgaggcatcttgaacgtcacgctgctggcaagccccaccaacgatgccggtgctggctggcagttttcggaatggaaaatcgcaggcacagctggagacgggcgcaaatcgggtcaaccatacggcaggccactcgacacggtccgcacgcggtacaacgaaggcggactggcgcccgagaggcgagggtggcatctgccagggtatgatctctcctcggatgaagattcgacgtcatcttggaccgagtctagcccagaggacgacttcaccggcgctggtgtgcgcttctaccgtggtattttgcatcttgatgtaccccgtggtttggacgtgtcgttggcgtttcgcatcaaggggctcaatggcaatggtacggtgtttggagaggagccggggggctttcgggtgctgttgtttgtcaacgggtggcagtatggccgctactatccggacattgcgtccgaggacacgttccctgtcccaccgggcgtgctggactacgggagtggtggtggggagaacgtgattggcttgatagtgtgggcactgcaggagggcggcgccagtgtcaaggtggatgtggtggtacggtacactttggattcttcccttgatgtgaactttgatggacggtatttgcggccggaatggagtcgggagaggctgcagtatgtgtag

SEQ ID NO: 148 - DNA, 844 bp, Scytalidium thermophilum
atgaagctcctcgctcctctgatgctggctggcgccgccagcgcccgtgagtaacccctggctggatcccatgctggtcccagtgttccatggctgacaaccaccctcagacaccatcttcacctccctcgaggttgatggccgcaactacggcacgggcaacggcgtccgcgtcccctcctacaacggccccgtcgaggatgtcacgtccaactcgatcgcctgcaacggcccgccgaacccgaccagcccgaccgacacggtcatcaccgtccaggccggccagaacgtgactgccatctggcggtacatgctcaacacccagggcacctcgcccaacgacatcatggacagcagccacaagggtcccactctcgcctacctcaagaaggtcaacgatgcccggaccgactcgggcgtcggcgacggctggttcaagatccagcacgacggcttcgacggcaccacctggggcaccgagcgcgtcatcttcggccagggccgccacaccatcaagatccccgagtgcatcgagcccggccagtacctgctgcgtgctgagatgatcgccctccacggcgcccagaactacccgggtgctcagttctacatggagtgcgcccagctcaacattgtcggtggcaccggcaccaagaagcccagcaccgtcagcttccctggcgcttacaaggtatgtccgagtttggtaccgcgataaccgggagatgagaaaagtgatgctaacaaactatgatagggcaccgaccctggcgtcaagatcagcatctggtggccgcccgtcaccaactacgtcatccctggccccgatgtcttcaagtgctaa

SEQ ID NO: 149 - DNA, 1322 bp, Scytalidium thermophilum
atggcgaggctctctcgcgccctgctggcggctgccgccgtagccgccaatgtctcagcgcaacagcaacaacaagcacaagaacagctccccgagggattgcacggcctcatggtggccgccggcaaggagtatttcggcacggcgaccgatgtcaacaacatcgaggacgaggactatcagtccatcctccagtaccagggcgagttcggcatggtgacgcccgagaactcgcaaaagtgggagtttactcaacctcgtcgggacgagttcgtctacaccaacgccgacaaggtcgttgggagggcagaagagattgggcaattagtacgatgccacgccttgacatggcattctcaattgccgatgtttggtatgtactcccctccgcaatttcaaagccatcatcggcgatgtgttccacgcctttactgacatggagttttcttctccccctccttccagtctcaaccacgcaatggaatgcttccactctcgcctctttcctaaccacccacatcgacaacgtcgtgacccacttcgccgggcagtgctacgcctgggacgtggtcaacgaggcgttaaacgaagacgggtcctatcgaaactctaccttttaccaatacctgggcgaggagtacatcacgctctccttcgaggcggccgccaaagccgacccggccgccaagctctactataacgacttcaacctcgaaacctccccgaaaaaggctgccggtgccgagcgcatcgtccgtctcgtccaggaggccggcgcgcgcatcgacggcgtcggcttccaggcccacctcgtcgtgggccaaaccccgccgcgcaagaacctcaccgccctcctctcgcgcttcgccagcctcggcgttgaggtggcctacacggagctcgacattgctcacgagttccccaaaaacagctccaaccggatcccggacgccgcggcgctcgagcagcaagccgaagactacgtcgccgtcgttggctcgtgcctggacgagcccaaatgcgtcggcgtcacggtctggcagttcaccgacgagtacagctgggtcccggacgcgtttgaaggccgcgaccaggcgtgcttgtggacgcgcgactacaagaagaagccggcctacgacgccgtgtccaagctgctgcgcgaagcggcagctaacaacacgggcgtgaacaccaactcgaccgaggatatcttggagccgataccctccaatggggcagcggcggcagcggcggcagcgggcggttgggtgggcagggttgctctgggagcggccttggttgtggggatggctttgctttaa

SEQ ID NO: 150 - DNA, 1104 bp, Scytalidium thermophilum
atgagagctccgtcctccgtcgctgccgcgactgccctcctcttgctggccacccccgcgacggcgcagcttcacaaactcgctgtccaggcgggtctccgctacttcggcgcggccaccgacactcctcaccagcgtgagcgcgccccctacccggagtcctatccgcagtacgacgccatcctggccgacaacgacgagttcgggcaaaccacgccgaccaacgggcagaagtggctcttcaccgagcctgccccgcgcctcttcaacttcaccgagggcgactacgtcgccgacctggcggcgtcgcagggcaagctccttcggtgccacgccctcgtctggcacagccagctcgctccctgggttgaggagaccaactggaccgcgcccgccctggctgacgccattgagcgtcacatccgcgccgtcgcgggctactaccgtggaagatgccatgcgtgggatgttgtcaatgaggcgctagacgaggacgggtcctatcgccagtccattttctaccgggtgctgggggaggagtatctccgcctggctttccgggccgcggcggccgcagaccctgacgcgaagctgtactacaacgactacggcatcgagcggccaacctccccgaagacggctggtgccctgaggcttgtgaagatgctgaaggatgccgggctgcgtgtggatggcgtcggtatgcaggcgcatctccatgccgacaaccacccgagtgccgaggacctcattgccacaagtgaggcatatgcggaacttgtcgacgaggtcgccttcacggagctcgacgtgcgcattaagcttcccgtggacgagcagaaactgcagtggcagaaggaatgctaccaaaaggtggtgacggcgtgcgtgaaggtgaaggcttgcgtgggaattactctctgggacttttacgatcccttcagctgggtcccgcatgtgttcccgaacaatggagcgtccctgttgtggttcgaggacttctcgaaacacccggcttatgacggcattattgagaccttcaagagtttgattgccgaggcagaggaacaacccaagaggcggagcctgggatggagggcttaa

SEQ ID NO: 151 - DNA, 1860 bp, Scytalidium thermophilum
atgcgggtgttcaacgtcgtcgcgaccctcctcctcgctggtctggtcgagtccgccggcaggggtttaggccatgcaggcaaacgccatgtccagcacgccgcgaagagagccatggccgctcagcaacagcagggtcctgagaatcttcacctcccggtcgtgtcttcgcggaaggcggggaataggttcttgactaacaagacggagcgtgagtttttcatgttctttagcattcatagacctctttctaacgtcgtctagcattcaccgttgacgggacggccatccccgatgttgacttcgacgtgggcgagtcgtatgccggtttgttgcccatcagcagcgacccgaacgatgagaacaagctctttttctggttcttcccctccaccaacgaggcggcgaataaggagattttgatctggctcaatggcggagtgagtttctcctcatcccaaagatatatctactttgtaacagcttggctaacacccatcgtagcctggttgctcggcctttgagggccttcttcaagaaaacggaccattcctctggcagtacggcacgtacaagcccgtccagaacccctggagctggcacaccctgacaaacgtcatctacgtcgagcagcccgtcggcacgggcttctcgaccggcactccgtccatcaccaacgaggaggagctggccgcccagttcatgggtttctggaagaacttcattgacaccttcgacatgcacggttacaaggtgtacatctctggcgagtcgtacgccggctactactgcccgtatatcgccaaggccttcctcgacgccaacgacaaaacctacttcgacatgtcgggcatgaccatctacaacccgctcatcacctccttcgagatccaacaacaccttcccatcgtccagttcgtcgactactggaccggtctgttcccattcaacgactccttccgcgccgacattcaccagcgcgacaagcagtgcggcttctccgactttatcgcccaacacctcgtctacccgcccaagggcccgctgcccagcaagcttcctggcacgagacccgacggcacgctcaagcccgagtgcgataacctctactgggacatcttcgacgcaatcatgctcatcaacccctgcttcgacatctaccaaatcaccaccacctgcccgctgttgtgggacgtcctgggcttccctgggagcatgccttacctgcccgagggcgcgcagatctacttcgaccgggacgacgtcaagcaggccatccacgcgccgacggggttcacctgggaagaatgctccagcgacgacgtgttcgtcaacggcaccgacctctccccgccgcccgtgctcgacgtcctgcccagcgtcatcgaccgcacgcaaaacgtcatcatcgcccactcggcgttggatatgatcctgctcgccaacgggacgctgctggcgctgcagaacatgacctggggcgggaggcaggggttcacgcgccgcccggacgagccgttctacgtcccgctcaacaacatgaccgatctttcaacgctggcggcggctggggtgatgggcagcttggtgtcggagcgcggactgacgtacgtcggtatcgcgctcgcggggcatatggtcccgcagtatgcgccgtcggcggcgtacaggaatgtggagtacatgctgggcagggtgggatgtatgaattgtaccgtgccgtttacgacggatccgtttacgccgcagagccaagggccgttggggaaggggacggcgccgcaggggtggagcgacattacaggctttgggaaggggaagggaaagccgcatcgggtggtgaaggggaagaggctgtga

SEQ ID NO: 152 - DNA, 534 bp, Scytalidium thermophilum
atgcggaccatactcaccttcctctgggccttcgccgccctcgccagcgccaccatcacctaccagctccagcgcgccaacaacccaacctcggaccagaacgatgcctactggcgcatcgaccaggccatggcccgcgccgtggcgcggtacaaccgcctggcccctcgcgcgaacaagcacattacggtgcagtacgttccctcggtccagacggccgacggcaacttcaacggcaacatccgcttcggctccaaccgctcgtacatgacggagcgcacggcgctgcacgagattgcgcacaccctcggcgtcggcacgacgcagcagttcaatacccggtgcgccaacaacaactggccgacggcgaccgcgctgctgcggtcgtgggacgggccgaacgcgaagatcaactgcggcggtggccacttctggccgtatgggctgaactatgagaacgagatgagcgagacgaatgccgagaggcactgcttgctggtcaatgccatgttggcggatgggatggcgtggtag

SEQ ID NO: 153 - DNA, 1406 bp, Scytalidium thermophilum
atgacgctcaagaacctgttcgcgagcgcgctgctcgccgccgcgcccgcctttgcccacccgggccacaaggatgtggtgccccagggccccctctacaggcgcaacctcgaccactgcgcctggaagttcgaggagcctgagttcgtcaagcgcaccgttgaggtccacggcgccgagatcgcccggctgaggcagaggctgggtatccgcgagaagtgagtctgccgtttgaggagcaaaggacgttggtgtgacagcgatgctgacaacagctactctccaggcccaagatcagcccgcgtgactacctctccgtgtcgcgcatcgaccacaagagcaacaagaccgtgaccaagggcatggatcttagcaccctgttctcggactctggtgcttgcgtgctcactcccaccgtcgacctgggccctctctgtaagtcacaccctggggaacacatgtggaggctcgattcagggatggcgtgctaacagtgaatcctttagacgtccagggtgaggagatccgcaaggacattaccaacggcgaggccggtgtccccgtgaccctggccatccaggtcgtcgactaccgcacctgccagacggtgcccaacgcctatgtcgacatctggagctccaacgcgacggtgagtgacactgctcgagattgagggaactgactgatactgactttgtttcttagggtatctacgtcggtgtccagggctaccccggcatgggcgaccccaacgatgcttccatcctcaacggcaccaccctccgtggcgtccagccaaccgatagccacggcattgcctccttcgacactctcttccccggccactacgacgggcgcaccacccacatccacggtatgtcctgctctcaccagctcccaaaatgaatcagacactaacgatccccacagccgtcgtctaccttggcgccaccaagcagcccaacaataccatcactggcggccgtgctgctcagatcggccagatctacttcgaccagaacctcatctacgccgtcgagcagctgcctccctacaacaccaaccgcatggccatcatcgagaacgtcaacgacttcctcttccgcgccggcgctaacggcgatgacccgattgttcgctacgctctcgtcggcaacaccctgcaggagggcatcttcgcctggatccgcttcggtgtcgatgtcaacgccaacaagcctctcaacccggctgctttctggactgagaagggtggtgtcatgaaccccaccggccccgtccagcccggcggtggtggcctcttccctggcttccctggcggtggctggcctggcttccccggcggtggtggctggccctggcctggcggttggcgcaggaggcgcgcggcccagaacgccaactaa

SEQ ID NO: 154 - DNA, 1508 bp, Scytalidium thermophilum
atgcacttcaccatgcgtgcccacgtgggcatcggctacctagccgccctcagcagcgcagcggccaccaactgccgctgctcccaggtgatcaaccgcgatgtggccatcatcggtggtggcgcgtcaggctctcacgccgccgtgtggctgcgcgacaatggacagagcgttgttgttgtcgagaaggctagccagttggtatgtgctgccgctcttgaccatgttcctcctcgtagctttgggtactaacttgtgtctagggagggcataccgcggctttcaaggaccctgccacagggttggacatcaatgtgggtgtccaggcgtggatggactacaaggattcttacgacttccccgcccggatgaacgtgtcgaccagcggctccatgcagttcactcccaacacgaacaacttcgtcgacacgctgacgggccgccgggttgaaggctgggaagcgcctgtggatgagaccaagtacccggccattcaacggttcctcgatgccatcctgccctacgaggacatcatgcttccgggcttcttcgacttcccggacgaggtccccgaggacctgctcatgccgttcggccagttcgtcgagaagtacgacctttatggcgcggtcccccaggtttgggacgcgacgggtcagggcgttggcgatatgatgaacgtcccgacgctgttcgtgatccaggcttcggcggtgcccatgacgaaggcactcctcgggcaagccgctgccgccaccccggcctcaggccgtctgtacgacctgtacgagagcgtcgccaacttcctgggcgacgatgtgctgtacaacagcgaggtgattaagtcgacccgcactgagtccggcgtctccctggtcgtgtccgggccgaagggcaagaggacgtgcatccaggccaagcggttgctcatctccatccagccgactcgtagcaacatggctcctttcagcctggatgaggaggaggccgaggtcctgggcaaattcttcttccctaccgtcttcaccggcatcctccgccaccctgctctgcccaagctcaacgcctttttgaaccgttccccggctcccggatcgctcaactactccgtcatgcccgtcgcgtcccaggtcggcagcatcgagtacatcggtggcaccgaggacctgttcaggttcactgccgtgggcaccgaggatgagaccgaagagggtatgaagaagcgcatcgccgacgccatcgacgctctgattgctgagggcacgatcgaaagcgcggctccggaaggcccggtgcccgaggtcacctacgccgtcttctccaaccacggccacatgcacgcgcaggttaccgccgacgaccttcgtgatggcttcttcaagaaactgtatgcccttcagggcaagcgcaacacctggtacactggcgcggccttctcgagcgggttttcgacgattctttgggagtacaacaaggtgctgctgccgaaggtggttgaggggttgtaa

SEQ ID NO: 155 - DNA, 1003 bp, Scytalidium thermophilum
atggtcgccttctcgtccctcttcctcggcgcttccatcgccgccacggcactcgccgcccccggtgagctgcctggcatgcacctgaacaagcgccagacctacacccagagcgctaccggcactcacgacggctactacttctccttctggactgacggtggtccgaacgtccgctacaccaacgaggccggtggtcagtacagtgtgacctggtctggtaacggcaactgggtcggtggcaagggttggaacccgggtgctgctcggtaggttcatcatctaaccgacttctctcaagatcatcactaacatatggcagtaccatcaactacactggtacctaccagcccaacggcaactcgtacctggccgtctacggctggactcgcaaccctctcgtcgagtactacgtcgtcgagaacttcggcacctacgatccctcgactggtgcccagcgcctgggcagcatcaacgttgatggctcgacctacaacgtctaccgcacccgccgcaccaacgctccctcgattgagggcacccgctcctttgaccagtactggtccgtccgtgttaacaagcgcgttggcggctctgttgacatgaacgcccacttcaacgcctggcggcaggccggcctcaccctgggtacccacgactaccagatcgtggctactgagggctacttctccagcggctcggcccgcatcaacgtcggcggcggctccactggcggcggcaacaacggtggcggcaacaacggcaaccctggtggcaaccccggcggcaaccccggtggcaaccccggtggcaacccgggcggcaacgtaagtctatctacatatgtctcctagcttgtcttgagccaaacactaacaatgagatcctacagtgctctcctcgctggggccagtgcggtggccagggctggaacggccctacctgctgcgaggccggcaccacctgccgccagcagaaccagtggtactctcagtgcctgtaa

SEQ ID NO: 156 - DNA, 1363 bp, Scytalidium thermophilum
atgaagttctctactgccctcttcgccctcatcgccccggcgatggccgctccggcgccctctggccccatcgacaagcgcgctccccttatccaggcgcgcgctggcgaggtcgtccccggcaagtacatcgtcaagctgaaggagggtgccagcagcgaggctctcgatgctgccctgagccgcatcacccgcaagggcaagaaggccgaccttgtctaccgcaacaagggcttcaagggcttcgccggcaagctcgacatggaccttctcgaggagctccgctacctccctgaggtatgtggcacaaaatccggggaaatagacccctgtttccgtggctgacacgtggtacaggtcgagtacgttgaggaggaggccatcttcaccatcaacagatatgtctctcagagcaacgctccttggggcctggctcgtctctcgtccaagaccaagggcgccaccacctacacctacgatgacagcgccggtgccggcacatgctcttacatcatcgacaccggtatttacaccgcccactccgacttcgagggccgcgccatctgggccgccaactacgccgacagctccaacagcgatggcaacggccacggcacacacgtagcgggtactgtaggatctaagacatacggtgtggccaagaaaaccacactgtatgccgtcaaggtcctgaacgctcagggttcgggtagcagtatgtatccaacccttaccccgaacttattggaacaggtctgacacgtgaaagcttctggtgtcgtcgctggcatcaacttcgttgcctcagacttccctaagcggaactgcccgaacggcacggttgcgaacatgtcgctcggtggtagctattcggcctccatcaacaacgctgctaaggctctcgtcaacgctggtgtcttccttgccgtggccgccggcaacgacaacaagaacgccgccaactactcccctgcctcggaagccagtgcttgcaccgtcggtgccactgatagcagcgacaagaagtcgtctttctccaactacggtgccgctgttgacgtctgggctccgggcaccagcattctaagcacctggattggtggcaccactcgcactgtaagccgatatcacacaagttctcacgacccctgatgctgacaatgaacagaacactatctctggcacttcgatggcttctccccacattgccggtctcggtgcctacctcctcgccctccagggcaagaagacccccgctcagctctgctcctacattgccagcactgcccacaacggtgtcctgagcggcatccccagcggcaccgtcaacaagctggctttcaacggcaacccctctgcttaa

SEQ ID NO: 157 - DNA, 1066 bp, Scytalidium thermophilum
atggggccgacctgggcagtgattctggggctgattgctccttctgtgctcagtcacagttgcgtctcccaacaacctctcgacttttatcaagctggtactgactcataacccaactcacctagatatccatgggatcctcctggtcaatggcacagagacaccagagtggaaatacgtcctgtatgcttccccatatcccagccccattgtacgagttgctgacgtgatacagcgatgttgcgccggtgattcctatttcaaacccagactctcttccccctggataccaaggttataaggttgatcccatcatcggatccgggaaccccaacatcacttgtggccggctagcatttgactcggcacccaagacgcaaatcgcggatgtgctagccggctccgaggtaggattccgagtctcggctgacggcttgggaaatcgagatctggagaagggctacatcccgacgttctggcacccgggtccggcccaggcatacttgtcacgtgccccgaacgacgacctgtacagctacaaaggcgacggagactggttcaagattgcctacgctggcccggtggacgacctgacgtggtccctttggccgggagtttcagatgtatgttcatcctccatgatccttttttgcccgtctccaggaccaaattgctaacatcaagtcgcagttcaacttcaccattccatcgacgacaccccctggaaagtatttgctccgaatcgagaacttcatgccaacggcctcgacaggatatcttcagttctacgtcaattgtgcatttgtcaacatcattggaccaggaggtgggacaccgaccgagttcattcgaattcccggggattacaccgacgaggatccaggtgagtttgtgttatgagacatgttcaactcgcaccgacgaatgcttgtttcctgacagagatttgtaaaaactaggttttctcgttcccccggagcaaagctccttggatggcagagtcccaagggaccagttgaaactgatgagctacacgccaccaggtcctgcggtgtggacggggtga

SEQ ID NO: 158 - DNA, 595 bp, Scytalidium thermophilum
atggtcaggccagtgcttctctcttgtgtctttctcgggacagtctctgcccaggtctggccacctccgcctccctggtggtcccccgcgcaaccacaacctacaacaacctctacgaccaggacgaccacaacctcgacccgtctgccacctggagccacgcagtctctctggggtcaatgtatggcgatctttggacatcggatcaactagcactccaggtgaccggcatcaaagctgattattacatcaaccaggtggcggaatgaattgggatggcccgacccgatgcccaatcggcgcgtactgcaagaatgacggaaagtaggtttcctctagcaacctcgtcagggtagttggtggcagggcaagtgttgacacacacggcagcatctggtatgagcagtgcgtccccatcgagacggggactccagcgactacgcggacgtcaacgaccacgatcacctccggtcccgtcgtgattaccacatacatcacctacgtgacacccaccactacaccaccccctaggacatccattgtcactgtcacgctacgcccggacgagccatgcgatcatccgtttttgtgctga

SEQ ID NO: 159 - DNA, 1210 bp, Scytalidium thermophilum
atgcgtgtctcgtcgctccttgccgctctcgccaccggcagcctcgtggcggctgctcccagccccaagagcccgaagccgagcaccccgacgggcgacgtgaaccccttcgagggcaagaccttctttgtcaaccccaagtggtcggccaagctggatcagaccgccaaggctttcctcaagaagggtgatctcatcaactgggccaagaccctgcgcgtccagcagatcagcaccttcgtttgggtctcgaggcgttccgagctctccaacatcgacgacgccattgccgccgcgcgcaaggcccagaagctcaccggccgcaagcagattgtcggtctggttctgtacaacctccccgatcgtgactgcagtgccggtgagagcgccggcgagcttgacagcaccaaggatggcctccagctgtacaaggacaccttcgtcaagccctacgccgaaaagctggccgctgccaaggacctgactttcgccgtcgtcctcgagcccgactcgcttgccaacctcgtcaccaacctgggtgtccctctttgcgagcgcgctgccgacgtctaccgcgagggcattgcctacgctatctccagcctgcagtttgaccacgtccacctctacattgatgctgctcacggcggctggcttggctgggacccgaacctgccccttgccgccaaggagtttgctaccgtcctcaagctcgccggtgaaggcaagaagatccgtggctttgccaccaacgtgtccaactacaacccgttcaacgccctcgtgcgcgagaactataccgagtggagcaactcttgggacgagtcccactacgcctcgtccctggcgcctcacctcgaggctgagggtctgcctgctcacttcattgttgatcagggccgtgtccacctccctggtgcccgcgaggagtggtgagtaattccatgtgaactaacatgtcgtttcatcccgtgctaaccatgagtttcacaggggcgagtggtgcaacgttgagcccgctggctttggccctaagcccactaccaacaccaacaacacctacgtcgatgctctggtttggatcaagcctggtggtgagagcgatggccagtgcggcatggccggtgccccgagggccggcgagtggttcgacgagtatgcccagatgctcgtcaagaatgccgacaagtccatctttaagttctggtaa

SEQ ID NO: 160 - DNA, 1583 bp, Scytalidium thermophilum
atgcagatcaagagctacatccagtacctggccgcggctctgccgctcctgagcagcgtcgctgcccagcaggccggcaccatcaccgccgagaaccaccccaggatgacctggaagaggtgctcgggccccggaaactgccagaccgtgcagggtgaggtcgtcatcgacgccaactggcgctggctgcacaacaacggccagaactgctatgagggcaacaagtggaccggccagtgcagctcggccaccgactgcgcgcagaagtgcgccctcgacggtgccaactaccagtcgacctacggcgcctcgaccagcggcgactccctgacgctcaagttcgtcaccaagcacgagtacggcaccaacatcggctcgcgcttctacctcatggccagccagaacaagtaccagatgttcaccctgatgaacaacgagttcgccttcgatgtcgacctctccaccgtcgagtgcggtatcaacagcgctctgtacttcgtcgccatggaggaggatggtggcatggccagctacccgagcaaccgtgctggtgccaagtacggcacgggcgtacgttctctccgtcacatccctaccgaaagtatgacttgcgctgacgtttgacagtactgcgatgcccaatgcgctcgtgacctcaagttcattggcggcaaggccaacattgagggctggcgcccgtccaccaacgaccccaacgccggtgtcggtcccatgggtgcctgctgcgctgagatcgacgtttgggagtccaacgcctatgcttatgccttcaccccccacgcttgcggcagccagaaccgctaccacgtctgcgagaccaacaactgcggtggtacctactcggatgaccgcttcgccggctactgcgacgccaacggctgcgactacaacccgtaccgcatgggcaacaaggacttctacggcaagggcaagaccgtcgacaccagccgcaagttcacgtaagtcccctggcgcctcttcgacataggatatctggatgctgacccaaaacagcgttgtctcccgcttcgagcgtaacaagctctctcagttcttcgtccaggacggccgcaagatcgaggtgccccctccgacctggcctggcctcccgaacagcgccgacatcacccctgagctctgcgatgctcagttccgcgtcttcgatgaccgcaaccgcttcgccgagaccggtggcttcgatgctctgaacgaggccctcaccattcccatggtccttgtcatgtccatctgggatgacgtatgtggcatcgactatcccccaggcatgaatcctatgctgacgttgattgacagcaccactccaacatgctctggctcgactccagctacccgcccgagaaggccggcctgcccggtggcgaccgtggcccgtgcccgaccacctctggtgtccctgccgaggtcgaggctcagtaccccaatgcgtatgtttctgccaccattgtatctcgggaaaggtatacaggtgctaaccattgtgcagtcaggtcgtctggtccaacatccgcttcggccccatcggctcgaccgtcaacgtctaa

SEQ ID NO: 161 - DNA, 1458 bp, Scytalidium thermophilum
atgcaccagtgggcttccctcgccgccgctgcggcgttgctggtcaacggcgccgttgcccagttcaacatgctgcgtttcgcctgctcccagctggttgtcgatcgtgtcgatcccttggttaacccaggaatgcgctatactcctcaccttcaccagatcgtcggtggaaatagcttcaacctgaccatggagccagttacctatgatctggccaagcgctcgacgtgcacctcgtgcagtttcgttcaagacaagagcaactactggtgaattcccctttctttcactctccatctccttctccttcgtcttcttctgttgaaaaaaagaaaaagagaaaaacaaagggaaaaagtcatgtgcatcatactgatgacgacggcaggactgcggtgatgttcttcaagcacaagaacggctcgtatcaccggattccccaggtcggcaacggcgggccccagggcaggctcatcaacaagggcggccttgacgtctactatatccccagcggccggactaccgcgttcaagcccgtaagtttgtttgaacgactcgccctctgtcccagcttttgcatactaactcgggaatatccagggcttccgtatgcttgctggcaatgctgccgagacagacgacaacaaggtctccaggggcaacatctgccaccgttgctggacatcgaccaacgaggaccagttcattggtggtgctccctgcactggcagcgataccgttgccatcccccagaacccgagctgcaagatgatccgccagaccatcatcttccctcagtaattatccccccgcccccaattctaccactctgtgagatagcctgatgctaacggtgcttctctcaccttgcagctgctgggacggccggaaccttgacactccggaccacaagtctcacgttgcctacggccagggttccggtgcgaacggtggtggcgcgtgcccgtcgtcccaccctgtcaggctgccgcaggtcatgtacgagctcatgtggaacgtcaccgacttcaccgacaggagctggtggcccgactctggcccggccttcgtctacagcatgaaccttgggtacgttgtcttccttcgacccaggttggggactattcttgaaacgtcttccgttaacacaatgacattccagtggctcggctgctcacggtgactacgtcttcggctgggagggcgacgttctccagcgcgccatggatatgggctgcaacctcaaccgtgattgccctcaggccggtctcacgtcgcagcctcccgagaagtacaatgcctgcaccatcaagcagcaggctcctgagcccgtcgatggctgtgagtatacccaggggatatcatcccattcttgttggcaagactggcttactaacctaaccgcgtatcacagggctcaaggaaatgcccatgggccaaatggccatcagggcctaa

SEQ ID NO: 162 - DNA, 717 bp, Scytalidium thermophilum
atgggtctcctacaactcgtcacaggtgttctcgccctggggagcgtgggctttggtaaccccgtccctcagtggggtcctgcccccccttccaagttttgcgatgccgctacggagatctgttacgccgaatataagagtcccgagaatatcgcattcagattcgctattccggacactgctaccccgggcaacttttctgtcctgctgcagattagtgctcccaggtcggttggctgggcgggcattgcctggggtggcgtcatggtgaacaatcctcttaccgtgggatgggcgaacggtaatactgctgtcgtgtcgagtcggagggcgaggtgagtgaagcgttggcgccagatggacagtgactgtttaaatcaccgacgctaactgaagcttgttggaatcagtgctcggagctatcccaatccctggaccggcgccacctatcaggtgctccctggctcacacgccaacaacactcactggacgctcagtgttcttgcaaggggcgtcagttcttgggacaacactcgtcttgacccgtcgagcgtcgtcacactcgcctatgctcaggcccccactcccccgacggaacccgcgaacaatgcgagccgcttcagcatccacacctcgaggaataggttcacgctcgatctcaagagtgctcagatttccaactttactgagctccttgcgaaggctttggctggctag

SEQ ID NO: 163 - DNA, 1377 bp, Scytalidium thermophilum
atggtggcacttacaagtctcacactcacagccgcccttgcggcggttggtcttgcctcggtgttgcccaccaagattggcaccacaggtctcgataatggttacagcgagagctccggtagcgggcgggcgaccctcaagcaagtgcggcgtcccggctaccgcttcaatggcgcccgggccatctacaagacgtatctcaagtacggcgtccctgcgccagactacctgctccaggcggtggccaacacggatgctctggctgctgccgcggcagcgaagcgggactcgggcagtgcagcagcaattcccatcaacccccgatacgacatcgcctatgtgactccagtcaccatcggtacaccgccgcaaacactgtacctcgaccttgacacggggtcctcggacctgtgggtattctccagccacactctggcctcgcaggtccgaggccaaaggatctactcacccgagaagtccagcacatccaagctgctccatgggcacacgtggagtatccgatacggtgacgggtcggggtctttgggaaacgtctacacagacaacttcaccgtgggtggcgtgacagtgcccaaccaggctgtccagtgcgctgagcaggtgtcaaccagcttcacgcgggagtctgagatccatggcctggtcgggctcggcttcagctccttgaacactgtcagtcccaatggccagttgaccttctttgacaatgtcaagccgaacctggacagccctgtgttcacggctgatctgaagtggaagaaaggtgagtcagaactgttgacggtgccagcctcctccttcgtgtccacaagagtgacggggtgctgacatgaacattccgggacagagggcacctatgactttggattcatcgacaaggctaagtacacgggcgagatcacgtaccttccggttgagagcaacccggggtactggaccttcacgtcgtcgggctacgcagttggggacgacaatttcatcccggcctcgatcgtaggtatcgccgacacgggcacctcgctgacgtacttgccggggtcggttgtcgcggcctactaccggcaggtcgagggtgccgtcgacagctggtactacggcgggtatgtgttcccgtgcagctccaagcttccatccttcacgttcggcgtcgggggggccaacatcaccatcccttcgtcgtacattaactatgcggcaatcacggagggttcgccggtatgctttggtgggcttcagagcagtgactggctgggggtcaacatctggggcgatgtggcgctcaaagcagcgttcgttgtcttcgatggctccaatccgcctaaaattggatgggcccgcaagcccctggagcagtaa

SEQ ID NO: 164 - DNA, 753 bp, Scytalidium thermophilum
atgctgggaagcgctcttctgctcctgggcactgccctgggcgccaccgcccactacacgttccctaggatcaacagcggcggcgactggcagtatgtccgccgggccgacaactggcaggacaacggcttcgttggcaacgtcaactcgcctcagatccggtgcttccagagcaggcaccaggccgccccggccaccctcaacgtcaccgccggctccacggtgacctactacgccaaccccaacgtctatcaccccggcccgatggccttctacatggcccgcgtccccgatggccaggatatcaactcgtggaccggcgagggtgccgtgtggttcaagatctaccacgagcaacctaccggcctgggccagcagctgaggtggtctagcgatggtacgtgaatggtggtcctgtggcatctcaacctcttccagacttctgacccgagcccccgcggccctacaggcaagaactcgttccaggttcagatcccccgctgcatccgctctggctactacctgctccgtgcggagcacatcggcttgcacagcgccggcagccctggtggcgctcagttctacatctcttgcgcccagctcgccgtcaacggcggtggcagcaccgagccccccaacaaggtgtccttccctggtgcctacagcccgtccgaccccggcattcagatcaacatctactggcctgttccgacctcgtacaggaaccccggccccccggtcttccagtgctaa

SEQ ID NO: 165 - DNA, 854 bp, Scytalidium thermophilum
atgaagctgcttcctgggttgcttctagcagccacggctgcccaagcccattgtacgcttccgatccccaagaccatcttcgagaattttcgagccagatctttctgagagagttactgacaattcccgctagacacattccccaggctcgttgtcaacgggcagcctgaggagagggactggtcggtcactcggatgacaaagaaccaccagagcaagtcgggaattgaaaacccaactagccccgacatccgttgctacagctcgcagactgcccctaacgtggcgattgtgccggccgggtctaccatccactacatctcgacccaacaaatcaaccatcctggcccaactcagtactatctcgccaaggtcccagctggtcagtcagccaagacctgggatggctctggcaacgtgtggttcaagatcgccacgagcatgccggagtacgatcaaaacaggcagctggtttggcccggtcatagtaaggactcactctcgtccgatcatctcttttgagtgagtcttgggcatgcccactgactacgtctgctatgacagatacctatcagaccatcaacgccaccatcccggccaacacgccgagcggagagtacctcctgcgtgtcgagcaaattgccctccacatggccagccagccgaacaaggcccagttctacatctcgtgctctcagattcagattaccaacggcggaaacggcactccgggccctctagttgcattcccgggggcatacaggagcaacgaccctggcatcctggtcaatctctacagcggcatgcagccttcgcagtaccaaccccctggaccggccgtgtggcgtggctga

SEQ ID NO: 166 - DNA, 1293 bp, Scytalidium thermophilum
atgaccaaaatactactgaccggcaagtaactcagaggcgtaccccctgtaggagacacttatagctaacaaaaccacaggaggttccggcttcattgccggtaagcattccgtacatttcatttaataaaggcaaagagctgcatgctgctcttacttcccacccacaatcaaatgtattgcctccattctccatccgagcctgctaacaaccctgttagcccatatcctcgaccaactcctcgctcagggccacacagtggtgacaacggtgcgcagtgaggccaaagcggccaagatccgcgcggcgtacccgtcgcaggcagaatcgggcgctttgacagtcgcgatcgtgccagacattgctcgcgaggacgcctttgaggaggtcgtcaagaacacccccggtttggaggtggtcctgcacacggcttcgccgttccacttcaaattcagtgcgtcgctccagtccctgtctcaatgttttcccctcccctcgtcgggaaaaagatgctaatctttctcacagcggacccaaagaccgagctggtcgatcccgctatcgtcgggacaacatccatcctcaaatccgtcgcgcagtatgccccaactgtgcgccgcgtcgtcgtcacatcctcctttgctgccatcctggatgaggcgcgcgcaggtgatccggccaccgtcttctccgaggcttcctggaatccggtgacaatcgatgatatccaccgcaaccctccaacggcctatcgtgcgagcaagaagcttgctgagaaggcggcgtgggaattcgtcaaggacaacaacaagtttgagctggtcacgatcaacccgcccatggtgttcggtcctctggcgccgggccaggccgtggagagcctggacggaatcaacacgagcaatcagcgcattgtcgatttgctgcaggggaagtggaagaacgccgtccctgaggttggggtggcgtggatttgggtcgacgtccgggacgtggcggcggctcacgtgaaggctggactcgacgtgaaggaagcggcagggaagaggttgttcgtgacggcaggcgagtacagcaacgccgaattggggaagattgtgcgcaagaacttccccgagtatgccgagcaggtgccggaagatagcgccctcgcggttggggagaagccgccagcggataagaggtaccggttcgacaactcagagacgaacaagttgctggggatttcgtatcgtacgtttgaggaatctatcgtggacacggtcaagagcctgaagaagctcggtgcttag

SEQ ID NO: 167 - DNA, 2176 bp, Scytalidium thermophilum
atgttcggactcgtggtccagcagctccaggctcaactgctctccctctcagcggtcaccgcctccgacctcgtcctgtccgccatgcacaccttctccaagctcctcgtcctgggctctgccgtccagtctgccttcgggcggcctcacggctcctcccgcctccaggaacgcgccgccgttgataccttcatcaacaccgagaagtccatcgcatggaacaagctgctcgccaacatcggccctaacggcaaagccgctcccggtgccgccgccggcgttgtgattgccagcccttccaggacggaccctccttgtacgtggcattgaatgacccgagagacaggttttagatgaaagagtttccgctaaccgccacacccagacttcttcacctggacccgtgatgccgccctggtcctcaccggcatcatcgagtcccttggccacaactacaacaccaccctgcagaccgtcatccagaactacgtcgcgtcgcaggccaagctgcagcaggtctcgaacccctcaggaaccttcgccgacggctcgggtctcggtgaggccaagttcaatgtcgacctcactgccttcaccggcgaatggggtcgccctcagagggacggcccgcccctgcgcgccatcgctctcatccagtacgccaagtggctgatcgccaacggctacaagagcacggccaagagcgtcgtctggcccgtcgtcaagaacgatctcgcctacacggcccagtactggaacgagaccggcttcgatctctgggaggaggtccccggcagctcgttctttaccatcgccagctctcacaggggtgagtcatttattgttcagtgtttctcattgaataataaccggaacgccactgacgccaaacagctctgactgagggtgcttacctcgccgctcagctcgacaccgagtgccgcgcctgcatgaccgtcgcccctcaggttctgtgcttccagcaggccttctggaactccaagggcaactatgtcgtctccaacagtaagatccctacaccaacaaaaatcgaaaggaacgttagctgacccttctagtcaacggcggcgagtatcgctccggcaaggacgccaactcgatcctggcgtccatccacaacttcgaccctgaggccggctgcgacaacctgaccttccagccctgcagcgagcgcgccctggccaaccacaaggcctatgtcgactcgttccgcaacctctacgccattaacaagggcatcgcccagggcaaggccgttgctgtcggccgctactcggaggacgtctactacaacggcaacccgtggtacctggccaactttgccgccgccgagcagctctacgacgccatctacgtgtggaacaagcagggctccatcaccgtgacctcggtctccctgcccttcttccgcgaccttgtctcgtcggtcagcaccggcacctactccaagagcagctcgaccttcaccaacatcgtcaacgccgtcaaggcctacgccgacggcttcatcgaggtggcggccaagtacaccccgtccaacggcgcgctcgccgagcagtacgaccgcaacacgggcaagcccgactcggccgccgacctgacgtggtcgtactcggccttcctctcggccatcgaccgccgcgcgggtctcgtcccccagagctggcgggccagcgtggccaagagccagctgccgtccacctgctctcgcatcgaggtcgccggcacctacgtcgccgccacgagcacctcgttcccgtccaagcagacccccaacccctccgcggcgccctccccgtccccctacccgaccgcctgcgcggatactagcgaggtgtacgtcaccttcaacgagcgcgtgtcgaccgcgtggggcgagaccatcaaggtggttggcaacgtgccggcgctgggtaactgggacacgtccaaggcggtgaccctgtcggccagcgggtacaagtcgaatgatcccctctggagcatcacggtgcccatcaaggcgacgggctcggccgtgcagtacaagtatatcaaggtcggcaccaacgggaagatcacttgggagtcggaccccaataggagcattaccctgcagacggcgtcgtccaagggcaagtgcgccgcgcagacgctgaatgattcgtggcgttaa

SEQ ID NO: 168 - DNA, 1910 bp, Scytalidium thermophilum
atgatctcctccccgctgagcctgggcgccgccctcgtggccgccgcatccctcgtcgaggcctccttcgacaggaacattgcctaccgtagcccctcgcgccgccacccgagcctggctgttcccctctcacacgtgtccaagcgccagaccggagacgttttctccccggatgaggtcaacttcacccacggcgtggcctcgggtgatccctatgccgattccgtcatcctttggacccgtctggccccgactgcggatagcgtggcctcggatcttgtcccggatggcgtcgtgcccatctatgatgacccggagggcgcgaagccgtctgccaaggcggcttgtgtcgagttcaagatcgccacggattccaacttgaagaatgtggctgatcaagggcgggcgtacaccacgagcgatgtggattacacggtcaaggtaggaattttcccccttgatgcttgacatagacatatatctgacaaagtggaatagttcgaggctggcaacctgcaacccttcaccacgtacttctatcagttcaatgtgtgcggttccaacaagacgagcccgatcggccggaccaagacgattcctgcagagacgcaaaaggtcaacagcgacatcaagttcgccgtctactcatgcgccaactaccgtacgttaccatagccccagtggtcatctcccctgcctgagtaggtactaacatctaccctccagccgagggatacttcaacgcctacggcaacgtcgcgcgcaaagactcagtcgactatgtgatccacctcggcgattacatttacgaatacaagggcgactcgtcgctgcgcaacccgaagccggaccgcgagacgtacacgctctacgactaccgcgcccgcctcggcagctaccggaccgacccggaccttctctcgtcgcactcgagcttcgcctggatcccggtctgggacgaccacgaggtggccgacaacgcgtggaagaacggtacgggcaactcgtcgggcgacgtcttccgcaagcgcaagcaggccgcggtgcgcgcctactttgagtggatgcccatccgccaggtcgacatggacgacagcctgcgcatctggcggcgcttctccttcggcacgctcctggacctgatgatgctcgacacccgccagtacgaccgcgacctgactgtgctcaacggcttcgcgggcatcggcggcaacagcaaggaagtggagaagctggtggaccaccagaaccgcacgatcatgggcttcaagcaggaggcgtggttctacgacgagctgacgcgctcgtcgaaccgcggcgccgcctggcgcgtcgtcggcaaccaggtcatcttcagccgcatggcgctcgacatcctcggcaaccggcccttcaaccgcgaccagtgggacggctatatcgccaaccgcgaccgcgtctaccagcacctggagagcggcagcatcaacaacaccgtcttcctgtcgggcgactcgcacgctgcgtgggtgtcggacctggcctggctcgggaagcgcgactatgacccggtgacgggcaagggcgcgttcggcgtcgagctggcgggcagcgccgtgtccagccacacgcccgtcggcagctggatgcccaacctcatcaccaaggccttgtcggcctggttggtcaaggataatccggagctgcagtggcaggatctctattacagggggtattttgagatgagcgtcgggtatgaggcggtgaaggcgaggttttacggcatccccaagcccaaggtgcgcagcagtgatgagattatgattgctgagttcttggtgaacagtggggaaaataggttggctaggaatccgaccgtgggaggagggaaggcgaaggctggcgcgctgaagaatggaaaggtggaatag

SEQ ID NO: 169 - DNA, 1088 bp, Scytalidium thermophilum
atgcgccccctcctcgccgccctcgccgcggccaccacggtccacgcccacggctgggtcgacaatgccaccatcgacggcatcttctaccagctctaccacccgtacatggacccgtacatgggcgagctcgccccgcctcgcatctcgcgcaagctggtgtggaacggctacgtgaacgacgtgacgtccatcgacctgcaatgcggcggacacacggccgaagggcagatcggtacggaacccgcgccactgcacgcccccgccacggccgggtcgacggtcaacctccgctggacgctgtggccggactcgcacatggggcccatcatgacgtacatggcgcggtgtccggacgagggttgtgataagtggttgcccggggaggagtaagtgtttcctggcggaatggctgtgtatttgagaaggagatatttgggtggaactgggagaggcgagaagaagagatgctgacgcgggttttgctctccttagaccagtctggttcaaaatccacgaagccggccggtacaccaccgacaagtcttaccccgacgacatctgggaagttgtaagtgccctgcctacctatccatccccaatttccccccccccccccccccgttttaccttgctaaccaaccccctcccttacagacccgcctcatgtacctcgccaacgaaggctacaactacaccatccccgcctgcctcgcatccggccactacctggtccggcacgagatcatcgccttacactcggcctgggccaaaggcgaagcgcagttctatccctcgtgccaccagctgaccgtcacctccatcggcggtaacgtgcgcgaggcgccggccgagtaccgcgtcagtttccccggcgcgtacaaggacgatgatccgggtattctcatcaacgtttggaaccgtaagttcttttttgttccccttcctcccaacctacctaggtgtcgtaatgtgatccgtaagggtttgttgttgagggatatagctgacaatggatgtgtgataacacagctggcccctacaccattcccggaccgccggtctggacgtgccccgagtctgagtga

SEQ ID NO: 170 - DNA, 2281 bp, Scytalidium thermophilum
atgagttagttgaacaacaagcccaagtaaacaataatacactttgtttccctaacacttgatagagcctccattaattctctcgtgttacctctccctcatccccgtcgtctcatcccatcccatcaaccatcaggatgtcttgtccgataccccctattcgaccggcaaacgaggagccgtggccagcgagagctccatatgctctaagataggcatcaacaccctcgccatcggcgtgagtttccatctaatccatcccccatttttcccccacgcccactgaccctcggaatcgcagggttccgccgccgacgcgatggtcgccaccaccctttgcgtcggcgtcgtgggcatgtaccactcgggcatcggcggcggcggcttcatgcttgtccgcgacaagcacgggaggtacgaggccatcgactaccgcgagacggccccggccgccgccagtcgtgacatgtacgagcacgacaggaatgccagtgtctatggcggtctggccgtggctgttccgggggagctcagggggttggagtatttgcatcagaagtacggcgtgagttacgactgcccatgggccccctttggtgtgcgtttgcagcggcgatttctgaccgtggatggctggatagactcttccatggaagacactggtcatgcctgctgttcgggttgcaagagagggatttcggggtaagaaccttgtttgaggtacatccttggaagtattgttggtgacaactgctgacagaggatcagtgacggaggacctcgtacggtacatggcggccgcgagtgccaacaacaacacatttcttgtggatgatccaatatgggctgaggattttgctccaaacggtatgttcccaatccacgctacctcgttgttttattcgtctttttattcttccttttagtcttttttttcttttttttttttttatttttctctccccttctgtcgtgattcttttatgaacgacgcgctcactctaacggctagggactctccttcaactcggtgacaccattacaaggaaacgctatgccgagtatgtaagcaactgaagttgagacttgaccttgtactgacaatcacgagcacactcgagaagattgcaaatcttggggcgggtgagttctacaagggagagattggtgagttcgctccgtgctcatccattttgatgacgctaacatactcctagcccggtccatggttgactacgtccaaaagatgaatggaactatgaccatcgacgacctggccgaatatgaggctgatatcaaaccggccctgaacatcacgtacggcaactacaggcttttcactacaccggcgcccagcagcggtgctgttatgttgaacatcttcaagatcatggagcagttctctccaaaggacctcgatgacaccaacttgacgacccaccgctttgtcgaagccatgaagtttgcttatgggggacggcttcaactcggcgatccgggtttcgtcaagaatgccagtgacttcgaacaacagctgctcctggacgaaacggcgcgctacatccgtgaccgaatccttgatggccaaacccaaccagttgaggcctacgatccgctcaggctttaccttccagacagccacggcacctctcacgtcgtcactgccgatgcatcaggcctgactgtcacctctactaccaccatcaacctactcttcggcgcccaaataatgactcccgacacgggcatcattctgtgagtaaaaccccaagctctactgaccttccctgactaacccctacccctctcaaggaacaacgaaatggacgacttcagccaacccaaccggcgcaacgccttcggcttcgctccctctcccgccaactacatcgcccctcgaaagcgccccctttcgtccatcacccccttaatcgccgaagatgctgccgacggccgcctcgtcctcgccaccggtgccgccggcggctcccgcatcatcagcgccaccactcaagcctccttccgtgttttataccaaggcgaaacgcttcacgacgccatcacccatccacgcgtgcaccaccagctacttcccaacgtgctgctcgttgaggacggcacggaccctgtccttgtggatgacctgcgtgccaagggacaccaagtgcagtggatgaagcccgggttgagtgccgtgcaagcggtgaggaggggggaagatgggaggttcgaggcggtcggggagacgaggcagaggaatagcgggggatataccctttga

SEQ ID NO: 171 - DNA, 1284 bp, Scytalidium thermophilum
atgcgtttcacctcggttgcggccctcggggcatgcttcgttggaaccgttgctgggacggattcgtcatcctccagcagctccagcgttacaggcccggattccaatgggaaatattggatctacggggagggaatcaaggccgccttcattccgtatggcgcgtccatctcggatctgatcatcaaggacaagaacggcattgatcgggatattgtcatggggttcgacaaggcgagctcgtacgagacggacaagtcgcacccacacctgggcagtgttcccggccgctatgccaaccgcatcaagaacagcacgttcgaaatcgatggcgttacttataaggtagctgccaacgaaaatcccacggctgagaatcccgatggcgtcaacacccttcacggcggcccggacggctgggactggcgcaacttcaccgtcgtctcgcacaccgagaacagcatcaccttctccattgtcgaccccgacggcaaggagggattccctggagaggtgatttccttcgtcacgtattcgctgggcaatctcacctgggatgccaccatcgtggctgtggcgacgactaagaagacgcccatcatgttgaccagccacacgtattggaacctggacggctttgccaacgatgagaccgataccgccctcaaccacacgttctatatgcccttcagcggccagcgcgtcggggtcgataacatccttatccccacgggcgagatcttggccaacgagaagggctcggtgaatgacttctggagcgccccgaagcagattggcgcaagcttcaatgatccggagctggtcggaaattgcggctacaattgcactggttatggtacgtttggcccgcctcatttaaaatgactgcttgcgcacccagtaactcaactctcctcacaattagacaactgctacatcgtcaaccgcccgaccaccgtcaactggcgtaaccccgaccaggccgtcgccagcatctggtcgtcgtggtccggcattcgtctcgacatttactcggaccaagaggccttccagatgtactcgtgcaatttccaggacggcacattcccgctcaagtcgagccagggccgggagggtggcccgcggactgtgcctaagtacggctgcgtcgtgctcgaggtccaggattggattgatggtatcaaccatccggaatggggcaggctccataagcaggtgtttggccccggagatgatcctcacattgtgcaggtgaggcacaagttcagcattattgatgagtaa

SEQ ID NO: 172 - DNA, 1742 bp, Scytalidium thermophilum
atgctgggagcgccggccagtctgctcctgcagctgacgctctgggctgcttccgtcaacgccttcttcccttttattcccgaaggtcactgcgcgccagatgaggactgtgcgggccccggccacggcaccaagcggagcaatgtcttggatctgccggccgagggcggccgcggcggcgtcatcacggtcccggtttatcatcaccatgcaactatcgtatgtggtttcttttgtggtctacctgtccatcttgagctagctcgggttgtcttgttccggaaattccggatgaattggcccgtgccgtgtgtataggtaatggggtataagtgcccgttggcttttgctgacagatcatgtctgtttcacagacccgcgatcccaccaaaaccgacccggtaaccttggccggctctcgaattgcccggaaatacgcccgtcctgaaacctcccgggggctagagaagcgtgagaacgcgtatcccgtctcggaacccctcgaacccaccgaacccaacagcgccggcatctaccagtatggcccggactactcgtatttcatccaggtgcaggttggcaccccggcccaggaaatgttcatgctcctcgacacgggcgccgccaatacgtggatgatggggtccaagtgcgaatcggacgcttgcaagctgcacgatacctttgatgcgtcggcctccaaaacgtggaagaacacgaccgactactttggcattcagtatggctccggcaacgtgatgggtaccgtgggcaccgacacggccaagttcgccgggcttacgatccccgagctctccttcggcctggccaacatggtgaacgacagcttcaagcacttcgccttcgacggtatcctgggtctgggaatgggcgactcggtcacgggcgggaacttcctcagccacctcaagaaccacaagattgttgattcgctggttcttggcatctctctcaaccgcggctccgacggcgtcaacgacggccaggtcacctttggcggcgtcgacccggccaagttcacgggcgacatcacgtacagccccatccctcaggcgcagcaagccaagggcgaatgggccatcattctagagtcggcagcctacgacggcaaaactgccggctcgtccaacgtgctcgcctacatcgacacgggcacgtccttcatcttcgcccctcccgccgacctcgacgagctgttcaagctcgtccccggttccagctcgtacgacaacagcaagtaccgcgagtacgaagtcccctgcgacactaagacgcccatcacgctctcgtttggcggcgcgcaattcgacatttccccggccgactggatcctgcccaagggcgacaagtgcgtggcgaacctgtacgggtgggaagtccgcaagggcaccgggtcgtggctgctgggagatacgtttttgaagaacgtgtacagcgtgttcgacgcggataagcaccgcatcgggttcgcgcacaagccggccccgcccgagcgcaacgggaccaccacttcggccgactcggcgcataccacgactatgccgggagatgaatcgctgcatccggtcatgccgggctcgtcgacgacgggtgatgagggcacggggtccgcggccgcgcaggctaccggtccgacggggcatcaggtgaatgggggtgtgaggatgacggctggggtggttggcgcgggtctggttgcggcgttggtggctttggtttga

SEQ ID NO: 173 - DNA, 2191 bp, Scytalidium thermophilum
atgaagttcgtcagctcgctcctcgtcgcggcggtggccttcaccgccgaggtcgccgcccaggccaagaaccctgagggccctccgaacctccccaagaactacaagagcattgatctcaagatcgatctcaagaacggagtccggaacaagacctcgccgctgcttcatggcttgttcttcgaggacatcaaccactctggtgatggcggcatctatgccgagctgatccggaaccgtgccttccagggtgagtcccagtgttgaggaaaagatggctagcagcgttgctaacaattgcaggttctgatgatgtgaccggcggaaccagggacctcgttggctacaggcccattggaaagggtgtcaagctcgagctggacattactgagccgctctctgatgccctgaggtactcgctgaaggttaccatcccggccaatgctactggcgaagtcggtttcctcaacgagggctggtggggtatcaatgttcaaccgtaaggacctatctcccctgactcctgggagtcaattgacgagggatgaccgtctaacaagtcctcagatacacctacaacgcctcggtctacttcaagccgcacatgcccaccttcaagcgggactccagcatcaccggcctgaccttctccctccgctccaacctcaccgacgacatctgggtctccaagttcgtccccttcccggagaacatcagcgcctaccgttacacccacctcacgacgactctcaccccgcccaaagccgctccgaacagcaacaacaccttcgccgtgacctggaacggcactgaggccgccggccagaccttcttcttcaacctgatctctctgttcccgccgacctacaagaaccgcccgaacggtctccgcaaggacctcgcggaggctcttgagggcatcaagcccaagttcctccgtttcccgggcggtaacaaccttgagggtctcagccctgccacccgctgggactggaagaagaccatcggccccctcaccgagcgtccgggccgtcccggcaactggggctactacaacaccgatggcttgggctacctcgagtacctgctctggtgcgaggacatgggcattgagccgctcctgaccgtgtacgccggctactccctcgacgcctccggtgtccaccccgcgcacaccgtcccgcctgaggagctcgactacttcatccaggatgccatcgaccagctcgagtacgccatgggcgacgtcaccaccaagtggggtgctctccgcgcccagcacggccaccccgagccgttcagcatcaagtacgtcgagatcggcaacgaggactggttctccgacagctacgcctggcgcttcccgcgcttcctcgaggcgctcaagaaggcctaccccgacatcacctacatctcgtcccaggccgtcgaggagaacccgaccaagcaaaacatcaccatcccgccgggcaacatgtgggatctgcaccactaccagaccccgcagttctacaaggacaacttcaactacttcgacaactggcaggagatcaatggctaccccaacgtcaccatcttcgtcggcgagtactcagtcctctctcgcgaccgccccggcggcgtcgactgggtcaacggcgagggccgcttcgcctacccgcccgtgctcgccgccatcggcgaggccatcttcgccctcgccatggagcgtaacccgcacgtggtcaagctgtcgtcgtacgcgccgctcttccagaactggaacgcgtaccagtggacgcccaacttcatcgccttctcggccaaccctaaggacctggtcctgtccacgtcgtactaccagcagaagctcttctcggagtactacggcgccgagacgctgaccgtcgtcaacaagaacggcgacttcaacccgctctggtggggcgccaccatcagcgaggaccaatcgcgtattttcctcaagatcgtcaacagcgagaaggacaagaagacggtcaagctcgagctcgacaagcccatcaagtcggccaacgccacggtgctccgccacgacgatccgtatgcgttcaacttcatcggcaactcgaccatcgtgcccaagccgcagaaggtggacaagcccaagggcaagaaggtcgagtttgtcgtccaggggtggagcgtgaatgttttggagttgagggtgtaa

SEQ ID NO: 174 - DNA, 1070 bp, Scytalidium thermophilum
atgcgtttctcgaccatcttctcggtcgccgccacggcgtcgacggccctcggcgcgtcgctgcagcaggtcttcaactggggcgccaaccctaccaacatccagttccacatctatgtgccggaccgccgcgctactaacccggccatcattgtggcggtaagcattgccctgctcgccatgccatggcccgttatcagcatcagaggtcatccaagcaagattctaacgagatattctcttagctccacccttgcggcggcaacgcccagcagtggttcagcgggacccgtctcccccagtatgctgaccagcacggcttcatcctgatctaccccagcaccccgaaccagagcaactgctgggatgtgcacaacaccgccagccttacgcacaacggcggcggcgacgccctcggcatcgtcagcatggtcaactacaccattgaccgctacagcgccgaccgttcgcgcgtctacgtcatgggcttctcgtccggtggcatgatgaccaacgtcctggccggttcttacccggaggtcttcgaggccggcgctgcctactcgggcaccgcccatgcctgcttcttcggtgagtgattccgggcttagcacccaggagccattcttcggcgggatattgggtctcttggtatatcaaatcatgcggcgcgactaaccgccctgccactctatctaggtgcccccggtgccacccccttcagcccgaaccagacctgcgctcagggcctcagccacaccccggagcagtggggcaacttcgtccgcaactcgtaccccggctacaacggccgccgcccgcgcatgcagatcgtgcacggcctccaggacttcctcgtccgccctcagtgcggctatgaggcgctcaagcagtggtccaacgttctcggcattcccttcacccgccaggttcagaactcgccctcgtggggctggaccaccgagctgtacggcgacggcacccagctgcagggtctcttcagccagagtctcggccatgctccggccgttgatgagcagcagctcctgaggttcttcaggcttatctaa

SEQ ID NO: 175 - DNA, 2615 bp, Scytalidium thermophilum
  misc_feature (868)..(1810): n is a, c, g, or t
atggcctcggctccatggttccctccgcatagcatggcagcccatgcggggatgcgtcacattgaccacggcagtatggatgcgtataagagagacagaggccgcatctgggtgttctggctaccaccgtgctgcttgctggtcccaggatagacgacctccgccacctccaatccagccacgacactggtgatcgcccggcttttgacaccatgaaggtcccaactctcatctcgagcctcctggctctggtctccttctccgaggccacgccgctcatcaagcgagcgacgctcacgcgggtcaacaacttcggtaacaaccctagcggtgcgcgcatgtacatctatgtgcccgacaggcttcagccacgtcctgccgttctcacggccgttcactactgcacgggcaccgccaacgccttctacaccggtactccgtatgctcgtcttgccgaccagtatggcttcattgtcgtctacccggagtctcccaatgacggcggttgctgggatgtctcgtcccgcgctgcctacacccgcgatagcggttccaacagccacgccatttctctcatgacgaagtgggctctgcagcaatataatggtgacccggagaaggtctttgttgccggcaccagctcgggcgctatgatgacggtgagtgacatagagatgaggctcaagttgtggtcggctctcttgtctcggttactgacacctctctcaccagaatgttctctctgctgtgtaccctgatttgtacaaggctgccgctgcctacgctggtgtccctgcgggctgcttctacacgggcactgttgctggctggaactcgacttgcgccaacggccagtccatcaccacgnnnnnnnnnnnnnnnnnnnnnnnnnnnnnnnnnnnnnnnnnnnnnnnnnnnnnnnnnnnnnnnnnnnnnnnnnnnnnnnnnnnnnnnnnnnnnnnnnnnnnnnnnnnnnnnnnnnnnnnnnnnnnnnnnnnnnnnnnnnnnnnnnnnnnnnnnnnnnnnnnnnnnnnnnnnnnnnnnnnnnnnnnnnnnnnnnnnnnnnnnnnnnnnnnnnnnnnnnnnnnnnnnnnnnnnnnnnnnnnnnnnnnnnnnnnnnnnnnnnnnnnnnnnnnnnnnnnnnnnnnnnnnnnnnnnnnnnnnnnnnnnnnnnnnnnnnnnnnnnnnnnnnnnnnnnnnnnnnnnnnnnnnnnnnnnnnnnnnnnnnnnnnnnnnnnnnnnnnnnnnnnnnnnnnnnnnnnnnnnnnnnnnnnnnnnnnnnnnnnnnnnnnnnnnnnnnnnnnnnnnnnnnnnnnnnnnnnnnnnnnnnnnnnnnnnnnnnnnnnnnnnnnnnnnnnnnnnnnnnnnnnnnnnnnnnnnnnnnnnnnnnnnnnnnnnnnnnnnnnnnnnnnnnnnnnnnnnnnnnnnnnnnnnnnnnnnnnnnnnnnnnnnnnnnnnnnnnnnnnnnnnnnnnnnnnnnnnnnnnnnnnnnnnnnnnnnnnnnnnnnnnnnnnnnnnnnnnnnnnnnnnnnnnnnnnnnnnnnnnnnnnnnnnnnnnnnnnnnnnnnnnnnnnnnnnnnnnnnnnnnnnnnnnnnnnnnnnnnnnnnnnnnnnnnnnnnnnnnnnnnnnnnnnnnnnnnnnnnnnnnnnnnnnnnnnnnnnnnnnnnnnnnnnnnnnnnnnnnnnnnnnnnnnnnnnnnnnnnnnnnnnnnnnnnnnnnnnnnnnnnnnnnnnnnnnnnnnnnnnnnnnnnnnnnnnnnnnnnnnnnnnnnnnnnnnnnnnnnnnnnnnnnnnnnnnnnnnnnnnnnnnggaccccacgggaggatctcgtatccgacgacgattgcgttgtggagtgtcgggtcagaggggaggtcgagaacctctttcagccaggaggggttggtgagggagccgtagaagaagtaccatgttggtctgaactcgatattttgtgcttggtgtttcggttgtgttgttgagctgacgcaggctgctgtcggagggggtggtgcacctgggacatatataggatgaggatgaggaggaggaggtggtggtggtggtggtggcggtgtcggacctccccctccatctgtagactgggcagaaaggggagcctccatgagaatcattgcgaaagagcttcccagggtgctcatgatggctcacggcaagcagattcaaattagaccgcaaccatcttgttccgtcacctcccaccctgttcatgcaggaagctcaggtatcctaggtatgtgcatccagcgctcactgatggacttacttgttattagttttttggagagtttattgacgccgttgagttgtccaagagacggcagggcagggcgatagggctctgtcacagccagcgcttaatgagacgcctgccaaattgtgtggccaatagggtgatagtgtgggcgcttaaatggtgttgtcgtgccgggttgttgagctgtgccgcccgcaaaccatgctccccttgcggaccagactccaagcaaagccggatgtgtccctcgacgctcagctgccccgcgagaagcgcgggaatccgatgccctcgagccagcgtgaagctgcgtggaaccttgtagcgatgcagtag

SEQ ID NO: 176 - DNA, 1497 bp, Scytalidium thermophilum
atggggaccactcgattcactctcgccctcggggcccttgttttcgtgtctctcttcgggtctctcctcgatgctgccagcatcccctccagcgtcaaaggtcttgattaccgttccctgataatctacctcaagcggaaccccgactactctcctaacggtccggcggaatatgcccgtgccctcagaaaatggggggccaaggttcctgagcagctgatcaagagtctcgccgccatggctggggctcatgggcaccccagcaaaggcgaggaaggggaactcggagacgtccccgccgtttcgatccgcaatgaccgggaatatctgagccccgtcggctttggcacgcctgtacaatggttgaatcttgatctggataccggatcggcggatgtgtatgatatccgcccctcggggaacctcttgtggagtggaggaagactgaccatatctcgtagctggatctataccaccgacacacacccgtatgttgcccaaagccgggaccacgttttccgcatcaatgagtcgtcaactgccgagaaggttcataacacgacctggtggatcacgtatggtaagtcacatcactctgaacagccccctgaagccagcttaccctccgctgacactcaggcccttaggcgacggaagcagtgcatacggcggcgtttatcgtgacgttgtcaccttagcgaatattacggtgcacaatgccacggtcgagtctgctatcagcgtctcgaattcgctgattcaagatccatacatggacggcatcttcggccttgcctacaggctcccggtgcagaccagccccaagcagcctacagtgttgtcctcgctgcttcccctcttgaacgagccactcttcactgtcgacctgcgttggcgctcgccggatggggtgtacacgttcggctacatcgaccatgaacggcactccggccacatcaagtacacatcactcctcccgggtgcgcaattctgggaactggagtacacaggcatccatgtcgagggccaggacaggtggtacaagtcgacccaaatcccgtggcgtgccattgtggacacgggcactacgctcatcctgatgccccaggatgtgtctgacttgtacttctcggacgtaccgaatgccatgtttaatgagtccattggtggggtttggacctacccgtgcaatgtgagtctctatctgtacccagtccatgccattgaggtccaacacttgttgacacttgctgcgaatatcagaacccggtcttgcctgatttcgagatcagcttcgacagtgggttcatcgccaggattcctggaaaatacatgaactataccaacatgcctgataatcccaaggtctgcatgggcgggctgcagggatgggatgacagcgggagggccatctttggggatgtgttcttgaaggccgtctacacggtgttcgatgtcggccaggggcgcgttggctttgcgccgaagaagttttga

SEQ ID NO: 177 - DNA, 2237 bp, Scytalidium thermophilum
  misc_feature (656)..(1446): n is a, c, g, or t
atgaaggtcccgaccctcatctcgagcctcctggctctggtctccttctccgaggccacgccgctcatcaagcgagcgacgctcacgcgggtcaacaacttcggcaacaaccctagcggtgcgcgcatgtacatctacgtgcccgacaggcttcagccacgtcctgccgttctcacggccgttcactactgcacgggcaccgccaacgccttctacaccggtactccgtatgctcgtcttgccgaccagtatggcttcattgtcgtctacccggagtctcccaatgacggcggttgctgggatgtctcgtcccgtgctgcctatacccgcgatagcggttccaacagccacgccatttctctcatgacgaagtgggctctgcagcaatataatagtaacccggagaaggtctttgttgctggcaccagctcgggcgctatgatgacggtgagtgacacagagatgaggctcaagttgtggtcagctctcttgtctcggttactgacacctctctcaccagaatgttctctctgctgtgtaccctgatttgtacaaggctgccgctgcctacgctggtgtccctgcgggctgcttctacacgggcactgttgctggctggaattcgacttgcgccaacggccagtccatcaccactnnnnnnnnnnnnnnnnnnnnnnnnnnnnnnnnnnnnnnnnnnnnnnnnnnnnnnnnnnnnnnnnnnnnnnnnnnnnnnnnnnnnnnnnnnnnnnnnnnnnnnnnnnnnnnnnnnnnnnnnnnnnnnnnnnnnnnnnnnnnnnnnnnnnnnnnnnnnnnnnnnnnnnnnnnnnnnnnnnnnnnnnnnnnnnnnnnnnnnnnnnnnnnnnnnnnnnnnnnnnnnnnnnnnnnnnnnnnnnnnnnnnnnnnnnnnnnnnnnnnnnnnnnnnnnnnnnnnnnnnnnnnnnnnnnnnnnnnnnnnnnnnnnnnnnnnnnnnnnnnnnnnnnnnnnnnnnnnnnnnnnnnnnnnnnnnnnnnnnnnnnnnnnnnnnnnnnnnnnnnnnnnnnnnnnnnnnnnnnnnnnnnnnnnnnnnnnnnnnnnnnnnnnnnnnnnnnnnnnnnnnnnnnnnnnnnnnnnnnnnnnnnnnnnnnnnnnnnnnnnnnnnnnnnnnnnnnnnnnnnnnnnnnnnnnnnnnnnnnnnnnnnnnnnnnnnnnnnnnnnnnnnnnnnnnnnnnnnnnnnnnnnnnnnnnnnnnnnnnnnnnnnnnnnnnnnnnnnnnnnnnnnnnnnnnnnnnnnnnnnnnnnnnnnnnnnnnnnnnnnnnnnnnnnnnnnnnnnnnnnnnnnnnnnnnnnnnnnnnnnnnnnnnnnnnnnnnnnnnnnnnnnnnnnnnnnnnnnnnnnnnnnnnnnnnnnnnnnnnnnnnnnnnnnnnnnnnnnnnnnnnnnnnnnnnnnnnnnnnnnnnnnnnnnnnngggccctataggaggatctcgtatccgacgacgattgcgttatggagtgtcgggtcagaggggaggtcgagaacctctttcagctaggaggggttggtgagggagctgtagaagaagtactatgttggtctgaactcgatattttgtgcttggtgttttggttgtgttgttgagctgacgcaggctgatgtcggaggggttggtgcacctgggacatatataggatgaggaggacgtggtggtggtggtggtggtggtggtggcggtgtcggacctccccctccatctgtagactgggcagaaaggggagcctccatgagcatcgttgcaaaagagcttcccagggtgctcataatagctcacggcaagcaaattcaaattagaccgcaaccatcttgttccgtcacctcccaccctgttcatgcaggaagctcaagtatcctaggtatgtgcatcgatggactttgtcatcagttttttggagagtttattgacgctgttgggttgtccaagagacggcagggcagggcgacagggctctgtaacagccagcgcttgatgagacgcctgccagattatgtggccaatagggtgatagtgttggcgcttaaatggttttgttgtgccggggtgttgagctgtgccgcccggaaaccatgctccccttgcggaccagattccaagcaaagccggatgtgcccctcgacgctcagctgccccgcgagaagcgcggaaatccgatgccctcgagccagcgtgaagctgtatggaacctcgtagccatgcactag

SEQ ID NO: 178 - DNA, 1157 bp, Scytalidium thermophilum
atgaaggtctccgtgatctcggctctcctcgccaacgccctctcggcctcggccggcaccatcctctgggatggccgcttcaacgacctcacgtcttcggcggatctgaacaagtggtcgtggtcgaaccaggttggaccttatcgtatgtgcatctttggcccctgaagtgaacaaacatccgctcacacaattctcagagtggtacatccacggcaacggcccggtgaccaactatgtcaacctctcgcctgactacaagaaccccgccgacacggggtccaagcagggcgccaagattacgctcgacagcacggcgtactggaacggccaaaacatgcgccgcactgagctaatcccgcagaccaaccagcccatcaaccgtggcaaggtctggtaccacttctccatcatgcgcaaggacgtcaacccgcccagcatctaccgcgagcaccagatcgccttcttcgagagccacttcaccgagctcaagtcgggctggctgtcgggcgccccgggggtgagcgacacgctcctgcgctggtgcgtcaacggccagacccggtggagcaccgagtgggaggccgacgtctggcacaacgtggcctacgagatcgacttcagcgccaacacggtcggcttctggcactcgaccggcagcgacccgctgaccctcaaggtcgcccccgtcagcgtcagcaccagcagcaacggcgccgactggcacgtcggtgttctcgagctgccccgctccggctacccggacagcaacgaggacttttacttctcgggcgtctacattgagagcggcagcatcaccacctccgtcgctggtcctggtatgtctttccgctcttaaacagaatcatggatggtcactaaccagtcccgacataggcgctcccgttgtcgacccccctgccagctcctcgaccgccgtccctcccaccacaactctggtgacctcgactcgcgtttccactaccactaccagcactaccaccaccagcagcgcggccccgacccctaccaccccgagctgcaccccgcagcagcagtgggcgcagtgcgacggcctcaacttcaacggctgcaaggcctgcgtggctccttacacctgccactacgtcaatgactggtactcgcagtgctactga

SEQ ID NO: 179 - DNA, 1667 bp, Scytalidium thermophilum
atgaggatcacagctacgtttctcgccctcctcccgggcatggcccttgctggggggaagaacggtgggaagtgcaagaagcctctggtttcgtcccagaagctgcagtccctggtcaccatcgacgacctgcttgatggttcgaagaagctccaggagttcgcctatgccaacggcggcaaccgcgccttcggcggtggtggccacaatgccactgtcgactgggtctacaagaccctcaagtcgctcaactactacaacgtggtcaagcagcctttcgagagcatctactcggaggcttccggcaccctgaccatcggcggcgaggacatccagatgcagcccatgacctacaccccggccggcgatgtcagcgcgcccctcgtccccgtggccaaccttggctgcgaggttgaggactacccagccgaggtggctggcaagatcgccctcatctctcgtggctcgtgcactttcagccagaagtctcagaacgcgaaggctgctggcgccgttggtgctctcgtctacaacaacgaggagggcctagtgcagggcaccctcggtgaggctctgcttgactacgccccgatcgccggcatcacccaggccgacggccttgccctcctcgagaagctcgccgagggtgaggtcgttgccgacctcaagatcgacgccaccgtcgagaaccgcatcacctacaacgtcattgctgagaccaagggcggcgaccacgagaacgtcctggttgttggcgcccactctgactcggtccctgccggtcctggtatcaagtgagtttaaccattgagggttctctcttatctgactccaatgctaacgattccgcagcgatgatggctctggcactgtcggtatcctcaccgttgccaaggcgctggccaagttccgtgtcaagaacgccgtccgcttctgctggtggagcgctgaggagttcggtctcctgggctccgagttctatgtcaactccatcaacggctctcaggctgagctggccaagatccgtgcctaccttaacttcgatatggtatgttggactccaaatccatgatgaaattggcaaaacatgcatctaacaactttcccaacagattgctagccctaactacatctacggcatctacgacggcgatggcaatgccttcaacctgaccggccctgtcggctcggacctgatcgagaagaacttcgagaacttcttcaaggccaagaacaccccctctgtcccgactgagttctcgggccgctccgactacgccgctttcatcgagaacggcatcccctcgggtggtctcttcacgggcgccgaggtcctcaagactgaggaggaggccgcgctcttcggtggcgaggccggcgtcgcttacgacaagaactaccaccagcccggcgacacggtcgacaacctcgccctcgacgccttcctgctcaacacccagtcgattgccgacgccgttgccacttatgctctcagctgggagggcttccccgaggttaacctcaaccagcgccgctgggatgctgagcgctccaagaacatccgccgcagcggcggcagccatggccacgggccccgctctggcggccactcccacgcccacggtgtcgctcactccggcccgtgcggcggtggtgacagggcctaa

SEQ ID NO: 180 - DNA, 1842 bp, Scytalidium thermophilum
atgtggttccgcctcgccctcctcgccgccgttgcatcggcccttgtaatggagagcctgtcggcggtgcccaaggactggtccgaacttcgaccggccttgcccgatgagcctatccgactccgcattgccctcaagcagcagctggatcgagccgtgatgctggaccgggctgcccttgacattgcaacacctggtcatcccaactatggcaagcacttcacccgcgatcagttaaggtccctcacggccccttccgacgcctccatctctgccgtcaccgcttggcttcagaagcacgccattcaacccgtcctggaccacgactggttcaccttcaccacaaacgtgagcaccgcaaacaggcttctcgactctcgcttcgcctggtacgcgcacaaccaggccccgtctcgccctgctcttcgtgttctttcatacagcgtcccagacgacatcgcttcccatatcgatctgatccagcccaccacccgcttcggcaatcttgccgcccggaagtccaccatattcgatgtccaccgccttcataccggcaaggacatagtgccaggcaaaggccgagtggtcctcagtggcgtggacacggacgactctaaggattgcgtcggctttgtcacaccggaatgtctccgtcggctgtacaatgttcgctacaagcctgtcaacccacaaggcaacaaggttgccattgtttcattcctcgaagagtacgctcgatacgatgacatggaggagttcgccgcggaactccttccagaggccacaaatgccaacttctcagtcgagctcgtcaacgggggcctcaatgatcaggccagcacatctgacagcagtgagttaaccgggcggtcttcgtgtggtctataggatgacaactgacaatgagtagccgaggccaacctggatgctcagtacgtcctagccttgagctatccaatccccctgaccgagtacagtgttggcggccgaggcccgcttattccaaccgccatccaaccggatccgccaggttccaatgaaccttacttggaattcctactctatctgaccagtcttcctgattctgacctaccgcagacaatttcggtatcatacggggaagaagagcagtcggtccccaaaagctacgctatcaaggtatgcaacatgttcaaggagctcggcgcccgtggcgtatccgtgctctttgcctcgggagactctggtcccggatatgaatgtatccggaacacagggaacaatgccaccttcttcgagccaacgttccctggtacctgcccgtgggtcacgtccgttggcgccaccatggatatggcgaacgaacgcgcagtcgccttttccagcggcggcttcagcatgtactacggccgaccggtatggcagaaggaagctgtcgatgcctatctagacagaattggagacacctacgcaccctacttcaaccgcaccggtcgtgcgttcccggaagtgtctgcgcagggcacatcattcgcggtcttcaaccagggagactggttaagcatcggcggcacttcggcttcgtcgcccgtcgtggcgggcgtcgtggcgttgttaaacgcagcgagaaaggcacaggggaaggcgccgctagggtttttgaacccgtggctttacaacaattcggctgccttcaaggatatcatggagggtgccggtatcgggtgccgggagcgcgacgagtttggttgggacggcgcccggtggaatgccacggaaggttgggacccggtgacggggttggggacgccgttgcttgacaagcttttggaagcggctgctcctgggacgaagaatgagtga

SEQ ID NO: 181 - DNA, 1362 bp, Scytalidium thermophilum
atgcacatctcgactgcaaggttgctgatcaccagcctcctggctagtgtcgttgctgcggcgccgcatgttcccaagacgtcgaagttcctcactgtggaaggggggaagttcaagcttggggggaaagacttccactttgcgggaagtaacgcttactatttcccgttcaatggggtatgtgggatttttccgttgatcgtcccgtcatacctatgagaccgaggtgttcagctcactcaccacccaataatctagaaccagcaagacatcgaaaagggcctcacggcagcaaagaacgctggcttgagtgtgttccgcacgtggggcttcaatgacaaaaattcgacgtatatccccggtggccttccgaactatggcggcgagggcgctgggccttccgaggtagtgttccagtggtggcatcctaacggaacaaccacgatcgatgttagcggcttcgacaaggttgttcgggctgcggaaaaagtgggaatcaagctcattgttgccttgacgaacaattgggccgactatggcggaatggacgtatacacagtgaacctcggcggcagataccatgatgatgtaggtcgatctattcccgttacatgtcacggactaacaccggcccagttctacacgatgcccgaaatcaggaacgccttcaagaggtacatcaaagaatttgttacgcgatacaaggactcgcctgttattgctgcctgggaacttgcgaacgagcctcgctgtggtgctgatggggtgcgcaacctgccgcggagccccaactgtacaccggccgtcttgtcggcatggattgccgagatgagcgcgtacatcaagtcgttggatcggaaccaccttgtgacctggggcggcgagggtggcttcaaccgccagtccgacgattgggcatacaacggcagtgatggcggcgacttcgatcatgaactatccctcgatactatcgacttcggtgttttccactcctaccccgactggtggggtaagacggttgaatggacacaccagtggattcgggatcacgcagctgctggccgccgagcccgcaagcctgttgtccacgaagagtatggttggctgacccctgacaaacggcttgaatacacgggaagagtcgataaccgcacccgtgttgaagtgctgggcggttggcaaaggcttactgttgaggagaagttggctgggagcatgtactggcagtatggctactcgtcatattcctacggccgcaaccacaatgatgggttcacaatttacctcgatgatgaggaggccaaggttcttgtctatcagcacgcgagagagatgaacgcacttaaccgtcacgctcattag

SEQ ID NO: 182 - DNA, 1197 bp, Scytalidium thermophilum
atgaagttcacggccaccggactcctcatgtctctgccgagaattgttctcggccatggttatctcacagtgccgttcagtcgaaccaggctaggcgcagaggtatggctgagcacccgactggaggagacagatcctaatgatttccaggccggaattgactcttgtccggaatgctccattctcgaacctgtggtggcgtggcccaacttggatgcgacccctgtcgggcggagcggtccatgtggctataacgcccgagtgtccgtggattacaaccaaccttcctcacattgggggacaacaccggtggcaacatattcacctggccagatcgtggaagtggagtggtgtgttgatcacaacggagaccacggcggcatgttcagctatcgaatctgtcagaaccagacactggtggacaagttcctgacgccaggctacctcccaaccgaagccgagaagcaggaggctgaagactgcttcgaagccgggctgcttccatgcacggatgtgtcaggacagtcttgcgaatacagcccagactgcacaccgggccaggcgtgctggcgcaaggactggttcacctgcaatgcgttccaagctgacagtcgacgggcatgccaaggtatcgataatgccccccgtggctcctgctacacgagcatcgccggcggttacccggtcacgaagaagattcggatccccaattacttgtcaaagcatacattgctgtcattcaagtggaactcgtatcaaacgggccagatctacctctcctgtgccgacattgctatcattccggggtctgacccaacgactcccaccagcaccacctctgaggcctcagctactgctacgccaactgcgtcctgcactccggtttcgactgtgacactgaccttctcggaacgcgtcgtcacgacttggggtcaatctatcaaattggttggttctattcccgaactgggaaactggaatctgtctgccgcgccgacattgtcatcttcagagtatacaagcacaaatcctgtctggacacacaccatcatgctcccggtcggcacctcgttccagtacaagtttgtcagggtggaggccaacggtgctgtgacctgggagagtgatcccaatcgcttgtacacggtgccatcggggtgtgcgacaagcataagggttatttctgaatggcgatga

SEQ ID NO: 183 - DNA, 792 bp, Scytalidium thermophilum
atgaaacctgctgccatcttcccagtgcttctcgtcgcctcgtcctcggccaatgccaagaaaatcttctgcaacgaaggcaccacagaaagctgggacctagcacaggttgagcacaacggctacctccacgagactaccgatgtctactttgacaggccaccagccctagtcgctgggtaagtcttcgaccccgattaccccggacgctgtcattctgaggtacgctataatgcgggctacgggctgggcgacacacggtactacggctttgcgttccgtcttcatccagagtggaagttctcgcctcctataagctacaacattgcccagttcattgcgccattcgacagttcatgcgattcctacatgcccaccacgatgatgtggatggttggctctcaactcttcacccggaccaagcatgggagcgtttgcaaccagactatcgtggaataccctctcgacgtcgatgtcacggccggggactggcacagagtcatcattggcgcttcctggcaggccagcacaaccggctttttgaaggtctggtatgacgggaaaaaggtcctggacgagcaagacattcccacgacggtcaccgagacggagcagtttcaattccggatcggcctgtatgcgaacggctggtatgacgacaggacgcgacaacctcctgagggcatctacgaggtcttttacgacaagatcgctatcgccacaaccaaggatgaagcctccccggacacgtggaagaggaagccgataagctgtcgaaggttgacacgttga

SEQ ID NO: 184 - DNA, 1502 bp, Scytalidium thermophilum
atgcggtccctctcgctccttgtggcgggcgttctgctcgcggggcacgccgccgcggctccccagatccccaacttcacccaggaagaaatcgacagcggctatgctctgcgcgagctgagccgtattgcctatgaaaatgccatggcgcgtgtggaaaagtcgaccagtgggtgcaccaaagagaacgtgcagattcgcagagaatggtaggaatcggagtgccaagagtaaaatttcgagttcgatgttaattctctgtgttcaggcgcaacatgactcttgcggaccgcaaggcgtaccaggaggccatccaatgtctgatgcagaagccgtctcgcaacaagggcatcgacggtgctcgcacagcctgggacgactacggcgttctccactacttccaaactccctatgtgcacaactcaggtacttcagctaccctatgatatgaaattcagcctccgtgtttcactctcagttaagaggacgccccactgactgaatgtacagcaactttcctctactggcaccgccatttgaactgggttcttgagcaggatatgcgagagctttgcggatatactggtaagttcccatggctgtgagattgggctcggcggtagcccctgaatcctgaatcccgaagagatcgctgacatcaacaccaggcaccgtctcgtactgggaatggggtcttgactgcggcggactcggcaccgtcgagacctcgcctctttttgacggcagcgaatactccatcggaagcaacggcgccaaggtcaacagccctggtggtggaatgcctttcttcggtgctggccccggcacgggaggcggttgcctgctgtcaggcccgttctccaacttcaccgttaaccttggacccaacaccgcccgcgaccctctcaagtacaacccgcgctgcatcaagcgtgatctcaacaccaatatctgcagccggtactcgtcgctccgcaacacgaccgacgtcatcctcaacagcccgaaccttgagatcttccaggccattgtccagggcgacactcgctggcctgaaggcaccagggtcggcatggctgttcatggaggtcagtagccatacccatataccggcgtaatgaatatcaagctaactctttgtttcaacaggtggccacttctccatcaacggcgacccaggtggtgacttttacttctcctccctggagccgggcttctatttccatcacggaaatatcgaccgcctccacttcatctggcagaaccttgactgggagaaccgccaggtacgttatgactaactcatgatggctgggagcacttactaacaacacttacagaccatttccggcaccaacaccatgttcaaccgccctccgacccctgaggcggtgccggaagacatcatgggctttgagcccatcaacaggaacgtgaccatcgggcagaccattgacactgttggcggcacgccactgtgctatgtctatgctccatggtaa

SEQ ID NO: 185 - DNA, 1479 bp, Scytalidium thermophilum
atgcagctcattactttggccgctctcctccccttcgcgctcgccgcgcccgtcatccagcagcctggcgcccagctcatcccggacagctacatcgtgaagctgaaggatggtgcttcggaacgtgccctccaggatgccatccgccatgtcaaggcgggcaacgtcaagcactccttccgcagcagccggttcaagggcttcgcggccaagctgaaccgcgaggcgcttgagattgtcaagaacctgcctgaggtaagttgacagccaaagactccatgcgcagctctcttagctgacactcttgccaggttgaatacatcgagcaggatgccatcgtgcgcgcctacgacctcgtcactcaggagaacgtcccttggggtctcgcccgcatctcccaccgcgagaagggggccacgacctatgtgtatgacgagagcgctggtgaggacacctgcacgtatatcgtcgacacgggcatctatgttgatcacaatgtgagtttcatgttttgttattcatgccaatctatccccaatttccccccgattccctagaccaatcaacgctaaccatcaatgatcaggaattcgagggccgcgccgagtggctcgccaacaccatcgacacggacaacaccgacggcaacggccacggcacccacgtcgccggcactgtgggaggcgtttctttcggagtggccaagaagacgcgcctgtttgctgtcaaggtgctcgactcctggggctcgggcacctggtccagcgtcattgctggtattgactttgtggcggccgatgctgcgaaccgcactgccgcgggagagtgtaagttctcgccccctcaggcattgaattcccgagtctaactgacacctccacaggcaagaagggcaccgtcgctaacatgtccctcggcggtggccgcaacactgccgtgaacgctgccgtcgcggccgctgttcaggctggtaccgtcttcgtcgttgctgccggaaactctggcgacgacgcctactggtactcccccgcgagcgagccgactgccatcactgtcggtgctagcaacatcaacgatggcgtcccctacttcaccaactacggccccggcgtcgacgtctatgcccccggtgtcaacgttctcagcgcttggattggcaaccccactgcgactgtaagcagactgcttccctcttctttccttcccaccacctcccccaccgaacaggataaatatcctcattcagaatcttgagagatgacacagaagctgacaccccattaacagcgcgccatcgacggcacctccatggccagcccccacgtcgccggcctcgccgcctacttcctcgggctctacggccccaagacccccgccgagattgacaccctgatcaaggagctcagcacccagggtgtcatcaccggcctgccggctgatactgtcaatgctgttgccttcaacggtgccaccgagtaa

SEQ ID NO: 186 - DNA, 875 bp, Scytalidium thermophilum
atgcacttcaccaagatcttctcgaccctgggcctcgccagcctcgccctggccggcccagtccaggttgctgagcgccagacccagaagctgcggatcagtaagcaccttaccctgtttccatcctcccgccggttcatcagagctgacacctcctccagtgcccctcggtgacagcattacggagatcacctgctggcgcgccttcgtctgggaccagctggccgaggccggtctcgccgacaaggtgcaatatgtgggctcgcagaacagcaacccgcagggctgccgtcccaacacccccaactgggatcagcaccacgagggccactcgggttggctggccatcgacattgccaacaactacctcgagggttggctgcgcagcacccccgctgacattgtcatgttcatgctcggcaccaacgacgtcttccgcggccgcagcaccaacgacatcatcaacgcctacactaagatggtcgagattatgcgcaggagcaacccgcgcatgaagattattgtgcgtccttacctccctacctaccacctacgctctgggcgatgactctgtcaattgttgagtctccattaacatttcttccccctcttgacaggtcgacctcgtcatcccgctgagcttcaacaacgccccgatccagcaactcaacgcgcgcatcccgcagtgggccgcctcgctcaataccaccgagtcccccatcgtcatcgccgactgctacaccggcttcaactcgttcagtgacctccgcgacggcgtccaccccagcctgtcgggcgaccgcctgattgcctcgcgcgtcggcccgctgctgcttaactatgtccgccaggctcttgaggagcgcggtcagtaa

SEQ ID NO: 187 - DNA, 1370 bp, Scytalidium thermophilum
atggctcgcggtaccgctctcctcggcctgacctcgctcctcctggggctggtcaatggccagaagcctggtgaaaccaaggaggttcacccccagctcacgaccttccgctgcacgaagaagggtggttgcaagccggcgaccaactacatcgtgcttgactcgctgtcgcaccccatccaccgcgctgagggcctgggctttggcggctgcggcgactggggcaacccgccgcccaaggacgtctgcccggacgtcgagtcgtgcgccaagaactgcatcatggagggcatccccgactacagccagtacggcgtcaccaccaacggcaccagcctccgcctgcagcacatcctgcccgacggccgcgtcccgtcgccgcgtgtctacctgctcgacaagacggagcgccgctatgagatgcttcacctgaccggcttcgagttcaccttcgacgtcgacgccaccaagctgccctgcggcatgaacagcgctctgtacctgtccgagatgcacccgaccggtgccaagagcaagcacaaccccggcggtgcctactacggcactggctactgcgatgctcagtgcttcgtgacgcccttcatcaacggcttggtaagttttggcagtcgacctcactgttctaccgacatttcgctgactgagacttcctccagggcaacatcgagggcaagggctcgtgctgcaacgagatggatatctgggaggccaactcgcgcgcctcgcacgtggctccccacgtctgcaacaagaagggcctgtacctctgcgagggtgaggagtgcgccttcgagggtgtttgcgacaagaacggctgcggctggaacccctaccgcgtcaacgtgactgactactacggccggggcgaggagttcaaggtcaacactctcaagcccttcaccgtcgtcacccagttccttgccaaccgcaagggcaagctcgagaagatccaccgcttctacgtgcaggacggcaaggtcatcgagtccttctacaccaacaaggagggcgtcccttacaccaacatgatcgaggacgagttctgcgaggccaccggctcccgcaagtacatggagctcggcgccacccagggcatgggcgaggccctcacccgcggcatggtcctggccatgagcatctggtgggaccagggcggcaacatggagtggctcgaccacggcgaggccggcccctgcgccaagggcgagggcgccccgtccaacgttgtccaggttgagcccttccccgaggtcacctacaccaacctccgctggggcgagatcggctcgacctaccaggaggttcagaagcccaagcccaagcccggccccggcccccggagcgactaa

SEQ ID NO: 188 - DNA, 1788 bp, Scytalidium thermophilum
atgaggctcacctcgaccgccttcgcggcgggcttcttcctggcccgctgtgccgccgccaacctcctccgcggcaccggtctcgacatcggccccgacgatgactcggtccccgcctccgaactccaaaaacgcgccgaaaccttccacggctggggcgagttcgaccagctgatcgaccactcggacccgtcgcgcggcaccttcaagcagcggtactggtacagccacgagttctggcgcggtccgggctcgcccgtttacctggcgacgcccggcgaacagagcgccgagggattcaaccggacatggctcagcagctcgcggttgcccggatggatggcgaaccagacgggcggtgccgttgttttactggagcatcggtactggggcgagtcctcgccgtttgaggagctcacggtcgagaacttgcagtatctgacgctgcaggattcgatgaaggattttatttactttgccaagaactgggtgccgccttttgatcccagcggtaacagctcggcggataacgctccttgggtctttgccggtggttcttatgttggtgctctggccggatggcttgccactttgtacccggggacgttttgggcttattatggctcgagcggcgtggtcgaggctattggagatttctggcagtactttgtgccggtgcaagaggcgacgccgcggaactgcagtgccgacgtcgacgccgtcattaactacgtcgacacggtgctgacgtacggcaccccgaagcagaagcgcgctctaaaggagaagttcctgctccaagatcttgaagacgaggacttcgccgccgcgctcgaatggggtccctggcagtggcaatcaacgcagttctactcggccaagaacaccagctacggatacaccccgtactaccgcttctgcgactacgtcgagaatgtttggcccaactctaccaacaaggtgcccggtgctcggggcgttgggttgaccaaggccttggatgggtatgccaagtggatgaaggaggagttgatcccgggctgtaagtttcccccttggttttgagcacactgacaactgcaagaaatgttgacggctatgcagtctgcgaagaagccggctatcccgagtggaacggcacctataacacgctctgcttccagaacctgaatgcctccaatgtcgcgtacaaggacctgagccccggcaactggatcaaccgccagtggatgtggatgctgtgcaacgagccgtatgttctcatctccaccctgatagccctactggtttttctccatgctgactcttccctgcaggttcgagtggtggcaagacggcgccccgcggggccacgcaactctcgtctcgcgccttgtcaaccccagctactggcgcaagcagtgcccgctgttcttccccgtcgacaagaaaaccaccaacgccacgtacggcatccgcgaaggaaaacgcgcgcgcgacgtcaaccgctggacgggcggctggttcgccactaacacgacccgcctgatgcacaccaacggtcagtacgacccgtggcgcgactcgacgctggccagcatgttccgcccgggaggccccgtcaggagcaccgagcagctgcctctgaagctggtcaagggcggtgtgcattgttcggatttgtactcgccgaactgggaggcgaatgagggcgtgaggaagattgcggaggaggcggtcgagcagatgaagaagtgggtcggggagtggtatgaggagaggggcgttgggaagccgtgggaggtttga

SEQ ID NO: 189 - DNA, 1020 bp, Scytalidium thermophilum
atgcgtgcctcattcgctgtgctttctttcctcacctcgctggcgtccgccggcccagcccctgcctacccaggcatgaagctgctgtggtccgacgccttcgacggccccgcgggcgcgacccccgacacctccaagtggaacatcatcaccgagtaagtcctcactcttttccttcctcctctacctatcaaccatccccatatctctctcccctccccacaaccctttgttaaccctcccacccagcgtccgcaccaacaacgaaatccagcaatactccccctccaacaccaacctccagctctcgggcggcagcacggtccagctcgtcccctggcgcgaccaaaagacaggcgaatggacctctgcgcgcatcgagaccaaattcgtcttcaccccggccgccggcaagctcaccaccgtcgaggctctgatccgcctcggcgagaaccctctcgaccggcgccagggcttgtggcccgccttctggatgctgggcgactccatccaccacggcaccgagtggcccatctgcggcgagattgacattctcgagtcggtcagcgggcacccgctgggccacggcacgctgcactgcgggcgcaaccagggccacggcgggccgtgcaacgagccgatcggtcgcggcggcgcggtttccttgccggattatgccggctggcatacgtggacggtgcagattgatcgccgcgatacgagcagggggttcaggagcgagtcgatcaggtggttgagggatggtgcggagtggtttgtggtgaggggtgaggatatcggggatgagggtgtttgggcgacgctggcgcactcgccgctgtttattatcttgaacgtggcagttggtggtgactggtgagtttaccttaacctaggacatggtgtgtgtgagaggtgttgactgacttgttccgcaggcctgggcacccgaacggcgcgaccctcgatgggtacggcagcatgatggaggtcgactatgtcgccgtttatcaggggtaa

SEQ ID NO: 190 - DNA, 974 bp, Scytalidium thermophilum
atgcgttcctcccccctccttcgctccgccgttgtggccgccctgccggtgttggcccttgccgctgatggcaagtccacccgctactgggactgctgcaagccttcgtgcggctgggccaagaaggctcccgtgaaccagcctgtcttctcctgcaacgccaacttccagcgtctcactgacttcgacgccaagtccggctgcgagccgggcggtgtcgcctactcgtgcgccgaccagaccccatgggctgtgaacgacgacttcgcgttcggttttgctgccacctctattgccggcagcaatgaggcgggctggtgctgcgcctgctacgagtaagctttggccgcgtgtgtaacactgtacagacatagcactaaccctctcccaggctcaccttcacatccggtcctgttgctggcaagaagatggtcgtccagtccaccagcactggcggtgatcttggcagcaaccacttcgatctcaacatccccggcggcggcgtcggcatcttcgacggatgcactccccagttcggcggtctgcccggccagcgctacggcggcatctcgtcccgcaacgagtgcgatcggttccccgacgccctcaagcccggctgctactggcgcttcgactggttcaagaacgccgacaacccgagcttcagcttccgtcaggtccagtgcccagccgagctcgtcgctcgcaccggatgccgccgcaacgacgacggcaacttccctgccgtccagatcccctccagcagcaccagctctccggtcgaccagcctaccagtaccagcaccacctccacctccaccacgtcgagcccgcccgtccagcctacgactcccagcggctgcactgctgagaggtgggctcagtgcggcggcaatggctggagcggctgcaccacctgcgtcgctggcagcacttgcacgaagattaatgactggtaccatcagtgcctgtaa

SEQ ID NO: 191 - DNA, 1236 bp, Scytalidium thermophilum
atgaggtcggttgctgctttcctcgcggctgtgctccccgccgtcgatgcggcgtgcagtctcccatccagcctcagctggacgtcgtcaggtgctctggcccagcccaagaatgggtggaggaacctcaaggacttcacctatgtcccgtacaacggcaagcacctcgtctacggcagctattacgacggcaaccggtatggctccatgaactttggcctcttctccaactggaacgagatggccagcgcgagccagaacgccatgtccaacgccgccgtggccccgaccctcttctacttccagcccaagaacatctgggtcctcgcctaccaatggggccggacggccttctcgtaccgcaccagcagcgacccgaccaaccccaacggctggtccgccgagcagccgctcttctcgggctccatcagcgacagctcgaccggccccatcgaccagaccctcatcgccgacgacacccacatctacctcttcttcgccggcgacaacggccgcatctaccgctcgcgcatgcccatcggcaacttccccagcagcttcggcagctcctacgagaccatcatgacgggcaaccgcaacgacctcttcgaggccgtccaggtctacaccattgacggctccaaccccaagcagtacctcatgctcgtcgagtccatcggctcccgcggccgctacttccgctcctacgtctccaacaacctcaacggcgcctggaccccgcacctcaccagcgagaacaaccccttcgccggccgctccaacgccccgaacgccacctggacctccgacatcagccacggcgacctcgtccgcctgcgccccgaccagaccttccccgtcgacgcctgcaacctccagctgctgtatcagggcctgcagggcagcagcagcgactataacagccttccgtaccggcctggtctgctcaccatggtcggtgcccggcccggcaacggcggtggtaacaaccagccccagcccacgacgactagcagcccgccggcgaacaccccgcccccgaacaacggcggtggcggtggtgcgacggttcctcgttggggtcagtgcggtggtcagggatacaccggcccgacgcgctgcgagccgccttatacttgccagtactcgaatccttgtaagtgatcctgagactttacttgactagggggtgaccagaaactaactcgcgtcacagggtactctcaatgcctgtga

SEQ ID NO: 192 - DNA, 1559 bp, Scytalidium thermophilum
atgttctggctcggccttctctcgttgccgaccgccgttcaggcgcagttcggcttcagcacgaacatgctgcggttcggctgctctcagctgtcgattgaccgcatcgacccgtaagtgcctacctgacatactgccatgtccgcagctagagagagactggacacacgactcacaacacacagccttgtcgagcccggcaacattccctcggcgcacgtccatcagattgtcggaggcgtaaggatcacccgagacacacccgtgtgcagaacatccgctcactgatttcgtcctttctccgcagaatgccttcaacgccagcatgccagtgaccgacatctccaagctgtccacctgcactacctgcagcttcgaccaagatcatagcaactactggacggccaatagtacgcaaatccaacttgttgtcgtcgtcaagaaggccagggaacgcaggactgacgttggttgaacaatagtttacttccgggcgcggaacgggtcgttcaagcgcgtgccgcagatggtcaacgatgtgatcggccctgccaacggcggtatcactgtctactacaccgctccgggtccgaacacggtggttgccttcaagccggtaagttgtggtcatgtgtcaagtgtgtgttgtgacaagacttgctgacgtcttactcagggcttccgcatgttcacgggtgacgtgatgaggcgcacgccgaccaacctcggccgccaggtccagagctgctaccgctgctacgacggccccaacttccagggcaacacccaggccccgtgcttcgaccctcagcgcgacaccgaagccttcccgaacagaccctgcccgggtggtatccgctcgagcgtcatcttccccatgtacgtacactcacaggtggtacgattgcagatggagtcctaaccggagtaacagctgctgggacggcaagaacctcgactcccccgaccacaagagccacgtcgcccaccctgtcgacggcccggctccgttcgccatggtcagcggccgttgcccgtctagccacccggtgaagatccctcaggtccactacgaggtatgtcaacccggaaagccgctctcagaggtttgaacttgccttgctgaccaaccatcacagatcgtctgggacaccagcaagttcaacaaccgcgctgagtggcctgcggacggcaagcagccgttcgttctctcgaccggcgacccgtaagtccttgactagttcttatacgttcccatgatggctgctgacacttcccttcccaggactggttacgcccagcacggtgactacgtcttcggctggcaggacgataccctgcagcgcgccatggacgccggctgcttcggcgctacctgccgtgccctgactactcagagcttcgacaaggccaacaggtgctctgtcaagcctcaggtccgggaggacaacgatggctgtaagtattctttgatgaagacccaggatacggaaaacggatgactgacaaacttgcgaatagggctcaacgagcttccgggtggccaccacgtcatgtaa

SEQ ID NO: 193 - DNA, 1407 bp, Scytalidium thermophilum
atgcgccggtcagctgtcactgtcgggggtgctttggcagccctactcggcgtccagccgcacggggcttcagcctcggtgacggtgcgcaagaccggccggggccccacggggtatgaggtcgacttccggtacgtcaacgccacggccaaaagcgtcaagatcgggggtgggttccagccgttcaccgaccagttccacaccaccggtaccatccaccgcgtcaacggccggtttgacccatggagctaccagcccggcgacttctgggtgagtaacccttacccgcagctccccgaagactacccgtggccgtatgagatgcagaggtcgaacgagtccgggcatgagggagagtggatattgacggtgccgttgccgtcggggacgtacacctacgccttcctcccggactgcgcctacgcgccgaactgcaccatcgattccggacagctggtagtggacccggacgtgcctccgttgcaaaacgtcccgggggacgcgctgagctccaacttccacgtccccttcgaccctgagttccaattcactcccgaactcaacctcaacttcgactacgcccttccagcgcccaagccatgccacaaccgcggaaccgtcatgtacgtcaactacacctcgccgggctccatccacccggcgcctgatgtccacgacttcgtgatctacctcccgcccggctacgcccgcaacaaaaccaagacccggaaggagtaccccctcctctatctctctcacggcgccaatggaaacggcggtgactgggaaaacctcggccgcatgagccacatcatggacaacttgatccgcctgggccacatcccgcccaccgtcgtcgtcgctccgaccttctacaacctcaacgccacctaccaaaacaacaccaaatacctctacggcaaccgcacacacaccgtccccgttccgcccgcgctgctcgtgcgcgaaaactacgaaaagtacctcttccccttcgtcgaatcgcacttcgacgtctgccgcaacgccagctgccgcgcgttcgccgggctgagcatgggcggggtgctggcgtacgagatgctggtcaacgcgaccgacacgttcgattactttggcctgttctcgccggcgacgctgccgccgtatatcggcgagaaggatctgaagaagaacccggcactgaaggagaaggggatcttcattgcctatgggttgtacgatttcgtgttccagtgggcgagggacttgcagacggcgctggatgcgttggagatacggtatctgaaccgcgtgacgccgtttgggagtcatgcgtggaatacgtggcaggatgagttgtggtggtttgggcagaaggtgttgtggaaggagttgccgctgtggaagctggttgggaggagatga

SEQ ID NO: 194 - DNA, 1131 bp, Scytalidium thermophilum
atgaaggcttccctcctcttcctcctggcgcccttcgcggcggcggctcccaccgtcgagccccgccaggctgcccagagcatcgacgccctcatcaaggccaagggcaaggagtacttcggcacctgcacggatcagcgcctgctccagaccggccgcaacgccgccatcatcgaagccaacttcggctccgttacgcccgagaacagcatgaagtgggagtcgctcaacccccagcgcggcgtctacacctggggccaggccgactatcttgtcaactgggcgacgcagcgcaacaagaccatccgcggccacaccctcgtctggcactcgcagctggccgggtgggtgcgcaacatcaacaaccgcaacgagctcattggcgtcattgagaaccacatcaagaccgtcatggaccggtacaagggcaagatctatcactgggtatgtccgctgccaatgacacccccctggactctcatggtcagaactattaaaactattaacacatttgttccaggacgtgatcaacgagatgttcaacgaggacgggtccctccgtcccagcgtcttctccaacgtcctgcgcgacgagttcgtcggcatcgccttccgtgccgcgcgcgccgccgacccgtccgccaagctctacatcaacgactacaacctcgaccagccgggctacgccaaggtcacccgcggcatggttgacaatgtccgccgctggctgtcgcagggcatccccatcgacggcatcggcacccaaggccacctgcaagccggccaaggcgccggcctggcccagaccatccgcgtcctggccggctcgggcgtcaaggaggtcgccgtgacggagctcgacatccagcagggcaccaacacgcaggactacgccaacgtggtgcgcggctgcctcgacgagcccaagtgcgtcggtatcaccgtttggggcgttcgtgatcaggtgagtgacaatcatcctggacatgacattgtgaaagggggaatgaagcagagactgacgtttgaatgcaggactcgtggcgcccgcaaggcaaccccctcctcttcgacggcaactacaaccccaaggccaactacaactccatcgtccagctgctgtctcgttaa

SEQ ID NO: 195 - DNA, 1320 bp, Scytalidium thermophilum
atgaagttctccaagtcggctctcctggccctggccaccgccgcctcggcctccccgaccaagcgccagagcgctgctcccggtgcttgcccgtcgccggtccgcctcgacgccagcaccaacgtgttcaggcagtacactctgcacgccaacagcttctaccgcgctgaggttgaggctgccgtccgccagatctcggaccccaccctggctgctaaggctgccaaggtcgccgacgttggctcgttcctctggctcgacaccatcaagaacattgagcgcctcgagcccgccctccaggatgtgccttgcgaccacatcctcggtgtcgtcgtctacgaccttcccggccgtgactgcgccgccaaggcctccaacggcgagctcaaggttggcgagctccagcgctacaagaccgagttcattgacagtgagtatccttgttcttgaggcagcaagacaggaggagagggaagaacagactggctgaccacgttttcccacccaaacagagatcgccgagatcatcaagcgctatcccaacactgccttcgcgcttgtgatcgagcccgactcgctccccaaccttgtcaccaacatcgacctcacctcctgccagcagtccgcctctggctaccgcgagggtgtcgcctatgctctgcagcagctcaacctccccaacgtcgtcatgtacctcgatgctggccacggtggctggctcggctgggactccaacctccgccctggcgccgaggagctcgcctccgtctacaagcgcgccggctctcctagccagctccgtggtttcgccaccaacgtcgctggctggaactcctggtaagttttctgttgtcctcttctccatcagtcctctcacaggactaactctctgtctccagggaccaaacccccggcgagttcgccagccgctcggacgcccagtggaactcgtgccagaacgagaagctctacgtcgagaagttcggcgctgctctccgcaccgcgggcatgccgaaccacgccatcgtcgacaccggccgcaacggcgtcaccggcctgcgccaggagtggggccactggtgcaatgtggacggcgcgggcttcggccagcgcttcacgaccaacactggctcggagctctgcgacgccttcgtctgggtcaagcccggtggcgagtcggacggcaccagcgacccctcggccgtccgctacgacgaattctgcggcaagcccgacgccttcaagccctcgcccgaggccggtgagtggaaccaggcctacttcgagatgctcctcaagaacgccaaccccccgttctaa

SEQ ID NO: 196 - DNA, 2834 bp, Scytalidium thermophilum
atgaagttcctcggccgtattggggcgaccgcccttgcggcgtcgctgtgtaagttgccgtcaagaggtatttggaactagggaacttgggctgaccgtccacagatctcacagcgggcgctgcgcaagccactggtgatgcgtacaccgacgcggaaacaggcattaagttccagacctggtccccggatccgcagttcacgtttggccttgccctgccgccggatgccctggagaaagatgccactgagtacattggtcttctcgtaagtctcaagcaactcacatggtgtcgcgatgccgtgatcaactaacaatgtccagcgctgcaccagggccgacccatccgaccctggctactgcggtctctctcatggccaggtcggccagatgacgcagtcgctgcttctcgtggcgtgggcctacgagaaccaggtctatacgtcgttccgctacgctaccggctacaccctcccgggtctgtacaccggcaacgctaagctgacccagctctccgtcaacatcaccgacaccagcttcgagctcatttaccgctgcgagaactgcttctcgtgggagcacgaaggcagcaccggatctagctcgacctcccagggctatctcgtcctcggtcgtgcttccgcccgccgcggtgtcgtcggcccgacttgcccggacacggccacctttggtttccacgacaatggcttcggtcagtggggtgtgggtctcgagaatgcggtttcggagcagtattctgagtgggcttcgctgccgggtctgactgttgagaccacttgcgaagggtgagtaaattggacgaggagagcgggttcgagacgcgatgtgatggtccacatgctgacactgttttcgtagatccggccctggtgaggcgcagtgcgtgcctgcccctgaggagacttacgactacattgttgttggtgccggcgccggcggtatccctgtcgccgataagctgagcgaggccggccacaaggttctgctcatcgagaagggtcccccgtcgacgggccgctggaagggtaccatgaagcccgagtggcttgagggcactgacctcactcggtttgatgtgcccggcctttgcaaccagatctgggtcgactcggctggcattgcctgcactgatactgaccagatggctggctgcgtcctgggtggtggcacggccgttaatgctggcctgtggtggaaggtgagtcgctttgcactggaagtgtcaatggggttaagtttgctgactccaatagcccattgacctcgactgggatgagaacttccctgagggctggcactcgcaggatcttgccgcggcgaccgagcgcgtctttgagcgcatccctggcacctggcacccgtccatggatggcaagctgtaccgcgacgagggttacaaggtcctctccagcggtctggccgagtccggctggaaggaggttgtggccaacgaggttcccaacgagaagaaccgcactttcgcccacacccacttcatgttcgctggcggagagcgtaacgggcctcttgccacttacctggtctctgccgatgcccgcgagaacttctcgctctggaccaacactgctgttcgccgcgctgtccgcactggtggcaaggtcacgggtgttgagctcgagtgcttgactgatggcggctacagcggcattgttaagctcaatgagggcggtggcgtcatcttctcggccggtgccttcggttcggccaagctgctcttccgcagtaagttgccctggtacatgtctcggttgattttctgataactgactttgttgtgctaggcggtatcggccctgaggaccagctccgcgttgttgcctcctctaaggacggagcggacttcatcgacgagaaggactggattaagctccccgtcggctacaacctgattgaccaccttaacaccgacctcatcctcacccaccccgatgtcgtcttctacgacttctatgaggcctggaccaccccgatcgaggccgacaagcagctgtaccttgagcagcgctctggcatccttgcccaggccgctcctaacattggccccatggtgagttgagatgggtatgccattgcgttcttggaatgggttactaactcaacgcagatgtgggagcaggtgaccccctcggacggcatcacccgccaattccagtggacggctcgcgtcgagggcgacagccgcttcaccaactcttctcgtaagtagagtcaaatccactcgccaacagactcatgggctaactgtcccagatgccatgactctcagccagtacctcggccgtggtgtcgtgtcgcgcggtcgcgccaccatcacccagggtctcgttaccaccgtggctgagcacccgtacctccacaacgccggcgacaaggaggccgtcattcagggcatcaagaacctcattgagtctcttaacgtgattcccaacatcacttgggtcctgccgcctcctggtagcactgtcgaggaatatgtcgattcggtgagtgttttccttccggaccacactgaaacattcaagcacgcctgctaacgcatacctaaacagctcctcgtctccccctcggctcgtcgctcgaaccactggatgggcacggccaagctgggtactgatgatggccgctccggcggtacttccgtcgtcgacctcgacaccaaggtctacggcaccgataacctgtttgtggtggatgcttccatcttccctggcatgtcgaccggcaacccgtccgctatgatcgtgattgccgctgagcaggctgcggagcgcattcttaagctgaggaagtaa

SEQ ID NO: 197 - DNA, 4308 bp, Scytalidium thermophilum
atgtctctgcgtttcagaaacggcttcatagtcggcctcgccctcgcggcgtcaaagctggctgcggccggctcggagccctccatgaccgtcttgcccgggaccgctgccaattgcgcctggtggtatgaccataacggctttttgtcttgcactcaagtcctacagcaaaactggatcagcttggatgagtttcggcagtgggtgtgtttgtaccgcgctcttgccaattcctgaatattaaaaaactctaactcattcatcgcagaatccaagcatcggacctggatgttccaatctccaagtcggtcactcatactgcgtcgagatcgaccccagtatccctaccgatggtgtctcaacaacatccgcagtctctaccacggttgcaagcaccttgactacaccatccacgttcaccaccttctccactttggtcacgtcgtccgagacatcgtcaacgaccacgaactcaaccactaccagcacccccagctccagcagcacctcctccagctctagcactagcacagccccctcttctactgccccaacaacagcaccacccacaaccaccgccacagctccgacctccacagccgctccaacctcccccaaacccaccggccccgtgaccaccccctcacccatccaacccggcatggttagcagctgcgacgccttctacttcgtcgccaagggcaccacctgctccgaggtcctctcgcataacgggatcaccctagctcagctgtacgcctggaacagcggcgtcgagcccgactgttccggcctgtgggccaacgtctgggtgtgtgtgtcaacctttgatcacgagccgactcccacccagccagacagcggcgtcaccacgccctcgccgctgcaggagcaggttgtttccaactgtgacgagttctatctcgtccagccgggggagacgtgctcgattgtcgcggggaagaatggcatcaccgtggaggagttgaaggcgtggaacccgtccgtcggcgcggattgctctggactttgggctgatgcctacgcttgtgtttcggtgagtggccatcagcctacgcctgtcgagccggggaacggggttgagacgccgtcgccgattcagggaggtatgacgacgtcttgcaatcgcttccactttgtggatggggagctttgttcgagcattttgaagaagtaccagatcagcctagaggattttgtgcggtggaatccgggtgttggggaggtttgtgagaatatgtgggatagatattatgtctgtgttggtgttttgtaattgttgagacggagtgcttagctgcactgttgatagttaatagacaaggggtatcctcgctggaggagctttcatactaggtattgttcccaccacatcctccgatcctgtttatgactgacatctaattaatacctgatttttcagtaacacaacacattcgacgagatggggtattaaatattctacacctaagggatagacaacctttctggcttattcaatccagtgtaaaagacgacctcgtgtccacattgggtggcagttccggggcaacaaatgctcgaggactcgacagcctagccacattcacattcagcctcggcttggcaaacatcagcccaacctgccactttacacctcaaacaacaaaccattgcctcacaaaacatcaccacaccttcacgcaatacttcacagtccacttcacaatggctctcctcaccgccatcccaccggagctcctcgatgccatcatcacccgcaatctgccgctgcgatcgcaagcccatctcccgggccccaacctgccttgacaccgggaggcgtggctggcggccatgcgaccgcgatcgccaggccacgctgaagtctctctgcctcacctcccaccggctgtattccctagcactcccccacccctaccaccacctagccctcaactcccgccgggagtggtggctactcgcgcggacgctcgcctcgcgcccggagctgggacatcatacccgcgggctctctctgccttttagcgtatggagaggttaaagacgaggccactcgcgactccctatcagccgaagatggcagcggtttccagcacttgcagcgttgtcgggacgaatacatcgcctcctgccctgtgtgaacccagacgcatccagcggcgaatcgcaatcccaagcggcggacgccgtcctcttctcaaagcttcttgacggccaaaataacctgcccttagacttcctcgccagccttcttcccaacctccaaacgctctgtgccgcactaaacggcgggctgggcttccgcttcctgacgcccggatcgctgccccggctgtggcgcgtctgcattaccgagcggaacaactggttgaccatggacccatccatggcgaggcgggtgcttgccgcgggccagcacagtctcgagagcgtcgacctgcacatgtgtgatccgtggcagatgtatccggacgaccggccccgccatgcgttgaactatgtggaggtttactgggagatggcttccgagcctgatgattctgagcatgactcggaacattgcggcggtcgaggcgaggcagaggaaggcgaggagggtactcaaccacaagaggagcaagagcaaaaccagggacaaggacaagaacaaccccaacctaccgcagccgcaccccccaaccttgccctacttccttacggaatcgtcgttccccacgtaaagaacctcaccgtcgtacacaccaccctggatgctatcgtgctcactcgcctgttcctcacctttcccggcgttactcgcctccatttcaccatgggcggtccttgccaatgggacgagcagcctccggtccaggaggtcactgggttctttcgttcgcgtgatcgcgcgcgaaggttgaagtccttcacattgagggttttattgaggggtttggacacctacaaggattggcgacggcggtggaacgacaacgatgtgagggtgattggggcacgcggggtgaggtttaagtttcgatcccaggtaccggtgtatcgctcaatagatgactgcccaacaaattactggcaaaaaaaaaagaagaagaagaagaaggaaaaaaagaaagaagaaaagaaaggtcaagctaaaaacaacaacaccttccgtacctagtgacaatgaaaggtgacaatgggacaatggaagcaaccaaaggaagcttggcccggagaaccaagactttgaaccttaagtatcaatgttgcggagtcaattagatacaagatctgagaaggaggcgaagtagtacccgggcaccttatgagtacgacgggttttagcggaaactgttcgtttactacccaactgttcgtttactgccccaccctttttccggccaccccgaggcgtatagaagtccttaatatccatttcttacattaacttggcttctacaatttctatttatctttaatataataaagtaattataatttactataactgtaattaactataataataaactaagtatagttaattatagttataattaagtaaaagaatagaattataaaagaattagaggatagttaactagggttagggacttttatattagggttagggtagtaagctagggtagggttggggttataaactttagtataacaacggtatactactagggttagggttgttatactcagggttagggtgtaccaataagggttagggttgttcgccgagggttagggctaggagctattctttcatgttattgttacactaggattagggttgctcatcttaaagttagggttttcttattagggttagggttatctgctttacaaccggtatatagtaatagtatactgttagggcgctacgtttaattagggcattgttgttacagctaacgtaaacgtattaataagcttcgatagctttgtgctatatgatttgttaaattttcggtgtggagacgttaaggtagttatgaaagaaatgcatttaaactccagacgcctcggcgtgaaggtattgataggcgctgataaggaattcgatgttgattggtggtcgacgagtaaacgaacagttggggagtaaacgaacagtttccgctaaaacccgtcatatatgagatccaccggcctggcgtttgcttgaccctgcaggtggccgccttgtatacctcgcccactaccacaaaggctattattagtcaccgccgtccagcgagctcctgccccagcccagcaggccaaccagcccaccacttagccagccattga

SEQ ID NO: 198 - DNA, 1074 bp, Scytalidium thermophilum
atgacaaacctcttccacaccctcctcgcgggggccgccctcctcacggccaccgccaacgcccaatgcggcgccggctctccccatgccacggtcaccggcggtggtaactggttccaagcccagcgcggctcccaacaactctacgccggctccgactaccgcctggccatccagacggccctcgacgccatcagccccggccagcgcgtggccgtgatggcctctggctccatcggcgccagcaccattaccatcacgagcggcaagatctttgaagggtgcgggaccatcaacgtcggcaaccgggccgggcgcggcgccatcgagtcgaccgacaccaacgacgtgcagatcccgtacctgagcatgacgggcaacccgtactttggcctgcgcttctcgggcacgcggaatctgtatctcggcaagatcaacatgaacctcagcggcgggctgggtatccgcttcgaccgcgaccgcgcccccaattacaacgtccgcatggacaccatcaccgtcaccggcgccggcagccacgcggtcgagacgtggaacattgatggtttacaaatcaactcggtcattgcccggaacgtgggcgagtgcggcctgctgctgcagaagaccaccaacgcgcgcgtcgggctggtggatggcgagaatgtggccaccggcaacggctacgcgacgttgaggttcgccaacaacaacggccagctgcccaacggacagtacaccaccaacgtctacgtcgaccgggtcgtctcgcgcggcggtggtcgcgggttcttctgcgtctcgcagagcggcggcgcgtcgattggatatctggatctggccaacaacggcaacaacgcgattctgattgagaactgctataacgtgcagatccagggcggcagggtcaacggcggtggtgaggtccgcttgtcggccaggtcggagttccccaacaacagggatgtgtccatcaccctccaggtcgataacacgtcggtcagggagcagccgtgtggccagaatatccggtggaatatttcgggcaatgctaggaggcagacttgctcgtaa

SEQ ID NO: 199 - DNA, 3723 bp, Scytalidium thermophilum
atgcgcaccttcaccttcaagtggttagtgcattcctccctcccccccccccccccaaactttgccatgccctgccattctttgctcgctgctcgtccgggctctgctggcacggtccaatgtgcgtccggagccacttacacacgccggcaagcctcggaggctctaaacctctttgtctgggttgcgccacgatgacgattggccgtcgcttgtgcatgcccgtgtttgtttgtgtttgttggcgatggctggtgtgggacgggttgcgctgactaccacccttggtgtttccattccctccctacaggcctcatccgggcgacgaagtttatgtcacgggcgacttcgatgactggtctaagagccaccgcctcgaaaaagttggagagtccctccaagtgacggtgaccttcccggatgacatgggaaagcttctttacaaggtcagtgtggttttgttcttttgtttttatcccttcgttgaacaaccggcccgggcttccaccgtggcacaatgggcaacgatactgcaacatgcgaaacgctggaggggcaaacacatgctcctttgttttctcctacgtgagccgcgagcaagaaaaagacagatgggaaagataagagggaaacggcgccatgaaaagcagcggtgtgctcggtgaaagtggagcaagtggctccgagaggccgaagccgacgcaacagggacctaccaagaaccccgctgtggcgcttctccgtgctgcgctgcgggcagcgggtgcaaccccgcgtcatccagcccgccaagatgagggacactctccaagctgctgcccctcatgccatccacagctcattacgtttgtccacctcagagcgttctcaagtgacgcgtgctcgtcagacaatgacatagccagtttggggagtgtcgctggccgctacctcacggagccagcacattgcgtaaccgtggtcattgggggttttgataaacgtcaatccacaagctacctagtccagaggaggagaatcagcatgaacggcgtgagcaacctgatggaacgctcacctgccgatcccaagcgagctcgggcttagcggcaagcttggagtgggaccttggcaacctcttgtccgaggatgctgcgtctcagcagcaataccagaagcccccgtgaccaaaaaaccgaacctggaatggcgcttaaggcctgggaaacggggaacaaggccctgggatgcacatgggaaggggaattccatgtgttgcccctctctcctgtcccgtcccagcccctcatttcgtcacgccgtgcttttcgatcttttccctctttctcttaaaaagttgcctcccagccccacctgtctacccagctccgtggcctcgaccgattcccgatcgtgtcaattgccttcgtgtcgcaccttgactcgtcgcccattcccatttccctcttaattactgacacaagatctgctttgaacgcaccacagttcgtcgtggacggaatctggaccaccgaccccacagtgacgcaagaaaaggacgccgaaggcaacgacaacaacgtgcttcttcccgagcaaatggacaaggtcgaggagtccgccgccaccgcggccatcaccaccgtgacccccgagtccaccaccgctcaactcgctgccgctgtaccgctggagcccaaggaagaagctgcccccgctgctcctgctgctgcgactacggaagagaccaaggaggaaccccccaaggcggaagagaagaaggaggaagaggtcgttatcttgagctctgctgctcccgagtcgatcacggcgcaattggctgccgaggtgcccttggagaagaaggaggagaaggtcgaggagacgcctgcccctgaggccgaggctaagccggaggagaaggtcgaggagacgcctgcccctgaggccgaggctaagccggaggagaaggtcgaggcacctgctcctgtcgccgaagagaaggctgaggagaaggccgaggccacacttgcacctgagaccgaggcgaaaccggaggaaaagattgaggagactcctgcccctgctgccgaagagaaggttgagcccacacctgcacctcagaccgaggccaagccggaggagaaggtcgaggagacgcccgcgccggttgctgaagagaacgctgagtctacgcccgcgtccgcgcccgaggctgaggctaagcctgaggagaagcccgaggtgaaggaagaggagaagaaggaggaaaccgccgagcctgttccggaggctaagcctgaggaaaaggtcgaggagaaggccgaagagaaaacggaacccgctcctgagcccgcgcccgaggctcagcccgagaagtcagaggagaagaaagaggaggctaccgaggctgcccccgagcctgttcccgagcctgctgctgctgtggaggagccgaaggcacctgaagctgccgccgcctctctcgaaaccaccgaggtcaagatcaaccctctccccgccgccgacggcgctgtcaaccccatccaactcgcccctggcgaggaagtccctaaggacatcaccaccgccgccatcgacacccacgtcacgctcgacaaggagtcgtacgagcaaagcgaccgcatccccggcctcgaaactgccctccccgctgtgtcgagcaccatgattcccgagtccagcttgcccgtcctctcggccagcgaggccgaggccgcgaccgccgccatcagcacggtgacccctgcggccaccaccgtcgccctcgccgccgaggtccccaaggaggcggaggccacggtgcccgaggtggtcaaggaaagccaagagaaggcccatgccgaccccgaggccagcgccatccctgaagaggtcaaggagaaggccgaggtggagaaggagctgctcgagaaggttcccgaagtcccgcccgccgcggagggcgttgcgatcgaagacccggccaaggctgtgagcgcagccgtggttgacgaaactaccgtcaccgaagctgtcgccaaggcggttgaggaggcaaaggagcaggcggaggtggagaaggcgatcgagaacatctcggaggaggtgcctgccgtcgtgaggaagtcgatctcggaggcgcatgtcagccccgaggcggccgtgaatgccgaggccgtggaggagaagaaggaggtcgaggccgaactggtggataaggtcgctcacaaggcggaggaggccgccgcggctgccgaggcgggccccaaggagtttgtggccggggccaaggaggaggtcaaggaggttgttgctcccgtgtcggttgtgcctgcgccggctgaggaggcgaagcccgctgaggaggttaagcctgtcgaagaagctaagccggcagaggagcccaagcctgctaaggaggccaaacctactgaggaggccaagcccgctgaggagaccaagcctgcggaggaaaccaaggttgcggaggaatccaagcctactgaggagagcaagcccgctgaggagagcaagcccgctgaggagagcaaacccgctgaggaagccaagcctgcggaggagaccaagccggctgaggagacgaagcccgcagaggaaacccaggctgccgaggagaccaagccggccgaggagaccaacggtgctaccgccgcggataagaagaagcataggctcagcggcttctggagcaagcttcgggccaagttcgttggtgcttaa

SEQ ID NO: 200 - DNA, 3125 bp, Scytalidium thermophilum
atgttcagtcaactcctaacaagcctcggcctgttggccgggttgtcctctgcaggacagaccatccagcaatacgctacggaaagacccctcggcgaatgccctgggtacagggcactcaacgtcaagaccactgccacgggtctgacggccgacctgaggctcgccggtccgccatgtaacacgtacggaactgatctggagaagcttcggctggtggtgacctatgaaaccggttagtgatgtccatgacaaggtccccggaagtcgttggtgacgagaaggctcacatgacaaccgcgacgcagagaaccggctccatgtcaagattgaggacgcggatgagctggtttaccaggtgcccgagtccgtctttccccggccagcaagccgtggagtgagctctaccaagtcagccctggtgttcaagtacaaatccaaccccttcagtttctccgtatcccgggccaagacgggcgaggttatcttcgattcatcggccgctcagctcgtgttccagtcacagtacctccgcctgaggaccaagcttcccgagaacccgaacctctatggactcggcgagcactccgaccctttccgtctcaaaacaacgggatacatccgcaccttatggtcccaggacagcttcggcacgcccgaaaatagcaatctatacggaaaccacccggtctattttgagcatcgcaagagcgggacccatggtgtctttctgctcaactccaacggcatggacatcaagatcgacaaggaccccaagactggccaatacctagagtacaacaccctcggcggtgtcgctgatctctacttcatggctgggcctggcccaattgatgtgtctcgccaatatgcagaaattgccggccccccagcaatgatgccgtattggggtctgggtttccatcagtgccggtatggttatcgggacattttcgaagtggtgagtgagataggcttcacttcgattcgtcatacgcttccatccggatatgcgtctcgtcaatatgacttggttatgtactcgacaaaatcactgctaacgttgtttgatccaggccgaagtggtgtacaactacagtgctgctggcatccccctggaaactcaatggatcgatatcgactacatggaccggagaagggtgagtacttctccgttggcctcatctggccaagtcgtgcgctttcatttctgtgctgacgtgacaccgtgtataataggtcttcacgaacgacccggagcgatttcccatgcctcttctgcgatcctatgttagccacctccattccaagaaccagcacgccattgtaatggtcgaccctgcagtggcttatgccactgacaacaatcccgcatacatccgcggagtcgaggataacatcttcctcaaacgcgagaacggatcggagtggctgggcgttgtgtggccgggagtctccgtattcccggactggttcgctgccaacatcaccaagtactggaacaacgaatttcaccagttcttctctcccgagacgggtcttgacatctctggtctctggatcgacatgaatgagccgagcaatttcccctgctacttcccctgtgacgatccctggacggcggctcaaggcttccctccgactcctcccgaagtccggactcatgcgccacggccgcttcctggctggccctgtgagtttcaaccagagggatcatcctgcaagcgggatatggagcctcgtagcatcgcggcagcggagccacaggctcgtggtgaagtagccattgcacagacacatgctcttccagcagcactccgcgctcgtgttggtggcaagtggcagggtctgcctggacgcaacttgctgttccccaagtatgccatccacaacaaagccgcctacatggattcgtggaacgccgaacaaggtggcatttcaaacaagacagtcaacaccaacctcatccaccaaaacggtctggccgagtatgacgttcacaacttgtacgggtcaagtaagcaccacacctttcttatcaatctttttgaaatattttctctaacaagacaacttccacagtgatgtccattcagtcccgtcatgcaatgctgtctcgccgtcccacggagcgccccttcatcatcacccggtcgacgtttgccggcgcgggcaggtcggtgggcaagtggctcggcgacaatttctccagctgggaacactaccgcgggtccatccgcgccatgatggcttttgcggccatctaccaagtcccaatggtgggtgccgatgtgtgcgggtttgcctcgagcaccaacgaagctctctgcgcccgttgggccatgcttggagcattcgcgcccttctaccggaaccacaatgagtacccgccggccatctcacaggaattctaccggtggcccattgtcgccgaggcggctcgcagggctatcgatatccgctaccggctcctggactacatctacactgccctgcaccggcagtccgtcgacggcactcccctcatcaaccccatgttctacctgtacccgaatgatcccaagacatttggcctcgagctacagtacttctacggccccggcctcctggtggcgcctgtcacggaggagggcgcgacgagtgtcgacgtctacctccccaacgggatcttctacgactggtacacgcacaagcggatccagggccgcggcgccacgatccagatcagcaaccagacgctcaccgatatcccgctcttcctgcgcggtggcgtcatcatccccgtcagaaccaagtcaggcatgaccacgacggaggtccgagagcagaatttcgagctgctcgtccctctcgactctgagggttccgcaacgggcgagctgtacctggatgacggaatcagcctccagcagaaagtgacaacacttgtcacgttcaagtacaagcatggtgtgttgagtgccaggggagagtttgggttcaaaacaaacgtgaagattacgaaggtgacggtcattggtgctggccgtaagagggatggtggggctgagggagagagtaccatcatcacggttgatcaggcgctcactggcgactttgacattttggtcaatgagctggagtga

SEQ ID NO: 201 - DNA, 789 bp, Scytalidium thermophilum
atgaagccgattgttctcgccaccagcttgctggcctctctcgctgccgcgcagcctcacggccacggccatcatcatttccacaagagactcgctgatcgccacaacaagcggggcattgtcacggaatgggttaccgagattgtcaccgaaacggtcaccgccctcgtggatgagaccaccacggagctgatcccgccgagcacatcggcttcatcggctgccgaggctgccgagaccactccggcgacctcttcggctcccgaggcccagccgcacgtcttcattgagacgccagaaccgtcgccggctccgacaagcaccaccacttccgaagctgcgccgccgccgccccctcctcccccgccgccgccgcagcccacgaccaccagtgttgaaccgcccgtccagcctccggttgagactcccagcgctcctggcggtggcaactccggcggcggtagctccagcgatgaaattttctcgggcgacatgacgtactacgctctgggccttggtgcctgcggcttcgacgacagcggcaaggacaacacggagaacatcgtcgccatgtccgcggagcagatgggctcgcagtccaacggtaaccccaactgcggcaggtccatcactatccgcgccaacggcaagaccaccacggctgtcgtccgcgacaagtgccctggctgccgcttcggcagcattgacgcgtccgagaagcttttcctggagctcttcgacgacctgggtgttggtcgcgggcacgtggagtggtggttcaacaactaa

SEQ ID NO: 202 - DNA, 4377 bp, Scytalidium thermophilum
atgaagtgccttccactcgttttgttatctggcgtctcggccatcgctgctctcggggcggccgagaatcccgtggcgcctttggagcaacgggatacagtcgccgtcacgtacggggctgaacacccatcgacgtggcatcaagaggcgaagcgtcaggagcctcctgctcctgtcaccgtctttgccaacgccaccttcggaaatgccaccgcggtcaatgccaccgcaaccgtgagtgaggcaaagctccgcgagctggcgagcaagctgaggctcctctatgcgtactacgccacttacaaggagagccgccagaccgggcttctcaacaacatcctgggcttggtcggcaacattctgcctccgctggaggatgtgacggatgccctgcgccgcgtcttaatcggagagaacatcagcatcaaggagcagcttgcgattgccaatgctctgggtgagtgagacgttcgaggttgtctgaggcaaagctgaccttgtgtaggggttggtgttgtcacgaaatacgtcacggtcaccggcggcgcgacgggcgttcctgctgccgcgaactttacggtcactgcaatcagtaccttgacgacgaccattgagccggccatcgagcaaccaaccgtgacaatcactgtgtcccccgaccctgagaccatcaccgagatcgagaccgtcgtggttgtgagcgctgccgacccaacaactgtgacaatcgaccaggtcctcgagaccactgtcacggaaaaggtgatcgttgagacgccggttcttatcgtcgagagctcaaccgagacaagaaccatcaccatctttaatgaggttgtgccttcgaccactgcagtgggtagcctggagaccgagctcgcttcgtgtctgggcgaattgtcgtcctgcctggctacctcgacaccgtcgacgtctgatggttctgaaccttctaccccggcgccttcagaccctgagtcgaccgcagatccagagccatcccaaacttccgctgtcgatcctgtggacagcaccgctgcggaaacgacgtcgacgccggagccagctcagacgaccacggcggaggaccctttgtccacgacgaccttgggaaacgacgaggatgacagccccactgctgttgacactactcctgggtcatcccccaccgatgacgtggaggagccgtccacaacgagctcgggaaacgacgaggatgacagctccactgctgttgacaccacccctgggccattgcctaccgatggcctggaagagccatccacaacctcggcgggaaatgacgacgaggattccacggccgttgacatcacccctggaccatctaccactgagggccccgaagagccgtccaccacctcgactggaaacggtgacgaagattccacggccgttgacaccactgccgcaccctcaactactgaggctgatgagccttcgcccacaacctcggcgggaaacggcgaagactcgagctctaccgccgttgacactgaaccgtctaccaccgagggcccggaggagccttcgaccacaacctcggccggaaacgatgaggacgaaagctctactgctgcgccgtcgactactgacgctgacgagccctcgcccacaacatcgacgggaaacgacgacgaggactctagctccactgccattgacaccgatggaccgtcgccgaccgagggcccggaggagccttcgaccacaacctcggcggaaaacgatgaggacgaaagctctacgacaattgacaccacccctggcccgtctaccaccgagggcctggaagagccgtccaccaccacgtcggcgggaaacggggatgaggatgatgacaccacctccacggccgttgacactacccctgggctcttgacgactgagggtccggaagagccgtccacaaccacgccggcgggaaacggtgatgaaaatcccacgtccgttgatactacccctggaccttcaaccactgagggcccggctgaaactgacgccagctccgacgtaacggcggctccaaccaccagcagcgccgaagagccgcagccaaccacttcggacgtggagactccggatttcgacgacccgaccacatcttcagccgtcgacgagccggagacatccggggcttcgactaccgatgataccgccgactcaacgtcgtcagtccatattccgacctccgctccagacagttctgagtcgccggttattaccacgccaccgagggattcgacctcgtcagcgaccccggctgaaacgacgacggagcctgactcggagaccactgccacttccgatgcttctccaacggatgaggaacctacttctgccgcttcagagtctccgaccataaccgagccttctgccactgatgatggcgaggagcccactaccgcacctcccaccgatggcccagagacctcgagcgctgcacaaaccaccggctctgaggaggacccaaccacaacgagcgacgttgaacctaccgcacccgccgagtcgaccttgacagatactcccgagacatctactgctgccgaatctacgggaggagaaaatccaagcacaatcagcgactctgagcccaccgcaccgtccgagtcgacccccagcgaagctgagacctcgaccgcgcaaaccaccgcctccgaggccgattcgagcacagcaagcgagtccgagacacccatcacgaccgaggccccctcgagccctgctacctccagcgccgcctcgaccgaggactccacccctgccaccgagtcccaggaaagcaccgacacaagcttggtcgatgtgacagggtctgcccccagcaccaccgactccgagaatgacacgaccacaactgtgacgtcgaccgtgacatccacgacgatcgtgaacgagcccccagcagacactaccttggactcggatcctaccacggccgactcgtccgcgtctaccccaagcaccgaggacccgtccagcacgggctctgatgccaccagcgacgcaaccaccggaccgactcctgcggcctcaaccccgcccgcaacttctggcgccgacaccaccgcgcaggaaaccgagtccgacgcgacgagcgcccctacgtccacgaccctcgtgacaagcgtcgtctcggattcctcggcagagaccagcacgacatcgagcgcgccggcaaccacgtcggccgccccagtgaccgagcaattcgatgacaagattgccgtgtatttcggcatgccgccgcacgatcggaagaaggttcgccggtcgttcaacttgtttggcgcccgccacgacgacaagccgagtctcgcggagctatgcgacgatccgaacgtggatatcgtgatcctcgggtacctcacggatgtcaggttcggctgggaagtcaaggtctatccgcggttggagatggtacgtttccctttgtcaacgccatgagcacttctaacaaactgccaggaccaccgcttcaccgccacccaaacctccgccatgaagaagctcgcccccggcctgcactactaccccgccctcgagaccgacatccagcactgccaggaaattggcaagcaggtgctgatcagcatcggcgggccgcacgccgacatgccgctcgactcggacgagcaggccatcgatttcgccgacaagctctgggagctttttggcccggttaccgacgccatcgatccgtctctccgcccgttcggctcggcggtagtggacgggtttgatctgagtatgtccatttaccgtccttccgtccttcactctctaacccaaccagacaaacacgacgaatgcgcctccaactacgacaccctggccaccacgctgcgctcgcacttcgccgccgaccccagcaagacgtacctcctgacggcggcgcccggctgcttgtacccggacatgtcgatccatccgggctatcttgcgcaggcagactacgtgtggccgcggtactttgacaatcccaagtgcgacgttggatcccctcggttcctcgactccgtcaagacctggtatgtcgcccccaaataccatgaccccttacggaaagttctgacacacaacaggtccaccgtcctgcgcaccaactccatccccgcaaaccacacgcaggcgcagctgctcatcggcctcgaagtgcgcgccgatctgtttacctcgtcgggcagcccggtgacgtcggcgctgctggcggaggcgcgcgaggcggcaggcagggacgtgtttggcggcgtggccgtgacgccggatcgcagcggggtggcgctgagcgagatcaagtttggtggggaggggttgttgagctggttgaggaaggttttgggcggggggttgtga

SEQ ID NO: 203 - DNA, 878 bp, Scytalidium thermophilum
atgaagctctccctgacaaccctcctggcctctgccctgtccgtccagggtcacgccatcttccaggtgcgtgcctttcaccacccacatcatcatgatgagcctcaaagttgctaacccccgttgggcagagagttaccgtcaacggccaggaccaaggctcgctgactggtctccgggcccccaataacaacaaccccgtgcagaacgtcaacagccaggacatcatctgtggcgctcccgggtcgcggtcacagtccgtcatcaacgtcaatgccggcgaccgcatcggtgcctggtaccagcatgtcatcggcggcgcccagttccccggcgacccggacaacccgatcgccaggtcccacaagggccccatctccgtctatctggccaaggtggacaacgctgccacggcgaaccaccagggtctgcaatggtaaacatacctctggtcaagtcagaacctctgtgatcgccgagacgactaacccctctttcccataaacaggttcaagatctggcacgacggcttcaacccctccacccggcaatgggccgtcgacaccatgatcaacaacaacggctgggtctatttcaacctcccgcagtgcatcgctcctggccactacctcatgcgcgtcgagctgctcgctctccactcggccacctaccagggccaggcgcagttctacatctcgtgcgcccaggtcaacgtccagtcgggcggcaactttactccctggcagacggttagcttccccggcgcctaccaggccaaccaccccggcattcaggtcaacatttacggcgccatgggccagccggataacggcggcaggccctaccagattccgggcccggagccgattcagtgctga

SEQ ID NO: 204 - DNA, 1404 bp, Scytalidium thermophilum
atgtccatcagtccgttctttgaaaactgcaacgccagcccgtgcctgtcccaggttgccgggctggtgaacggggacgcccccatccagtatgaggcctgcacatcgctgtttggggtgccgactgtgaccacttagtatgtgatatgaccatgttcaagactgttgattgtcaggaaagcgaatgctaacaaggcaccaagcatcccccctgtgtcgactgactacacgacgatcgtggatacatccacctacattgatgtgatcgtcgaggtcagcacgacgtataccaccgagcagctgctgtcgaccctgtaccagtcgaccaaggtcactaccacgcagttcacctccaccaagacggtcacgtccacggtaaccacgacgaattacaccacttcggggaagggcaagcggaggaagaggtccgcctgcaagccaaagtcgtccagcacattggcctccagcgaggccgagactacgcctgcggaggagaccactcctgctgagactactccggctgaggagactactgctgccgaggagaccacgcctgctgaagagaccactccggctgaggagaccacgcctgctgaagagactactccagctgagaccactccggctgaggagactaccccggctgagactactccggctgaggagactactgctgccgaggagaccaccgccgtcgagaccactcccctcttccccacggccaccgactgcccgagcctcgaggagtactcgtcggcctgctcgtgcatcggcgctgtcgaaacgactatcactgagaccgccgaggctgagaccactgtgctgaccgagtacaccaccaccacggtcacttcggagtccgtgtccctggagaccgccaccatcaccgtgacgacgagcatccccatcacggttaccgtcaccggcacggcgaccacgaagaccaagaccacgaccaccattacctccacgaagaccgtgaacaccgccctcccgacttcctggtgggtcaggtctcttcgggtcgaccagccgcccgctctcgccggcaagaacgtccagttcaccggcaacggcaactctcccaaggacggcgagatcacgaccggcgcgggcacctctctcaatgtcaagtccactgggggccagccttatctgaccagcaactcgtccttcaagctccgcttggagcctggtcagggccttcagcgcaggaagctgcagctccgctccacgaccggcggcgctgcggatgttacctgctcttttggcgtcaacctgatcctctcgtgcaccggcaacggctggacgcgtatcatcgagtgcgatggcgatctctacatggcctcgaactcgtatcagaacgcgcagtgccaggacgtcgtgttgaggttggctgcttaa

SEQ ID NO: 205 - DNA, 898 bp, Scytalidium thermophilum
atgaagaccacgaccctgacgaccgccctcgcctacgtggccgcggccgtggccaagcctctcgagccgcgtcaaggcactccgggctctggcccctttgctccggctgtacgtcctctcccacatccaatcctctccaccccagagaaacagaccagctaactcctcccaggggtggtacaccgtcggccagcttcctcgccacaccatctacgccccgcgcaacacgccccaggacgccaagctccccgtcctcctctggggcaacggcgcttgctcggccgacggtctcagcgcggtcaacttcctctcgcagatcgcctcgcacggcgtgctggtcatctcgcagggcacaccgtggggccagggcagcacgaccggccagcagatgcgcgacgcgctcaacttcatcacgtccccgcaggcgcgcaacgtcaacgccgactttgccaaggtggactcctcgcggatcctggccgcgggcttctcgtgcggcggcatcgaggcgtacgagcagatctgggacgaccgcgtcttcggcgtcggcatctggaactcgggcctgctcaacaactacgagcaggcgcgcaacttccgcaagcccgtcttcttcttcctcggcggaccgtccgacatcgcctaccagaacggcgagcgcgactacaactacatgcagcccggcgtgcccaagtggaagggcaacctcaacgtcggccacggcggtacctatggcgactacaacggcggcaagttcggcacggcggccagctactgggtcgagtggctgctccggggcaacgagacggccaagtcgttcttcacccagggcggcgcgcagcgggatggttggcaggtggtgtttgcggatctggatcggattcaggtcaacccgatttaa

SEQ ID NO: 206 - DNA, 1449 bp, Scytalidium thermophilum
atgctcctcctcctcctcctcgcccttcccagcctcccaggtctgggagccgcccaacaagcaggcacagtcactacagaaagacaccccaaactagcctggaagcactgcatctctcccggcacgtgtttgactctcgaaggtgaactcacgatcgactcgaactggcgctggacctacgacagggaaacctacgacgactgttacagcccctccagtggttggaattctgccgtttgcacggatggccggggctgtgcggaccgttgcgccctggatggggtggataactatgcagagagatttggggtctttacctgcagagactcggtgatgctcgagtttacgaacgcaggggatgagggtgtgtttacctcccgtcaccagatggaaacgacgctgaccaccaaagccgtcaacatcggatcccgcatgtacctgatggccactccgaccaagtaccagacattcagcctccttggcaacgagcttacgtttgacgtcgacacttccagactcgggtatgtgacgagcaggcacagttaccggtccagggctgacaaacggcccaacaggtgcgagatgaacggggctctctactttgtggccatggacgaggacggtggcatggcaaagtacccgggcaacaaagccggggccaagtatggcacagggtattgcgatgctcggtgtccgcggggggccaggtttgtcaatggcgaggccaatctcggcagtcaaggtgtcaggacgggccgggatggctcgtgctgcgccgagatagatgtctggtacgtccgtctgcgtgccatgttggatcttcgctgtagttggcatccagttctgaccggttaccaggcatggaaatgtcgtttcgaccacattctccgcacagtcatgtcgaaccagcggccagggcacatgcgaaggcaatgatgggtgcaacactgccatcaagggctgcgatgaaaatgccatcacgttccggagcagcctctacggccctagccgggggcacatcatcgactcgacgcgcaggctgacggtcgtgactcggttcgtgccgggtcccaacaataccctggccgagatccagcgggtgtatgtccaagacggactgggtgtttccgagatcgttgccgaacaatctaatcccaagcaacttggcaacacgctctcccagcctatggtgttggccatggcggtgtgggatgactaccatgcgaatgtgctctggcgagactcggcagcgacaggactggtagatggtgaatgcgaaatgacggcgggagcgccgagtgagattgagctggaggatcatatcggaggtgggaattatgttgttttttgtgggtatacccctccgaacttgtgagggagatttgctgactgatcgcggtagccaatatcaggtttgggccgataggatcgacgctgagactgacgtag

SEQ ID NO: 207 - DNA, 1108 bp, Scytalidium thermophilum
atgccttccctccagactatcggcctggccgttctggctgctgcccaagccgtctcggccgctaccgccggctgcggcaaggctcccccgagctcgggccagaagaccatcaccgtcaacggccgtcagcgccagtacatcctgcagctgcccaacaactacgaccgcaacaagcctcaccgtgtcgtcttcggctaccactggctcgatggctccatgaacgacgttgccaacggcggcttctatgagctccgccagcgccagggcggctcggacagcaccatcttcgtcgccccgaacggtctcaaccgcggttgggccaaccagggcggtgaggatatcgccttcactgacgctctcgtcaacatggtcaagaacgacctctgcgccgacgagacccagttcttcgccaccggctggagctacggcggtgccatgagccactctgtggcttgctctcgtcctggtatgttcttcccccccggctcactctgtcctattgaaacattagtctaacattgtcgcagacgtcttccgctccgtggccgtcattgccggtgccctgctctccggctgctcgggcggcaacacccccgtcccctacctcggcatgcacggtgctgccgacaacgtcctgcccatcgccatgggccgtcagctccgcgaccactggatccgcaccaacggctgcgccaacaagaacgctcccgagccgtcggccggccagcaggcgcacatgaagaccgtctacgactgcactcgcgcccccgtcatctggatcgccaacggcggtggccacgtccccgaccccaccggcaacggcggccagaagttcgctcccccggagacctgggacttctggaactcgatcgctggcctgcccggcaccggcaccggcggcaccccgaccaaccccggcaccccgaccaccatcgtcacctcggtcatcaacaccccgacccagcccgcctacacccctcctcctccgcagcagaactgctcgcctcgctggggccagtgcggtggccagggctggcaaggcccgacctgctgcgaggccggctctacctgccgccagcagaaccagtggtactcgcagtgcctgtaa

SEQ ID NO: 208 - DNA, 5924 bp, Scytalidium thermophilum
atgctctacctcattgtctttctgctgtcacttactaccgcccttgctcagcaatcttttcctggaggaggcggactctgttccgatgccattccatgcaagattggatgctgcagcaagaataaccaatgtggcttcactccggagcactgcggcgagggctgtaaacacgactgtgattccaaggctgaatgcggccagtacgccgaacgcgggaacaaggactgcccgctcaacgtctgctgcaggtacgagatttccctgaggatcttgtgagcaagtcggaagcatggtgacgctaattaagaggatagcaaatggggtttctgtggcatcacggaggacttctgcggcgatggctgtcagcggaattccgatggaaagggttgcggtgcggctccgtgagtatccctcactcatccgtggatgcatgctctcctctctgacacgacgtctaaataggcggccagctgagtgcctagtcgaaaccaacgcactgaaatacaagcgccgcgttgcctactacatgctccctgactatatggagcgtgtgaggggttgccatatgtttatgcccgaagacctccttgtgactgggctcacagacatcaatgttgccttcatcaacttcggagaggatttcaagcttgtggatgccggcggcgatatcgtacaccgattggcaaaactgcgcctagaccatcctggtcttcatgtcagcattgcgatcggaggctggacctttaacgagggcgaaaccgcggactactggtcaaagagtgagtaataaatcctgaaagacgttttgtctttgaagtgtgactgaccgacaaccagtggcaagcacctttaccaatcgccataccttcattacctctgttgttcaatacctcatcaagtatgggctgaacggagtggatctgggtatgtaatcctattcaacactcccctgggggctctttgtgtccaggagttgctgacttctttggcgagggaacagactgggaatatccagtggcagtcgaccgtgctggccaccctgatgatttccagaacttcgttcttctcgtggccgagatgcgccgtgcgttcgatagggaggacccggggtggaccattacccttaccttgccaacgagctactggtatctgcgcggcttcgatctgcagggactgcaaaagcatgtgtcctggttcaacctcatgtcctatgacctccatggcatgtgggattatggcaacaaatggaccggcccatatctccgaggtcataccgaccttgacgagatcgacctcggccttgatctgctctggcggaacaacatcaagcccgagaatgtcgtccttgggtttgggttttacggccgctctttcaccatggctgatcccaactgccatcaacccaatggcatatgccagttcaccaccggcggcaaccctggcatttgttccaagactcgaggcgtcctcacatatcaggaagtttggggtcgcaacgacagctcggacgcacagacctactacgaccccaaaaccacagtcaagtacaccgtctttgatggaaatcaatggatctcgtatgacgacgcacaatcctttcacgacaaaaaggtcttcctctccaaacgctgtctcagcggcctgatggtttgggccctcaatcaggacaacggtcactttgacgcctatcatgccttgatgggcgatgtgtcacatctggagttcgatggagctgagaacagcgaggaagaaaaagaacgtctggcgaaggagttggccgcttacacaggccagaactgctttgtcaccactcgctgcaccgatggatcttcaagggaacaaggcatcgaccaagtgtgccctggaggaacgcagtcagttgccacagcccacgcaccgttccagctacgatatagcatgggaggcggcgagaaatgcaagaagggctggttcaagcacatctgttgtcccaaggatgcggcgcccaagaactgcgagtgggtcggagttccggagcggaacgtgttggggtgttcgggggtttgtggtcgcacgcagttcaaattggccaccgacacagcccgagatgccaagggagaggccatgtgctatacgggaacccgtgctctctgctgcgactcgaccgcaatcctacacgactgctactggacctcctgtcaggacttgcgaagtgggatgccgacctgttctaagagctacaagttcctgcattaccgcctgaacacgcctgatggaacgggttactgctccaggacctttggtagttccgaccacgagagatatgggagcggcttgtgctgtccggacacctcagcgttctccaactgtcgctggtccaacgatccaggccgaaagagtcctgcgcctgcagtgcccgtgtccgtggactctgcgtgccaaccacgcccgtgcaagagcaacgagatcaaggtcgcggacgcactggatccgcccaggtcatccttcttggcatcaggacagtcctgcgcaggagtcaagtaccctcccggagtcgaactctctcaccatctgtgctgcgaccctcccactcgattcaacaaaaacgctcccgttgcaccagaaaagctgttcccaacgcactacggtcaccacgatgagtacgacctgcagtggcattacaacgatgattaccgccacaattttagggacgatttcgacgacccgactgaagacggcaaggacgccttcggcttcatcacgcttcatgggcctgagggttcgcttgacaactccttctcgacgacgtacacgtttgtcagcgaaaagcgcgaggttcctaaaaccaagcggtctctcataaccctcgaccaaagcgtgctggacagcgtgtttgacaacgcgactcaggtcttacatgtctactgcaactaccctgctgggtcgccagagtgcgacaaaatttggatcgacggtgccgaggacactatcatccggcttccgaatcacgtcggtgaaggcccctttgcgcgcgttgtctcgatgaaaccagtcagctccggcatgaaactgccgcgacaccatgtcgaacaccgttccgctgacggattgcatgagaaccccgtctacgaggtcgtcattgattacaacttcgctgctatcgcgcccaagcgggaggacgaacccatcttcatgcgcgtcgactactctaacatgctcacctactgggaagaggttgtggaggccgagccagaccgggccaagcggggagagggaaatgtcctgaagagacacaccactgatgagtggcacagccgcgtccaacgggcggctcaaaagcacaaagctctccgcaagcgctctggagcggtcaacatctcggtgcccatggaccccgtaatggatgaggtgggcaccgaaaatagctcaagaaaccagaagcgatggttcggcagctttggcaaatggctcgagaaggtgaccacagttgagaaggcggaattgggccatcttcctctggggtgggcagattcaatcaacctcttccgagctcaatatggctgccctgggcaaaccttttcggccaatttgcgcatggatctggaggcccagctcagcatggacgtcacctacgcctactacttcgtgggtagctttattccgccgagcaaacccgatgtgtacgcctatctcagcatttcgccgaaaggctacgtgggtcttcgcatggagggcaacgcggtcatgcagatgacctcgggcaaaaagaagctcgtcgacacgctggcgtatccaggcctggccatcaagggtatcgctgccgtgggcccgactatggatgtttttggtgaaatccgaggcaagatcacgctccacggcgaggcgagggccggcgcgaatctttggttcggctatgcacaggtgtactggccgcagaacgacgaggccagccagcggtacgagaagctgctgggcctcgacaggagccttcatgctcctgaccccgagttcatcactcccacatttgaggctggcgtcaggctggatgcgcagctggatgttattgtgcagccccaagccaatatcggcatcaaaatagggggtggtagccttctcaagaccaccatcatggatgcccagctgagcggctaccttacgggcgatctctccttccaggcgtccagcgacgtcaatactggcacaaactccttccgctactcgtatggcgtgtacttcttctacaacatcggctacacggctaccgccaagatcctgggtctcattgactgggctctcggtcctcgcaaggcctggccccaggaccaaaggataaatgtttacggacctatcaacggttcgataccgctgacgaagcgttctctcgatgctgggttggagtatgcggtcaaccgcagcatgttgttgcccagggcaggtgataacggaaatggaaatcaaggagctctgagtaagtgatcatcgaccgcaaatcccaggtagaacagctgtccaatgctttgttctaatcacaccttctcccagctccaaatcaacccgtgttcagtcagaacatacaatgtcctccgggaggatctgcgcctgtcaggctccccgaacttcgatgtatgtttctcttctgcattctcatttcacagcttcggtactaaggttgttacaatggtatcaacagtcaattgcgaccgttttgggacaacagtaatcagatccctcgttaccggaaatcttcaccctatagttgggatgtgcgatgggtggaagcgaatgcgcaatagaccgacaacattaacctactctggcgcaaagcacctcgtagaggagcgacggaaagtccaatgcaaatctgggttctgcaagggcgcctctgagcagttcgagaaggccaccggtctcggcatcaaatcgccaatgtcctgtgacgaagcgccatgggcctcaactgaagagggaggcgactttcttgataaagcagatcgaaccgcgacttgcgttcccagctacatgaactcgggctttggtgggaattgccagagtgagttggacgaaaacacctgcctggcttttatccttccatgaacatgctaaccgttttatacccttgctcctctgtccacgcagagcttgtctcaaatcttgtgagcaactggggcaagttagatccgacaatccctaacgacaaaaaaaaggacaactgggtagaatggaagacacctcggcgtatgtaccctgccctcgttccacagacatccaatttcctggtatctcgtgaaaggctcctggcgcattgacctttttttgtgccctgaggaaacccttcaataaacaatcctaatcccggaagctgacgtcttccagcgtggacttcacaaactcgattaggcgacaacgaaaaccgccccgtcacttaccccaaccgcatgcctccgccagagggtatggtgggcaggacagacgaatacgtttcctggatgttccggcgcaattacacctggtctatcattgacaacagtgcacagtcgagtcagtggtggggggtaactggccgcgaatttaacaacaagaaatacaagccacgcccgggccatgatgccatcctttgcgccctcaacacatttggtcaagacgatttgttccggatgccgaagtataacggctactgccttcaagccggcacgcatgtttcatatcattggccggccatcccgcaaattggaaggtgtctgatcacgtttgcgccgccgacaacaacgacgacaacaaagaggtcggatgggtctgagtattatgacggttgggaagttttgagtaagtggctctgtcccgagtccttgaacacatccaggcttgacttttctgtgccatgaggatggggtgttgcaggttacatccgacaactgcggacttggctggacgagagccgtggctga

SEQ ID NO: 209 - DNA, 1887 bp, Scytalidium thermophilum
atgatgctattcaggacccagacctcagtcgtggcggcgtcgatggtggcggcctgggcctaccaggttgctgccatccaactttggaccgcacccgcagcgatacctacaagtgtgccagcacgctgtcgggctgctctggtgcagaacattacatgcgccaactacctcgtcactgcgggcctagtgtctagcggagccgctctggaggacgatgaggctgcggaatactgcaccaacacctgttacgactccctcaccacattccaaagacaggtcacggctggctgcggcaccgagatgtatgtgttgcacatgaacagcacctacatgcaatcgccagccgaactggcgaacagcctagtttgggcatacgacgtgagctgcattaaggactcgtgagtgtcttctgaggatgatggggttatgatccatgactgactgacgattacaccagagctggattctgcctccggagcctttatgctggtctcaaagagctgtgctctgactgcaccctcaaatatgccgctgcgatgctcaactcggagtacggcaggcagcagatcagtcccgaagcattctctgagctcctgtcatcgtgcagcgccaacccgaccagctacacgtacacatacacctcaacttctgtcacgaccaccagtacgagttcagcagatgagccattaccgacatgccttggagagacctacacagtcaaagccgaagacacatgcctgtcaatctccagagataagggggttggcacagacctgatgatcaaccgaaactacctggactacaactgcacgaccttgtcacctggaatgtctctctgcctgcaagacaagtgcacaatcaagacgttggatgagaattcgacgtgctccgaactcattcgcgaccagccgtttggtctagttcaactactttcctggaacccgtgggtaacacctcgtttccgaaacctccccataaaacattactaaccgcacaatagatccattcacaggaactgcgataatctggactccatgatcggacgaagcatctgtctttcgttggttgccctccactcggccgtttgactgaccaggctaacgtcagtgtcatttaggcctcctggcggcggtacctacgacgtcaatgtaactgatacatactatgaatattacccaacactgttcgtatctatcttgctacgactacatctgatcgtcatgacaagagactaatccatctgagaacaggacaagctcactgatctctaattgggtcaccgcagttgacgacgtggggaccatcagcttcaccacatcttggtacactcccacgctcaacctgagcgcaacaccgaccccttggctgacgatcacatacaatgagacactggcgtcggaactggcgcaacaaacacaatactgttggctcaacgacgacgactttgccaacggattcaacgaagaggactatcccgaaggttgccagtctctcctcagcgtatactgcttcccaacccccggtgctcctgtgccaacctctcccgcgcgcattccggccatgtgtacacctgacaggtcagaatatataataattgatgatgatgagccacctgcctcgacgacgagtgcgcctgcgacgactccgacgccatatcagcccaatatgatccatggctgcaagcggttctacaaggttgtcagcggagatacttgccagaagattttagatacgtttggcctttccctgcaacaggtgagcagatctctatgactctgcgtcccacgatgacatgctgatagttctcagtttgttcaatggaatccagatgtgggcgaggattgtcgcacaatgttcctcgactactatgtctgtgtggaggcttga

SEQ ID NO: 210 - DNA, 1919 bp, Scytalidium thermophilum
atgatcgtcaccaaccttgttggagtgcttctccttgcctcgacaggcgcttcccgctccatcacgaggagggcatgtggtttctcggtcccagcggaggcaggcgatacttgtgcctccatcgctgagttttggggaattaccgaggcagagttcatcgcctggaacccctctgtcggcgcaggatgctccgccggcgtcgtgcctggactggagtactgcatcgaatggattggaccgatcacgaccaccacctcgtcctcttcatccacttcgacgaccaccaccacggcaagaacgacatccacgacgagcacgagcgccggaccatcgccaactcaagacggcctcatctcgacatgtacgttcacagtccgtcgaggcttggttttcttaccccaccagctaactggacatgcaggcacaaagttccacaaggtcgtctccggcgatacttgccaaaagattgtcgacaaatacggaaccttcagcctgagggacttgtaagtgaactcataagatcgcttacgactgggagggtcttgaagggtgttctgactggctttgcagctacacttggaatcccgctgtgggaacaggcaagtagttcctcttgatggattcggtaaagactggacgaggatcgctaacacaatcgactggtgtaatcagagtgctcctatttgatgctggactattatgtgtgcgtggggatcccaggaacacccaccactcggcctaccactagtacctcatctacgatcacgaccacttcagttccaacccagtctggcattactcgtgattgtaagtcagctgaagaattcgttactcttacttagcatctctctccaacaaagacctcttttaacggtgtattcaggcacgacgttctaccaggttgtctccggtgacacatgccaaaagattgttgataaatatggaaccttcaccctctcaaacttgtgagtccccttttacgtgttgagctcccccacgtcctgacaagctcgcagctactcttggaacccggccgtgggatctgattgctccggactccaaccgggcgtctatgtttgtgtaggcgtgcgcggtaccccgacgacgaggcctaccagtacccttccgtcccctacccagaccgggcttgtttcgaattgtacgtcaatggatagattctcaaattatccaatctcccgcttcaaataaacttactgctaactcctcgaaaaggcagggatttctacaaggttgtccagggagacacatgccagaagattgttgacaagtacaagaccttcacgctcaacgacttgtaagtgtctaatccttttgtagtacattactcatatactaatccaacatgatagctacaagtggaatcctgctgttggcactagctgcaccaacctccaagtcggcgtttatgtctgcgtcggaatccccagcacgcctacgaagcccatcacgacttccaccgctcgcacgacctcgacatccacccggaagacttccacttccacccggaccacgacgacgacaagcagtgcgccaagtccgacacagcctggaattatctcaacctgtatgtcacccactccgagggcctctgccatcctacttatgcacatgcaccggggacacagctaactggatcgatctctaggcaacaagtattacaaggtcaaatcaggagatacttgtgacaagatccgcgctgcgcacaataatagtttcaccttgcagcagttctattcctggaactcgggcgttggtgtacgtttctttcctctgcctcctgttcccacacctgcatctttgaagctccatcctgtgaacacgtttgctaactgttccgatagaacggctgcactaccctgtgggtgggatactatgtctgtgtcggcgtccgcaaatga

SEQ ID NO: 211 - DNA, 1518 bp, Scytalidium thermophilum
atgctgcccgttctcgccggaatcaccttgttgtccttcgggctcattcccggggcttctggtttggagcgccgcggcgacggcatcgtccgcgctcctgtccgggccattcccggcgatccactgccgaacctgcggggccgccagaatgccatcgacgtgatcaatcagcttaatgggacccggtacgccgtcgaggtccaactcgggactccgccccagactcagtacttgattctcgataccggatcacccgacacatggttcaacccaacctgcgcgacgtcgcgctcggccgccgaatgtaggagatatcctaggttcgacctcgacagtagcagcacgctggtggacctgcggcagagcagtctcctccgttatggaagcggccaggccatggtcgaatggtatcgggacaccctcacaataggatgtatgtctcactgtcttctgagtttggtctcaccttgggccgtcgactaactcctcatagctgccgagatcaagaatcaaattgtcggaatcaacgtcgactcagaaaagattcccctcggtattcttggagtgtctccctccgtccacggcaccaacgattacgactacgtccttgatagcatggtgaagcagggtctgatcaaatcgcgcgctttcagtctcgacctgcgcagcgtcgagaaccccaatggcgccatcatcttcggcggcattgacacggggaagtacatcggctccctcgccaaactcccaatccttccccagaaacagtccccgcgcggcggcaaccggtactacgtcagcatgaccggcgtcggcctcacccttcccgacggaaccatcctcaaatctgaagccatcgaaacaccagtcttcctcgactccggcgccaccctgtcccacctcccgacgcggatcgtccaggccctggccaacagcttcaacgactctgcctacgaccccgagatgggatactactacctcccctgctccgcgacccaactcaacgcgtccatcgacttctactttggcgacaagggcatcagtgttccgttcaaggaattcatctggcaggtcggaccctactgcctcctcggcgctatcgctgaagataccgaacccatcctcggcgacaccttcctgcgcgctgcgtacgtcgtgttcgatcaggaccagcggaacctgcacatcgcccaagcggccaattgcggcgagaatctggtgccgattgggacagggaagaatgccgtccccagtctgacgggagattgtaccgagctgccgacgccgactcacactggatccaagagtgggagcgacaaactggacgttacagggacgcacgcgccaaccgcgactattacgggcgtagtgccggacttggatgatggtcctggaccggcagcggatggaaccgagtcgaccggaccgtcggagacgaatgctgctcccgctgttggcaagagcgggatgggcttggccgcggctgtggctgtggcgaatgtggtggcttttgcgctctag

SEQ ID NO: 212 - DNA, 657 bp, Scytalidium thermophilum
atgaagctcctctgtgtcctggccggtgcgcttggtctggcagctgcacttccgagtagcggccacccgcccaccacagaacatctagagtttcacaacaacaagagaataaccactcgtcaagtcgaaaccgtccggaatgatctagaggaaggtaacccagctgcctgtccacgcgttatcctcatctatgcgcgggcgactggcgagccgggaaatatggtaaggctctccgagtccctcaacacagagataccaaccatgcaaaattaccccttactaaccattccccagggcatctccgccggtcccaacctcgccacctccctaaccaccacctaccaatccaacggcggcatctgggtccaaggcgtcggcgacccctacctcgcccaaggtgcacacaacttccttcccctcggcaccactcgcgaagctatcgacgagggcaagcgcctcttccagcttgctcacacgaaatgtcctacctcggtcgttgtcgcgggagggtacagccagggcacggccgtcattgtcaacgccatcagggagttatgggacgaggaagcagcaggtgttggggagcaggtccagggtgtggtgttgtttggatacacgaggaatgagcaaaacggtggaaagatccccggcgggtag

SEQ ID NO: 213 - DNA, 2163 bp, Scytalidium thermophilum
atgggcctccttcgtgtggcatttctgtcgctcgtggcactcaccaccgcggcgagtgtgcccaagcaaagagtcagacggcaggtcactgaactccgttcgagctatgactttgtcatcgtcggcggcggtacagctggcctgactgtggccaaccgaatttcggctgcgctcccatcaagtatgtcattgcccgggagttgacattccttgtgtcctggttgacgctgaccttgtcatcgcagaaaatgtcctggtcattgagtatggtgatatcgccgagcatacaccgggcggattcgacccgccggtgaactggggcgaaggccacccggaccaggcaccgagatggtcgttcaattcacttccaaacccagctatggggaatacaacggcgttcgtcatggcaggacaaaccttgggtggaagtgagtcaaccctaaccctgaaccccccaaattccccctgaacattctcacaaccatcacgacgatctgaaccaccacgacgacgactaaccgcgtgaaggttcggccgtgaacggtatgttcttcgaccgtcccgcgaaagaggacatcaacgcgtggcatgaattgcaaggtttggcggcattggggcctatcaagtggaattggaacggtctctacccctatttcaagaagagcgtcaccttcacagaaccctcccctgccgttgcttcccaatacggctacacctgggacgtctcggcctacggcggatccggtccgatttacagcacctacgcgaccttccagtgggccgacgaacggatcctcgccgaggcctggcgcgacctgggaatccaggaccagcaagagtgcgcggacggcagcaaggagggtatctgctgggttccggcatcgcagcatcccatcactggtgcccggtctcatgctggcatcggccactatcaggatgtccagcctcggtccaactatgacctgctcgtcaagcaccaagtcatccgcgtggtctacggtcctggcggccccctgagcggttccgcgccaaaggtcgaggtccggtcgttggatgacgatagccggttcaacgtcacggtgactggcgaagtcatcatctcggccggcgccatccatacgcctaccgtcctccagcgtagcggtattggccaggcatccttcctgtccagccgcgggatcccggtcgtcgtcgatctccccggcgtcggcgccaacttccaagaccactccggcccatcagtcaggtggaactacaccgaggagtacgcccccggtttgtggccgctgtcatccgagatggccaagaacgcgaccttcaaagccgaagccatcgccgcctattccgagacccctgctgccggtccttataccctcgccggtggcaacagcgccatctatgtctccctcccgcacctcgccggccagaccgtcacgaagcaaattgctcgcaagatccggcaacaggtcctgaccggcgccgcggcctccttcctccccgccgacctgcgcacgagcccgaccatcgtcgctggctacgccgcccaactgctcgtcctggccaagctgctggaggaccccaactcccccagcctcgagacgccgtgggccatgtccgagggccccgtcacggcgtggaacttcctcctgcacccgctcagccgcggcacggtgaggttgaacccgacggatcccctggagccgccgattctggactaccgcgcggccacgaacccggtggatatggacctccaccgcgcgcacgtgcgcttcctccgccaggtgatctacaccccgacgctgcagcagtttggtgcgattgagctcgggccgggggcgtcggtggctgcggacgatgacgatctcgctgagtacatccagcagaatagcctgctgtcgttcatgcacccgtgctgcaccgcggcgatgatgcccaggttgctgggcggtgtggttgggacggacctcaaggttcacggaaccaagcggcttcgcgtggttgacgccagcatcatccccttgaatccggccgcgcatttgagcgcgacggtgtatgctattgctgagaaggtgagtgaatgccctcgttggagttggtgacggtggtgaaatagtactaacgtgcgaacaggctgcggacattatcattgacgactggagttaa

SEQ ID NO: 214 - DNA, 1526 bp, Scytalidium thermophilum
atgaagtacacactcgccggctcagtacttttatacgcggcgacggcggccgcgcagagctgctctcaggtgctcgtgccctccaaggcgaaaccagttgtggctgaaggatggcaggcccagcttgtcgccggcggtttgaccaagccgcggagtctggtctttgacagcactggggccttgctcattgttgagagcggaaagggcatcagccggcaccgcttcactgacaatggcggtacttgcctccactcgaaccactctcacatgctggttgagatgacgggagtaagtcaccctcttcaggatggcagaacagaacctcgactaacgtttccagcttaaccacggcattgccctctccgacgacggcgagaccctctacgcctccaccgccgaagccgtctttgcctggacctacgacgcccgcggcggcgccgtccgcggcgaaccgcgccgcgtcatcgccaacatgagcaacagcgacctggtcacccgcacactggtcatgtcccgctccaagcccggcaccctaatcgtctcgcgcggtagcgccgacgagcacgccctccacgccgagaccatctccagcggtctgtcccaagtccgcgcgttcgatctcaccaacctcaccagcacctctgccccctacgatttctcgtcccagggtatcgtgctcggctggggtctgcgcaacagcgtcggcgtcggcgagcatcctggcacaggcgccgtttatgccgttgagaacagcgtcgatggcgtcaagcggaatggggtggatgtgcatgagaacaaccccggcgaggagctgaacttccttggctatgccaacggcacggataccggcaagaactttggctacccacactgctttgccgtttggcaggtcgatgagatcccggataacgaggggctgtcggtcggcaagcagtttgctatccaggagaactcgacgcatcgcgacgagacttgcgaggagaagtacaccccgccgaggctgaccttcccggctcattatgcgccgatggatatcaagtttactccggatggcaagacggcgtatgtcagcttccgtggtagctgtaagtcttcccttcacttcaaccttccccctttcagattattgacatgtctgttcagttgaccgctcctcccccgtcggctaccgcgtcgcctccctcgcctggaactcggccaccggcgagcccgaggctgccgctgacagcaccgatgcgctgagcgacgtcatcttcaatgctgacctctccgtctgccccgacggctgcttccgtcctgtcggtcttgccctggacggcgaagggcgcttgtggatggcctcagatgccacgggcgagatctacgtcctgcaaaagactggtggctccgagggcgtctttgtccagcccgccggggacaacggtgccagcagtggggagaacgttgcagcgagtgtttctgggaagcagacggctgttcttggctcgattgttgcggcggtggtggtggcttggttgatggcttga

SEQ ID NO: 215 - DNA, 3027 bp, Scytalidium thermophilum
atgatgccccgtctctcgttccagtcgctcattaccctttcggccttggcctcgggtgtcactgcgatcgcggttgacagcagtgacgtccactccttgaccagcccgcccgaggccatcgtcactgtcatcatcagcaagactatcactacttgcccctccccccctccgcctccgccatgctcggccacgaatgtcgtaccaagtgacacagagcctagcgttagcagctctgtgtcgtcgatcgtgagcgagtccacgtggggcacgatctcatcgacttctctgagcagtatcgtcttgtcatcgactatcgagtcctccactacgtctgctgccgaaagctccggccccgttgagtcgtccactagccaggtttctttgtctgaaacaagcttcaattctgcctcaagctcggtctcgtcgacctccgaattctcgtcaacttcggccgtctcgtcttcgtcctcgtctgctactgaagtctcgtcatccgcgtctgaagtcgtttcctcgtcgacctctgaagctgtgtcctctacctctgaagctgtctcgtccacgtctgaggtttcgtcgacttccgaagtcatctcttcatcaacgtcggagacggtgtcctcgacctctgaagtcgtctcatctacttccaaggtctcgtcgtcgtcaacctctgaagtcgcttcgtcgacctccacagcatcgtcgacttctgcagtctcctcatcctccaccacctcggcggcttcgtcctccacctctgctgctgcccctgcttgcaccgacttctggctggagaagattacgcatcaaggcgttgctccgtttggcggcaatggctacaaggtgttccgcaatgtcaaggcctatggagcggtcggtgatggtgtgaccgatgacaccgacgccatccagctcgccatcagcgatggaggtcgctgtggtcccggctgcactggcagcacaaagacaccggcgctggtctacttcccgccgggcacttacaaggtgtcaaagcccatcatcgactactactacacgcagatcatcggcaatccgggttgcctgcctgtgctcaaggctagcgcggactttgagggacgttggctgctcgacaccaatccgtatggagccaatggtcctgcttggggcgcgaccaacgtgttctggaggcaggtcaccaaccttgtccttgatatcacggatatcccgccggagaaggaggtgtctggcatccattggccgagctctcaggctacttcactttccaacctggttttccggtcttcccaggctcccggaaccctccaccaaggtcttttcatcgaggagggctctggcggttacatgggtgacctcgtgttctatggcggcaacccggctctgatcatcggaaatcagcagttcaccatgaggaacattacggttttcaacgcgaaggtcgccatcaagaagctctgggattggggatggacctacaagggtgtcagcatcaacaactgcgaggtcggcttcgacttcacggcgacgagcgacgctggtaacctcgaggttggctccgttaccatcctcgacagcgaaatcaggaacacccccatcggtatctcgttcggcagtcccaatggcatcactcctcccgtcgccaacaacttcatctttgagaacgtgcgcttggataacgtgcccgtcgcgatcaaggggccatcgggtactgttcttgcgggcaccactggctctaccgtcattgcccgctggggccgtggccacaagtacacacccacctctggaccgaccttcttcgagggaactctgccgccctatgcccggccttcttcgctcgtcgcaggcaacgcttactacgagcgctcgcgtcctcagtaccatgagttcccactttctgagtttgtcagtgcgcgcgacgctggtgcggtgggtgacggcgtgaccgatgacacagatgcgctgaacgacctcttcgcctcggccgctgcggctgggaagatcgtgttcctcgacgctggcatgtatctcgtgaccaagaccgttcacatccctcccggctcgcgcatcattggcgaagccctgccggtcatcctgtcctccggcgcgttctttgccaatccttcggcgcctaagcccgtcgtccaggtcggcactcctggctccactggtcgtgtggagtggtccagcaccatcgtgtcgactcgcggtgctcagcccggcgctatcctcattgagtacaatcttgcttctcccgccggccatccatcgggcttgtgggacgtccatgtccgcgtcggtggcttcgccggctctgacctgcaactggctgagtgcgccaagacccccaacaccaccatcaccgaggacaacctccagcaggaatgcatcgctgccttcctcagcgtgcacatcacttcgaccgccgccggcctgtacatggagaactgctggatctgggtggctgaccacgacatcgaggagggcgcaaacaaccagcagatcaccatctacgccggacgcgggctgctcatcgacggttcgcagggcccgatttggctggtcgccagcagcgtggagcatcaccagctgtacgagtaccagctcgtcaacgccaaggacgtcttcatcggccagctgcagaccgagactgcgtactaccagcccaacccggatgccactcttccgtttgagtccctcgcggagtggcacgaccccgttttcaccgaagcgggtgactcgggctggggcctgcgcatcgtcagcagtaagggcgttattcttcccggtgttgggctctactcgttctttgacaactacgatgtgtcgtgctcgcagattggcgagggtgcgcggtgccagaagcggacgtttagcattgaagggaagagctcggtgacggtttacaacctgaacacggttggcaccaagcatatgattacagtcaacgggtcggatgtggcgaattatgaggataatttggatgggtttgtgcatactattgcgttgtttaccacggatgagtga

SEQ ID NO: 216 - DNA, 2030 bp, Scytalidium thermophilum
atggctcgtctcacctcgacggtcgtcgccctcctgggcattgccggcactgtgtgcctagcctacccccgggaagtcccagcgtcaaaggtcttcctcaacggacgccaggttgagaaggaatatgactacatcatcgtcggcggcggcacggccggtctcacggtcgctaaccggctgaccgaagatggaacgaccacggtcctcgtcatcgagtacggccagctcagcaactcggcctccgtcacgaccgtgacaggcggcttcgccggcatgggcgacgcttccctcatgttcaacatccagtcggtgcctcagcggaacctgcgcaaccgcaccatcgcggtccagatcggcaaggtcgtgggaggctccagcgccgtcaacgctatgatgacggtgcgcccggccgccgaggactttgaccgttggggatacttcttcagcaaggcttcgcattggtcctggacgggcttgctgccttacttcaagaaagcattgaactttgtgccgccggacgaggaggtcacgaaggctgccaacatcacctacgacactagttactggggcaccacgtcgggagtctatgcgggttggccttctttccagtatcccagcactacagcgcagatggaagctttccgcggcatccccggagttcccttcgtccaggacagcggggcagggcttccgggcgtctactggtacccgaccttcatggacccgaagaaggtcgagcggtcgtacgcaaggacgggccatcacgaccaagctgtcacccggccgaactatcatctcgccacggggtcgaaggtgaggaggattgtgcttgagggtacgaaggcggtcggtgttgcgtttgtgccggcaacaggatcgagcgcggccgagacgctggttcgcgcaaggaaggaagtcatcctcgctgccggtgccatccacagcccgcatattctgcagctcagcgggatcggtccgaagaacctcctgaccgcggccaagatcgacacggtggtagaccttccgggcgtcgggcagaactttcaagaccaccccatgatccaagccagcttctcttgtgagtgctccaaccggatgactatttgtgcttgtttttggtgctgacatctccctgtagaccaacgcttcaacatccggccgaaccccaacgacatgttttccaacgcgaccttccgcgcctgggcacagcaggtctgggccgccaaccgcacgggtcccaactccatcgccaccggcaactccgccgcctggctttccttccccgtcatctcctcccgtgcggacgagatcgcaacggcgctcgaagcccagaatcacgcggcctacctcccctccgacgccgacgagaccgtcgccgccggctaccgcgcgcagatgctcgcctatgcggccgcgctccgcagcaacggctccgccttctacaaccttgtcatcacaggcggcccgagcaacggcatcctggtcgacctgcacccgctgagccggggcaccgtcaacatcgacacctccgacccgtggaaccgcccgccgcgcgtcgactaccgcgccctgtccaacccgctggacgcggtcgtcatggcggagcttgtccgcttcacaaggcggtattacctcgagaacccgctcaccagcgcctggggcccgaccgagatctcgccgggcaggaacgtgcagacggatgcgcagtttgcggagtggttggagcgcacgctcagcccgacggagtaccacccctcgggcacgtgcgcgatgatgccgcgggagctgggcggcgtggtggatgaggagctgaaggtgtatggtgtggaggggttgagggtggtggatgcgtcgattatgtctacgctggttggtgggaatacctgccagacggtgtatgctgtggcggagaaggtaggtcatcttggactgttcccccgtgtctacttctgctccaaggagggtactaacgatccatcttccaggctgcggacctcatccggttcggcgcgccgaaggctctggagtaa

SEQ ID NO: 217 - DNA, 1254 bp, Scytalidium thermophilum
atggctcgcatcctggccctcatcggcggcgccgcgctagtccccagtgcgctgggcgccactctcatcgcctcacacttcagcggcaacctctacaccttgcaatacaccggaaccaacagcagcggcactttgaccgttacatcccagacccaaggctgcggtaccactccaggatggatccagtactatgacgacacacgccagctgtactgtttcgacgagtcgtggtggggaggcggctccatcacggaatactctgtcggcaacgacggtcgtttgagcatcacgggccaaggccggagtcaggggaacagcgtccatggcgccctgtacggcggtcccaatgggcggagtttcgtggccaccgctgaatagtacgtctgagagattaatgatcgtcgagacgaagaatgggagggagtcagatagctaacagagctgcgcagctccccgtccacaatcaccacttaccgcctcccgcttagttcctcggccacctacctcagcctgacccggtttaccatgccgcagcgcgggccgaacccacgccaggatgcgcctcatccgcacgaggtgcaccccgatccaacgggccagttcctgctggtccctgacctcggcgcggacctgatccgcatcttccgcattgagtcctccaccggcaggttgatcgcctgccccgacgcgcgcaccgaccccggcgacggcccgcggcacgtcaagttctggaagtccgccgacggccagaagcagaagctgttcagcgtcaacgagctgggcaactctgtctctgcctgggacgtgtggtatccgagcgacctcaacaacggatgcctgtccctgaccaagacccagaccctgtcgaccttcgcgccgggccggaccggaggtccgcagaccaaggcggcggagctccgcgtggtggacaacttcctgtacgcgacgaaccgcgccgaccaggcgtttggctacgagcaggactcgatcgccacgtacactatcgacccgtcgaccggtgccatctcgtggttcgaggcggccaactcgtactcgtactatccgcgcacgttttcgttcaataaggacggcacgctcgcggccatcggcggacagacctcgtcgaacgtggccatcgtcgcgcgggatccggtcacgggcaggctcggaaacttgatcgcgaacatccaggtcggacagagggggcgtgccggccaggaggatggtctgagcgccgtcgtttgggcggattaa

SEQ ID NO: 218 - DNA, 815 bp, Scytalidium thermophilum
atggtctcgatcaagtctgtcctcgcagccgccacggctgtgagctctgctcttgctgccccctttgacttcgttcctcgggacaactcgacggcccttcaggctcgccaggtgacccccaacgctgagggctggcacaacggctacttctactcgtggtggtccgacggcggaggccaggttcagtacacgaacctcgagggcagccgctaccaggtcagatggcgtaacacgggcaacttcgtcggtggtaagggttggaacccgggaaccggccggtaagtcttgtacccttgttgatcagatttgccagagaggcacgttatgtccaagaaatactgacagcctgtagcacgatcaactacggtggttacttcaacccccagggcaacggctacctggccgtctatggctggacccgcaacccgctcgtcgagtactatgtcatcgagtcgtacggcacgtacaatcccggcagccaggctcagtacaagggcacattctataccgacggcgaccagtatgacatcttcgtgagcacccgctacaaccagcccagcatcgacggcacccggacgttccagcagtactggtctatccgcaagaacaagcgtgtcggtggctcggtcaacatgcagaaccacttcaacgcgtggcagcagcacggaatgccgctcggccaggtaagttcactgctcgtcgtgttgttggtttggccaacgtgactcacacttctgcagcactactaccagatcgtcgccaccgagggttaccagagcagtggcgagtccgacatctatgtccagactcactaa

SEQ ID NO: 219 - DNA, 1779 bp, Scytalidium thermophilum
atggtctcgttcactaccctcctcacggccgtcgccaccgccgtgtccgccgtcacggccagcccgcttgaggccctcaagcgcggcatccagcccggcaccggcgtgcacgacggctacttctactcgttctggaccgacggtcgcggttatgttgacttcaacaacggtccccgcggctcgtacagggtcagctggagcaacgtcaacaactgggtcggcggcaagggctggaaccccggccccccgcgccgcatcgcctacaacggcacctggaacaactggaatgtgaacagctgtacgtcttcctcgttccatcccccgcgtcttcgaagatcgtaccctaattaacccctgccatagatctcgcgctctacggctggaccaccaaccctctcgtcgagtactacattgtcgaggcctacggctcgtacaacccgtcgtccggcgcgtctcgcctcggcaccatcgaggacgatggcggcgtgtacgacatctaccgcacccggcgtatcaaccagccttccatcatcggcaccgcttccttcgaccagtactggtccgtccgtcgccagaagcgcgtcggcggcacgatcgacacgggcaagcacttcgaggaatggcgccgccagggcaacttgcaactcggtgcctggaactacatgatcatggccaccgagggttaccagagcagcggctccgccgaaatcgaagtccggtcgctggattaaggtgccgtctcttgaggggaagactccgagagaagaactaccatggccgtgctcccaggccaggggcaggacggaatcactgtaaatagggaaatattcctcctggaatagcaaaagtacagactgtcttcctcaattcttgttccgccctcctgtcgatgttgtggcctttcaggtccaggtgcttgtaatggatatgtggtcttggcctctccgtttgaaacggccctcctgcaacggtttgagagaagaatcccccggttgtaacttctagtgtatttcctcacccatctgaacttcagtcccgaagggagtctgctccgtgatggcgtcataggtaaatgtgaatgtgtgggtcacacctgccgcgcgtcgtacttgattgaagcaaacggagcatctgcatgagcacctgcacgtatctcgaccgaccttcccgatcccggtcttcatcgcttcgagcttgtctccccataccagcatcatttgcatgcccacatcgagccgcacagagcatcgagcccgcctcgatcgcggcaatatcatctagcctgagctggaactccaaacagagcccttcggagtgagccgcatagcaggtcaccgacgtgaaaaacaacctggaacttatgtcagctaatgcggtctcccacaggactgacggttgtgctcctgagacgttcacgactggacacattcaacgatgcagctcagaacaaggcgacaggtttgtgaaccacctcaagttctgctccttgcttcctactacctacggtctccaagacgtcccatccatagcagtgtccgctgacgtgttacctcaagcatcacatcacctccgtctcccgtagagggaaggggatcagagccgttgagcgcgtcgaagaagactctcttcctgccgctgttcagtggcaaatccagcagctcaaaggattggttttggccaagcgtcctccggcaccatgttttccacgccggtcagctccgaagcccaaacgaaaggccgaacgttggcttcctgaagaggatcgtcttcttttgttga

SEQ ID NO: 220 - DNA, 1917 bp, Scytalidium thermophilum
atgcgctatcgcctcttgtctgcgcttgccgcctcgtcggcgctccgagtcacggcagctccgtccacgtcttcttccacggagacgtacgactacattgtggtcggcagtggccctggaggaggtccgttggcagtggagctcgcacgagcaggcttctcaaccctgctgatcgaggctggcggcgatgaaggagataacccgacgtatgccgagatcccatggttcaatgaggcagcaaacgacgaggccacgcgttgggatttctgggtcaagcactcggatgaccctgaacaggacctgaagttcgcccataccacctgggacacgggcgatgggactttctacgttggtctcgatcctccggaggatgctaaacttctgggcatccactatccccgcgctgccgtgcttggtggatgtgccatgcacaatgctggcgtttgctccatgcccgcggacgatgactggaatatcattgtgaacaagactggcgacacgagctgggaagccaagaacatgcgcaagtatctgaagaagatggagcgcaacgagtacctagcccctggtgacgagactcatgggtacaatggtaagttctccttccatgttagaggaaaaatgtgatgattgacgaacatcacgccaggatggctcgccacgtcaatcatggactcttcatgggcacgcaacgacagccttcccggcagtcgtatcctgcgtcgcctcactgaacttatcggccaggacccggacaaggcagcagatctcattaacagcgaccttcttgaatactttgacggcgttgacgagaagtcgtctgtatacagcatggtgacgcactccgattccaagggcatgcgctacagccccaacaactacatccgtgccacactcgccgaccccgcgggatacccgctgaccgtgaagcttcgcacacttgccacaaaggtcctcttcgacccggccactgtcggcgtcgatggagtcattccacgtgcgattggtgtggaggtcatggaaggcgaatcgctctacaaggctgacccgaagcacgtcccgggaaccaagggtccggtgaagcaatactctgctcggcgagaagtcatcgtttctggcggcgcgttcaattcgccccagctgctcaagctcagcggcatcggtcccaaagacgaactggccaagttcaacatcacgctggtcaagcacctgccgggcgtgggcgagaaccttggcgacaactatgaaggctcaatcctggccttgggcgcggcgccggtcgaaacagggctgatcacggtgatcttccgcacccccaacgcgcccaacaagaagcgcaacatctacgcgtggtgcggcgccttctcctttgagggcttctggcccggcttcccgacctaccacggcccgactcagtactcgtgcgccatggtccacatggctcccaagtcgcaggccggttcggtgaagttggtgtcggccgacccgcaagacaagcccgagatcaacttccggttctttgagaaaggcggcgacgaggatctggcggagctggtgtcgggcgcgaacatcctccgcgaggcgatgcaggcggcgggcgcgcccgtggccccgctggttgagaagcacccgtgccctggcgggaaggacgagaagtgcaccgacgcggcgcaggccgagttcttcaagcttcaggcatactcgcaccacgcgacgtcgacttgcgcgatcggtggcgatgacgacgagatggcggttttggactccaagtttcgtgtgcgcggcgtcgctggtcttcgtgttgttgatgccagcgcgttccctgttgtgccgggcgcgttccccagctgcccaaccatgatgctgagcatgaaggcagcggaggatattcttgcggaggcaaagaagcaagagtag

SEQ ID NO: 221 - DNA, 1418 bp, Scytalidium thermophilum
atgagagcaaacgctcaattattattcctcctaggcgtccaatccggactgtcctcaggacaacaacagccgcttgcccacaactactaccttgatcaacatctcaacgagctttatcaacagagataccaatttgacaatgacccaaccatcccctcataccgaaccgacctcctctccctccatcgctatctcatcgacatcccctcaatcagcggttccgagcacgacgtggccatcctcctccgcgacctcctcctctccaaaaactacacggtgaccctgcaacccattccatccccatccacctcccaccacaacgacaccgacgacgcccgcacgcgctacaatgtcctcgcctggtcgggctcccctcactcccagaccatcgacacccccgcattcctaaaaaaccgcgtcctcctaacctcccacatcgacgtcgtcccccctttcctcccctacaccctcaaccgcaccaccatcccaccctacaaacccatcccctaccccatcttgtcccgcagcacgctcatcggcggccgcggctccgtcgacgccaaagcgtccgtcgccgcgcaagtcgtcgccctcaccgaccttctgcgcaagggcgagatcaacccggagcacgtcgccctcctgttcgtggtgggcgaggaaaccgacggcatcgggatgaagacgttttcccgctggctgggcgatcacgacgtccaactcaaagcggccatctttggcgagccgacgactaatctgcttgcgtgcgggcacaaggggatcctcctcgccactttgcgcgcaaaagggagggcgggacattcggggtatccggggctgtcgggcgcgaagtcggcgacggcgtcgttgattcggggacttgcggcgttgttggatgcggaggcgacgttggggtcgtcggagagatttgggaatacgacggttaatgtgggcacgctggatggaggtgtcgcggcgaatgtgattgcgcaggaggctgaggctcaggtggcggtgaggattgccgtgggaaggaaggagacggggttggggattgtggcgaagaagatggaggaggtggttgggaaggtggataaggagggattgaggctggagggggtcatggggtatggaccggtggagtgtgagtgtgatgttgatggtgagtttctttatgattcttgttgtcctctgttcaacgaagggttcgctgctgactcggattattaggctttgacaccatggtggccagctatggcaccgatgtgcccaaccttgatggtgaccacgtcagctatctgtacgggccgggcagtatcttggtggcccatggtgaggatgaggcgttgaccgtcggggaactggaggactcggttgagggtttcaagcggctggtaaagcatgctcttggaaattag

SEQ ID NO: 222 - DNA, 2203 bp, Scytalidium thermophilum
atgcgtcagccgcagtctctgctcctcctcggggcattgctccccttcctgcccacgtcttctgcggcgtcttcgcagaatattaggattccaggtcacgccactgtcgtcaacaagcgtgccctctttgggaactacaccttcatcattgccggcggcggcatcgccggtctgactcttgccgaccgcttgacggaggacccaaaaggtaaactcacgctatcgaacgggtgtctctacatcccgacctagtccgtcccgtcctcagctaacgtacgtcttcacaacaagtgaccgtccttgtcattgaagccggtccagtcgactggaaccaagatggcattctcactcccggcaacttccagccgtggtggtacttctacccagggcttgagacggttcctcatgccggtctcaataaccggacgcccgatgccatcgctgcccaggttgtcggcggcggcagcgtcatcaacgccatggtgtatctgagaggagatgccaatgattacgacgcctggggcgctcttggaaatccgggctggagctggaagaatatgctgccatattttaagaaggtaaggcgtctcttcttgctcatcttgggaatgcatttttggtatcatggtcagttgcaagagacacaagtgactgacttgggacacgcaacaacaggcggagaacttcaccccaccggatcctgccctggccgctgctgggaacatcacctgggacagctcggtccgtggtagcggtggcccggtgcaatattcctaccccaacttcttcttccccagcagcggtgagttctgaacacagctatacagcattcgatctgacactgacgtctaccccgtagccaactggtggaacgccgcccgggagatcggcctccccgcaatccgcgatcctcaggccgggcagaaggagggcgtcttctggatcccctcgacgcttgacgcaaagaccatgacgcgcaaccacgcgcgcctcaaccactttgaccgggtcgccgagtcgcggcccaatttccacctcctccactccaacatcgtcacgaatgtcctgttcaacggcaacaaggccatcggcgtgagctacttgccgacgggcgccactgacgcctcgtgcccgaataccgtctacgccgcgcgcgaggtcatcctggcggctggcgggtttgggactcccaagatcctgcaactgtcaggcattggcagtaagaagctgctcaacaagttcaacatctcggtcgttgccgacctgccgggcgtgggccagaacctgcaggaccagccgacactgtcgatcccgtatacctgtatgtgttataattatcccacccataccttttatttcttttatcaactctactaaccaactcacagtcacgaacaacatctcccccaactacgacaccttcctcaccaacgccacctacaacgccgagatgcgcgccctctacgacacctcccggcaggggccctacaccctcatcagcggcgtgagcagcaacatcgccctcctctcactgccccaaacctccccgtcgtcctacctgcaaatcatcgcctcggccctggcccgcaaccccgccgactccctacccgcaggcaccgaccctgccgtcgtccgcggctacgctgcccagcgcctggccctgctccagcaattcgcgcgcaccgacgtcggcgtgggcacgctgcactgggacacgggctccacggcgctcgtgtaccacctgaagccgctcagccggggcagcgtgagcatcaagtcttccaacccgctcgacgggccggtgattgactttggcacgggcaccgacccggccgacgtggccgtgtataccgctctcttccgcaagaacaggcagttgtttgccgcggggccgatgcaagccctcggccccgtcgagcaggcaccgtttggggaaggggtgcagacggacgaggagatttataacgtcatgaagcagctcattaacccgacgaatgcgcaccagtgctgcacggcggcgatgatgcccaaggagttggggggtgtggtgaatccggagctcaaggtgcacggggtgaaggggttgcgggtggcggacgcgagcatttggccgttccagattgctggttcccctatggcgacggtgtatgcggtggcggagaagttggcggatgcgattaagagggagtatgggatgcagtga

SEQ ID NO: 223 - DNA, 2644 bp, Scytalidium thermophilum
atgcgtctcagctccgtcctcgtcttcaccctgggcctcgctggcccagcactgggcgacgtggtcaagtacttttccgacgaaactggtatgttcactgcagcatccccgagtaattgatctgacatacgacgacaactcgactgccaagttcccaagccaactactaacgtcttttgttcactgtagcacgaacctgatcaagcaggacaagacccgtgatagggacctggatttcccctcgacacccgccaacgcgaaatccttcatggttgtggccgagaaaacgcaggttggccctcttccccttattcgccgctctcagtggtacggctttccatgggagatacccatcctacatgggagtgcatgctggggcgatcctgatcttgggccgactctcataaaccctggaacatgtctctcgaccaaagcgagggagtaccgatgcttgacctattgtcatacggcaaagccctttgtgcagtgcccaggtgagagagagaggtatatcacttaggaatcctccaaaacctgaaccagataccaaacgctatggcggctgtacggaccatctatccgacgcatatctcgccatgacatgaggggctaaacacgtatataaatgctgcaaggacggtgtattggctgaggcactctgacatgagcagccaaataagatatagtcaacattgtggttccctcacccgcagtcttgctgtgaagaagaatgacggcaatgttcatgttcttcatcttttcatcatcacagctccaacctcctgcttctcagtgacagggcacgctgaccgccaggaccgacttggccaactcatgggtcttgaactaaacaatcccatcatcctcggtgactgccatgcttgcgttccatacagagatggatgaccaacatttagggccacaaagactcgtggcggacacgaccgaggggcgtggataacacggccttcatcctaagtagtgtaccttaggtttaggctctgcggtgcttgcctttggtatgtacatctgaactcctgggttctctggtttggtcatcaaagaggttgttatcaaagatggccaactcgtggaaggtgtcacaagatcatggtgaacaactggaacggcctcccctcccaaaacagcttcctcactctttctccatggaaaagctcatcacttcttcccttcctcagtttgcaactcaatccaccgcgaccctctttggcttacccacctacccaacaagtctactggagataccacacttgacggtgcctacgccatgtcttcaacccacgagaagaagggagtctggttcggaggcaccattccatcgaccatgattctctggtctctgttcctctgcttcctggtgtcggtcaccacggccgccacggcgaccagggacttgcggtgcctcgtctactacaccaagtcccaccaagacactcctccggtcgacgagcttcaacgtgtcacccatgtcgccattgctttcctcagtcctgaattcttcaacgaaccgaagagcggacttgaacccctgttcacaaccgttgacgatgtccgagccaagttcgctcccgacaccaaggttctgatctctctcggcggctgggaagagatggctggcttcgagacggctgcgtggaatgatttcacccgcagcaggtttgccaaaaacttggccgatgcgattaagaagacgggagcggacggagtggacttttactggcagtatccagggtgagcatcaagtcgtattaatcatgtcaagctgcatcctctcgtagtacatggcactgacttgatccattgttgaaggggcaacggcgaagactacaaactgatccccaacgaggaacgggtttgggagattgacgcatatcccctcctcctcgaggaggttaggaaacacttggaggagggcaaaatcatttccgttaccgttcccggactcaagcgcgacatgatcgcctacacctccaagacggttcccaagatcgcacaacacgccgacttcctcaacgtcatgacctacgacctcatgaaccgccgcgaccccttcaccaagcaccactcgggactcaaccagagcctcgaggccatcgacacctacctatccctgggcgccgggccggagaagctcaacctcggcttggccttttacgcccgctggttcaagacggaccacgacaactgtatgtgggaccacatcggctgcccgaccatcgggctcgaggacccggagacgggcgccgacctcaacaacagcggcgtcgtctactggagcgacccggcgcccgccaacgtcaacggcgccaaagtggccgagtcgctccagagggcgctcaagtatggcaagtacgagtacaagggcggcggatattattactgggacggctccgacgatctccagaatatctggtggacctttgacacgcccgacgcgatcaagcgtaagttccccctggttgtggaggagaggggtctgggaggcgtttttgccatggggattggggaggacgcgcctaaatatgatcatttcaacgccttcatccggggtgtggaggattatgtccaaggtggagaggagacctcatatggacgagaggggaagaaagggggtcgtttctga

SEQ ID NO: 224 - DNA, 886 bp, Scytalidium thermophilum
atgaagctcaccacctccatcgccctgctggctgcggccggcgcgcaggctcactgtacgtcctcccctatctcatcaagccatcgttcacctattagttattaacaaactctcacccagacaccttcccccgcaccaaggtcgacggcgtcacctcgggcgagtgggagacgatccgcatcaccgagaatcactggtcgcacggccccgtgacggacgtgacctcgcaagccatgacgtgctacgagaagacacccggccagggcgcgcccaagacggtcaacgtgcgggccggcggcaccgtcaccttcaccgtcgacacggacgtgggccacccgggcccgctgcacttctacctggccaaggtgcccgcgggcaagacggccgcgacgtttgatggcaagggcgccgtgtggttcaagatttaccaggacggccccggcgggttgggcaccagctcgttgacctggcccagctttggtgagttcctttttctcttttctttctgaccatcttccataatcacctacagccgacaagcaaccaaacactcataaatgaacatttcaacactaacccaccttttccccctcctccaggcaagaaagaagtctctgtccaaatccccccctgcgtgcaggacggcgagtacctgctgcgcgtcgagcacattgcgctgcacagcgccgcgagcgtcggcggcgcgcagctctacatttcgtgcgcgcaaatcaacgtcaccggcggcaccggcacgctcaacccgggccagctcgtctcgttcccgggcgcctacaagcccaccgacccgggcatcctgttccagctctactggccgccgccgacccagtacatcaaccccggtccggctccggtgaagtgctga

SEQ ID NO: 225 - DNA, 846 bp, Scytalidium thermophilum
atgctgaacactctcctcctcgccgcgctcgccgccgcgcccgccgtcatggccgggcccgtcactccccgagcattgccggtgcccattatcgggggtggtctcggagccgaaagcgacgtccaccccccgaaagccctcccggccacagtccgcttcaacgagggcaagttccaacccgccatggacttcgacacggacagctgctacaacgtccccgcgatcgacgcggatggcaacatcgtcaaaggcctcagccacacctccggcctgaccgcggggtgccgggacgcatccgacctcgacaacaacaacgtctacgtccgccggcggtgcaacaacggctggtgcgcctacctgtacgactactacttcgagaaggatgtcgcggttccttttggggggttgtcgaccggccaccggcacgactgggagcatatcgtcgtctgggtgcgcggcgaccacacgcccgagtacgtggccatctcgcagcacggcaactacgagatcaagaagtggagcgacatccgcaacgacggcggcacgcatcccaagattgtctaccacaaggacggcgcgtcgacgcactgcttccggttcgccaacaaggccgacgacaagctcgagaaccacaagggcgtgtggttctacggcgcgctggtcgactactacgacgggtggtctgtcgagttgcgcaacaagctggtcaaccacgactttggctcggccaccatcgccttcaaggactcgcagttcatgccccagctggacaaggccaagcccaaggacgagcggctcaaggctttcaagacgggccgcgacggtgacgttgatgacaagctctga

SEQ ID NO: 226 - DNA, 6427 bp, Scytalidium thermophilum
atgaagccaccgtcgtggtcgtccttgagctctttgctcctgttgaccttgcccacgggcagtattgcaggaatcatcattaatcgtggcaccgaagacacccaagatcagccgcaaacgtgtagaccagagatttcgtgcgtgcctcatctttcttctcaactttggctcatgactaacactgtaaacaggccatttgattattctgccaagctccggagcgtttatgagctgccagtctgcagcgctggcgacgagaccggtggcatccatggcaggaatgacgggggaagcaacgacgtgtctttcctagcggccgagtcgctgtctttcttgactggccgacaggtcgtgggacttaacgacgactatacctgcgcgccggaccggccttgcaagaacaaagcatgttgcccaaaggcgacgctccagtgcaactacggcccggagtacgtcttctttagtgtcccttgtctgggtcggactcggtgtatactgactcgagctccagggcatgcggcacgtcgggaatcacgcccaatgaagtttgctggcacaactgcgatgccaaagcagagtgcggtcaatttgctgaccctcctgggaagaaatgtcctttgaatgtctgctgtggaaagtcagtggtatcttgaagttctctgaatgacgagctctcgtgggatgtggctaacggcgcgatggtttttagatggggcttttgcggaatgacaaagtaagtggatcattccttccctctttctggtgaccttgttaacgcatggcatccagagacttttgcgatgtcgaagatcacggcgccacgggtggctgccagtccaactgcgcgcagcctgggcccaagaaaaaggacagcgaacagttggaccgggtcattggatattacgaggcctggcggtacaagtcccaatgccagggcatggtgagtgagccctcttttgatatatgtacacctggcataggtagcccgatgttaattgacgtacacagggtctggacgacattccggtcaattcactgactcacctgttcttttcctttgggtttatcacgccgggtgatttcaacatcgttccaatggacaacctgcccttcgagctgttccgcaacttcaccaacctgaagaaaaagaatcctggcctcaaggtcatgattgctgtgggtggttggacacacaacgatgagggtatgttctccctgaaccctaatctcatccatcgctaaccgtctctccttaggacctctgcagaaggttttcaccaatctggccagcacccagcagaaccgacaaaagttcatcacgaatctgctgtctttgatgcggagatatggctttgatggcgtcgactttgactgggtacgtccccttccccacccaccacgtcgccgctcgtcagggcaatatactcatcgacatcgctgtcacacaggaataccccggggccgacgacagaggcggtgagccggaagacggcgtcaactttacgctgttgctcaaagagcttcaagaggcgatcaagaagcagccgatgaaatacatcgtctctttcactgcaccaacgagttactggtacctgcgccattttgatctgaaggccgtcgactatgtggattttgtcaacgtcatgtcctatgagtaagcgctggccgtacctcacttgtcgtgtgaagtcccgttgcggactgtttacgtattgggtgctaatcagccctttgttcttagtcttcatggtgtttgggacgccaagaatccgatcggctctcatgtctacggacacacgaatctgactgagatgaagatggcgtttgacttgttctggcgtaacgacgtcccggcaagcaagttgaacatgggcttcggcttctacggcagagcgtacacgctagctgacccggcttgcaacaagcccggttgcgtcttcaagggaggcgcaacggcgggagcctgcagcggcgagtctggcattctcacctaccgtgagatcatggaggttatccgaaacaaaaaaatcaagcccatccacgacaaggccgccggcgtcaaatacattacgtggaatgtggaccaggtaagaacctttttccatgttcattttttttcttgttttcctccttttttttcttcgtttctttttttttttttcgtttctttttcctcgttctgttcttttccttgttttcttctacttgaaactctgtacgcaatgccctggtgctgacttccactctcccagtgggtgtcgtacgacgacaaggagacgttcaagcaaaagaaagactttgctaaggaactcggtctcggcggattcctcatctgggccatcgatcaggacgatgaccagctggcggcgctccaggccgtcctggatccccagcccctcaaagcttttgcaatgaccaagggcgacgagaactggaccggctccaacgagatgtgctacgtcaccgagtgcgacgggaagtgcaagtccggctatattaagatcaccgatcagaagtgcgccaagaacaagaaaagccagctgtgctgcccgctctcgggagcgccagatcccaaggagtgccactggcgcggcgaccccttaatgtgcaatggccggtgccatgacgatgaggtcatgacacacatgtcaaagttcgggtcaggcgggactgcctgtactgatggccaaaaagcacactgctgtaagagtcctctcgccgaggagaacacttgcttctggaagggggtcgggcaacagtgcccggccggctacgagatgatgacgttctctggaacagcattcgacctgcttgatgacattgccgccgtgatcatacaggtcgtcggcagcttccaccctctcacgcgtcttaccggccgtctcctcgctcaagtcatcgagcggattgatatccggaccaagaagctattctgctgcaagacgaacgacattgaaaagtgggacaactgcgactggtacggcaagcccggcaactgcttcgacggacactgtcccgacatgaggtttgtgcagctcaccgacagctacttcggaggcgactcgacttgcggcagatttttgaaccggaggcgtgtcttctgctgccaaccgaagaacggacaacctctgttcctccctgtgcccctggagaacctcttccctaatccgcctcagggagacagcgtcgacaccgaatttgagctcaagacggacaaggaatcggccggtggaaacactgaccccaacgatgccgcgtttcagttctacatcctcgcctctcccgaggcgatccagcagtcgctcgacaagcgcgatggctcccactgggaagtctttgactgcaaagatgctgttaccgagggcgagcacaaggtcaagatggtctgcacggacacctccgagaacagcaactgttacaagattgggctgggccatggcgtgcccggcactatcttgcagatgccccggggctgcgggccagggaaatatgccgtagcgaagtctttggaacctctgccggtcgaagatcatcgcaagatactgccgcgtcacctcgcgcacctcgcggactcgaaaccggtggtgtacgagttgacttttgactacgacttttcccgcgtcccacgggacctcggagacacgaagttgcgggttgatttcagcaatcaggatgattattggaacaccatcgttgctggagccgcgtccaagaagaagaggggactcagcaagcggacgctcgctgacgttggtggcaaccacgtcaggtggctcgaagaggagttcagggacgactaccactttggcgggctggacaagcgcgaactgcacgagcgctggtttggctccagtgtcatcgagtggctggtgcagctcctcaagcccgagatcaagcgcgagttccattacaagtacgaagacagcatcacggccaagatcttggacgagtcgtggcagtgcaagaatggagatgttggctacgaagggcaccttctcgcccaagcccttctcaacgtcaacgtcgagaccagctttggtttcactctcatcgttgagtcgctcagagcgccgctcgatatcagccagagctatcttaccttttacaataagggcgagatcacggggatccttacgctcgaggctgtcgccaagattctctacgaaaagaagggcgtgattgcgaatatccccttcccgggcgccaccttcaggattcctggtattgcgaccatcggtccgcagattacggtcgagggtggcattgacgcactcttcgccgttggtggcatcgtcgagaccaagttggagattgccaagtgggaggtatgtaacatcccttgttctatatccctccctccttggctttttatccctccttttaccttcaatcttactttctttttcgagttttatctttatttctttctttcctccctatctattacgtttccctttccttttttttctactatattttcttctctttcttttctttttgttttctttgtttctttttttcgtttttcttttagtatttccccctattttcttgttatttgtttgttattttctgtctattcctttatctctttttctcttttattaaataccctctctactactttgttataccgtctcctatcttttatctaaatgaaatattctcttgaggtcgcattgctaatgttactatacaggtccggcatgttgtcccagataacaacgatgaaacctacaagccaaaggagatcgccccaggcgaccccaaacttgaccggactggcagctttgagggccttaagagaccctcgtttttcgccggcgtcgccgtccacggcgacgtcacggctaaactttctgcagctgctgagttcgggatccgctttgatgataagtggaagatcaagccggctgccgccgctgttgtcggtgaaaccagtgtcatgctcaagatggcggccggcgcctcgaccgagggcgtctgcccctttacctacggcgtcgacgtcggcgctcgcctctatgccagggtcacggcgccgcaggccttccactggtctggtattgagtacgacctgacgcccaagtggaacaaggccatcatccagggaggaacttgcccagagctggccggcattccgatgaaaagggatctcgacttcgttgatggctccgcaaaccattctgtcaccgcccttgcgcaacggtcacccaattctctggccaaacgatcattggtttttggtccggcgttcaggctcccggttggcagcttcttctgcccgattgatgacggcgaggaactcagctgcagcgaccatgacaagatctgggctgatgagcccgaccccgaagctgtttggaagaggtcactgaacacggctcttttcgacaagggccacggtgacgtggccaatgttacagcggacgttccagaccacctcgacaagagaaccaatgcaaagtcggtcaagatttgcgacaacgatgagaccacatttcaatatccgaccggcggcgagcttggtgccaatgttgacagcttcggctgggtggagccagacaattgtactgattacaaatggggcggccctcttgccgcgcgtgtcgccggtatacagtacgactcggagcacgtcctcgaggcccagctcgtgaacgacttcttcaaaaaacatatggctggagtgcatccccaagtgcctcatccgaaccccgccatgattgactcggccggaaacaggaggcgcattgactggtgcgactacgtgaggttaatgatccgtattcctgcgttcgtgatacctaacctggacacgagcgaagggacgaacgtggcgctcacgccccttagacacatcgctgcacagttccccacaaataattggaaggaggacgagtatattgccctccagagctacatcaactcggtaatcaagaaccacgcatgggcaggaggccgtatcgtcaacacggacaaatgggcgaccgattacacccagccggctgtggcgcggaagatgatcgtgaagatgcgcgggatcatcgggttacggctttaccacaataacccgacggtgatgagcattctgcgggcgcagaagaaccgcatcggcaccatccttaaccttctcgatacgcagtacctgccgaacaaccggcctgcaccaggctgggacgcctggcctgggctcaacctgcaaagcgaatggaacagattcatgtcgggcaggttcaggcatctgagggccaagtgcgacagcattgtcgaggaccatttggatctcttgcttgattactgggctactccggctatgaagcaggcgagccaaaacaacgctggaaacaaggcgatcatcagggatattgaggagatggatatctactggatgaacgagattcctgactgggaggtgcctttctga

SEQ ID NO: 227 - DNA, 2746 bp, Scytalidium thermophilum
atgaatcaactcggtcgtctcttaggtctgggggctctcctgggcttccgccccgcagccgctgctcggctggtctacgaagacagcctccccgatgacctcccttcagcttgctccgaggctctgctggccgacgtggcctgtagccttcttgtgcgcgatctgcacccagacttcttattacctcccgaggatttggaggatatctgcaccccaggctgcgcgacagcgctcgcatcatggaaggcaacagtccaaagcgcgtgcccgagcgacttgaccatcccgtgggaatttgaccttcccgcgtcgccggtggttatcccagacagtcttcagtggctgtttgagtttacttgtcttcgcgtgaacagcaatttctgtggtccggttgcggccctcgccatagtcttcgccgaccctggaggtagggactgcctcaatctcgatttctttggcgcttgcttacgcctttcgcagagtcacccttcaactacctttccgaagtccctagcggagccacggagcctagcagctgcgatgagtgcctcgtagccaggctgcgcatgcgggcaggatctccctattttgaaggtcccgttctggccgaggagtcggtttatgaaagcatgacgtcgagctgtagtgtaacggacaagccgttgatcacgacaaccctcgacttcttcaccagcgagccagagcctaccgaggaaccttgccccggaacgctgtacaccatccaaagtggcgatgactgctacagcatctcgcaggctcagagcgttggcacagcctggttgctcgctgacaacaacctggccgctgcgtgccataacttcccgacgtcaggaactctgtgtatcaccaatacctgtgacacggtcgttgtccaggtcaaccagacatgtgccgacattgcagacgccgcaggcatttctgagatccagctgatggcgtggaacccggtcatcaaccccgtctgctctaatcttcatctgatgaacggcacaacgctttgcatcagtcctcccgggccccagctgagcgagcctgtgaccacagaccttccgcccttgactccgaccgctcccgcacctgtaccaacaaatgccaaccccgggtctacgaaaccttgtggccgctggtaccatgttgagctgggcgactattgcaacctgttggttctcagattcggaatctctttggaagacttcatgtttctcaaccccgacgtcaacagcaactgcaccaacttgtttgctggagagagctactgcgtccagccagtgggagatagtatgccacgccattccttctactatttcacctcaataaagtattcatagttgatgctaaccagcataatgcgcttacagtcaatacctactctggccggccaggatacgcgactttcaccttcgaccccacagctcccttcacaggcgtgccatttaccatgctcccagatgccactgagtctccttactcgcgtgtgcgcacgccccgtgtgctggccgatggtgtccgcgacgactgtacattctatttcctcggcgacagataccaggacccagtggaaagcctgggctactggaagagtaattgcgagttagcagcctccatctacaacgttgacaacgacaactttgtcgcctggaactcgctggagcacaacatcacggatccggcatgctccttcgagactggaaaatggtattgtgggtcttggaacctgccgtcctatcctaccttgacctttaccgagaccgagacaacaacgacaacaaccggcaccgccggcccaacccctcctgccccgactcactcaggccaaccggagaactgcaacacatggcacgtcgtcgaatcaggtgactcgtgccagtcggttgccgacgccgccggtatcacgctgagccagttcctggcctggaaccccgcggttagcagtgattgtgtcgacaacttttggctgggtcaggcctactgcgttggcgtctccggagagggcgccaccacgacgacggcagcgaccactgcgagcccgactccccccgctcccacacactctggccagcccagcaactgtaacaagtgggatgttgtggagtccggtgactcatgtgcctcgctcgcggcggacaatggcatctcgcttgctcagttcttcgagtggaatcctgctgtgagcgaagactgtacaacaaacttttggctcgggcaggcatactgcgttggagtctctggacagagttcgtcaacgacgacgacaagcgcagctagcccaactcctccggcccccacgcacaccggccaaccaagcgactgcaacaagtgggatgtcgtggagtcgggagacacctgtggctctatcgcctcggacaacggaatctccctggcacagttcttcgcctggaatcctgcggtcagcgaggattgcacaaccaacttctggcttggccaagcatactgcgttggcgtgtctggaagcgcaagctccacaacatcaaccccaacttccacgactacagccccgcagccccaggcttccactcacactgggcagccgagcaactgcaataagtgggatattgtgaaatctggtgatagctgtgcctccctggcttcagacaacggtataacgcttgcccaattcttcgcctggaacccggccgtcagccaggactgcgtcaataacttctggcttggctacgcctattgcgtcggggtttcctccccataa

SEQ ID NO: 228 - DNA, 2733 bp, Scytalidium thermophilum
atgcttactcggcgactgacagtcgctctgagtctgttttccaccctatgtcaagctacgctacctctggtctcacgtcctggggacactgcagcgatcccttcatgggacctcacgtcctctgcgcacgtggcgagcaacctgagtgccctctctcaagttggaatcgacacaaccgcgtggacccatgtcccgacttcgaggtgcaccctcgtgggatgtctcattgaggccggcaagctcagtgagggtcacttgttctattcggacaacctccgccaagtcgacgcaaagcagttctcggttccctggatctaccgtcacgagttcacccttgagcctagccctggcaagaacttctttctccaaacgcacgggatttcgtcgcgggcagatatcttcctcaatgggcaccaaattgtcacaaaggagcaccaagccgggtcgtaccatggacggacatactggatcaccgactacgtccgtgaacgaaactcccttgtcgtccaagtccatccaacggattactaccgggacctcgctgttggatggatcgactggaacccctggccggctgacaatggcaccggcatctggcgtgatattgagattcgacaaaccggagatgtccgcctggacccgttgcgggtcatcactgacgttggcaaaactctcgaagcagagcccgcaacggtcacactccgaacgaagattcacaacatggcgcgccgatctctccgagtgacagcaaccgcgacggtggttctggagtcgggcgccggcgagcccatagtctgtaccaaggagctcactgttcccccggggccagactctacaacggacctgaccattgacgccatcatccccaaacctcggatctggtggccgcggcaatggggcaagcagcctctctataacgcaactctcaccgttaccaccaacgcggattcggacacagcctcagaccgggcattcacaacattcggtcttcgttccgtgcaccgcaccctcaaccccttcaacgacaccacgttttggatcaattatcgccctttccaggtccttgccgcgggctacactcccaacatgtttctgcgcacgtccccgagagattggtcacgaaccctcgcctactctgctgcccttggcctcaatacgatccgtctggagggcaaacttgaacaccctggcctgtatgacctcgccgaccgtgccggtatcatgcttctcccgggatgggagtgctgcgacaagtgggaagcctggccatacaatgaccaccagccttctgacgtcttgagaattgggaagtggttggacgccgactattgggatgccaaaggcagcatgctccatgaagcttccatgatgcaatctcatccgagcgtgttagcgttcctgattgggagcgactttgcgcctgatgagcatgccacacggggttatgtggaggcgttcaaggcggtggactggcaagtgccggtgatcgcagcggctgccacggggcggggatacatctcaaatgagctgacagggccgtcggggatgaaaatggatggaccgtacgactgggtgccgccaacatactggtgggatggaaggcctggggctgatggtaggcagggcaggttgggggccgcgtttgggtttggctccgaacttggtgcaggcgtgggaacaccggagctgtcgtctctgcagacgtttctcactgatagggagatccaggagctctggagaaatcccaacaaaaccctttaccacatgtctcgcgagggctccgagttcacggcacggactatctacaacgcagcactgtggcgccggtggggagcaccgaagagcctggacgactatctcatcaaggcccagctgatggactacgaagcaacgagggcacaatttgaggcgtacggtgctatgtggaatggtcccaggcctgccactggtctggtctactggatgctcaacgccgcatggccgtcgcttcactggcagctctacgactactacatgcgtccggcaggggcgttcttcggggctcaaatggcgacaaggatcgaacatgtggttttcgactctaccacacggaatgtctggatcatcaacaggtccttggaccggagtggccggcgtcgtgtcgaggtggatgtgctgagcaaacatggcgaaatacttcacacgggtatcctcagagccgaggcagagcctaacaagagcatccatgttggctcgcttgaccagcctgtggccagagctctggaaaagcaagacgtggtattccttcgtttggcgttgcgcgatgatgaaagtaggcgcctgctcagccgcaatgtgtactgggtctcgaaaacgaccgatgtcttgaactggaaccggtcggaatggttttacacgccggtgagcagatacgctgatttcaccgcgctgaacgccctctcacctgcccgtgtggtggtgacggcagcgagggatgtggacgctgacggagaatttgttgaggtgaggctcgaggcaaagacaaaagtcccggcctttttcatcaatgtcagggtgctggatagggacgggaatgaggtactcccggtgacatggagtgagaattacgtgactctttggccggaggaggtcattgtgctgaaagccaggcgggcggcggatgaaccatgggatccgaaggaggtgacggtgatggggaaaaatgtggagttccaacgagtgaaacttgcttga

SEQ ID NO: 229 - DNA, 1217 bp, Scytalidium thermophilum
atgcattctatcctgaccctcatcgtcactgccggccttgtgacggcgcaaaccaacacgaacctccaaaccaagttccccacggccaccagcacgactggtatttccgccgcgcgcacaattgctgctggagctagctttgatggccaaatgctccagtgggaccgcagcccgtcgacctgcaaagagcaaaccgagggcggcgagaaggatgccctgttcgtcctcgagaacggtgctactttgagcaacgtgattgttgggcccggggctggtgagggtatctattgcaaggggtcgtgcactctgaataacgtgtaagtttctctcaacagaatcttagaacatgaagctctctcccctgattcgcatgcgtgagtatactgggcctaaccaattgtttccaatagatggtggaccgacgtctgcgaagatgccgcaaccttcctccaatcctcgggcacgtcgtacgtcaatggcggcggcgcccgcaacgcagccgacaaggtcttccagcacaacggcggcggcaccgtctcggtcaagaacttcctgtcctccaagaacggcaagatctaccgctcctgcggcaactgcaagacacaggtcgcgcgcaagtccatcttcgagaacatccgggccatcgactccctctcggtggttgcgggcgtgaatgccaactttggtgactcgacgacgatcaagaactcgtgcttgctcaaggggcggacgtgcgatatctttgaggggaacaatagcggaaaggagccgactaagattggaacgggcccatcgggaacggcgtgcgttgtgcaggcggtgcagacctcagggtgctgagctgaggtgcgttgaggcaatggactgagggtcttaggaagacagtggacaaagctctcctgaggatatcatcgtggccgactcaaggagggctttgcctgtacccgttttctttcgtcacgggcccctggagggcatcgttcctattcttgaagtattagagatagctgaatcgattcatgctttaccattctctcctggtctatctcagaggttatgcgtgtctgccatttcaacgcaacctacttagctttgggacatctgaagttactcgatgactcagcaacacagcaaccacaaaggccaagcatcctgcaggtgttaaacgaatgttcctgcgccaggggatgtcggactttggaaattctgatgcctag

SEQ ID NO: 230 - DNA, 2353 bp, Scytalidium thermophilum
atggcctccaacatgttgttaaaggcagtgttgctagcatccacattgctcacggctgtggcctttcccagcccggctcatctcgacacacgacaaacagcttctaacttctggtatgccaacattgatcacaggactcctggaatcagggggtatgcacccgaccttgacggcgatgaagcgtacgaggtgttccgtgccgtttcggctggcgacggagcggctatccaggcggccatcttgaacggcaccaacggggcacgtcgccacggcatgtggtttgcttcacagccaagggtggtgtatctaccgcctggcgagtacacaattaccgagacaattcacatgaacactgacacggtgctcatgggggatgccacgaacgtaagtgtcaagtgtctctggatcccctgcacagctatctcaccatcgttagcctcctgttctcaaagccgcgccagggatgcctcgtaatggtgttcttttctcaggaggtgatccaaccaccaacaatcgaggggagctatcattcaccgtcgccatcaagaacgtcatcttcgacacaaccaatattccgggcgatgcgccgttcgtggcacttggctggagcgtggcgcagggttcccacttacagaacgtggttattcgcatgccacccgcaggaagtagcggcactggacactcagggatccgcatgaatcgaggttcgaccttggccgtgtcagatgttcgcatcgaaggcggccagaacggaatctggttcaatggccaccagcaagccgtgttcaagagtgtccacttctacaacaacaaggtgggcttcctcattgacggcggcagtaccgtcaacttggtcaatccaacattcgaaaacgtcggaacctgtgtgctcaacacgggagggtacccgttcatcggcgtggtcgacgcgagttcgaagaactccggcgtgtttctgcgcaccaccacctggccaaattaccacatcgaaaacctccgccgcgagaatagcaccggagacatcgcccaaggtcccggtaactttgtcttccccgctcagcctcacataccacagctcacctacggcaacacagtcggcgccaaccccatctacggaccggtgttatcctccctggctcggccaagcgccctcgtgtccactgctcacaaatatctcacgatccctgcaccaaactatgccaacaaccccatctccgacttcctgaatgtcaaagacccagcccaaaacggcggccgctcggtccgaggcgacggcacaggcgatgaggcagaagtcatcaacgccatcctccaactcgccgcccaactcaacaagatcgcctacttcccattcggcaaataccgcgtcggctcaaccatccacgtccctcccggcagccgcatcgtgggcgaggcatggtcaaccatcgtcgcgcagggtgacttcttcaaagacccgcgcaacccaaggcccgtggtgcaagtcggcagcccaggggacgtgggtgtcgctcacatcagcgatatgcgcatcaccgtcggagacgttctccctggcgccattctcatgcaattccacatggctgggaaccaggccggggacgtggccgtttggaacacgctcaccaccgtcggcggcacgcgtggtgcaaaggcgttgacggacacatgccgggatccgaccaaccagtgccgcgcggtgtttttgggcctgcactttgcgcgcacgtcaagcgtgtacctggagaacgtgtggaactgggtggccgaccatatcacggaggatttcgacggggggagcaacattgcagcggggcgcggggcgctggttgaggcgaccaaggggacttggctccacggtctcgggtcggagcattggtggttgtaccagctgaactttcgcaaggcggagaacgtggtggtgacgatgctgcagagcgagacgaactatgaccaaggagataacaaccccatgttgctgcccgctccgtgggcggcggatgaggatggctggggcgatccgacgttcgatcattgcgcggcgacggacaagcgatgtcgaatggggtatgccaactacttcaacggtgggaggaacatacggtcatatgcttcggcttcgtgggcgttcttctccgggcctgggtaccaaccttgtgcaggggagtatcagtgccaacggcatatgcacttcgtcaaggagacaccgctgagtctagaggcgtttggactgtgcagcaaggatgcccacgccgtgttgcgcctggcggacgggactgagattgtcacttcggagggtttcactggatcatggcctggtggcggaggtgatatcgggcgatacacgacttaa

SEQ ID NO: 231 - DNA, 1500 bp, Scytalidium thermophilum
atgcattttctcgctcggactgggctctcatcagcccttctcacctggctcgccacctccgctcacctttcagccgcatggccgaacactcctttccgagcatcagggcgatggattgttgactcaagcggggacatggtcacgtacgttggagtcaactggccaggccatggcgaggtcatgatcccagagggcctgcagcacgtttctatcgcgtccgtcgtggccaagatcaagagtcttggcctgaacgcggtgcgcttaacctatgccattgagatggtggatcagattttcgacaacggcggggaagatgtgaccattgaaactgcgcttgtgaatgcgttggggaaggaaaatggcacgacagtgctaggaaagattctggggaataatccgcaatttacagcccagacaacgcggctccaggtaggttgtcgcaaggacgtagtcagcaaatgtcgtccctgctaatcatcgaaggtctttgacgctgttgctaccgaactagccaggcaagagatctacattctgctagataatcatggatcgaaagggcaatggtgttgctccccattcgatggcaacgcgtggtggggagatacatacttctcaatttccaactggacgagagggctgacgttcatggcggagcacgtaagtccctcgaccaccaaatcatgtaggacagcacagacaattgacacccactaggcaaaatcctggcccgcactcgctgccatgtctctccggaatgaactccgccagccgctgagcaacctcacgttggcccaagagtacaactgggcaaactggtacagttactcccaactcggcgcaaataccatccactctgccaacccagatcccctcatcctgctgtctggaatggattcctcgatgcagttcgatgtcattgtcgatggtaagcctctgacaccaagcacgacggtattcgatcgatctgcctttgcgccagactttgccgaccgcttggtactggagatgcatgcatacagcattactgagaaagttgactcttgccctgagtatgaaaagaagcttacaagccggggcttctcaacattgacaaaagatcctgagcaccaatatccacttcttatgacggaattcgggttcgcgcaggacgccgatacctggaagaatgacgtctatgccacatgcattactcagttcttaccaaaacagaaggttggctggttcatttgggtcattgcggggagttactatgtgcgcgaaggtatacaggagtatgatgagacttgggggttgttggatgctaagtgggagaactggaggtcgcccgattttgtggagaatgggttgaagaagatggtgaatgagatgctggaggcagtgaagggagaaacgggagacgggggccaggctccgacagacagcggaagtgcgaagagctatgatgtgtggtgggggatgttggcgtcaattgttgccgtgctaagtgcggcgatttgctaa

SEQ ID NO: 232 - DNA, 752 bp, Scytalidium thermophilum
atggtcaagccgaccgttcttctcaccgccgccctcgccccggccgccgcgctggccggtcccatccagggtccccagaccaagaccgagagcacgctcggtgcccgccagtggtggggaggcggctactacttccagaactggtccgagggtggcagcaacatccgctgcgtgaacggccagggcggccactacacggcgcagtggaacagccgcggcggcttcgtatgcggcaagggctggagctatggcggcaaccggtatatttcttccccggcaaaccatacctgacttagtgtgtctgctaaccttcctctctttcatccagcgtcatccaatacagcggcacctacaacgccaccggccccggctacctcgccgtgtacgggtggacgcgcaacccgctgatcgagtactacgtgatcgaggcgcacgccgacctggcgcccaacgagccgtggcagcgcatgggcgagttcaccatcgacggcgagggcacgtacgaagtcttccagagcacgcgtgtcaacaagccgtccatcgagggcacgcgcacgttccagcagtactggtcggtgcgcaaggagcagcgcgtcggcggcaccgtcacgatgcagaggcactttgatgcctgggccaggtttggcatgcgcctcggcaaccatgactatgtggttgttgctactgaggggtacacgtcggagccgaatgggtgggggagcgcgggccagtcgagcatcacggtggtttga

SEQ ID NO: 233 - DNA, 906 bp, Scytalidium thermophilum
atgttcttccgcaacgccgccactcttgctctggcctacgccaccaccggcgtctccgcccacgcgctcatgtacggcgtctgggtcaacggcgtcgaccaaggcgacggccgcaacgtgtacatccgcacgccccccaacaacagcccggtcaaagacctcgccagcccggacatcgtctgcaacgtcaacggcgggcgcgcggttccggacttcgtccaggcatcggcgggggacaccctcaccttcgagtggctgcacaacacccgcggcgacgacatcatcgaccgctcccacctcggccccatcatcacctacatcgcgcccttcactaccggcaacccgacggggcccgtctggaccaaaatcgccgaacagggcttcaacccttccacccgccgctgggccgtcgacgatctgatcgacaacggcggcaagaccgacttcgtcctgcccgcgtccctcgcgccgggcaagtacatcatccggcaggaaatcatcgcgcaccacgagtccgaaaccactttcgaatccaacccggcgcggggtgcccaattctacccgtcgtgcgtgcagatcgaagtctctggctcgggcaccgccgtgccggatcagaactttgacttcaacacgggctacacgtacgccgaccccgggatccacttcaacatctacacctcgttcaacagctactccatccccggcccggaggtttggacgggcgctagcaccggcggtggtaacggcaacggcaatgccacgcctacgcagcctactcccactcccactgtcactcccactcccatcgagactgcccagccggttactaccacgaccacctcgacccggccgttccctacccgctgccctggccgccgcctcaagcgtgaggagcccaaggcttga

SEQ ID NO: 234 - DNA, 1979 bp, Scytalidium thermophilum
atgtccgacatgttgtcctcacctgcctccttgggcgcgggtatcacgccgccgcctcttacgctacctgctgctgctcccccgatgatctctgctaatacatcggcgccgcctcatcagcctcctcccgctgttccccccgcaaagccgattctacgccgacccccagggtacgtccccctccgccggcgcacccacaaaaagagccgcacgggatgcgccaactgcaaggcccgcaagatcaagtgcgatgagagacatcccgcttgcatcaactgcctgtcccacggcgtacagtgtccctatctcctcaacggtgggggtccgggcacgggacccgggacggggacggggacgggttcgggatcggggtcggccccaactgcaaccccattgaacgccaccaccgttagcaccggcggctctcccgggaactcgagttttattagtactactacaaattccctcgactcccctgtcccctcggtcctcaccccctccagcttcccgacaccttcctctcccaaccacaccaccaccaccaacaaccatggcggcctactcaccccatctcgggcgtctccctcgccctcctcctccggcgggctacccatgctagagctcgagctgctgcacaactggacgacgcagacctaccggaccctgatggctgagccgatctgggacttttggcgcgacgacgtcgtgcgactgggcctgcgctgcgagtacgtcatgcagaccattctggccgtgagcgccctgcatctggccttccaccggccagataggagagatgagtacacgaccgagggtattctgttgcaccagcgcgcgtcgaggtcggcgatgcaggtcatggcggcgatggataaggaggatgcggatcaggcggcgagtttgatggtgttcagtgtattgactgtcttttttggtatgtctctccttttccacttcctcctcgggtaactacctaggtatgaccatgaccatgaacatatctctaacctctcctcctaccagccctcgcctgcccccgccgccccaaccccgacgggaccttcttcatcggcgaatctggcttccccgactgggccctcctcctccccggcaccaagtccctcgtcatgccgctcagcggcgaccgcggcctgcaaaccatcgtcgccccgttcctccgctacagcgtcacccggtggtacgcgcagcgcgccatgctggagaagaagggtattcctctcccgtcgaaaagcaccgccgcgtttcgttccccggatggtgccgttcctcctcctcctccgccgttgtcgtcatccgagcacgatcttcacctccatcatcaacagcattatcagcagcagataaaacaagaacccccctcgccccatgatcaacagcaccaacaacaacaacaacaaccagacgatgtccccaaaccccaacccctcctcgcccctctccacgcccgcatcacctccaccatctccgacccctccctcctcgcagcttacttctttgccctcgacgagctcgaaatcgcctgggccctcgccctgcccgactcctcttcttcctcctcagaagacccttcttccccttccccctccacttccaacccacccaccgaaaccccaagcccgtctactcctaccccgcgcgacgacgtcctcgacgcgatggtctggctctggagggtaggcgacacgctcatcccgctcctccgccgtcccgaaggggagggcgggcccgcgcaggaggcggtggtgatttttgcgcattttgccgtgctgttgaaacaccatgagcgcaggacgtggtggttgaggggatggggggaggcgatgttgagtcgtgcgcgggaggtgttggatggggagcatcgggagtggttggaggaggggttggaggggttgaataggttaggaggggggttgggagcggtgggaggggggtgtagtgttgaggggatgttgaattga

SEQ ID NO: 235 - DNA, 1514 bp, Scytalidium thermophilum
atgaacctcctccttctcctcttccttcccctcgcccacgcgggcctccgcttcggctgctccaccctcaccatccagcggctcgacccgctcgtcgagcccggcaacatcccgagcgcgcacctgcaccaaatcgtgggcggcaacgccttcaacgcgaccatgccgaccgacgacgtggccgcgcacgcgacctgcacgacgtgcaccttcagcgacaacttctccaactactggaccgccgtgctcttcttccgcgccgagaacgggtcgtacaagcgcgtgcccatcatgcagaacacgggcctgcccaacgggatcaatggcggcatgacggtgtattatacgcagcatagtctgagttcgaatgggggtgtgaaggttacggcgtttaagccggttggtttttggtccttctgttcgactgttgaccatctttggtgaggatcactaaccattgtcgttttcttctctccggtacatagggcttccgaatgacagtgggcaacccagctttcgcgtcccaacccagcatccgcggcaacccgggcctgcgtttcgtctgtctcgacaacccgggcactcgcttccccgaactcccaaccttccccgaccgcccgtgtaaggcgggcatcatgacgatacaccacttccctgcgtacgtcctccccctcccttttgtactgtccctcagccttaactccccatcatacatcccaagctcaagtaaacaacccccatactcaactcactcattcactccatccttccctcgacttcgccactcaccaccaccaccccaacctaacccaacccctgatctctctccgagcagcagcagccttctaaccgagggtactaacaaaccaacagctgctgggacggcaaaaacctcgacaccccctcccaccaatcccacatgtactccacgacgcgcgaatccttctccccagcagggccctgccccccttcccacccggtccgcacgccccaaataaccctcgaaaccctctgggacacctcctccttcaaccacctctggccggcggacggttccaacccgttcgtcctttcctacggcggccgcggcgatggggtcggctacggcacgcacgccgactacgtctttggctggaagggggacgcgttgcaaaaggcgatggactcggattgcatggctagcggatgtgagaatggacggccgttgaggagtcagagcgtgcaggttatgaataagtgtgcggtggagagggtggtggaggaggatattgatgggtgtaagtgcctaccctgcctacctaccgacctatttttccctattgccatgccgtcttaccctgccttgcctactttcctacctaaggtagctagcttctacatactacgtacaagcaagccaggtggtgtgggtgggttgggatggttgctgtaatacgtgtcggcttgactgatactaacgtgttggtgtaatagggcttccacatctccctggccaaggccccgaggatgtctag

SEQ ID NO: 236 - DNA, 1143 bp, Scytalidium thermophilum
atgtggcccactcccaaggcagcctacctcatcctcctggctcactcgctgctcgtcagcggctcgcccgtcgacgccgagatccaggcccgccagtcatgccctgagatccacattttcggcgcccgcgagaccaccgtgccgtcgggctacggcagcgccggcgccgtcgtcgacatgatcaagcgcgagttccccggcgccacctccgaggccatcaactacccggcgtgcggcggccaggctcagtgcggcggtatccagtacggcgactcggcccgccagggcacccaggccgtggccaacgccgtcaacagcttccaccagaggtgtcctaacaccaagctggtgctggttggctactctcaggtgagcttacccgtcctttgagtatggaaagggtaaggaacagtcaagctgacgaactcacagggtggtcaaattatggacaacgccgtctgcggcggtcccgactccggctcgggcatcaccagcaccacctctcccatcaacgcctcggcccacgagcagatcaaggccgtcatcctgatgggctctccccgctacgtcgccggcctgtcgtacaacgtcggcacctgcaccgctcagggcgtaagtcttccccagcaccatcaactcccccacaatccgatcccaaccataccattccaccaagccacttgcttcaccacatactgacccgaactccagttcgccgcccgcccccgcggctacgtctgcggcaccaactctgccagcaagatccaaaactactgcgactcgcccgacccgtactgctgcacgggcaacgacgccaacctgcaccagcagtacggcagccgctacggccagcaggctttggccttcgtccgcgcgcgcctcaccgagagcggcggcggcaacaacaaccccaccaaccctaccaaccctaccaacccgaccaacccgactaaccccaccaacccgaccgacccgtggaacccgggcaaccccacgaacccgggcaacccgggcggcggcaacggcggcaactgctcgcctctctggggccagtgcggcggccagggctggcagggaccgacctgctgcagccagggcacttgcagggcgcagaatcagtggtactcgcagtgcttgaactaa

SEQ ID NO: 237 - DNA, 1426 bp, Scytalidium thermophilum
atgcagaccaagtccatcctcaccgcggcgctcctggcggcggcgcctgcgtcggcccagctccacgagctcgccgtcaaggccggtctcaagtacttcggcacggcgcttcgcgagggcgccatcaacagcgaccagcagtacaaccgcatcctcagcgacacgcgcgagttcggccagctggtgcccgagaacggccagaagtgggacgccacggagccgaaccgcggccagttcaacttccagcagggcgacatcacggccaacaaggcccgccagaacggccagggcctgcgctgccacacgctcatctggtacagccagcttccgggctgggtaagtaacttcactaacataatgtgagagagtaagacacgatgctaactcttgtctcccgaataggtctccagcggcaactggaaccgtcagacgctcgaggccgtcatgaagacgcacattgacaacgtcatgggccactacaagggccagtgctacgcgtgggacgttgtcaacgaggccgtcgacgacaatggccaatggcgcaacaacgtcttcctgcgcgtctttggcaccgactacctccctctctccttcaacctggccaaggccgccgaccctgacaccaagctgtaagtcattcccaccttccaacccgactctgtaatatcccccgacctcttattaacatttgccttaccccaggtactacaacgactacaacctcgagtacaaccaagccaagacggaccgcgccgtcgagctggtcaagatcgtccagaacgcgggcgcgcccatcgacggcgtcggcttccagggccatctgatcgtcggcagcacgccgacgcgccagcagctcgcgaccgtcctgcggcgcttcacctctctcggcgtcgaggtggcctacacggagctcgacatccgccactcccgcctccccgcctcgcagcaggctctcgtgacgcagggcaacgacttcgccaacgtcgtcggctcctgcctcgacgtcgccggctgcgtgggcgtcaccgtctggtccttcaccgacaagtactcgtggatccccgagaccttctcgggcgagggcgacgcgctcatctacgaccacaacttcaacaagaagcccgcgtggacctccatctcgtcggtcctcgccgccgccgccaccaaccccccggcttcctcgagcacttcggtcgtcgtccccaccaccactttcgtcacgaccactactactcctccgcccatctccagccccattgttcccagcaccaccacctctgccgtccccaccaccaccgtctcccctcccgagcccgagcagacccgctggggccagtgcggcggcatcggctggaacggcccgaccaagtgccagagcccctggacttgcactcgcctgaacgactggtacttccagtgcctgtaa

SEQ ID NO: 238 - DNA, 1682 bp, Scytalidium thermophilum
atgaagactccccgtaccagcgcggccgtcgcggccctgctgctgtcccctgccgtcagcgccaccggcaacctcctgacgcccgacaagcttgaggcggatatcaccactcgggagtaagttgagacctccggcgcaaactccaggattcttgctaaccacaccaaccccgtctctccaggctccagaacgtcctgtggaacttcaaccacatcgccgaccgcaacggcggcaaccgcgcctttggcgagcccggctacaaggcgtccctcgactttgttctcgagcgcgccaagacgcggttcggcgactactacgacacgtacgtccagccgttcaaccacacgtacgacaagacgcgcttcatctcggtcacgggccccgagggcgaggacgtcaaggtcgtcagcccccagtacaaccccgccacgccgcttcccgacggcgtcacggccctgctgatcgacacccccgtcgacgacgagaacggctcgggatgctatgaggagcagtgggagggcatcgacgcgactggcaagctggccctcgtgaagcgcggcgcctgcgctgtcgcggataaactgaggcttgctaaggcccatggtgctcttggtaagttttctgttctggaccattcaaagaatcaaggaatttgttagaacaaacactgaccgtgatgcgctcaggtgtcatcctgtggaaccaagatccgggcgacatcgtcatgcccaccctcggcgcggacagcattggccagaccgtccctgtcggcatcattccctacgaggttggcctcgcctggaaggcccgcctggccgccggcgaggacgtcaaggtcaagcttgtcgtcgatgccatcatcgagacccgcgagacgtggaacatcatctccgagaccaagcagggcgacccgaacaaggtcatcatgatcggcgcccacctcgacggcgtgcaggccggccccggcatcaacgacgacggcagcggttctgctgctcttctcgagattatgaccgccctgcgcatgtacgacggctacccgcacaagatccgctttgcctggtggggtgccgaggagagcggtctcgtgggctcgctctactacacctcgaagctctccgaggaggagcttgacaagatcaagttctacttcaactacgacatgatcggctcgcccttccccatgttcggcatcggccaggacgagctcagcggcaccggcgccaaggtcctggaggagtacctccggtccaagggcaaggacgtccaacttgggtaagtgttcccatccaaatacaataactatagaccagttttctgataatgtcatccacagctccttcggcggcggctccgaccacgtcggcttcgtcgagctcggtatcccgacggcgaccctcttcaccggcgccggcgctccctgggatccgtgctaccaccaggcctgcgacacgctcgacaacatcgactgggacgcgctgaccgtcaacgccaaggctgcagcccgcgccctcgccacgctggccaactccctcgacggcgtcggcacccgccgcaagacctcgcctaacccgcgcagccgccgcgccgccctgcgcaacttccagaagtgggcggccgtcacggaggaggcggagcgcggacagaagtgctcgcacagcaagcacaagacggttgtgtaa

SEQ ID NO: 239 - DNA, 1447 bp, Scytalidium thermophilum
atgtttacacgaggatggaggagagcggctgctgccgctgccggcgccgtcactctcttcagcaacacagcaatcggacaaacatggtcagcatgtaacccgctactcactagtaagtcaactcccatctccagcagatgaggcacccaaaaaactaacaatcctccccaggtggctgccccgccaacaccgccctcggcatgaccatcaacgtcgatttcacccaaggcgaagtcaactccttcgtccccagcggtggcaacccaacctacgggcccgacggcgtcagcttcaccgtcgccgggtccggcgactccccgcaactcaccagcatcttctacatcatgttcggccgcgtcgaagtgaccatgaaagccgccccgggcgccggcatcgtcagctctctcgtcctcctctccgatgcgctcgacgagatcgacattgaatggctcggcgccgacgccaacaccatgcagaccaacttcttcagccgcggccggcccatctacaccaacgcgcagttcaacccggcgcccaacaaccaggccgagttcctcacctacatcatcgactggaccaaggaccgcatcgtctggtacgtcggcggcaccgtcgtgcgcaccgtcaccttcgccgacgccggcgaccagtatccgcagacgcccatgcaggtcaagtttggcgcctggtccggcggcgacccgggcaacccccagggcaccatcgagtgggcgcgcggcccgaccgattactcccagggccccttcagcatggtggtccgctcggcgcgcatcaccgactactcgaccggcaaggcctactactacagcgaccagtccgggacgtggcagtcgattcggtccgagggcggcgagatcaacggcaacgcgaacggcgcggcgcccgtcgagaccacggccagcgcagcgccagagaccacctacaccgcctcccccaccatcccgccgggcggcatcatcggccacacctctgccgggtccacggtgatccgcaccgtcggccccatcccctcgggttgggtcatgacctcggatggcaaggtcgtgccggttggttcgagtactgtaagtacgtgccttttaccataaacattttccctgtcttcaatggcgatggcacatattcacccaaacctaatcttgataaaaccaaaatgctaatacaaaaaaaacagacacccccaacctcctcgccatcttcggactcggactcggactcctcctcttccggctctggcaataataacggccaaaccacgttcgatacaagcgtcctccccaccggcagcgccggaggctcggacttcttcccgacggccgcgcccccgatggacagcggtgtcaaaatggtgccctcggcattggtacccctcatgacggcgcttttctcgtctgttttcttccacttcctccgtttgttggtttga

SEQ ID NO: 240 - DNA, 1005 bp, Scytalidium thermophilum
atgcggttcagcagatccctcctcctccttttagggaccaatccgctcccttccctcgcggtcactctgaccaccatcttcacccttcccgggcccacccttcccggctcctggttcgagaacctcgccgtgaggcccaacggcaaaatcctcgccacacgcggcgatgcgcccgaaatctggcaaatcgatccggccaccaacaccggctcactgttggtgagcgttaccggcgcctacaacctcacaggcatcgccgaggtccgcccgcgccaccatggcaaaggcaagacgcggcacgtgcacgagacctacatcttcgcgagctcttacatcccggccccgttcaccgtcgcgccggggagcgctaaggtgtggaagctgaccttcggacactcggggacgccgaccgtctcccttctcgcggccatgcccagcgcgggcttcctcaacggcgtggcgtcgtgggacacggggcgggtgctgatcagcgacacggaactcgagtgcgtgtacctcatggacgtggacacggcgtcctacacgacgccgctcaccgggctggcgggaattaacggaatccaaacacgcggctcggcgacgggggcgggtcatctgggccacatgtacgtttatcgcgcggaccatttgctgtcccagctgagcaggatcccggtggattcgaatgccgtggcgaccggctcggcggagctgctgtcgaacgggacctcgattgatgatttcgctatcaacgtggatagcacgggagctggcaaagcatatatcggcgcgatgtacgataacctggtgcaagaggtggacgtggcggctgcgccatcttctgggctggggacgagcagcttgttggcgaacgacttgacaggcacggggtacggcctggtcactgtcgtggcttttgggaggacatcggcggattcgaatgtgttgtatgcgactgctgggcaaggcggaggtaatgcggcgattgtgaagattgagccttga

SEQ ID NO: 241 - DNA, 759 bp, Scytalidium thermophilum
atgaaactccaatccctcctcacatccctcctcgcttccgccgccctggcaaccccggtccgccgggacgtcgattttgacctctacaccctcaagatctccacgtaagcatcgcccccctctttttgtccagcaaaacaaacccggccgcctctctatcctaggttaggcaactaacccaacaacccccaaccccacagcaaccacccagcccttgacggcctctacctcggccccatccccgcgcccggcggcggcgccaagaacgccacggctggcctcgcgctcggcgtggtccccggcacccaggcgcagtcgggcatcatcgtctaccccgtcgcttcggaggacccggggctgaccgcattgcacaccatcgacggcggggcggtcctcgtggcgggaaggcacggggtgctggacctggccgccttctacggcgatccggcgtcggcgcccgtgccggagggcgtgactatcgattgggattcgttccagctggtggaggaaggggcggaggtgctgtttgccaatgctaagggacggtgggtggcgttcccgagctatgatggcacttcggggtggagagtgacgttcaaagaaagtgagtttctccccctcttctcaacttttcctggagctggtgtggtcgtatgaacaagaagaaaaaagaagctaacagtggtgctagccacggcgttctcgacgacggactatgttcctgtctccgtcgtgtacgagtcgattcggtgggactag

SEQ ID NO: 242 - DNA, 2206 bp, Scytalidium thermophilum
atgatgcgaagaggcctcgtcacaacagccttgggcagtcttgctcaattggcatcagcactctacatcaatagctccgtaacggccccctgcgactcgccgctctactgccagggcgagatcctcaaagccatcgagcttgcgaggcccttctccgactccaagacgtttgttgacatgtaagcaatcacccctcaaacagtccgcaaggacaggaggccaaagcacaggaactcactcgaacccttctaggcccaccatcaagcctctggatgaggtgattgcggctttcagcaagctgtctcttcccatttccaacaactcggagctgaatgccttcctcgccgagaactttgcccctgccggcggcgagctggaggaggtgcctgaagacgagctgtcgacggaccccaaattcctctccaagctcgaggacaccaccatcaaggagtttgtcgagaaagttattgacatctggcccgaccttaccaggcgctatgccggcgccggtaattgttccgagtgcgccaacagcttcatccccgtgaaccgcaccttcgtggtggccggcggtcgtttccgcgagccctactactgggattcgtactggatcctcgaggggctcttgcggacgggcggctcgttcatcgaaatctcgaaaaacatcattgagaacttcctcgactttgttgagaccatcggctttgttcccaatggcgcgcgcatctactatctcaacaggtcgcagccgccgctgttgacgctcatggtcaagacttacatcgactacactaacgacaccagcatcctggaccgggccctccctctcctgatcaaggagcacgagttctggaccacgaaccgcagcgtgtcaattaccgctcctaacggaaaacaatacaccctcaaccagtaagtcctgggattccatgtttgtacctaaacatggcggactgacagtgacgccagatatgccgtgaacaacaaccagccgcgtccggagtcctatagggaggattacatcacggctaccaaccagtcctactatgctgagtcgggcatcatctaccccgtgaagaaccctctgaatgagtcggagatcgccagcgtctacgccaacttggcgagcggcgccgagtccggctgggactatagctccaggtggcttcgcacgcccaacgatgctgccaacgacgtctacttccctctccgttccattgccgtcaacagccttgtgcccgtcgacctcaactcgatcctctaccagaacgaggtcatcatctccgagttcctcgagcagacgggcaactcctcagcagccgaaaagttcgcctcagcggccaagcaacgcagcgaggccatgttcgatttgatgtggaacgcaacccactggtcatactttgactacaacctcaccagcaactcgcagcacatctacgtgcccgtcgaccccgacgtcaccgaggcggaaagaggtgacgcgcccgagggataccaagtcttcttccacgtcgcccagctttaccccttctggaccggcgccgccccggccagcctcaagtccaaccccttggccgtgaagctcgcctacgcgcgcgtcgagcacatgctcgccatccgccccggcgccatccccgcgaccaacttccgcacgggccagcaatgggaccagcccaacgtctggcctccgctgcagcacatcctgatgcagggcctgctcaacaccccgcccacctttggcgaatccgacccggcctaccgcgacgtgcagaacctcgccctcaagctcgcccagcgctacctcgattccaccttctgcacctggtacgccacgggcggctcgaccagcgacatgccgcagctcgagggcgtcactcccggatcaacgggcaccatgtttgaaaagtactcggacgtggccatcaacgtggccggcggcggcggcgagtacgaggtggtggagggattcgggtggaccaacggtgtgctgatctgggcggccgacgtgtttgggaaccaactgaagcggccggattgcggcaacatcacggccgtcgtgacgcatccgggcaacgataagcgcgaggttgattttgatctgggcaggcgtgcggtcgagctgcacccgagggatgcggcgtggacaaagatgtttgggcggagtagggtgagggcggagatgaggaagcgggcagagaggaattga

SEQ ID NO: 243 - DNA, 1751 bp, Scytalidium thermophilum
atgctcgccacaatctcgaagatcgctgttggcgttctggccctcaccggccggacatctgcggcggatgcccaagaatggaggacacgatccatctaccaggtcatgatcgaccggtttgccctcacggacgggtcgaccgacaaggaatgtgatgtgtcccgcttctgcggcggcacgtggaaggggctcaagaacaagctggattacatccaaggtgcgctcacacctccccattgtcgcctcgactgttgtcctctgccgccggcggcagcacgaccctgacatatgataccacccaggcatgggcttcacagccatccagatcagccccatcgtcaaaaacaccgacgaccacacggccgtgggcgacgcgtaccacgggtactgggtgacggacaactacgcgctcaacaaccggttcggcaccgagcaagacttcaaggatctcgtggccgaagtgcacaagcgcgacatgctgatcatggtggacgtggtggtcaacaacatggcgcagggcttcgacaacaccatcccgcccaagatcgactactccaagttccacccgttcaacgacgacaagtacttccacccgtactgcaacgtgaccaggtgggaggacccggaggactaccagaactgctggctgtatccgtacggggttgcgctcgcggacctggccaccgacaccaaggaggtctcggacgagctgaaccgctgggtgaagcagctggtgtccaactactccattgacgggctgcgcatcgacgcggccaagcacgtcaacgacgagttcctggcgccctttgtggcgtcgtccggggtgtttgcgttcggcgaggtgctctcgggagtgccgcaggacatgtgccggtatcagatgctcggactgctgcccggcatgcccaactacctcgagtactacgcgctggtgcgggccttcaacggcgagtccctcgagaagctggccgacatgcgcaatcaggcagcctcggcctgcaacgagaccaccctcctgggcactttcgccgagaaccacgacatggcgcgcttcgctgcgcgcaacgacgatatggcgctggccaagaacgccatgacgtatgtgatcctgaacgacggtatccccactggtatgtacagttcctgtttgacaacctagtgtagtggtgaacgtcggtggctaacgcgccgcagtgtatcaaggccaggagcagcacttcaacggcggcgataccccggccaaccgcgaggcgctgtggacgtccaagtacgacacggaggctccgctctatgtcctgacgtccaagctcaacaaggtgcgcaacaacgccatcaagctgtccgagtcttacgtcacggaacccgccgagacgctgctcgccgacgtcaaccgcctgtgcctcaaacagggcggggacaacgcgaccgtcgtcttttgcatcaccaacgagagtagccaggggtccagctactcgaccagcgtgggagggttcaagcctaaccagaaggtggtggaggttgtgcgctgtcggcacaccaaggctgacggtgttgggaatgttgttgtgtatatggaccagggcgagccgcgcgtgtatgttgccgaagaggtgcttgagggcatcgatgtgtgcgaggagacgacgaaggacgggccggctgagaatggtgttgggcgggtgatggttcagggtatgtcagggaccgtcatgttggtaggtgtgttgtcagctatcttcgttgcgatgtag

SEQ ID NO: 244 - DNA, 336 bp, Scytalidium thermophilum
atgaagcccaccgtcctcctcaccctcctcaccaccgccgccgcctcccccctcaccgcctggcgcctggatctcacaaccaccgacagccgcacgctctcgctgcgcggcaccaccagcgacgtcgggaaatgcttgactgtcccgttggccagctcgctcaccaagttccgcagggccttcttcgacccgcaggccagcctgtccagcgttgcccggtttgagctcttcagcgactccagctgcggccgcaccggcttggtctacaccggccggaggggcgtccatacctttaacccgagcactgtcaggagctatcgggttaggaacctttag

SEQ ID NO: 245 - DNA, 2366 bp, Scytalidium thermophilum
atgaaggttgagcagcgcgcccttctcgccgcggcactggcgctcgccgggacgcccggtgctgaggcgatcctccgtttctcctgctcggagctcgtcactgagcgtctcgacccgtgagccaatcctgcagatgtccgacaggtttgcttgtgttctctgttgactgacggtctctagcctcgtcttcccgggcgttgcccaatccccccatctgcaccaggttgtgggcggcaacagtgagttggcgcgagcaccaactaacaggaggaacggttattgacgacgacatgcagtgttcaacatcacaatggatccaaacaggcacaatattggtaagttccaggtcccaaaatatgaagttgttaggcgctatgacgtcttgaggaacgggagagggtccaatattcctgagagccccaatgcccgaagaacgcacccgatatcatatcaggggcagagatggctgacatggtcttggcaggcgaggaggcgacatgcacgacttgcacattttcagaagacttctcgaactactgggtatttttctctcttcttcctcttctcatctatggactgctaacttgggtctagacggccactctcttcttccgggcacgcaatggctccttcattcgggtccctcagcgaggcaacattgacttcgagtcagctcgtggcggtggcatgactgtctacgtgagtattacccgactgataaacactccgactggaataacaagctctaacttcacgcacaacagtacactgctagctatcgtatgtgctgctcttccctcaacagctcatcccagatcattaaccccaggcagagaaccaaaaggtcaccgccttccgccccggcttccgcatgatcgtgggcaaccccttctaccgcacgcaggctgaggcgtcccggttccggcaattgaccttcacctgcctcgacaccctctacacccgcacgggcgagacgacctccatgcccacccggccctgcaaggagggcatcatggccaacattcgcttcccgacctgctgggacggcgtcaacctcgactcggaggaccacatgagccacgtcgcctacccggcgagcggcaccttcgagagcggtggaccgtgcccagcgtcgcaccccgttcggattccccagctcttctatgaggttatctgggatactcgccagtttaatgaccgcagcctctggcctgaggacggcagccagccgtttgtctggtcgtatggtgacttcaccggatatggcacccacggtgatgtgagtattactcgcgttcttgaaagccgtttacgccgtgctgactgtttcgtagtacgtcttcggctggaagggcgacagtcttcagcgtgccatggatgccaactgcgacggctattgcccacagctcaagacccaaagcatcgctcaggccaaccagtgccggcagcagcaaaaggtcaaggagaacattgacggctggcttgaccgcttgccgggtaacgttgagatcaccggtcctcagcccggctcgggcagcggaaaccccggtggcaacccgggtggtaatccgggaggcaatccggggggcaaccctggcggaaatcccggcggtggtaacccgggtggtggcaatcctggttgcaccgttgcaaagtggtatgtggaactccttgatctcttgacagacaatgatggacttgctctgacacctacatcaggggccagtgcggcggccaaggctacaccggctgcactacctgcgcggccggctcaacgtgccggttccagaacaactggtattcgcagtgcttgtaatgtctgggtgacgaaggacccatgagtggtgttgtggatgaagacatctggtagaaggaatcaggagacaggggctgataaaatcaccagtgcagtaaatagcagcacatgtacatacactgcgggacaagagacttgtgacaactcattcatggggtattccgcttgaacgcttgggaaattctccccgcttcccggaaattgtcatcctacccgatgacactcctcagggatgtgctcgttccttcagctcctcagacgaagccgcctcctgcttgaccagatattcctcttctttctcatcgctctcaacaaactctggcgcatctcgagagacgtcagcccagctcatggcagccgggtcggtcagaatggaccattccccaagcgtctcccactcatcgtcctcatcctcgatactgctatcgtgttctcctttgtcactaatcccctcatctccttccggctgttctaccgcttcctctctgcaggactgctccgctgcttcctccacatctctggccggttccgagacttgcactcctcctga

SEQ ID NO: 246 - DNA, 1363 bp, Scytalidium thermophilum
atgcgcttttcacttctcgcccttgtggccctcaaggccgcctccgtcatggcccttgatcccccttccgaagtgccgacggatcctactgaggcgctccaggaactggaaagtctgaccgaatcggcctacttggagatcacctcggcacttcaggaggcagagaacaagaggcgcatcaagcgcagcagctcgtgcaccctgagcaagcttcgcatccgccgggaatggtgagtgtcacttgtccaagccacaccttaaccaaacccccatagatgttctcgcactgacacggcatgtctcaggggtactctctcgacctcgcagaagaaggcctacatcaacgccgtcaagtgcctgcagtccaagacggccaacactccctcgtctctggcccctggcgccaagacgaggtttgacgacttcgtggccacccacatcaaccagacgctcaccatccactacaccggcaacttccatgcctggcaccggtactacgtctggatctacgagacggctctccggaccgagtgcggttacaccggcgctcagcctgtgcgttgactttccgtcccatccttcacctgacccctgggctaaccacttgattcttcagtactgggactgggccaagtctgccatcaccggcctgcacaactctcccgtctttgatggcagcgacacctccttctcgggcgatggcgagttcatcccggacaagccgaacctcgagctcggcggtggcctcggcctgccgcctctcatcctccccgccggcacgggcggcggctgcgtgaccagcggtcccttcaaggacatggttgtcaacctcggccctgtgtccctggaccttcccggcggcctggtcggcgccaaccctgacggccctctggcctggaacccgcgctgcctgaagcgcgacctgaccgactggatcaaccagcgcttcgccaacgccacctcggtgctccgcaacatcctgctcccgaccaccacggcccagttcaacgacatgatggagggcgttcccggctcgggcgagatgggcctgcacggcggtggccactactcgatgggtggcgacccgggccgcgacgttttcgtctcccccggcgacccggccttctacctgcaccacgccgccgtcgaccgcgtctggtacctgtggcagctgctcaaccccctgactcgcatgcagggctccagcgccatcgccggcacccgcaccatgatgaacatgcctcccagcgacccggccaccattgaggattacgtcgacctcggcttcgctggtggtgtgcctaccaagatcaaggacctgctggttaccaccggcggccctctctgctacgtctacctctaa

SEQ ID NO: 247 - DNA, 1785 bp, Scytalidium thermophilum
atgaaggccactctcttccttcctttgctcttgtttggctttgcggccgcctccaagtgccgcccgcggacgtcgaaaaccgtttcaccgtccgtctcgtcgaccgtgtcgtccgtgtcctcaacggcgtctgccactccatcgccgacatgcgcacccctcttctcgcttgagggcgtgtcggaggactccttcaatcctgctctcacccctttctctctcaccttggcttgtggcatcctcgacacggcgaactacactgttttttccaacgatgagtcaaccaacagcccctttggcaagctcgtcgaaggaaccacagccaatgaaaactccatcaccatccccggctttaaccccggcaaggtgtccatcactgtggctgcgtttgacactgctggaacgcccatcctgcagtccttttccctgctgtttgggtccatctcgatgcccgtccgcgtcctagatgagaacggtgttcctgttagcggtgtcgtcgtcagggccgacgcaaccgtctaccccggcatcgcccagaacggcacgaccgacagcaatggcctcgtcaccttcaccagcctcgcggccacgacgatcggtctcttcacccagacgtcggacaacaagatcggcgtcagcggcgtcgctgccacatcccagacggtgacgatccgcctgatccccttcctgcccgccagcaacaccaccgacttcaacgtcgacaacggcatcaccgggtggacgggtggaagaatccaagacctcaaactaaagaagcgcgcccccggtctcgttgttagcaccgacagcacctatagtctgcagatggcccacgccgagcccaggatctaccccttcaccaagtccgtctacatcaagtacaagttcctgacctacgaggtgccgggtgggtattttggcacccagtacaacgactacttcattgtcagcatccgctccaatacgggcgcctcgaccgccgtctcccggagcatgaacgagcttggccgcggtgcttttgacgccaacggcgccacggattggtacaccctgatcctcccgaccgacgaggtgacggagtgggtcaacttcaacgtcggcgtgtccaacgtggccgacaacaagtacggctccgcggtcattgtcgacaagattggcgacctcaagtgcgacgaatgtggcagctgcgagacgtgccctggcgatcccatgtgccagccgatgtgccaggaacctccgcagagaagctgcgctttctactccgagtgcgccgaggccaggctgcgctgcggcgccgacgggtatcccatccggtacggacaaaagaattgccttgccttccaggccgacttggccaagtactcggcggcgggtcaggcattcatctggaagaccatgcactgcctgcaggtggccctgcgcgatgccatcaactgtgactcgacgtgcgcccaggcgaacgatgcggcgtttgattcgcatccgaagtgctacgtcgagagcgggttctgcgacctttccctgggggactggtttcaggttattaagacggtgaacagagatttgttggggcttcagtcattcaagcagatcgcgcagactacacgtgcatgcgctggccagatgttgatgaagattgacgacgccattacaggatatttgcagcaggcggcggatgacctcttgaacgcggcagtccatactgcgaaggctcttgctatgaaggtgttcagggagctggtcgagcaacttcttgaggacgtgtaccctatccccattctctag

SEQ ID NO: 248 - DNA, 1210 bp, Scytalidium thermophilum
atgttaaaccggaagacgctctcagccctgattgccggggccgccgtcacctcggcatgcaccatccctgaggagacgctgagtgacaccatcacctaccccttcagcatccaggttcagaatgcctctcgccccgaggtgcacaatgagttcttcaaaatgtacccatggggtggtggcgacgcccatctgttcattggtcccgttggtctggatacctatgacttgacactcgtggacggcgtcatcacgcatgacggcatgggcgtccaagccgtcatcaacggcgaggtatgtcaactggccttgcctttggccaatggttggacttcagcatagctgacgtcttcacgcagtggtccgagatcgacgacaccaccaagctcttcatgaccgggcgttccgatcccagagccttcttccagcccacatacgcctgcaacccggacacggacgagctccagatagagctgaccctcgtgggccggcaatatgatccaccaggtggtgtcatttgcgtgcgcgagtccttcgacaacagccacgagttccgctactcgccgccgggcaacacccgtacgttgacttcgtgccatgcgttcccctctcgaacgcacgcctcgcttacattcgtcaacccacagtcattgaccccaaccgcgagtgcatcaccgtcactctggtcgtgatcccgacaaccgagcttcctcccacctcgaccgtggccaccaccatcacgaccagcaccgtttccagcaccgtcgccacgacctcgtcgacgagcacctcgtccacctccaccgccccgacagccaccccgtcgaccgaccccagcgacctcttcaccgacctgacggccctgggctggcggttcctgggctgctcgcccgaggagcggtggacgaccgacggggccttccgcacgctgcccgacgtggtgcacagctccgacaccatgaccaaccagtggtgcgtggcgtggtgcgagggccagggcttcaagtacgccggcaccgaatggaaccgcgagtgctggtgcggcaacgcctacgcgtcgacgcgcgccccgggaactaccatcgccagcctggccacctgcgactacccgtgcacgggcgactcgacgcagatttgcggcggcgatgcgtggttgagcttgtatgagaagtgcgaggaggaggagccgtgtgagaaccaggtgtttacgtaa

SEQ ID NO: 249 - DNA, 1540 bp, Scytalidium thermophilum
atgactcgcttctctcttgccggactggccacagtcctgctggccggcgccgtgtcggcgcaggatcctgtgttggccctccagaaccagggccggcctcagatcgacgcggccatcgccaagtcggcgacttgcaccaaggacaagctccaggttcgccgtgaatggtatgttgaggtttttgagtcacgaaggttgttggatagttacggctaacgctgactctcctcaggggtgacctgtcgaaggcggagcggagggcgtacatcgacgccatgctctgcatcatgagcaagccgtccaggctggaccctcagcagtaccctggcgccaagtcgcggtacgatgacttcgtcgtcgtccacatgaaccagaccatgaccatccacggcactgtaagttgatgacagacatttctggggagtccagggacaagtcggaggggaaaggggtggaagctgggttggggaagaaggaaaacaaagggataccacccggaagacaaccagaaccagtgctgacaatattgtacagggcaacttcctctcgtggcaccgctggtacacttgggccttcgagcgcgcccttcagactgagtgcggctacaatggcacccagccggtaagcataccgcgtgataatcttgaaaatatcaggaaagtttgctgatagcctattcccgcacagtactgggactggtctcggtggtatgaggaccccgagtcgtcgcccatcttcgacggcagcgatacgtcgctcagcggcaatggtgagaagatcgaccacaccatgtcgcctggcatccccgtcggtaacggtggtggttgcgtgaagaccggccccttcaaggagtaagtttccttgcccccctgagagtgttttgctcttgctctgctttccatatcgtccgccctgttggtatcaggttccagatgctgacaagctcctcaccagtatggtcattaccctcggccccatggctcccgtcatcaaccccgctcctcctcgcaacccgcgtgccgatggctacggctacaacccgcgctgcctgcgccgcgacatctccaacatcctgtccaggcagaacctgcgtccgcaagacgtggccagcctgatcactggctccaacaacatcggcagcttccaggataccatgcaggcggtcggcggcttcggcggcggcttccccggcttccccggcggcggtcagcagcagttcatcatgggcgtgcacggtgccggccactacaccatctcgggtgacccgggcggtgacttctacacctcgcccaacgacccggccttctatgtccaccacgccatgatcgaccgcacctggtacatctggcagagcctcaacttcgagtcgcgcaagtttgtcattgctggcggcacgagtatgatgggctggggcagcccgctggccactctcgatgatcccattcacctgggtcctccgggcctgattgctgacaccacctatcacatccgtgacctcgtcagcaccgttgatgggccgttctgctacatctatgagtaa

SEQ ID NO: 250 - DNA, 579 bp, Scytalidium thermophilum
atgcatctccttgctctcctcggtgcccttaccagcctggccaccgctctcccaacaccttccactacctcctcatcactcaaccaaccaacccaacaccaaaaacgcacctgcaccgccatccacccgccaacctcccaaacccctcgagtctacctcgccaaccgcccagacatctccaccgtcgtcacccaaaccgtcacgtggactcttccaccggacgccctcctcccggcctccggcccctgcaccctccgcgcgcgcttcccgtcgctgtgggagattgtcgacacaagcgtggccaagggcggcgccccgctgcccgtaaacgtcttctctgaaacagaggaccaacaagggctgctgatcggcgtgacgacgttcgcgagcccgaacaaggaggacaacgcgccctcgccggacgggccggagagggtggtggtggtgaactcgtttgcgtgcaaggagacgatgactttcaggtttgagctggccggggaaggcgaggtggggttcgtgaatgggttggatgaggggttggggttgactggtgggctggagattgtttatgggtgttaa

SEQ ID NO: 251 - DNA, 2054 bp, Scytalidium thermophilum
atggcttcatccctccggacgctgctccttgccgcaagcctcgtgccggcgacgctggcacagatcatcgcgaggaacgaccctgatccgtccgcggagaacgttgtcctggactctcttgacttctctgatgtcggcgagctccagccactcagtttgggaggaggcgcccagtatgcctgcaagtgctatcacggagagtcttgctggccgtcacaacacgagtggaacgtgttgaacaacaccgtcaacggcaagctccaggtacatatcccacccggagcttcatgctacaacaccttcaatggaccgttgggaacggtaaacacgtacaacgccgcaaagtgcgccgaggccacgcagaactgggccaacgagcaatggcagtaagtactcccatcctaccaaattgtacgtagctagcggagctaacatgggggacagtgtcgagcagcccggcgcgggtctctggacctacttcaccaacgacacctgcaggccaaccacgaacccgtctgacagctgcaccctgggctactatggcgtctacgtgatcatggcccagaagaaacaacatgtcaaagccggaattgacttcgcccgtcgccataatctccgcctcatcgtgcggaatactgggcatgatttccttggtcgtagcacgggctacggctccctgatcatcaatacccatgccttccaggatatccagtggatcaattcatatcagggtcctggaggtcctggaacgtaccgcggccctgccgtgaagatcggcgctggcgtccaagccaataccctcctggcggcgggccactcgctgaaccccccgcgcgttgttgtcactggcgagtgccctaccgtaggcatctcgggcggcttcatccagggcggcggccacggcccgtggtcgaccctgaaaggattctgtgagttgaccagtcagagaacgtgaattgaaagagacggccctgctgaccacagcctctacagctgccgacaacgtgctcgagtttgaggccattacggcttcgggtcactatgtgacggcgaacgagtacaagaacgcggacctcttttgggcgctcaagggtggtggcccggccacttacgctgtcatcctctccaccacgatgaagacgttcgtggacctgccatcggccggcgcaacgctgtacctcaacacgacccacacgctgaacccagatgtgatctggaacggcacctccatcttccacaaatattctaaccactatgtcgacaatggcttgtatgcctactatgagatcctgcccttcacattccgcgtgcgccccttcgtcgccatcaacaagacaaccacccagcttcagagcatcctccagccgatgctcgatgaactggatgctgccggcatcccgtacgacttcgagaccaaggcgtacccaactttctatgatctctacatcgacttgtttgaacccgaaaacgccggcgactcggccctaacgggtggctggatgttcaaccaccacgacgttgccaccaacaacgatgccatcatcgacgccttcaagacggtggcggcgccgcggtccgacttgttcggtatcctcatcggtcacatcttcaacccgggttatggcatgccccaggccaacagcgccacgcatcccgcctggcgtaatgcctccgactttgtcatcaccgtcctgcccgtgcctgtcggctcctcgctcgcccaaaaggccgacctgcagaatgtcttgaccaacgtcatggacgccgctctgcgcgacgccagcaccagtggctgcacttatgtcaacgaggtaagccgagattccgccaccccagagtcactgtccccacatcccgaatcccgagctgacgtgaatgttccctaggccgacccatatcagcccaactggcagagccacttctggggatccaactacccattgctccgccaattgagggaaaagtgggatcctgagggtgtgttttacgcggtctcgacgccagggaccgaagactgggagattgttaatgacaagttgtgcaagaggctttga

SEQ ID NO: 252 - DNA, 940 bp, Scytalidium thermophilum
atgcggttcttcaacccactcgttgtcctcgccctttcgggattcgcctttggtgcagaaggaggactccttggtgcacgcgcaaaaggtcagtcaacccatgtaaatccaaggactagaacttgatatctgctccgagggcaggtgtacgcatagcggcgaaaagcttgcttgaggggttcattccgccatatgtttcgtggcgggttgtttaaccccccatatgtacccggtaggctaactcgcaagaaatagatggcactgtcgacgctcctgcagctatccgtgcccgcaccgaggtcacaaccaaccacaaccacggcatcaactcggaagtgaagagacgctatgcaccccagcaccagcggcggggtgattggaatggaaaggggaagggcaaaggcccgtacgagactccttgcctactcccgcatgatgtggaggagctcgtcgacgcctatgatcgcatcatttccgcatggaatgatgccgatgctgtttacctcgccgacgagttccgcgacacgtccgacagcatcaacatcctggctgggattccgttggggagcgcaacttttccgactagggatgcattcctttaccatatgcagacccaggcacgtttcgctttacccctattgtttctttccataagatatctgatgagaacgccaccagctaactaacctcttcatatcagcccgacaacctgcccctggacatcacccacgcctccccatactcgtgcaccgagatcgccgtcatctgggagaccaaattcggcgtggcagagataccggttcgcgggatcaccattctgggggctaccaagacgaagggcttctggcagataagcagcatggacgtggagttcaactcgctggcctatctcctcaacattggaggcacgtattccaagcctggcgctccgccgtcgtaa

SEQ ID NO: 253 - DNA, 1311 bp, Scytalidium thermophilum
atgcgcttccacagcctgctctccctggccgcaacggccgccgcatccgtcgtcatcatccctggcgatggcgaccccaagccctacacgggtcccccggccatcacatccgaggatgacttcttccgccagtccgcgcccaatgagttctacaacaacaccgctcagctcatcatgacctcgctctctgggaccaccctgtccgcggactcggggctgcgtccgtcgggtgactccttcatccgcggcgccatccaagcctggggcgaacacctgcacctggtcatccgcccagacgaggtctggttcaccatcctcgtgcaaatgaacttctacatgctctcccacgccgaggagatccgctcgctcttcgtcgaccacgagggccaagaagaaatctacatcgaggacttcaccctctacgacgtcatcatccgcttcaaggacgagatccagcgccgcgtcaaaaccgactggcttctcgactggatcgtccccaacttctccaccaccacccaatccgacatcatgacggccaacatcctcatgatgggcctgaccaaggcctacttccgctacgtcggccgcgtcgtctgcggcttgccctccgtcaccctcctcggcgaacgcgaggactggcagcgcctgctcgacaagctcgcctacctcccgcaattcggcaaggaacccgccgagtacgccaaccggctcaggcccatcctcacccgcttcgtcgcgagcttcgatcgcccggacgacccggcgattcgcaagttctggaaccaaatcgtgaccgcctacggcccgcgcatctgcggcgacccgtccgtgttcctgtccggctggatcaccgggttctattactggaacgaccaaggtgggccgttcgcccgcggcagcgcggtcaccgcgcccaagggcggcgtggtcctcgacggcgtcgagtatcccgtgctcgacctcgagatggcgcccgtcgggtacgccaaggcgccgttgctgctgctggacttcaacggcacggccgagttcgaggcgtttgtcgccgcggggacattgggcaaacagatcacccagggcccgccggaggggtatgtcgaggcggtgcagagggtcggggaggaggtggacaaagcggtgttgaaggatgtgtcgaggcatgccacgctcaagccgatgagtgcgtggatggtgtatggacaggcgccgcacaatcggacgcagagcatttgggggtttgaggcggatatgcaggagacgttggcgagcgcgagaaggtggatgacgggtgacttttgtggcgtggaatag

SEQ ID NO: 254 - DNA, 551 bp, Scytalidium thermophilum
atgaagttccccggtgtcctcgctttcctcggtgccgtcgcgacggctgccgctcagtcccccgtccgcggccccaacactcttgtcttcaaggagattggcggtgttcccaacaacgagtgcctgaccttcaccaacgaggtaagctgttttctctcctccgactgtctcgaactggtcactaactgcttcaccagggcatcatcgttaatgctgcttgcgcctggacccactccgaccggcaggtcacacccggccggatcctgggcaccgacgtgctcatcatccagcgcccgtggcagcagcctttccgcccggatctcgtcggcaagactgcctgcattgcctacaaccagggcaccttccgcgctgaggactgcaaccgcaaggatctgctcttcgtccgcttcgacatcggcaccggccagatcgtcgcaaacggccacaccgcttgcctgagcggccacgacagccgggccatcgtcaccgtcgaccccaacggccagaggtgcgccaagttcaccatcaccgccgtcaccccgacgaactaa

SEQ ID NO: 255 - DNA, 565 bp, Scytalidium thermophilum
atgaggttccacttcttcgcccttgtccatgcggcgttgctggcgctcacagcgctcgcgcagagcacgccaaaggcgcctggcctcacctacctctactctctgaattgcaccctcggtgtcccctactcggttggcaacggcccgcacggcaaccgcgttgtcattcccatcaccggcggcacgttttctgggccgaggctgaaaggtgggcgaagagatgagacgaacgatactttcagccagacattgggcgcgcgactgacatccatgttccaaccaaacaggcagaatcgccaacctcggcgccgactggggccttgtcgacaaggacggactcttctctgcagacactcgctaccaccttcagacggatgacggcgcgcatatcttcatccgcacgagcggaccgacgcaggcggacggcacgatccatctccgcatcatctttgagaccggccaccagaagtattactggctcaacaacatcatcgctgtgggcgtgctgagggctggcggtggaggtgtgtcgattgacgcctggcagttggatagcccgaaataa

SEQ ID NO: 256 - DNA, 2721 bp, Scytalidium thermophilum
atgcttgctgtctctgctgtctctgctgcctctacctcgggcagcagttctgatcaattctccttgagcccatctgatcagctctctatccgtctctctttcgccctcgccatggcacgcactgtcgtggacatcaactccaactgggagttccgccaggcagacaaggaggattccaagttcctccctgtcagtcagttcccggccaacgttcacctcgacctcttgcaccacgggttgatcccggaccccttcattggcaaaaacgaactcgccgtgcagtgggtgggcgaggcgacatgggcataccggacgacgtttgtgtcgccgcccgtgccggccggagctcgcgccgtcctcgccttcgacggccttgacaccttcgcggttgtcaagctcaacggtacgaccatcctggagtcggacaacatgtttctgccctaccgggtcgatgtgtctgcccatcttgcccctgaagggaattccaacgagctgtccatcacctttgacagtgcttacctgcgcggctgcgagctggtcgagaagtacccggaccacaagtggggatgctggaacggggatacatctcgtctggcggttcgcaaggctcagtatcactgggtatgtgctttttttgctaccttgttccgaagcaccgctaactctctccagggttgggattggggtccgacgctcctgacatgcggcccatggcggccaatccgtctcgaggtgtacgaggcgcgagtggctgatctcgcggccgatgtagatgttgacaagtctctagaacgtgccgtcgtgactctgacggccgaagtcgagggaccggctgaccaggtccggttcgagttatccctgaacggcaagcaagttgcggctggaactgccgaggccaatgccccgactatctcgttcacactcgacaagccggccttgtggtaccctgcaaggtacggggcgcagccgctgtacgaggtgcgggctactgtgctacgcaatgacatcgagttggatacgataaccaagcacatcgggctgcggcgcgccgagctggtgcaacggccacttgatggccagcccggcacgagcttcttctttgaggtcaacaacattcccatcttctgtggcggcagcaactggatcccggccgacagcttcatcccgcgcattgggcggaagcggtatcatgactgggtcaagcttgtgctcgatggaaaccagggcatgctgcgtgtatggggtggcggcatctacgaggaagaagacttctacaacgcctgcgacgaactcggcatcctcgtctggcaagatttcatgttcggctgtggcaactacccggcatggcctgccctgcgcgattccatcgacgctgaggcacgagctaacttgaggcgactgcgacaccatccttgcatcgtcatctgggcagggaacaacgaagactaccagtaccaggagtcggcggggctcacctacgactacgccaacaaagacgcggagagctggcttgccacggacttccccgcgcgctacatctacgagaagatcttggccgatgcttgcgctgcgctggtgccgcgcaccgcctaccaccctgggtccccatggggcgctggccgcaacacgcatgacgcgactgtcggagacattcatcaatggaacgtgtggcacggcactcaggagaagtggcaggactttgacaagctggtcgggcggttcgtgtccgagttcggcatgcaggcgttcccgtcggtacggaccatcgaagcgtacctgccgcagggccgcgatgacccggaccgctatgctcaatcgtcgactgtcgacttccacaacaaggccgacggtcacgaacgccgcatcgccctgtaccttgcggagaacctacggtatgcgcctgacccgcttgagcagtacgtctacagcacgcaattaatgcaggccgagtgcctggcgtcggcgtaccggttgtggcgccgcgaatggcgcgggccgtcgcgagagtactgcgctggtgctctggtctggcagatcaacgactgctggccggtcacaagctggagcattgtcgattattacctccggcccaagcatgcctacttcaccgtcaagcgcgagatggcgcccatcacggtcggtattgcgcgccgtacacacaagcatcccatccccggggcgcatcgtcattctcgcatcggaactgagtcgcgcacacggatcgaggtttggggcagcaacctcaccctccaggatgcaaatgtcgactgtgtcctgcgcgcatgggatgtcgtaaccggcgaggagacgttctcccagacggtggcctcgggactggtgctgggtgccaatcggtcgaccgagatcgtcgagcgcgatgttcccgtccgcacgccgggggacgagggacgcacggtcgtggccgcatatctcgtgcaagacggtcggcatgtcgcgcgatatgtcaactggcccgagccgctcaagcacgtgcacctccagaagccgaaggcacttgaggcacgactgtcacctgacttcgcgtcagtccacatcagcgcggaagtaccggttaaaggcgtggcgctcgaaaccagcgatgaccgggtcgcgtttgacgataacttgattgatgtggtgccgggtgaggtggtaacggtggctgtacggggtgcaggcgcagacacgaagatcgggacgaggtaccttggtatgtgctaa

SEQ ID NO: 257 - DNA, 1958 bp, Scytalidium thermophilum
atggttgccgcaatggcttcattattacccttacgctcctgtctttctttcttcctcttcttcctcgttgccatccagcccgtcacagctgtttggcctgcccctaagaactttaccaagggcaacacggttttgtatctgcaccaagcggtcaaaatcacttacaatggtgatcctgtatgctggtcttcctcccacctctccacctcttcctcccctgtcgcatcaccacaccacctgtgctttgagaagggctatgatactgaaactggaggtttcctctaccaacagctcagctacacctacggctatgtcccgcgggatatcaccagcaaggaggtggtgcaagccggcgtgtcaagaaccctagatggcatcttcggctccaagttcgtcccttggaaactccataaacccggcagccagttcgagcccgacctgcataagggccagaaatggatttccacattcgagattgtccagacggcgaaggacaagccgagcactttcaagccccttgctggcgaggtggatgaatcgtacaagctgtccgtcagcgctgagggcgccgccaagctgaccgccgcctcgtccattggcatcctccgcggcctcgagactttctctcagctcttctaccagcactcggcaggcaccttctggtacactccctatgcgccagtcgaggtggaagactctcctcagttcccgcaccgcggcatcttgatggacacggctcggcacttcttccctgtagaggacatcctgcgcaccatcgacgccatgtcgtggaacaagctgaatcgtctccatatccacgttaccgactcccagtcgtggccgctcgtgctcccctcgatgcccgaggtctcggaaaagggcgcctatcacccgagtcagacttactccccaaccgacatcgagaatatccagagatacggtgcgatccgtggcgtcgaggtctatttcgagattgatatgccgggacacatcggtgtggtggccctttcgcaccctgaactcatcgtggcgtacaatgagctgccgtaccattggtggtgcgcccagcctccatgcggcgcgttcaagctcaacagcaccgaggtggacaagttcctggaaaagctgttcgatgacttcctgccccgcgtggcgccatacgcagcttacttccacacgggtggcgatgagctgaacaagaacgactcgatgctggacgacggggtccgctccaactcttcagacgtgctgcagcctttgttacaaaagttcatcgatgcacagcacgggcgtgttcgtaaggcagggctgacgcccgtggtgtgggaggagatacctctcgaatggaatatcaccatcgcagacgacacggtcgtgcaggcatggcttggtgagcagtccgtcaagaagctgacggagaagggtctcaaggtcattgacagcaactacaacttttgggtaagcaactgcagctcaaaactccctacgtactcgaccgttccccaaactaattattctttcttactcagtacctcgactgcggccgtgggcaatggctcaactgggacaacggcgcggccttccagctcggctacccctttaacgactggtgcaatccgaccaagagctggcggcttgtctactcgcacgaccccgtggcaggactgaccccggagcaggccaagctcgtgctgggcggcgaggtggccgtctggagcgagaccatcgactcgaccaacttcgacacgctcgtctggccgcgcgcctccgccgcgggggaggtcctctggtcaggcaggatcgatttcgcgacaggccagaacaggagtcagttggacgcggcgccaaggctgaacgagttccgggagaggatggttttgaggggcgtgcggagctcgccggtgcagatgactttctgtacccagggtaagccggaggagtgtgagtacgctccgtga

SEQ ID NO: 258 - DNA, 30 bp, Scytalidium thermophilum
  misc_feature (1)..(30): n is a, c, g, or t
nnnnnnnnnnnnnnnnnnnnnnnnnnnnnn

SEQ ID NO: 259 - DNA, 1059 bp, Scytalidium thermophilum; identical to SEQ ID NO: 71

SEQ ID NO: 260 - DNA, 1199 bp, Scytalidium thermophilum
atgcatctcgcttcgtcgctctttctgctcgccactctgcccttcggcttcgctgctggcaagggcaagggcaagggcaaggacaacagcgatgttggcctcgacgtcctggccaagaaggccggcctgaagtacttcggtgccgccaccgacacgcccggccagcgggagcgcgccggtcttgaggataaatatcccgagtatgacaggatcatgtggcattcgcccgagttcggctcgaccacgcccaccaacggccagaaggtcagttgcagtcccagtcccggtgcaccacttctctggatagtatcaatactgacatgctccttcagtggctgtttgttgagcccgagcgcggcgtcttcaacttcaccgagggcgacgtcgttgcctccaaggcccgccagcacggcaagctgctgcgctgccacgctctcgtctggcacagccagctggctccctgggtcgaggagaccgagtggactccggaggagctgcgcaaggtcatcgtcgaccacatcaccgccgtcgccggccactacaagggccagtgctacgcctgggacgttgtcaacgaggcgctgaacgaggacggaacctaccgcgagagcgttttctacaaggttctcggcgaggagtacatcaagcttgccttcgagaccgccgccaaggtcgaccctaaggccaagctctactacaacgactacaacctcgagtggccctcggccaagacggagggcgccaagcgcatcgtcaagctcctcaaggacgccaagatccccatccacggcgtcggcctgcaggcccacctcatcgccgagcagcaccccacgctcgacgaccacattgccgccatccgcggcttcacccagctcggcgtcgaggtggctctcaccgagctcgacatccgcctcaagaccccggccaccgaggagaaccttgccctgcagcgcgaggcctacaagaacgtcgtcggcgcctgcgtccaggtctgcggctgcgtcggtgtcaccatctgggacttctatgatcccttcagctgggtcccctacttcttcgagggcgagggtgctcccctcctgtggttcgaggacttcagcaagcaccccgcctactacggcgtcgttgaggccctcaccaacaagactcgccgctcgaagcgcagcatttcggaccgccgggccaagctcctggcttaa

SEQ ID NO: 261 - DNA, 1625 bp, Scytalidium thermophilum
atgaagacggcgttgacggcccttttgggtctgtccgtgattaccgaggctgccagcccccaccatcttaggccgcttaggtccctgaaccggcgacaagacgtcaatgctagcaacttcaacggaggtaatcggttcggcggtaacaacaatggtggcaaccggttcggtggcaattttggaggcaaccgcaacaacaacaacggaggcaacaacaacaatggcggtaacaacaacaacggaggtaacaacaacaataacggaggcaacaacaacaacaacggcggcaacaacggcaacaacaacaatgccgcgtccgtgacttgcctggcgcccaacgccatccagactggttctcagtccactggtcagcagggcgatgtgcccattgatggccaggtcaactctgccacgtaggtcaacttgcttcccggccattgctcatctgatgctgactcgtcctagtgacccggccaacttcatcaacttctgcgctggtcaggtcttgaccaacggtctgcagaaccgggatggttcttgcaacggcattcgtacgtggctttcgatactcgaccctcaaatgatacttgctaacattctgagcagcgatgggcaaaatcccggctttcgacaagatgatctcgactgtcatcttgaaccctaagaatggcgacaacctccagcctctcaccaacttcgacatcacgatccaggtcaacaacatgcagcttggtttcttcaccaacgccacgagcacctactacgctgctccccaggatctgaacggccagggcttcgttatcggtcactcccacgtctccgttcaggataccggtggcaccaccaacccgaccacccctctcgatcccaccaagttcgccttcttcaagggcctcaacgatgcgggcaatggtcagggccggctcaccaccactgtcacgggcggtcttcccgttggttgctaccgtgtttgcaccatcactagcgcttccaaccatcagcctgtcgtgatgcctgttgcccagcgtggtgtccaggaggactgccgctactttgctgtcggtggtggttgccaggacctgaacaacaacggcggcaacaacaacggcaacggcggcaatggtggcaacaacaacaacaacaacaacggcggtaacaacaacaatggtggtaacggcggcaatggtggcaacaacggaggcaacaacaacaatggcggcaacggcggcaatggcggcaatggaggcaatggaggcaacggcggcttccggaacaggttcggaaacaacggcggtaatggcggtaacaacggtggtaacaacaatggcggcaacaagaacaatggcggaaacaataacgctggtgcccggaccgctggcgttgccagtgcttctggtgccattggtggcatcgccgccccggccattgagaatacgaacgaccccgttcgcccgttccgggttgatggcaacacgttcacctccaaggccgacgccgcccagcgcgcctgcgccatccagaacaacgcctgcgccagtgccgtcaacagcgggcaagtccagggcaagacggttcccgactgcaacgcgcaagaagcccaatgccgcgccgagttgagtgcttaa

SEQ ID NO: 262 - DNA, 30 bp, Scytalidium thermophilum; identical to SEQ ID NO: 258
  misc_feature (1)..(30): n is a, c, g, or t

SEQ ID NO: 263 - DNA, 2145 bp, Scytalidium thermophilum
atgggccaggtcatggcaggtattgctctcctcctggtggccggtaccggcaccagtgcaggtcctgtccggctattacatccagatggctggcctgaccccattccggcctcatcggttgggccattgaactggtcgaccatccatcccccaatctacgcctcacaatggtcattgtcatcatcctcactcagacccagcaacaaggatcccaatgccccacctctcaagtccagcatctctgttactgacacgtccttgcccaacatcgtcgactggcgcaaccgggacggggtaaactacatcacgaccccccaggaccaaggagtctgcaacagctgctgggcgttcgccacaaccgccctcatcgaggccatggtgcgcatcgagcacggggcttggaccaagcgcagcgaagccgacgtccactccggcgtcggggccttgtgcgccgactacggtagtgccgatgaagccctggcctggatggctggaatgccgcaaccctgggaccagcaaaaccgtctccaaaaccctcctggagtcgccgactgggcttgcgggccgtacgaggacagagacccgaccattcgcacgagatgtgcagaccgagatggccgggccacccacgtgcccccgttccaggcattggggacgatggaggatcagaaacggtggctggatcggtacgggcccttggtggcgacgtttgtgctgtactcggactttggaacatggaggccgacggaaaagggaacggtgtatcagtgggacggcatgaaggattcggtgggaaatcatctggcgttggttgtgggatacgatgacaacaagcaggcgtggatcatcaagaactcgtgggggaggcagtggggagaggatgggtttgcctacattgcgtgagtctccgaggccaacgacctcttctcttccatgtgtcctgactcaacgatattaggtacggcacaggcaacatcgacaactgggtcaagcacggcgtcatgaacgtcaatccggatccctggacgcgaagacgccaccagaatggctgcatgctgcaatccagcaacggtaatacgcatcgcaattttgaactagtcctccctgccccaaagagcaaagacatttaccacgtctaccgcgacggagactcagggaggtggaccaaggccaccaaaatccacaatgccgacctcgtcgggccactgaccatgattggaacctcattcaatcgagacctgtacgccctaggcttggaaaagggcgccgtcctccatcaatggaagttcaaccaggctcaggggacatggtcacatacgagataccaccccgacatacaagacattgatggggttccgggactcacgcagaccgacgattcgcgcctcgtgatggttgtgaaactgtccaacgggactttgattgaggtataaacacccctaacgccttgagactagtcttctaatctctttctcttggcttcatcgaggctggatagcttacaaaggactttaacagctgctacaagagcccaatagtcagggctggatcaaaataaagcaacccatcgccaccaacatctcccaaagcggaccctctctcgttcaatccaacgtcgggctcaacatctatgatccaaacggcaattctcgcggcaacatttacatcgtggcggtccgggacgacggcagactacaactcttctggcggcccggagacggcgacagatggcaggcgggcgagatctttgggcagggagttccctccaactccccgcctgtcatgatccaggactttttcgacacggtcgacgagaccagcgtcggcgggttccagctcgtcgtcgccgtgagtggccaggttcagcactgggtcagagataacaggaacctgagccagcagaagccggtcgaaggggctcaggggccctggaggttggtagaatcagtgggcaacggggtgctgcgcgtctgggcattggtgcagggaagttttggacagaagatgcatatgatcacagagggggcggatggaaggttttcgtattgggagtgggatggacggtgggagaggttggggacgttgcccacgcttgatgaagagtggtcacatgtgacgatcgagagttcagctgtggtggtatga

SEQ ID NO: 264 - DNA, 1472 bp, Scytalidium thermophilum
atgaaaaagacactgctgctctgttttatccatggcttcaaggtgctgccaacccgaaactcctcctcccatcttcccgtcctctctccctttgaggttctcatcacttcccagactaacaccactgtgcccgtattcagggggatgagaccaccttcggcaaaaactttacctttgttgagtacctacgcaaacatgtctcccaagtcctccccaaggtagacgtgcaagccattgtctatcccacttacgaaacaaggggggatctaggggaatgtgtcacccgcttcaatgaatggtaggatacatccaaccaatctctctctctcacagaactgtcattgatgtatgaaactacaggcttctcaacaaggtcatcgacctcgaagtcgcggccggtaccccctcacccaccgtcaacccctccgtccgcgtaatcctcgtgggccactccatgggcggcatcgtcgccgccgaaaccgccatccgcatcgcctgggaacggcctattcacgagtctgattccgaggcagaagactccagccaagcaaccaccaccaccaccaccaccgctgccgccgccggcaaagccccgccaccaccaaacagtctcatgtttccctacatccaaggcgtcctcgccttcgacaccccgttcttgggcatctcccccggcgtggtcgcccacaacgccgagcagcactacaccaccgccgcctccgccatcgcccagatcaccagccttaccggcggtctctggggaggagccaagcttgcccaggctgctgagcaatctcactcatcccagaaacccaaaatcgccggcgcgttacccccagcgcaaggaaaggattccgccgccgggaaggacgcgggcaagaaagacagcggcggaggcggcggatggggtaagtggggcaccatcgccctagcggccggggccgcgggcgccgtggtggccggcggggcggcggcgtatctgcgccgggagcagatctcgcaggggctgggatgggtgacgtcgcatctcgagtttgttgggtgtctggcacgcaaggaggagttgcggcggcgtgtggtgcggatggtgcagctgaacgaagagcttggggttgggtttgggaacttctacacccggcttggacagtcggctgcgtccaagcaggtcagcatggtcgggacggtgctcgggaaggatcgaacgttttgcgttgtgccttcgaagaaggacaaggctggggactggcgaccggcggtcaacgataaggctaccgacgagatcggggctcatgtctgtgagtatactcgttcttctttcgccaagctcaaggttagtgatccggtactgacaggttgcagcgatgttcgaaccaaagaataaccccaattatgagaagctggggaatgaggccagagacatgatcgcaacctggctgcacaatgagtggtatgaaggtagctcgatcgattaa

SEQ ID NO: 265 - DNA, 1375 bp, Scytalidium thermophilum
atgtctcgctcgggctttggtcttcgccggcttctcagcctcgcgctgagcgccaccttcgtctccatcgcgacatgccgcgagcactgggtgcccatctgggcatcgatgccacagcaggttgagccgtacaacctgcctgaagccccttatgtgagtttccaaggtgaacaagcaaatccacttacctggcaaccagctgaccgctccatcatagaacggcaccagcgccgtcttcgaagacaccaccatccggcaaacggtctacctgacccaagacgccactaccatccgggtgcagttcagcaacgctttcggcggctccgacctgcccatcaccgcagcgaccatcgcccttccggccaacggcactgccggctcctcctccatccgccaggacacggtgcggcacctcaccttctccggctcaccctccttccgcgtccccaacggcgccctcgtcgtctccgaccccatccgcttccccgtcaaggctcaaaccagcgtcaccatcaccgtctacctcgcctcaggccagcagggccacgccatcacgggccacccgggcagccggaccagctcctggttggcgcgcggcaacctggtggccgcctcggacctgagcaagtccgactcagtccagcgcatcgataagtggttcctcatctcggcgatccaagcctggctcccctctcaccacaacgccctcgccatcatcggcgacagcatcaccgacggccgtgggtccaccaccaacggcaacgaccgctggcccgaccagctcctcgctcgtctgcgcaaggccaccggccgcgacgcctccctcctcaagtccctggccgtcatgaacatggcggcgggcggaaaccgggtgttggctgacggcctgggccccaacgcgctcggccgcatcgagcgtgacgtgctcgctcaccccaacgtgcgctatgcgtttgtctttgaaggtgtgaacgacctcggcaccgccgatccgaccgacgaggcccagactgctgtcggcgaccgtctcatcctcgcttatgaacagattattacccgcctgcacgcggctggtatcgcggtcttcggagcgaccattacgcccatgtctggacctggacaagtatacggcgagccggcgcgggagacgcagaggcagagggtcaacaagtggattaggacgagcgggaggttcgacgcggtcatcgactttgataaggcggtcagggatccgaagaacggcacgatgctgaggcccgagtatgacacgggtgactatttgcatctgaatcccacgggatataaggcgatggcagatgcggttgatttgtcactgttcaagaagttcgaagacggagtgagcgccatggtctaa

SEQ ID NO: 266 - DNA, 990 bp, Scytalidium thermophilum
atgaagtccatcttgatccttctctctcctctcatcaccccagcttatgctgggttccatgattgggagcctccggggccgaatgatggtacgtccttccatgtggctcactcatgaaccatcgttctccaagaaccggggacatggctgacacgggactctctaacagtgcgcgcgccgtgcccgatgcttaacactctcgcaaaccacgggtttctcccacatcacggcagggacttgacacgcaagcaggtagttgacggcctctacaatggcctcaacatcaacaagacggctgccagcactcttttcgactttgccctcatgactagccccaagccaaacgccaccactttctcgctggacgatctcggcagacacaacatccttgaacatgacgccagtctcaggttggttcctactcaactccagcattcccattgaagccacgattgagctgacaattcccggaaacctcacagccgcaccgatgcttactttggagacgtcttggctttcaacaagaccattttcgaggagacgaagcggcactggggtaagagcccgatcctcgacgtcactgccgcagcacgggcacggctcggtcgcattcaaacctccaaggctaccgacccggagtacttcatgtcggaactgggaaatattttcacctacggcgagtccgtcgcatacatcatgctgatcggcgacgccaagacgggcagggcgaataggagatgggtggagtactggtttggtgagttctcgccattctgttccttgttcgctgtttcttgagtgatgctgactgtcggtgaaactgcagagaacgagaggctgcccactcatctcggctggcgtcggccgagcaaggagctcaccagcgacgttctggacacttacatttccctgatccaaaatatcacgttgactcttcctggcggaacggaccccgtcaagcgccgcgctgcgtcccacttcggttggtga

SEQ ID NO: 267 - DNA, 2050 bp, Scytalidium thermophilum
atgaagatccccgccggtgccctgaccggggcgaccctctctttcgggccatggatatcacctagggcagtgtcgagcggactcacgcaggacgacctgtcgcggccatcagcccgggctgtcatccaggcggccggtgcgtcggcgacttgtgagcggtttcgccagccgattgaccacaagaatccgagctttgggggatggaaccaggtctattgtgttaatccacagtactgggaaggtcctggctcaccggtaagccgaccttcttgaacaataccggcctgcttttgtctaggagacctgtcgctcatgcctcgactcaactaggttatcctcacaacacccggcgaaaacccaatcagctcctacgtctacacctacaatggtttttctttcctcagcaacacaaccattaccggcgcatacgccgaggccgtcggtgcggctgtggtcgtggttgagcgtgcgtccagctgatctccctgagatgggagcatacccctgaatgacgctctgaagctgaaaatacctagatcgatactttggcggatcgtcaccgtacgatggactgaattccaacacactccaatacctcaccatggaacaagcggcgtcggatatggtcaactttgcacagaacgtggtctttccttgggacccccaggctggcagtgtcgcttccaagacggtgagtctggtgcctgatattgatgtacatatctgaacctagcactcacaccgtccagccgtggatctacttcggcacaggctacgcaggcacccttggcagctggattgagcacttccatccgggcgtcttctacggctaccatctcagtggcgcgagcgtcgaggtcaacaccgagaactggtactactacgacacgatccgcaagggaattgacgcgttccgtggagacaccgagtgtacccgcgcgctgagcgaagtggtggactttgtcgaccagtaccttctcgcggaggaacgggacgaggagaagattgacgccgtcaagaagttcttcggtgccagcttccccattgaagatgatgactttgcatagtatgatcattattcccagttcaagccttggtatagtcactaacaggcattccagcgccatcgcaacccccttccgatactggcaagaaaccggcggttaccgccgtgtcctcgacatgtgcgacggcatcgtcgggtcccgcgacaccgtcgacgaccccgacctcggcacgattccaccctctgttgtcgccttcgccggttacttccgtatgcacttccgcgacaacagtacgcagtcccctctcccctaacatcgccaccctctcagtgatactaacgctcccaaccagcatgcacctacctcgacacctggggccaagacgaccccctctggtgtgtcaacacgcacgacatctacaaccccttcttcatctcgcgcacgctcggcaacccgtggcggacgtggtactggttcctgtgcaacgaacccctggcgtcgtgggccaccggcgcacctccgggtcagccgtccatcgtctcgcgcaagattgtcgcgtcgtactggcagcgccagtgcgagatgcacttcccgcctgtcggcgacaagacgtacggcagctcgggcgggcgcaggacgccggcgtcgctgaaccaggagacgggcgggtggttgaggaggtggcagggggaggaggcgaggattatttggacgaatgggtacgttttgtccagtcataatctttacttggattcaagggatgcattgctgacatgtattccaatgtttccagcgagttcgacccctggcgcgaaaccagcatggcgagcgagaaccgccccggcggcccactgcagtcgtctggcaacgtttactcgttcgtcatcaagaacgcctcacacgccgatgatgctttcacggcgcggggcatgcagagtatggggttgccagtcaatccagaggttgtcaaggtccaggaacaggccattgagattgtcaagaagtgggtggcccaggggctggctgagaagggaggtgtgtag

SEQ ID NO: 268 - DNA, 1768 bp, Scytalidium thermophilum
atgatgttgggcagtggccttttgtggacgtccctcctggtcgctgctgtatctccgacgacagcccgccccggtgttgctccaggacgctcggtgaggagaaatgaggacgccgccgccgctgttaacagtctccatgaagccgggtccaggcgcggtcccgggccatggcggattccttcatacgtccggatgcctgtggcccgggagcacttcaacgtcacagggaggggagctttacacgcacggccaccgggaccttctcgaccgccactcgcggtgctcggcaacacctcgacagaaaacccggcggcattggcggcgcgacaggcgggcaatccgaggaaatggggatgggccgggctggaggaattgggagggatcgcgtatatcatcgagcgcaagtcattcccgagttcatgacaccttcactagcctgcttcatgactgactgaccctctctcaccgtctcgcaaacagtacaaatcggcacgcctccgcaaaaggtcaaggtgttcatcgacacgggatcctacgagctgtgggttaacccaaaatgcagcacgtcggcgtcggaatccatctgccagagccacggcatgtactatccgagccggtcccggtcgtccatgtttgtcggcggggggttcgccgtgacgtacggcaccggggccgtccgggggaagtactgggctgacgatatcaacgtcgcaagtgaggtttcctataacacatcctgtcctgcccgtggaatgatgactgacaacctgtctttgcagtgttccatgtcccccgggtgcaattcgccgtggccgacgacagcaattacaccttctcaggggtactgggattgggctatgcgtacccgcacaccatcaactatccgagcgtgctcaacttgatggtgtccaacgacatgatcatggcgcccatcttcagcgttgggttgggcggggaccaggacaacttcagtatgcctgcctgcggttgaccatagttatccaacttagccacaggagccttgctgacaataacatccttcaggtgagattatctttggcggcgtcaaccggtggaagttcgccggaaaactcgagccggtggccatctggccgcccatcaaacagcaggaccctcgctggctccagtaggtcagacccgagaagatagcagaaagcccgaacactaacaacaagtcaagatactgggtcaacgtcacgtcggtcggcatgaccaaaccgggcgagcggcccgtcatctacacgcagcgcgacaccttcaccatgccggtgcttctcgacacgggctcaaccctctcgtacatccgtgaggacctcgtcgcgcagatcgggcagcagttccaggccaagatcgaccacatgggatattacaccgtcgactgctcctggcgcaaccgtccgggtaccgttgactttggcttcaaccgcggccgcatggtcatcaacgtccgctacaaggactttatctggcagcagtatccgggccattgtcttttgggcgtccagccggccgatgtcgggtcgacggcgtacgtgctgggggacacgtttattaggggggcatactgtgagtctaccttacctgattcactaataaactgcaaagcttctgaccatcttttcttgcagtggtctttgaccaacagtcggacattgtgtggatgaaccaatactacaactgcggcgacggcgtggtgacggtcggagcggagaagggagatccgggaaatattgtcggggcatgctag

SEQ ID NO: 269 - DNA, 1792 bp, Scytalidium thermophilum
atgaagggcctcgccactcttgtgactgcggctgccctgctcgggcgagccgtcgccgctccgcccgagcctcccacgcgcgtcatcgagaagcgtgccaaccccaccgtcaccgccccggcgggcaagatcatcggtgtcgagcgcgtcggcaccgaggccttcaatggcattcccttcgccctgcccccgacgggttctttgaggctcaagccgccagtccgcctcaacacgtcgctcagcaactttgacgccaccggcatcgcgccggcgtgccctcagttcttcgccgactcggacgacaagggcctcttgtccatggtcttggataacatcacgggcctccccttctttcaaaaggccctcaaggtcagcgaggactgcttgaccgttaatgttatccgtcccaagggcaccaaggcgggggataagctccccgtcttgttctggatctacggcggtggatttgaggtaagcatatcagatgactattaatggctctctccgaccgttcactgacatgtcccagctcgggtggagctccatgtacgacggcggcccgatcgtgaccagcgccgcgagcctcggcaagcccttcgtctttgtggccgtcaactaccgcgtcggcggctttggcttcatgcctggcaaggagatcctcgccgatggctctgccaacctgggcctccttgaccagcgcatgggcctggagtgggttgccgacaacatcgaggccttcggaggcgacccgaccaaggtgaccatctggggcgagtcggccggcgccatctcggtgtggaaccagatggccctctatgacggcaacaacaagtacaagggcaagccgctgttccgcggcgccattatgaactcgggcagccttgtcccgacgaatccggtcgacagccccaaggcccagggcatctacgacgccgtcgtcaagaaggccggctgctcctcggccaaggacaccctgaactgcctgcgccagctgtcctacagcaagttccttgacgccgccaactcggtgccccacgtgctgtcgtacaactccgtcgccctgtcctacctgccccgtcctgacggcaagactctgaccaagagccccgagctcctggccaaggagggcaagtacgccgccgtgcccatgatcatcggcgaccaggaggacgagggcactctcttcgccctgttccagcccaacctcacgtccacctcccggctcgtcgactacttcaagaacatctacttccacgacgcgcccaagtccaagatcgagggcctcgtagaccagtactcgtcctgggtctgggacggctccccgttcggcagcggcctgctgtacgacatctacccgggcttcaagcgcctcgcggccattctgggcgacattgtcttcaccttgacccgccggaccttcctcgagtacgcgaccgcggccaaccccaacgtgcccgcgtggtcgtacatcgccagctactaccgcggcactccgatcctgggcaccttccacgccagcgacattctgcaggtgttttacggcgtgctgcccaactacgcgagccgcagcatccacagcttttacgccaactttgtctacaacctggatcccaacaacgcgtcgggcggcaccagctccaagtccaaggtgtcggagagctggccgcgctggacggccaaggaccgcaagctgatcaacttcttttgggacaagagcgagtttatcaaggatgacttccgcgagggggccgggaagtatatttcgagcaatatccagtacttgcgcgtctaa

SEQ ID NO: 270 - DNA, 2078 bp, Scytalidium thermophilum
atggttcccaggctcggctactgccttaccgcggccctctcgctgcttgccagcgtcgatgccatcccccaggggggcaaaggcaaaggcaagggcaagggcaaggacgacggccccagcgaggaagtctacgactacatcgttgtcggcagcggtcccggtggcgctcccattgctaccaacctagccaaggccggctactcggtcctcgtcctcgaggccggtgacgaccagagtgctgacccgaccaccagcatcatctcgctggctggcccgagggacaccaacagctggggcttctatgtccgccagtataccgatgagaatctgcacctccagaacaaccatctcacctggcgcaagcctgatggcacgctctgggtgggcagcaatgcctcggctcctgcgggatcgaccctcctcggtgtctactacccacgcggtgcctccctgggcggttcgtctgtcgtgaacgccggcgtggctgtcttgcctcccgccagtgactgggactacattgcggacgtgaccggcgactcgagctggaggtaagtatcgacaccccccttggtctgcagtgaggagcaccagctgaccttctcagcgcctcggccatccggaccatcttcgagcaggtcgagaagaaccactatcttccccctggcactcctggccatggcttcaatggctacctcgacatcaacaacaacgacggcgacgtcttcgcccgcagtccagccaccgttgaggtgctggaagctatggtagccgcggttggcgacgacccggccgacgtcattgacctcgtccaacgggatatcaacaataacagcccgacccgcgacaccactcagggcctcttcggcctgcccttccacggcaaccagacctggggccgcgccagcgcccgcgacctcatcctcaagaccctcgccgccaagaagcccaacggcgagcccctgtacaagctcaccgtcaagaccaacagcctcgccactaaggtgctcttcgatcagcagggccagaagccgcgggccacgggcgttgagtacgttcagggcgcctctatctaccgtgccgacccgcgtcacaacccctcggccccgctgcccactgcccaggtcgcccgcgctcgcaaggaggtcatcctctccggcggcgtcttcaactccccgcagctcctcctcctgagtggcatcggccccgccgaccacctgcaatccctcaacatccccgtcctcgtcgacctgcccggcgtcggctcccagctgcaagacaaccccgagatgcccgtcgtcggcttcgcgcagtccggtcccttcgtcaccgagcccctcgagggcgatccggaatgcaccttcggctggggcccgccgggcgtcccggacccctgcgtcgaggcctggttccagggttacggtccgtacacgcgcgccgccagcaacgccaacgccttcatgctcaagaccaaccactcgaccaacggcgagaccgacatcctcatcttcgtgctgaccaacttcgccttccgcggccactggccgctgaccgccgagaacggcatgcccgccgaccccccgggtctcgtcggcttcagcctggtcaaggccaacgtccagagcaacgccggcaccgtccgcctcgcctccaccgacccgcgcgacccgcccgagatcgtctttaagaccttcgagggcacccagggcgagatcgacatcgacgccatggccgacgcggtcgcctgggcgcgctccgtgttcgccaacgtcgacagccccgtcgggcccgtcgaccccgccgaacccccctgccccggcggcgacaacgccgcgtgccgcgccggcgacaaggacttcatcaagaagcaggtgtttggccaccacgccacgagcacgtgcgccatcggcgcggataacgatccgctggccgtgctggatagcaagttccgcgtcaggggtgtggatgggttgcgcgtggtggacggcagcgcgttccctcgcacgccgggcacgttccccatcgtggcgaccttcttgctcagtgagaaggcctcgttggatgtgttggcggatgcttga

SEQ ID NO: 271 - DNA, 1352 bp, Scytalidium thermophilum
atgaagggcatcctcaagactgccgtggccgcggccctcgttgccggcgtcgccgcccagcctcacggccacagtcacaatcacttccacttccacgccaagaagcacgccgccaagtcccaggtcgagaagcgcagcaccgtcgtcgtgaccgaggtggttgagggcccgacggagatcgtgtacgttacgcccgacggcaagaagatcgacggcaaggatgccgagaagggcatcaaggatggccttttcgtcgtcgtcggatcgaccagccccacgttcacggctcccccgccgtccgtttcgacggtcatcgacaacgccgagcacggtggtcagttcttcgaggtcgagagcagcaccagcgccgaggagaagccgaagccgaagccctcccctactcctgagccgaagaaggaggagcctcccaagccgcccgctcccgaggagggccccaagggcctggatgccgatttccccagcggcaaggtcaagtgcgacaagctcccgaccgagtacggcccggtcgagatcccgtggctgggcatcggcggctggacgaccatccagcagatgggcggctggcgcaagggccactcgttcgaccacttctcccaggccgtctcgggcggctgcaggccgggagacttctgctcgtacgcctgccctccgggctaccagaagactcagtggcctgaggagcagggcgccacgggccagtcggtcggcggtctgtactgcaatgagaacggcttcctggagctgacgcgcccgtcgcacaagaagctgtgcgagcccggcgtcggcggcgtctttgtgcgcaacgagctcagcaccaacgccgctgtctgccgcaccgactaccctggtgatgagcgcatgtccatccccgtcgacacccagcccggcggcacctacccgctcaccaaccccgactccaacacctactaccgctggaagggcatgccgaccaccgcccagtactatgtcaaccccatgggcgtgcccgtcgaggaggcttgcatctgggagagctccaagcacggccacaaggtcggcaactgggcccctgtcaacattggtgtcggccgcagcgagtcgggcatcacctacatttctatcttccccaacaagccgaccaccaccgctctgctcgacttcgatatcgagattgagggcaacgtcagcggcgagtgctacctccgcaacaacgtctatgccgttggtcccgatggttgcacggtacgtttttctcgtcctcaaatgaatggattttcatgtgctaacatcatttgcaggttggcttgcaacccggcaacacggccaccattgtcttcaagaaccgttcgtaa

SEQ ID NO: 272 - DNA, 2564 bp, Scytalidium thermophilum
atgagattcttctcacctcttgccctcgccctttcacttgcttcgtggcccgcggcggtcatcgccgatgagtgtcaaccagtgacatgggacccgaccaaaaaagcacgaagggcagatgaaccaacaggcgcgttcgtggttgctcggcccgtcccgaccatgctgaacaagagggagggcccgatccaaccgggtgagatcaactgtcggcagtgggccaggacgtatgacgacgtcaactactatacatgttaccagctggcgaagaagtacgacatcaccactgatcaatttttctttctaaatccggacctgcaaaaggactgttccaacgtccagccaaacgccatgtactgtgtttttgggtgtaagtgggcgactgatagattgggccagtatttttcagacactcaccacatatcatgcccgtgctattagtcgtcgaacccctccgcgcttatgatggactctgcggtcctccgaacaagaacgccacctgcctcggcaccgacttccaatgctgcaatgccgaaacgttcacctgcggtaactcggagtgagtaataatagcgcagaatgaagcgccgtttgattttgcttttgaagactctgacgctggaaccagcgacgactgtgcacccgggacgtgctacgagggcgcctgcgtgggcgacaaggtctggagtaccgacgggacgtgcggcttccaacatggcaaccggatgtgcaccgggaaatggggcgattgctgcaacatggaggggaaatgcggcactggcgacgactactgtggcagtggccggtgccaatcgggtaactgcatggatttcatcccaggcgagcccgtcgacaccacgccgccgtggctcgagggcaacacgacggatggcacttgcggagggccccagcgctacacttgcagtgtggtctacggaaattgctgcaacaggaatggcatctgcggttcgttgccttcagattgtggcgagggatggtgagtctccaacatgctctatcgtcagaacctcttgttaaccgtgtcttgttctctctagtcaacctgaattcggcatgtgtgaaacctaggtcctcgaccgggcgcggtacgaccctgcctgttcagccgtggatcatcgtttgtgatagggctttgttcgaggatggagtatcgagttgatacgatctagctaggaggagaagcataatgggtcaagaagggctagatttctgttggaagattgctccagataccgtggtaacaggctttatctctctacagctagatgttcagatcttgatggaattcaacagcatccccagtgctttgtgatctgtatgctattctgctcagctctgcggcgtctgaggggctcatactgtgatacctcacctgtgttccccctatctttgggtaattcacatggagctgttacgacatcttgatcaatgttccctaacaacttgacagtctgttccaaactggctttctcgcgtctcgccttctcgccctgtcgctaacattgtgccatcagatccgccggaatccatggatcctggcctcggtgaaaagtcaaagttagcccgagccaaaaggtttgcgcatatacgaactgccctctcccctcctattcaggaggaccatccatgacaatacttgtctttgaatccgatgagaggtaattaacgttccttctcatgctgacatggtgcgtagggcaatcgcggggacacaggtgacgcacttcggaacacgaaggtcacataaggcgagtttgtgtcaagcttgaagatcactgttgttgttggaggccgctgaccggcgggagttcgatggactatcctatgccctgtgtctgaatctggtgacagggtcacaaagcatagctcgtgaggagaacgacggtatacaaatggcctcgccctgacccaatccgagtcaacggtcgcgtctcaccagtcttcactccaccgacagcagcaactcatcttgagcttcaaaccattcccaatcacaacagcaacccaccatgcggtttgtcactctgaaccttgcctgggcgattcctgctctcgccatctctggtccactggccagccgcgccgactgcggcgaaacggccgcccgagtctgcttcggcatcgacggcggcacggcgcaagacatcgacccggaggacatcgaatatgcgggggcattcctgcgctacatcgcggaaacccacgaaaacccgttgtggaccatgccgcccgagttcacctgctccgagtggaccatccccgtcgacggcgcgggtaccattctggttctggccaagcacatcaacccgcgtaccaactcgtccgtcacctacagcgacctcgcgcgcaccattgacggcggcgccaacgcaactcccgagcaaaaggccgcctcgctgctgggcgcctgcggcggcaacggtggcatgatgggcgtcacggttgacaccagcgaccctgcctacaacacgcccgagtacattgccagcaaggccaagccacaggacatcattgttaaacttgtcagagcgccaagcttgtga

SEQ ID NO: 273 - DNA, 2399 bp, Scytalidium thermophilum
atggcgcgccgtctcctcaccctgtgcctggccgcgaccttggtcgctgccatcaaccctccccggaagccacagcaacctaccggcggcggcagcaagctggtcacctacaacaacaccgtcctcagcccgcagttcggagcctcaaccacctacgttacttgggtggcctcgaacacggacggcgatttcatcacctgggcctctgatggttctcttgtctttgagaacgtcgtgagcgggaatcgcacagtcttcctctcggccgacaagatccccgcgaacagctacgactaccagatttcccctgacaggaccaaggtcctctgggccgtcgactacaccaagcagtaccggtactcgtacttcgccaactacctggtccaggatgtggccacgggcaagacggagcagctggttgccgaccctaagggtgatatccagtacgccacctggagctctgcctcctcgtctcagattgctttcgtgcgcggcaacgacctcttcctctgggacaagggaaccgtcacccaaatcaccaacgacggctcgccggaccagttcaatgccgtccccgactgggtctacgaggaggaaatctttggcagcgaccacgctctgtggttctctccggatggggagaagatcgccttcctcagcttcaacgagaagggagtcgagaccttcaccgtcccgtactacatggacggcgagaagtacccgccctcgtacccgtatgagctgaagctccgctaccccaaggtcggcacgaccaaccccaccgtcgctctcaacatcttggacgtcaagaccaagaaggtcactcccatctctatcgatgcctggccggctgatgaccttatcatcggcgaggtcgcttgggtgacggacaagcacgacaagctgatttatcgcgctttcaaccgggtgcagaacaaggagaaactcgtcgttgtcgacaccgacaccggcaagtcgaccctcagccgccagcgcgatggctcagatggttggctcgagaacaatgtcgccatcacctacattggcgaggtcaagcgcgccggtagcaagaacgacaagaccaagtggtacctcgatctgtccgacgcctcgggctggaaccacctctatctcttctcccttgacggccgcaacatcacgctcacgtccggcaagtgggaggttggcggcatcgtcaaggtggacaccgaacgcggcctggtgtactacctttctaccgagaaccacccgaccgagcgccatctctactcggtctcctacatcaccggcaagaagacggctctcgtcgaccccaagaccccggcctactggaccgcttccttctcctatcgcggcggatactatatcctccgctatgccggccccgatgttccctaccaggagctgtactcggtcgacagccccaagaagcccatccgcgtcgtgaacgacaacgccaagctggtcaacactatcaaggagtacaagctgcccaagatcgagtacatcgatctcccgcacccctccggctacaagctgagcgccatgctgcgcctgcctgccaagttcaacccggccaagaagtaccccgtcctgctgactccgtacggcggtcccaactcccagcaggtcaccaaggccttcaaggccatcaattggcacgcgtacattgcttcggacccggagctcgagtacatcaccttcaccgtcgacggccgcggcacgggctaccggggccgtgcgttccgttccacggtgacggataacctgggccacctcgaagcgcaggaccagatctgggcggccaagtggcttgccaagacctattcgttcgtcgacaaggagcggatcggtatctggggctggagctacggtgggtatctcgcggccaaggtggttgaggtcggcgatccgatcatctcgttcgccatctccacggcgcctgtcacggattggcgtttgtacgataccatgtacacggagcggtacatgaagacgcctgctctgaacgaggctgggtacaacaagtccgcggttcggaacgttgagggcttcaagaagctcaggggccagttcctcatccagcatgggtatgtcttacatcctcccaatttcctaccacaccgtaacgcgactaacagcgggatctcaggaccggcgacgacaacgtccatgctcagcagagctttgccctcgaagacctcctcatgggtgccggcgtcagcccggagaagttcgatgtcacctacttcaccgactcggaccactccatcgtctacaacaagcagggcgtctacctctacaagcagctcaccaccaagctgtttgaagagaagcagcgcaagggcagcggtggtggccaccagtggagcaagaaggcggtcgcctggagggggtga

SEQ ID NO: 274 - DNA, 2051 bp, Scytalidium thermophilum
atgaccctcaagcgccttgtcgtgctggccctcgccagcaagctcgtttcgtgcgtgcccgcgcccacggacgagcccaatgagcccgtgcccacggacctcccctccgacgagccgaccgaggacatcgctagcagcttcgtctcggatctgatcgcgaacctcacgcaggctgaagagcctgagaccaccaatgagaagcgcggcctcttctcgtgcaagcaggattccctcactgtcaacctgggatatgccaaataccggggctactacaacgcttccactgggctgaactattggaaagggtgcggacgcattcccctcctcaaacccgcgcaatattaccatcaattgttggaaaaccggtgttaacactcaacagaattcgctatgccgcccctcccacaggcaacctccggtggcagccgccgcagtctctgcccctgaagttcaacccgcccgtcacggacgcgtatgagttcgggcccatctgcccgcaggcgatgccctcgctccccgtggcccctcacatcccgggtaacgaggactgcctcttcctgaacgtctacgctcctgctggtgccaagaacctgcccgtccttgtctacatccacgagggtggctacggctatggcgatggccgccgtgacatgaccgacatcatcaatgccaacgacaagggctttgtggccgtcaccatccagtaccggcttggtgctttcggttggctctcgtccaacgaggtgaagcagaagggcgtcgtcaatgctggtatgctggatcaggcgcttgctctcgcctgggtgaagctgcacatttgccagttcggtggtgacccgagccgtgtcaccatctcgggcgagtcggccggcgccggttccgtcatgtaccacggcatcgctcttggtggcaatctcggcactcttctctacaagcagggcatcgctgcttcgccgtatctcccctatcagtacaagtacaacgacccggatccgaccagcaagtactatgccttctcccaggcggccggctgcccgagcagcggcaatgtgttcaactgcctcaagagcaaggacaccgacaccctccagctggccaactaccaggtcactcagtcggtgcctttcggctactggtaagcccccaacccggttaccatcttattaccaatgcgtgaatctgacccattctctcccagggcgttcggtcccgtcaccgataacgtttacatcctgaaccgcccggttcagcagatggcgaccaagaagatgaacggcaacaagctgctcgtgggccacaccgccaacgagggcagcctcttcgttcctcccggcatcgtcaccgaggctgatctcctgggctggctccagtcggcgcagctcaagaacctgtcccccgctcagatcaacaccgtgctcgccgccaaccccaacagcgccgacaccgacctgagcgcccccaagtgggacaccctgggcaacagcggccccaccgccgtcgagatgtcccaggatgccaacggccagcagcagcgcgccttcaacatctacgccgaggccaccttcgcctgcccggccttctggctcgcctcgtcctacagcaagcccggcaaggccgcctacgtgtaccagtacagcgttcccttcgcctcgcacacctccgacctgggcgcctacttcggtccccaggagcccaaccactcggacgacttcgccctggccttccgccgcatctggggcaacttcatccgcacgggcaacccgtccatcgccgcacccatcgccaacggcgccgcggctcccaacccgtcggccccgcacccggcctccaactggcccgcctggagcgacgcccagcccaagttcgtcaacctcaacatcacgggcggcacgccgtaccaggccccgaccttgtatggcaccttcgtcacgcagtacgcccagccgggtctccagaacgccatcagcgtcgtctcggcctccaactgggagggcggtcgtctgtcgaggtgcgatgtctacaagagcctcgcgccgagcatcccgatttaa

SEQ ID NO: 275 - DNA, 2901 bp, Scytalidium thermophilum
atgctctggatcagcgcagcccttgcgctcctggccggcaaggccatcgccaactcggcccccgaggccgtcaccgagcctcccgccattgtccctggcgcgtacatcgtcgagtatgagggcgatcaggtgggtgtttttatgagcccggatcacgaaactttagagcaaccattccgctgacctgctccccaggacaccaactccttcgtcaaggagctcggcggcgaggcgtcgctgcgccgggacctgcgcttcaagctcttcaagggcgcctccatccagttcaaggacaccgagaatgccgaggccttggttgccaaggtggcagaaatgcccaaggtgaaggccatcttcccggtccggaagtatgcggtcccgcaccacgtcgtgcattccaccggctcggccgccatcgagaccaccctggccaggcgtgccgagggcaacgagaccgacaccttctcgacccacatcatgacccaggtcaacaagttccgcgatgccggtatcaagggcaagggcatcaagattgccgtcattgacacgggtgtaagtgcttgagcgcgggtcgccaattactacctacgcatcatatgctgatgagtccagatcgactaccttcacccttctctcggtggctgcttcggccccggctgcctggtttcctacggcactgacctggtcggcgatgacttcaacggttccaacaccccgaagcccgatccggaccccatggactgccagggccacggcacccacgtcgccggtaccattgccgctcagcccaacaacccctacggcatcatcggtgctgccacggacgttgagctcggcgcttatcgtgtgttcggttgcgatggcgacgtcggcaacgatatcctgatcgccgcctacaacatggcgtatgaggctggtagcgacatcatcaccgcctcgatcggtggtccctctggttgggcggaggatccctgggctgctgtcgtgactcgcattgtcgagaacggtgttccttgcgtggtctctgccggaaacgacggctctgctggtgtcttctacgcctcgaccgctgccaacggccgcaaggtcaccgccattgcttccatcgacaacgccatgaccccgaccctgctcagcaacgcctcctactcggtggatggcacccgcggtggcgactttggcttcacggccggtgacccggacaactggaccgagatcagcctgcctctgtgggctgtcaacttcgacacgaccgacgaggccaacggctgcgacccctatcccgaggacactcccgacctttcgggccacattgtgctgattcgccgtggcacttgcaccttcgttcagaaggccgagaatgctgttgccaagggggccaagtacgtcatctactacaaccactcgcctggcaccgtcatcgtctctgccagcggcgttgagggcctcgaggctgtcgctatggttactgccgagcagggtgaggcctggatccgcgagctcgccgccggccgcaaggtcgtcgtctccatgccgaacccggccactgctggcaagttcctcatctacaccccgaacaacaactcgggcggtttcatgagcgacttcaccagctggggtcccacctgggaggttgaggtcaagccccagcttgccacgcccggtggtctgatcctgtcgacctacccgcgcgctctcggctcctacggtgtgctctccggcacctccatggcttgccccctggccgccggcgtctacgctctcatcatgaacgtgcgcggtaccaaggaccccaagaccattgagaacctcctttcgtcgacctcgaagccgaacctgttccacactggcggcgagacggcgccgttcctcgcccccgtcgtccagcagggcgccggtatcatccaggcctgggacgctgcccacgccactacgcttctcagcatttcgagcatctccttcaacgacactgagcacttcgccccggtccagaacttcaccgtccacaacactggcaagaccgaggttacctactccctgggccaccgcggtgccgccaccgtctacacgttccgggacgccagccagaccacccccaacgccttccccggcgtcctgactgaggaatacgccaccctgactttcaacgacgacaagttcaccctgcctccgggccaccgcaagatcgtcagcgtgcgcgtgcagccgcccgctctcgacgccaagctcctccccgtctacaacggctacatcaccatcaacggcaccgacggctccaacctgtccctcccctacctcggcgtcatcggcagcatgcgcgagcactccgtcctcgacgccagccgcacctacgtccgcagcaaccgcgtcgagggccgcgtccccgccaacaccaccttcgtcctcccccccgccggcttcgccaacgacacctcgtaccgcaaccgcaccgagatgccgcgcatcgtgctccagctgaccatgggctcggcgcacgtgcgcgcttacgtcgtgcccgtcggcggccgcaccgccgtgggcgtcccccgcgtcgagaaccccttcggcatcgacgccattggtctcgcagagggcttcccctcgatgtggaacccgcgcggcacgtcgcagtttacttgggacggcaagctcgagcacggcgccttcgcccccgccggcaggtacaagcttgctctgcgcgcgctgcgcatctttggcaacccggagcgcaaggaggattatgacgcggctgagtcagtcgagttcaacattcgctacctgggcggcggttcggcgaagttgaggcggtggaaggagcgctgccgcagtgaggaggcggctactgctgcgggcgcggagaagatgaagcggtctgcgaggttggctttggaggagaggtag

SEQ ID NO: 276 - DNA, 1507 bp, Scytalidium thermophilum
atgaaactgtcaacactccaagccgccctcgggcttttggccgcccaaccagttgtcgcgagcatcggccaccggcacgctcatcaacacgcgaggcgccatggccacggccatggccacgctcatccatctcccaagcaagcgcggaaagccggctgccagctccctgatcacccagatcttgtccgtgttcccggcgccatgaacaacggcttcgccatgagccccgatgagccctgtgtggatggcacgtggtgcccgatcgcctgcaagtccgggaaggtcatggcgcaatggaagccgggcaccacgtattcctatcccgagtcgatggtgcgttgctgctgcggtcgttttttcttgcgccacggtataagctgacagttatgcagtatggcgggttgtattgcaatggcggaactgctgagaagcccttccccaatcggccgtattgcgttgacgggacaggcactgtgaaggccgtgaacagggccgggagcattgtgtcgttctgccagactgtcctgcccggcaatgaggccatgattatcccaacagatgtcgacgacgtcgccacccttgcggttccagggccggattattgggccggtactgccgcgcagtaagcaacctcgttcccgccgagctcacaggaggccactaacgcatggtcagctattatgtcaacgctcccggaatttctgcctcgaggggttgcatctggggtacgccagatgagcccatcggcaactgggcggcgtatgttgccggcgccaataccgtatccgacggcaccacctttgtgaagatcgcatggaacccagtgtacctcgacgagccgcggtatgccaacgtcaagcccacgtacggcctcaagatcgagtgccctggtggtggctgcaacggtttgccttgcggcattgacccatccaagcacgacgtcaaccaggtccaaagccccgttgccgctaacggcgtgagcaatgctgccttctgcgtcgtgacggtccccaagggccagacggccaacatcgttgtttttaacaccgacggctctaagggccccggaggcggtggcggcgacaagaagaaggatcctcccaagccgccgaagccctcgcccaaggagcaggaaccaagcaaacccgaggagcagccccccaagactaccaaggccgtcgaaatcgtcaccaccgctgccaacaatgacactaccacctcctcgtccaagaacaacagcaccccgtcgtcgtcttcgtctgcgtcctccacgaccactgccgacgactggatgggcggtgtcttccaggaagtcgacgcccagggcgacacgacggtggctgccggtctgtctagggcaacacccaatgctgtcaccgaacatcatgccgacgaggtccacagcgccgtgtcgccgacctcaagcagcgagggcgctgccgccgaaggcgggtcggcgattgctgggttggtggtcgccatcgtggctgcggcggcgctgatttga

SEQ ID NO: 277 - DNA, 1098 bp, Scytalidium thermophilum
atgacacttctccgcactcttctcactccgctccctctcctccctgcggctctcgccgcccctcccacctctctccccttcgtcatcaacacctggggcggccctttcaccgcggccaccgatgccgcgtaccttgctctgacctcctccccgtccacctccgccctcgacgccgtcgaaatcggctgcagcacatgcgagcgcaaccaatgcgacggcaccgtcggcttcggcggttcgcccgacgaggcctgcgagaccacactcgacgcgctcatcatggacggcagcagcatgcgcactggcgcggtggcgggtctccggcgcatcaagaatgcgatcgccgtggcgagggcggtgatgacgtacacgcgccactcgctgctggtgggggacttggcgaccaagttcgcggtggagatgggcttgggccctgaagaggatttggcgacggaggagagcaggaggagatgccaggagtggagagagcgtgggtgtcaggggaattatagggtgggcgtgcagccggatccttcgacatcctgcgggccgtacacgccgttgccggcaaaggggtcatatgcggaatttgcggccgcggaggatgtcactgggcagctgtcccatgacacgatctccatggtggttatcgacaaggacgggaagatggcggcggggacgtcgacgaacggagcgtctttcaaagtccctggcagagtcggggatgggcctatcgttggaagcgggtcctatgtggacggggaggtcggcggctgcggagcgacgggtgatggtgatatcatgttgcgcttcttgccctgctaccaagctgtggaaaacttgaggcagggcatgacccccaccgaagcggcgcaggatgctgtccgtcgcatgctgcgcaagttccctgacatctcgagcgggattgtggtggtcaatagcaaaggagaacatggagccgcaggatcagggtggacgttcacgtatgcgttccgtggaggaaatatgaatgctaccgaagtggtagctgtaccaccactcagtgttgtctcggtgcgcacctccgaggatgattatggggagcccggtgaaatctga

SEQ ID NO: 278 - DNA, 914 bp, Scytalidium thermophilum
atgaagcgattcgcaatcctcctcaccgttctcgccgctctcgccgcttgcatcggcgccatcactctcaacttcccgtctgacagctaccctcacacatccctcagtcatcacccaccggtcccaaacgcgaacagcaatgacccacctgctaccctccaggacgaccccaaccgaccgagagaggtacgcgaaaaccccttccgagccggcgcagtgctcctcggagccggcttcgacgtcgtccgcgccgccgtgcagatccccatcctccacttcgctcccggtgccaatcaaaccaaacaacacgccctctcggcctggatcgggttggacggcgagtccacctgtcctcataccttcctgcgtgtcggggtggatatgtttctgagcaagacgggcccggcatatctgccgtggtgagtcggcatctccaaatctgccgtgctaacactctccctcctttccattcattcccacatgactgagactcttccaggttcggctggtaccccaacaacgtccaccatatcaccttcctcgatccccagcccggcgactggctggacctgagcatccatgcgaccaacctcaccttcgcgtggctgtccatcaccaaccggcgcaccaacgtcacgggccaggccacggccgagaaccacccgaccttgatgtgcgggttcaatgcgctgtggatggtccaggatttgtggtcttcacagggcgtgccgctgccgaactttgggacaatgctgtttagcgaggtccaggcgcagacggtcatgagagtcgcgagaggcgtagaagatgcgtatctagaggcggtgagggaacgagatggacagttggcggtcacttgcgagaagttgggcgaggagatgttgtggttcaaatatcaagggggacatccgtaa

SEQ ID NO: 279 - DNA, 1926 bp, Scytalidium thermophilum
atgatcaagatgttacgcgctattgtaagctctgttgccttgctcgcagcagttgtgctggccaacgatacaggccacgagagacctccccgcacaagggaatatgactatgtgagcttaccccgagaaaacgtatgccatgagaagagcatacactaaccgcctgtatgtcggcagatcatcgtcggcggcggcaccgctggactcgcgctggcaaccagacttagtcacggcctcaggacatcacagatcctcgttgtcgaggctggccctgcagcgctggatcacgacggcatcaatgtccctggtctcaaaggaaccgtcttgggcgggccgctggactgggctttcaccacacaaccacagcgcggcctcaacaaccgctctctcttcatcccgcggggacgcgtgctaggaggatcgtcggccgtcaacctcctcgcatggaaccgggcatcggctgctgagtatgacgcgtgggagtccttgggcaacccaggatggaactggaaggccttgtcagccgctatggagaaggccgagacgtatgttaatgggccgcccggctcaggaacccatggccccatcaaggccgtcatcagccggttcatgacagagcaccagaaggccttcgtccctgccgtggccaggcacttctcctatctgccgaacaatcacgactccctccaggggaatcccatcggcgtcatggtgcagcccagcaacatcgaccccgtgccgtacaaccgctcgtacagcgccaacgcctacctgccgttggccgggcgcaacctcgaagttctcaccgacacgccggttgccaaggtcaacctcgccaaacctcaagacggggatcggaacgctccgtacacagcgaccggcatcaccttgcgcaacggcaccattcttactgcacacaaaggggtggtgctcagtgcaggcgctatcggcagccccgtgttgttggaactctcaggtattggaaagcgcgaggtgctgcgctcggcgggaatcacaacgctggtcgacctgcccggcgtgggtgagaactaccaggagcatccgcgtgtgcacatcgcgttcgcgctgaaggagggccaggtatctggcgatttgctgcaggtgaacgagaccttcagggcggaggagtgggccaagaggctgcgcggcgagcctggcttcttcgatgatgttggcgccaactacatctttactgactggtccggggctgtcgagtcgcgcacggtgtatggtgagctgactcggctggccaaggaggtggtggacagcgccccggagatcaacaagtatgagctgaaaaagcagctagagctgctcgacgacaggcgtgtgccgcaggttgaggtgatatactcgggccgctacgtcgggcccaaggggtacccggccccgacctcgaggctctacgggcggggattcttcagtcttctcgccggcatccagcacccgcttagccggggtagcgtgcatgtggacccaacggacccggtggggaagccgccggtgctggatccggggctcgtgagcaacaaatacgatgccgcggggctcgtggcactgctcaagttctgccgacgactggcacatgccccggggttccgggagtactgggaggttgagtacgaaccaggcgaggcggtccagacggacgaggactggcaggcgtatatccgcaacgtgacggagaccatttaccatccgacgggaacggcagcgatgcggccgcggcgggatggcggggtggtggatgcgaagctgactgtgtatgggacgacgaacctgaaggtggtggacgcgagcatcattccggtgcagctctcggcgcacccgcagacggcggtgtacggcattgccgagcgggcggccgagatcatgattgcggagcaccgtcttagaggttggtga

SEQ ID NO: 280 - DNA, 1624 bp, Scytalidium thermophilum
atgcgccacatcgcgcctctcctcgccctcctgggcgccaccgccgcctctccgctctcggctgaccggaccgcggcgctcctcgactgcctcaccgcggccggggtgcccgtcgatgaagtcggctcggccgagtacaagctcgacgccacgggctttaacctggcgctcaactacactcccgcggccgttgcggccgtcaccacggccgagcacatccgggacgccgtgacgtgcgcgcgcgagctagggtttaaggcgacgcccaagtgcggcgggcacagctatgccaatttcggactcggcggggaggacgggcatttggtgattgagatgtcgcggttcaacaaggtggtgctggacccggagacgggcatcgcgacggcccagggcggcacgaggttggggcattttgcctgggaggtgtataaccaggggaagagggctattagccatgggacgtgtcctgggtgagttttgtttcttgccccttccttggttggagacttctttgtctggtaatggtgctcccgacagaccatgactgaccgccgtctagcgtcggagccggcggccacgtcctgcacggcggcttcggcatgagctcgcacacgcgcggtctcgcctcggactggctggtcggcgcgaccgtcctgttggccaactcgacgtttgtcaactgctccgagacggaaaacccggacctgttttgggcgctgcgcggcgccggcggatctatgggcgtcgtgaccgagttccgcttcaagacgtttgaggtgcccgagaccgtcaccttcttcgtggcgtcggtgcagtggccaacggaggagcgcgcgttcgcggggctcaaggcggcccaggagttcgctgacaccatggcgcccgagctcaacatgcgcctgttcatcgccaagcgcttcgtcaactttgagggcttgtaccacgggaaccgtgcgggtttgcaggaggcgttggcgccgctcctcaaggcgacgggcgccgtgctcgccatggcaagggagggcaactgggtcgatcaggcgaggcatttcggcggcatgaccaacattgatcagcagcacggccatgaagatgtgagttccgagtctatcggtttctctgaagcaaacaccaactaaccgagctcccatagcacgacaccttcttctccaccagcctctacaccaaagccctgagcgacgacaagctccagaccttcgtcagctactggttccggcaggccaaagccagcccgcgcgactggtacgtgcagatcgacttccacggtggcaaaacgtcggccgtctccaagccggaccgcgactacacggcgtacgcgtaccgcgatgcgctcttcctgttcctactctacgaccgcgtcgacgacggccacgccttcccggccgacgggcacgagctcatgagcgacctcgtcaacaacatcacgcacggcttgagcagggacgattggggcatgtacatcaattacccgaaccaccggctcagccaggacgaggcgcaggtgaattattggggcaggcacctgcccaagctgcaggccatcaagaaggcggttgatcccgaggatttgttccacttcccgcagggtgtgctccccgcgtag

SEQ ID NO: 281 - DNA, 990 bp, Scytalidium thermophilum
atgcggttcactgctctcgctttcgccgctgcggcggcccgtggcgtcttcgccgctcctcgcccggacgacagccgtagcaccttcggctgcgctgctccggagcctgatgctgagcaccgtcgcatctcgcagatgttcgccgcccaggaggccgaggtggtcgcctctggcaacttcaccatgatggccactgtcaccatcgacacctacttccacgtcgtggcctcgtccacctccctgagcggtggctatgtcaccgtatgtcctcccctgcgcaatagaccacgttggatgaaggatggtacgctaactcaacccaggacaagatgctctacgaccaactggatgtgctcaacgccgcctacgcccctcacggcttccagttcaacctcaaggagatcacccgcacggtgaacgctcagtgggctgttgacggcaacggctacgagatgactatgaagcgccagctccgcaagggcagctatgctgctctcaacatctacttcctcaaggacctcggctccaacatgggctactgctacttcccgacctcgggcgccggtgctggcaccaccactcgcatccgggacggctgcaccgtgctctacagcaccgtccccggcggcagcaagaccaactacaacctcggtcacaccgtcacccacgaggtcggccactggatgggcctgtaccacaccttccagggcggctgcaacggcgtcggtgactcggttgccgacacccccgcccaggccagcgcctccagcggctgccccatcggccgtgactcgtgccccaaccagcccggtcttgaccccatccacaactacatggactactcttatgagtgagtatcccctgaatttcgtatgggatcaacgacgcaaaagctaacaggtgtttcacagctcttgctacgaggagttcacccctggccagcgcgctcgcatggagagcttctggaaggcctaccgccagggcaaataa

SEQ ID NO: 282 - DNA, 1648 bp, Scytalidium thermophilum
atgcggttctctgtgcaacatctcttggtggcagcgctcggcctgagcgtgttcgacgccgcagaagcctcctgcgcatgctggaacaaggggcttgaggcatgcttgagaaccaaaaagatcccgtacaaggtcaagtgtgactcagactgggagaactacagcaaaacacccaacctccgtctccctttcaagcccgcggccattgctctcccagagacagcggcgcaagtatccgaagctgtccgctgcgcggccaagaacaacgtcaaggtccaggcaaagtctggtggcagtaagtagttcacctctgaccagcacgaaaacaaaactaatgcccagcagactcgtatggcgcctttagctttggcggcaaggatggccagctcaccatcgatcttgcaaagttcaacaaaacggtgctggccaaggatggcgtcaccgccatcgtgggcggtggtgttcgcctggggagcatggcaaaggatctttatgaccagaacaagcgggcagtctcccacggcatctgcccgcccgtcggcatagggggtcactcaactcacggaggttggggctttacctcgcgtgcttggggtttgactcttgaccacatcctcgagctggaggttgtccttgccaacggcaccatcgtgcgggcgacgccaaagaagaactctgacatcttttgggtacggtatcccctcaaatcaccccatggccgagtgacaccttgctgatctcatattcctaggccatgcgcggcgcggcggacagcatcggcattgcgctcagcttccaccttcggacgcagccagcccctgaagaggtcatcaacttcatgtacgagttccagtccgccgctgaaagcgtcgacgttgccgtggacactttctccaagctccaagcgttcatcagcaacgaaaccctcgtggaccggcgcttttctttcgccctccaaaccatcgccaacttccaccctgaatctcacgagctcctgagaaccttcttcgttgagggaaccttcttgggatccttcgccgagtacaacaccaccgtcgaacctgcgctgctggcgggccttccggagcctaccaaccgccatgtctcatccaacggctggctcgactcacttgcactcctgagcccaaccgaaacccttgacactgcgcctctcttcctggacttttttgccaacagtgtcaccatcgacgacccgggcatgagtgaagatgctattcgcaaatacttcacctacctgctccagggcccgccggctcccacgtcctacctctcgagcatggagctctggggaggcgccgacagccagatcaaccagccggatagcaagggcatcaactttgccgccttcccccaccggaatgtgttttggactgcgcacaacctcgcccgcgtcggacccggccaggcgttcccggctgagggcatcacttggttgaatgacctgcgcaaggtcatcctcgattccgtagatgtgcataccgctgcgtaccccaatcttcttgaccccacgctgacgcgcgaggaggctcacgaggtttactatggccaggaggtgctaaagaggctgcgtcaaattaaaaagaaggttgaccctggtgatttgttttggaacccgcattctatctga

SEQ ID NO: 283 - DNA, 3157 bp, Scytalidium thermophilum
atggccacccctcacaagcctatccgtgtcggacttattggactctcctcagctgccaaaactgcttgggcatctcgagcccatctcccttacctcctttcgcctcgcggaaagtccaaatatcagatcactgcactcctcaactcatccatccaggcagctgaatccgccatcgagacctatggcctcccaaaagagacgaaggcctacggagatccagcctcccttgcagccgatcccaacatcgatctagtggtttgctcaaccagagttgacaagcactacgagacggtccttgacagcattaaagccgggaaggacgtctttgtcgagtggccattggctcacaacgcccaggctgcccgggagctggcggatacggcaaacagaactggcgtgagcaccatcgttggcctgcaaggagtcgtcgctccggtggccttgaaaattcgagagctattggaaacggaccggatcggaaaggtcctaagctcagagctgagggtgtttggtgggctaaatgacaggaaggtacttcctgaaggcttggcctacttcactgataggagcgttggtggaaacatctacacaatcgggttctcgcatcgtaaggcgctcgacccctcgacaataatgggcaggcactgaccttttcagttctcgacttggttctatcagttatcggagagttggcaaccgtttctgcagactttcatctccaacgaccagagaacacggtcaggggagctactggagagacgtggaccgtcacctccaatgtcccggatctgatccaattgtctggaaagtgggaagaatcgagcctcacccagaaaaacgccaccttgcactaccgataccgccgaggccaaccatttcctggggagccggcactcgcatggacgatcaatggcgagaagggggagctgagagtcatttcccagcagcacaccagcattcaggtcggtgatgctacagaatcacgggtcatcgaaatccacaattttgaaacaaacagcgttgagaaggttgagtgggactgggaggattggcagcaggaactcccattcccagcccgcagcatcgggaagctctatgagaactttgcggcaggcaaaaagattggtatgactggggaatacgctacatttgagcattccgcgaggaggcatgaactgctggaaggattgtggaaaggctggcggcattgagaaggcatttccttgcttgactgtcttgaaatcaaccctgtaaagcccgtagccgctcgccggctatgctagcactttggatgtggactacatgctttacggcagctcttacacctgccaacttggggacctatctgaccaaacttactacaccatgcaacacatgtgtgactccgtggttaagcagatagcttgagacatgcaatgtcggatatatttttggggtttggggagatatatattgcggctaaactaggcacggctggtgtcccggtatttaaatccagcgatgtgagaccatgtagtatggagctctcttgggcttctacgagtaatctattcccggacgatcataataccggcaattcctgcatgaaaaccaccatttccgatcaaaagcactccctgtccaccatcatgctgatgatccgaacccttcttaacgttgtctggatccaaggcatttccgggtaccgtgctctcgcgacggatctaccgccatgaagacttcatttcttgtcgtggccttgtcgtccctggcctgggcatcacctaccagcgtgatcggtgacagaagccaacatggccgttcaacacttcctcatggcaatggtcgcgaccgtctgtctagccacacaatccccatgcgcaagcatgcagttcagccatcaacggttcaccccgccctccggcgtcgcacagcagcacttgcaccattgagaaatatttacgacgtttactatagcatcgaccttgtggttggcaaccaaacagttcctgtgagcgttgatacgggctcgagcgacacatggatggttcagcagccgtatgagtgcgtttccttttggtttgatccgagaaatccagacggcgtaagtaatccctcaacactctctcctcgtcgtgctcttctaacatattcccagacgcgggactgtggccttggagcagggttcaagggaaatctttccggaggggttctgcccgggcttccgccgttctatcgcgcctacgttgacggcacctttgtctatggcttttacggggttgaagatgttacaatcggaggcgtcacagctcacaatcagcgaattgctatcgtcaattacacctactggcatggggatggacagacttctggacttctgggactcgcctacccttatctcaccagcctcgacggacccgaccaaaaccaaccgccgtacgaccctgttttcacaacaatgtggaagagcggggcgatagacccaatattcagcatcgctctgtcaagaaacgaggaccaaggaaatggcccaagcgggactcaggaggaatcttatctggctctggggggcctgccacccgtcgaggtcgatgaatccacctgggcgagcactccaatccatggcatgaattctgtcccccagtggggattcgaaacggacgagcgtggaatgtacatcatcaagccagacgcgttcgtcctcgagaaaggaggcgccggaccggacgccggtcaggagattttgaggaacaccactcaaattcctattctgatcgatgttggcgcaacattgagttacctgccaaagggtaagtcagcctgtgatgtgaacttactcaaactcttgctaattcacgccaaaggtcttgtaaaccagctgtatgccgcgtttgacccgcccgcgcaatacctcagctccaggggattgttctatgcgctctgcaatgccactgttcccaggtttggtgtccagattggagactctaccttttttatggccccggaagacctgctcaggcaaacagcccgagatcccacaggagaatggtgtcgtgttggtgttactgataccgactcaccgccgcatgtgcttggagtcagcttcctgacaaatgttgtggctgtatttgatgttgggaagcacgaaatgcggttcgcagctcgcaaggattactga

SEQ ID NO: 284 - DNA, 1398 bp, Scytalidium thermophilum
atggccggccgactgctcctttgcttcactgctgccctcgctgccttcggcgtctcagccctcccggccgacgccaaggctaaggcggatggtttctacctcggtgtgcccgttgtaaacccgggtatcaagaacgccattccccaccgatacattgtcgtgtacaacaacaccttcgacgatgaggccgtcgaggcccacgaggctgccgtcatcaagaccatcgccaagcgcaatatcaacaagcgcagccccttgaccggcaagaccctctcgacacgcgtccagaccttcaagattggcgggtggcgtgccatgtcccttgaggccgatgacctcctcgtcaacgagatctacgcagccaaggaggttgcctacatcgagcaggaccaggtctacactatcgctgcgcggaggtctcaggcccgggcccccagtggcctggctcgcctcagctcttcccaggctggcagctctgccctttacaccttcgatgactcggccggtgaaggcatcaccgtcttcgtcgtggacaccggcatccgcgttactcaccagcagtttgagggccgcgctagctggggcggtaacttcatcgacaatgtggtatgttggaccatatctgtcggcactgactaagagacgagctgtactaacattggctgcagaaccaagatgagcagggccacggcacccacgtggctggtactgtgggaggccgtgacgtgggcgtcgccaagaaggtcaagcttgtggccgtcaaggtgctcggcgctgacggcggcggttcgaccaccagcgtcattgctggcatggatttcggtatgtgtctgccaagctcctttacacaaaagagtcgtggtactaacacgtcgcaaagttgcccgcaacgttactgcttccggtctgcgcggcaaggctgtcatgaacatgtccctcggtggtggcttcagcaatgcgatcaactctgccgtcaaccgcgtcgagcaggctggtgtcgtcccagtcgtggccgctggtaacgaggctactgacgcctcgctcacctcccccggctccgctgaacgcgctatcaccgtcggtgccatcgaccagcggacggaccgcattgcctcgttctccaacttcggcccgatcgtcgacatcttcgctcccggtgttcgtgtccagagcgccatcatcgactccaacaccgcgcttggccctctcagcggcaccagcatggcctctcctcacgtcgctggtcttgccgcttacctcatggctcttgaaggcctcgacaatgctcaggctgtttccaaccgcatcaagcagcttgcccgccaggctggcggccgggtccggggtggcccgaggaacaccacgactctcattgccaacaacggcttcctcaactaa

SEQ ID NO: 285 - DNA, 1640 bp, Scytalidium thermophilum
atgcggctcccatccctctccccaacggccgcggccgccaccgccgcggtcctgctcacccaactcaccaccgcctcgcccaccacccacatcaccaaacgccaggccgccctcgacgactgcctcgccgccgccggcgtgcccaccgccgcgcacaactcgtccgactgggactacggcgcgcacgccttcaaccagcgtctcaagtacacccccgcggcgatcgcgatcccgaccaccaccgagcatgtccgtctggcggtggagtgcgcggcgcggacgggcgtgaaagtgtcggccaagtgcggcgggcacagctacgcgtcgtttggcatcggtggggaggacgggcacctggtggtgcatttggattcgatggacgaggtggtgctggataaggagaccggagtggcgacggtgcaggccggtgcgaggctggggcatgtcgcgaccgtgttggcggcggaggggagggattttagtcatgggacttgtcctgggtgagtagttacctgaagcatggatgggagagtcttctctcacgcaggaccgtcttgtgcttgttggagagtgagtaattctaacctaacccccctcccagcgtcggcgtgtccggccacaccctccacggcggcttcggcttcagctcgcacacgcacggcctcgctctcgacgccgctgtcggcgccacggtggtcctcgccaacggcaccgtcgtcgaaacctccaagaccgtcaacccctccctcttctgggccctccgcggcgccggttccaacttcggcgtcgtcgtctcctggtccttccaaaccttctccgtgccccccgtcgtcaccgccttcgaaatcaacctcccgcaatggcgctccaacgcgaccaacctcgcggccggcttctccaacctccaagactggttgctcgccggcggcatgccgcgggagctgaacatgcgcatcctcgccaacggcttcaccttccgcctcgaagggctctaccacggcgacaaaaccggcttctggtccgccatcacccctcttctccctcttctcggcaccaacgtcaacgcaaccaacgtccgcgaactggactggatgtccggcttccgcgccttcgccaacgccttcgtcatcgacacgaagcgcccgcaccgcgagcaagaaaccttctacaccaaatccctcgtcaccggcgcactcccggccgacgtcctccaaaacgtggccacctactgggtcaacgcggcgcgcacggcgtccggacggtcgtggtacgtcatcatcgacatgtacggcggtcccaactcggccatcactgccgtcggcaaagacgagacgtcgtacgccttccgcgaccccaagaagcacctgttcctgtaccagttcaacgacagcattttcttcgggtcgtatccggccaatgggttttcgttcctggataactggatcaaggcgttcacggacgggctgagcgaggatgagtggggcatgtacatcaactatgccgacccgcggttggatcgggacacggcgcaggaggtgtattaccgcgacagcttgccaaggttgaggcagcttaagaaggagctggatccgaacgaggtgttttactacccgcaggctattaagccggcggagttttag

SEQ ID NO: 286 - DNA, 1083 bp, Scytalidium thermophilum
atgcgtttctccgcctccctgctccttgccctgacgggctccgctgccgccagccctatccgggctgaggaagagatccgggtcgccttcacgccccgccaagtgcagggtctggatgctgccatgaaggctgccggaagggagtacatcggcacctccctcaccgtgaggaacgacttccaggagcagaacatcatccgcactgagttcggctccatcacgcctgagaacgcccagaagtgggacgccactgagcccaaccgcggccagttcaccttcggctctgccgaccagcacatggactgggcccgccagaacgggaagcacgtccgctgccacacccttgtctggtactcccaactgcccggctgggtgtccaacagcggcttcaacaatgccaccttgcagcaggtgatgcagaatcacatcaaccaggtgatgggacggtaccgcggccgttgcaatcactgggacgttgtcaatgaggctctaaatgaagacggaacgtacagagataacgttttcctccgtgtgatcggagaggcgtacatcccgattgctttcaggatggccgcccaggctgatccctcggccaagctctactacaacgactacaacctcgagtatctcggacccaaggttgagggtgctgcccgcatcgtgcgccttgtccagcagtacggcgttcgcatcgacggtgtcggctatcaggctcaccttgtcactgagcccacccccactcagtccacccccacgccgtccgaggaggacctcatcaaggctctgcgtatcaccgctgacctcggtgttgatgtcgcgtacaccgagattgatatccgcatgcgcactccgtcgaacgcccagaagctccagcagcttgcggatgcttactaccgcgtggctcgctcgtgcatgaaggtcccgcgctgcgttggcatgaccatttggggcgtcactgaccggtactcgtgggttcccaacaccttccgcggtgagggtgatgcgctcctttgggacagcaactaccagaggaaggccgcttacaacgccttcctgcgcggtatccaggagcccgttaactaa

SEQ ID NO: 287 - DNA, 897 bp, Scytalidium thermophilum
atgcgtcctcaggttgggcttcttctcctgccggccctcagcgcccatggcattcgcatcatccagtccaacgacgatgggtgggccgaactttatgtgaggtctttccatgaggctttgttggcttccggtcacgatgcggtcttgtccgctcccgcggaaaacaagtctgccacaagttctctcgatatcgagccgagtccccggaaatcgcggtgccagtatgacagttgtcctgtgaccaacgcccctattggacgcaacgagtcctcgccccggctcaattgggtcaactccttcccggtcacctcgatccgctacggtatcgacttcatcggtccccagttctggaacggccaggatgccgagctggccgtcacgggtcccaacgtgggcagcaacctgtacgtccaggcgccgttctcagggacgatcggagcagccgtctttgcagcaaaggaaaggaagattccggccatcgcgttttctggtctttctggcggcaacttggcatggaacacgacgccagtccccgaacgcagcacgctctatgccgaactggccacgatcctgacgaacgccgtcattgagagcgggaagccctatctgcccgaggacgtcttcctgaatgtcaacttccccacggttggaaacaagtgcaacaaggccagtcagttcaagtgggtgctcagccgcatcaacatcgggctgttctcggcccctgatatccagcactgtggttccacgcggttgccgatggaggcagcggttgtcctgtctgacggctgctacatttcggtcagtgtgggcgatgcaagggacaagacgacagcgccaaaggagaagcaggccatcgtgagggataagctgcagggtctgttgacctgtttgccatga

SEQ ID NO: 288 - DNA, 1536 bp, Scytalidium thermophilum
atgaaggcggaatccttcgccctcttcctctcggcccttagtggtctcaccgtcggggcttcagcccaggaacgcgagccgcggacctgggggttcgttccgggacttttaaagccatgggtcgattcaagaaggctccaggcagatatcaaaacagagaacctcgtgaagaaccttcaggtcctgaacgacattgccttcgccaatggaggcaaccgcgccttcggcctaccgggttacgccgcctcggtggactatgtctggaagaagatctccaaagtgccgggcacccgggcttggaaacaggactttgacgccctcttcagccaggtactctcgatcagtctcaaagtggatggcgaggacatctatgtctacggcctgtcctattcgccatcgacgccccctgaaggcatcaccgccgagattgtggccgggccggaaggcgctgcgggctgcaacgatgaggcatatgcagaccttgatgtggctggaaagattgtcctggttcagcggttccgctgcccgactggcggaacgttggcaggccgccttctcccggctgctcgtgcgggcgccgccgcggtgatcatctaccacgacctgacgaccaatgccaccgcgggttccctgtctgctccgaatccggagcacgttcccggcggattcatcaacaaggtcgatggcgagcgcatcaaagcgcgactagacgctggggagaaacttgaggcctattttcaacaaacgcagaccgttgagaaccggacaacccagaatctctttgtcgagaccatcgatggagacccggataatgtcattgtgcttggtgcacatttggacagcgttcaggcgggtcccggcatcaacgatgatggatccggcacgagcttgattctcgagctcttcctcgcgttgagcaagtaccgtacccggaacaaggtgcgcttcgcatggtggggtgccgaagagaacggactgctgggctctaagcactactgctcgactctcgacccgcgcgaggccaaccggattcttgcgtacctcaacttcgacatggttgccaaagggtacattggcgtcagtgacacggacggcagcacgcacggctccgtggcaccccctggctccgaggtcatcgaacgcctcttcaatgactattttgccagcaagggcatcactgtcacacctgccatcatgacgaacggtagtgattacgcttccttctggagcatcctcaacaagccctttggcttccttcataccggcactggcgtggagcaggacccgtgctaccaccaagcatgtgacacgatcgacaaccctgatcccgagacgcacaccaagaacgcaaaggctgcggcgcatgtcctgagcattctggccatggatggtacacgccttattcccaagggtcccccgattaacgcgacaacattggctgccatgcggacacgtgatcttacgcccgatcacgcccggatcgaagacctggaggcaatgggcgagagacatctcggatgtggccatgacatttga

SEQ ID NO: 289 - DNA, 582 bp, Scytalidium thermophilum
atgcagctcaagaccgccctcctctcgctcctcgcggccgtcgcttcggcggccccttcgggcaagtcctgcccggctccggtgcgcaagttcggcatcatggcgctccgctcggcgtcgcccatccatttcgccagggtctcggccacccagaatacgttggttctgaacctgcccgacgacaaacaagacgcgcagtgcgaggacggtcaggcgccctcgtcggccaccttctacatcaaggacgaggagctgtacctgtacggcaagaacccgaagcagtggcttgttgccgaccgctccggcatgggcctgggcatcctgcagtaccacaacaagacctccgacacccccagcgggcggctggaggttaagggctgggctatcgacgagaacgacaacctcacgttcaatggcaacggtctccttgcctgcccgagcacgaccgacgacacgtggtttatccggattgatgtgggcgttgagaagccccacggcatcgagggctgcctcgggtttagcgcccggactgtgactgtcacggatccggtcaagtgcacttacagtctgtatagcgcttag

SEQ ID NO: 290 - DNA, 1677 bp, Scytalidium thermophilum; identical to SEQ ID NO: 5

SEQ ID NO: 291 - DNA, 621 bp, Scytalidium thermophilum
atgaagtcctttattgtctattctctccttgccgcggtggctacggccttgccggccccggcgccgatgcctactcccccgggcattccctcaaaatcaacggcccagtcccagctgaacgccttgacggtcaaggcctcctatgacgatggcaagtataagcgcgacctgttccctcactggaacaccgtcagcgggacttgcaacactcgcgaatatgtcctgaagcgcgacggggtcaacgtcgtcaccaactcggcctgcgctgccacctcgggcacatggtactcgcctttcgacggcgccacctggactgcggcatctgatgtcgatattgaccacatggtgcccctgaagaatgcctggatttccggcgcaagcaactggacctcaaccaagcggacacagttcgccaacgacatcaacctgccccagctgtgggcggtcacggacgacgtgaaccaggccaagggcgacaagtctcccgacaagtggaagcctcctctcacctccttctactgcacctacgccaagagctggatcacggtcaagtacaactacggcctcagcatcacgtcggccgagaagtcggcgttgactagcatgatcaacacttgctga

SEQ ID NO: 292 - DNA, 1497 bp, Scytalidium thermophilum
atggcagcttccattctctacacggtatcggtgttgcttctcggtcttgttcaccatgtggctgccgctgccttgccccagcccacgccgcacgacgatggatgcgtacaccttcccatcattcactccaccaatgtcaacttcttctccggcaagcgcggcatccagatggccctggccaaccgctccgacatcgcctactatgcccagcttagtatcgggacgcctccccagccggtgtttgtgcagttggacacgggatccttcgagctgtgggttaacccggattgctccaaggtcaggggcgccgacgctctcttttgcgagcgggtaggacaatacgacacatctaggtcgtcaaccgtgacctcgctgggcacaagcaagttcctcaagtacggcatcggctcggccaatatcagctacgtgaccgacaccatcacgctggccggcagcgccacttcccttcgtaacgtgcagttcggcgtcgctacctcatcttccgacactttttcaggaatcttgggcatcggctacggccaaggtatcgctacaaagtaccccaatttcgtcgaccagctgcacgaccaaagcgccatccgcgtcaaggcgtatacgcttgcactcgggagcaaggacgcccgcgaaggtatcgttgttttcggcggcgtcgatacggctaagttctcgggcaagcttgcccgcgttcccattatccccgccgaccggtcgcctgaccgtgtgccgcggttctgggttgacctgcggtccatcaccctcacccctccgagcggcatctcccgggtgtatgaggactcggctcgccccgtgtttctcgacagcggttcgaccatgactcttctaccgcgcaaccttacggcggcaatcgcgcgggatttcggcgccaatgagccagattcgaacgggttctacagaatagactgtgccttgacgcagatgagcggcacgctggattttgcgtttgacggcgtcacggtcaaggtgccatataaggagctcacacgtgaggtgccgacgaatcctcccgcgtgtttccttggtatcatggccagtgacaagttcaccttgttgggggatacgttcttgcgttcagcctacgccgtattcgatcttgagtctgactccatatggctctctcaggcgactaactgcggttcctcacctgccgccctggacgacatcaactccttggcaaccatcacgggggattgtggcggaagtggcgtggtggactcatcgaccagcgtgcccacctcgacgtccgaggcgattcaaaccggcgtggaaactggaggccaggccgggccagtatcacagacctctccgggagggaggacgccgcagggtcagacgggtacggatgggacagcctcgggggctgcgttaccgttgctgccgacgggtttgggaagatgggtgaggagttgggcgttgctgttcgtgtttcaaagggtagtccttacatgcatgtggtga

SEQ ID NO: 293 - DNA, 906 bp, Scytalidium thermophilum
atgagcatgccccgacccctctcgttcggtttctcatcggggttcctgggtaaaccatcgccaaaaccaaggcaaacctcattctttccctcaccaccatctccacaactctcaagcgtcttagatctgcctgcatctatcacccagtatctattacccagtatggggcggttcgtctccgtctgggccataatcgggcttgctggcgtagtcctcggcgatctcctcgactgcggaccggctaggtatgacccagcgcagtacgtgtgctgggacaaccagtttctgtgtcccgtcgttgctggagagccgttgtcacactgcgctggtgcatgctacagcaagttcatgtacacgtgcacaaacaacatcctcacccttctcccaccccaagacacaccgttcaccctaactgtcgataaccccaatatcctcatccatggaaagcccgtcactgcttcgggactgcactggttactcaacggcgagacgagcagctactgtcccactgttgttccgagggagacatgtcccccggggaacatcacagtcatggtcgctagcggcggcagcgtcgccatgagcgtcatggttcctggcgggcagcaagcctatctggatccgtactggaatatgaagtacacacaagcgcactcggcatacatcccacctggtagcctcacgactgggttcggggcctacaaggggggtggcttcgtcaatctcaacggcaatggctggggatgggttgcttgcccaccgagggcgtcaggaggcggcgggacggcgtggaatttggttgcaaagaacgcaagcacagcagacctgctgaaggactgccacgcggttaatctaaagatcaacccattgccggctggcacctttggtgcctggcagtatacctag

SEQ ID NO: 294 - DNA, 1254 bp, Scytalidium thermophilum
atggccgctctctttctccctctccttctcctcgtccccctcgccgccgccgcctcccttccccctctccccctccatacctcctcccgatggatcctcgacgccaacaaccaccgggtcaagctccgctgcaccaactgggctggccacatggagacccatctgcccgagggtcttcatcataaatccgtggaccacatcacgtcttggatcgccgcccagggattcaactgcgtgcgcctgacctacagcatcgaccaggcactgaacccgaaccggaccgtggctgccgctttctccattgctgcttccgctgctggggtaagcgtgaacgacatgaacaacttcagggatagggttgtgcaaaacaacccctggatcaacccccaacaaacgacgacgagaaacgtgatcgagtatatcgtcgcgaagctggcagataaggggatcatgacaatcctcgataatcataccagttcggcaaagtggtgctgtaacatagacgatggaaacggctggtgggacgccggcgcctactacaatcattggaacagtcgagacttcaagacgaatgagtggctagccggtctccaggcgatggcggcgtgggccaagggccggaaaggcatcgtgggcatgggcctgcgcaacgagatccgcgagttcctcctccagggcatcctcaacggacgcgaagactggtaccgcttcatcaagcaggccggcgacctggtccacgccaccaacccggacgtgctcatcatcgtgggcggcacgcagagcagcacggatctgctccacatcaggtcgcggcagctggacaccagcgggtgggcggggaagcacgtctgggagatgcacgcgtacagcttcaccgtgaccttcccggacgcgctcaagaattgcgacgtgaccaaggtgcagtacgggctgtttgacgggttcgtgctggagcagaacaagccgtggacgggaccgctgtttctgagcgagttcggcgtcggcatggaagggggcccgttcgatgggctgtccgagaaggatgaccggtatctgaagtgtttggtttcttggatggagagcaacgacgccgactgggccgtctgggccatccaggggagctattatgtccgtgacaagattcctgatagggatgaatcctggggtctgctgaagcacgacttctcagactggcggaatccgaaattccctgccatgcttggaaagatgtggaacgtgacccaggggccgtga

SEQ ID NO: 295 - DNA, 1938 bp, Scytalidium thermophilum
atgctaccgaggagggaggcgagtggagggacgtccacttccaccgcgaggatcacggctcagttgctgctgtccttcctcgccctctcgccgtcgcccgttgccgctgtcgcaaatgcaccagcccagccccaggctgttcttcctccgggcgcagtaatacccgagcagccacaaccagttgcacccggagagcacagctttaccctccgccacattttccatcatggcacctacaagtacccgaatctccatcgcaagaaggatatcgaccccagcgtctccaatgtgtggctcgccgccgaggatggcttcgaggccgaacccctaccgccactccgcgcccggagcaacggcgtgcgcatacaacgactggtcgatcgccgacccagcgtcgtcgatcccatggtagcccacgcacgccggtttgggtacgcgaacgttctcgcgccttcagcttggaccctcgacgaggtcccggcgcccgatattaccgaccgcgacaccatcctgacgcttgcctacatggcatccgatgcctacgtgcagagccctgatgaagccgactgggacgacgttggtggcggctttaaccggagtgtcgactttggctgggagagcgacggcctgcggggacacgtgtttgccgacgacactaactcgaccatcgttatcgggctcaagggcacgtcgcccgccgtgtttgatggcgagggaacgaccaccaacgacaaggtcaacgacaacctcttcttcagttgttgctgcgcacagcagggtccatggacatggcaccaagtatgcgattgcgccacgggcccctaccagtgtaacaacacgtgcgttgtccaggctcttcacgaagagaaccgctactaccaggccgcccgtgaactttacgccaacgtgaccgagttgtaccccaattccaacgtgtggataacaggccactcgttgggcggtgctgtcagctcgttccttggtctgacatacggcgtgcctgtggtgacgttccaggcggtgcccgaggccctcgccgccggccgcctgggccttccggtgccgccgggcatcaatcccgacatcccgcagacacgcgagtacacgggcgcctaccactttggtcataccgccgaccctatctacatcggcacctgcaacggcgccacagcctcgtgctcgtttggcgggtacgcccttgagacggtgtgccacacaggctttgagtgtgtgtacgatacggtcggcgacaaggggtggcgcgtgggtattggtacgcacaagattcgcgccgttatccgcgacgtgattctcaagtacaacacggtgcctgagtgcaagcggaagcccgaatgccgcgactgcggcagctggaccatgtacgagagcaacggtacagaaacgacgaccacgtcggccaccagctcccctacgtccaccagcaagacgcgcacacgcaccgagacgtgcaagactccaggctggtggggttgcttggacgaaacaaccacagcgacgggcaccaagacgtccgaggtgactcctaccactacgtcgaccacgacatgtcatactccaggctggttcgggtgcagggataagaccactaccaccacaaccacgccaacgtcgacgacaacaaccactacaacgacatgcctgactccaggcaggttctggggatgttacgacgaaacgacaacagcggaagagacggcggcgcccacggtcaccacgacacgcgagctcagcagcaccagcaccatcacctccccgccgagcctgcccagcacttcgactccgaccagcgcggcgccgacgacgagtccaacgtgtgttgaccgggcgtggtacggctggtgcagggagtgggcaggtgatgatggcgagaacggggatgatgacgacgaacaggtgaataagaaggaggatatgtag

SEQ ID NO: 296 - DNA, 1434 bp, Scytalidium thermophilum
atgcgcacactctcaacgttgctcacagcggcggcggtggctacggcagccaccgtcagcccgcgacagtcgggcaccatcaccgtcaacctgggccaaaccttccagcgcatcgacgggttcggcttcagtctggcgttccagcgggccaacctcatcaccaacatgtcggacaagaccaagcaaaaggagctgctggacctgctcttcaacaagaccacgggcgccgggttcaccattatccgtaacggcatcgggtcgacgcccaactccaactcggatttcatgaataccatcgccccgaacaacccgggcggacccaacgcgacgccgcagtatgtgtgggacgggaaggatagtggccagctgtgggtgacgcagcaggcggtgagtttgtatggagtcaagcaagtttatgcgaatgcttggagcgctccgggctacatgaagaccaacgggcgcgacaccaatggcgggactctgtgcggcatgcccggggctttctgtgcgagcggcgactggaggcaagcgtatgccaactacctggtgcagtacatccggttctaccaacagtctggcgtcaacatcacccacctcggattcctcaacgagcccgactacagcgccagctacgcatccatgcaagccaacggcaaccaagcagcggacttcatcaagatcctcgacgccacgctgcggcgcgaggggctgagcgagcaggtcggcatcacctgctgcgactcgatgggctggggcaaccaagccaacatgatgaacgccatccgttcccaaggcgcagagggcctgctcaaggccgtcacgactcacacgtatacgggcgctccgaacgggccggtcaactaccgcgcgcctctctggttctcggagcagtgcgatctcaacggccagtggacaaccgcctggtacgcctttggcggcgcgggcgagggcctcacctgggccaacaacatcttcaacgccatcgtcaacaacaacgcctcgggctacctgtggtgggagggcgtgcagtggccgaaccccaacaccaacgagaagctgatccgcgtggacaacaccaccaacacgtacgaggtgtcgcggcggctgtgggcgtttgccaactggagccggtacgtcaagccgggtgcggtgcgcgtcggcacgtcgggcgcgccgggcgggctgcgggtggcggcgtttaggaacgaggatggcacgatcgccgtggtcgccatcagctccagcggatcgccggtgaatgtctcgatccggctgtcgggtggaggagttggcggcgcgtcggcggtcagggcgtacgtgtcggataacacgaggaactgtgagaacacgccggcgtcggtgggcgcggatggcagcatcactggatcagtggcggcgcggtcgatcacgacgttttatatactgccggcataa

SEQ ID NO: 297 - DNA, 1761 bp, Scytalidium thermophilum
atggcttcattattacccttacgctcctgtctttctttcttcctcttcttcctcgttgccatccagcccgtcacagctgtttggcctgcccctaagaactttaccaagggcaacacggttttgtatctgcaccaagcggtcaaaatcacttacaatggtgatcctctcagctacacctacggctatgtcccgcgggatatcaccagcaaggaggtggtgcaagccggcgtgtcaagaaccctagatggcatcttcggctccaagttcgtcccttggaaactccataaacccggcagccagttcgagcccgacctgcataagggccagaaatggatttccacattcgagattgtccagacggcgaaggacaagccgagcactttcaagccccttgctggcgaggtggatgaatcgtacaagctgtccgtcagcgctgagggcgccgccaagctgaccgccgcctcgtccattggcatcctccgcggcctcgagactttctctcagctcttctaccagcactcggcaggcaccttctggtacactccctatgcgccagtcgaggtggaagactctcctcagttcccgcaccgcggcatcttgatggacacggctcggcacttcttccctgtagaggacatcctgcgcaccatcgacgccatgtcgtggaacaagctgaatcgtctccatatccacgttaccgactcccagtcgtggccgctcgtgctcccctcgatgcccgaggtctcggaaaagggcgcctatcacccgagtcagacttactccccaaccgacatcgagaatatccagagatacggtgcgatccgtggcgtcgaggtctatttcgagattgatatgccgggacacatcggtgtggtggccctttcgcaccctgaactcatcgtggcgtacaatgagctgccgtaccattggtggtgcgcccagcctccatgcggcgcgttcaagctcaacagcaccgaggtggacaagttcctggaaaagctgttcgatgacttcctgccccgcgtggcgccatacgcagcttacttccacacgggtggcgatgagctgaacaagaacgactcgatgctggacgacggggtccgctccaactcttcagacgtgctgcagcctttgttacaaaagttcatcgatgcacagcacgggcgtgttcgtaaggcagggctgacgcccgtggtgtgggaggagatacctctcgaatggaatatcaccatcgcagacgacacggtcgtgcaggcatggcttggtgagcagtccgtcaagaagctgacggagaagggtctcaaggtcattgacagcaactacaacttttggtacctcgactgcggccgtgggcaatggctcaactgggacaacggcgcggccttccagctcggctacccctttaacgactggtgcaatccgaccaagagctggcggcttgtctactcgcacgaccccgtggcaggactgaccccggagcaggccaagctcgtgctgggcggcgaggtggccgtctggagcgagaccatcgactcgaccaacttcgacacgctcgtctggccgcgcgcctccgccgcgggggaggtcctctggtcaggcaggatcgatttcgcgacaggccagaacaggagtcagttggacgcggcgccaaggctgaacgagttccgggagaggatggttttgaggggcgtgcggagctcgccggtgcagatgactttctgtacccagggtaagccggaggagtgtgagtacgctccgtga

SEQ ID NO: 298 - DNA, 1332 bp, Scytalidium thermophilum; identical to SEQ ID NO: 13

SEQ ID NO: 299 - DNA, 2076 bp, Scytalidium thermophilum
atgctgcatctccgccgatccctcgttctccttcctctcttctacttcgtcaacacactcgctgtcgctcagtacagcggttacgactacggcttcgatgtccaccagctggtcaagcggcagattggtcgccgttccgacctggtcgttaatgaaacgactccggacgacggtatcaggatccgtcaagagatccgcgagctcgaaaaggaccaagatctctggaccctgtacatcctggccctcagcatgcttcagttcaccgaccagtcgtatcccttgtcgtactattctctcgcgggaatccatggaatgccacatgcgacatggggcggtgtgaaccccgtgcccggtagtgaggacttgggatactgtgctcactcttcggtgcttttcccgacttggcatcggccatacatcgccttgtacgagcaaatcttacacgggctcgtccagatgatcgccagcttctggaacgacaccgaacgaccacgctaccaagctgccgctcgccgattccgccagccctactgggacttcgcagctcctcctccggaaggagagagcgtacttccttggagcgtgggaggcagccagtatgtggacgttgacgggcccaatggccgtcaacgcatcgcgaatccattgtacacgtactatttccgccctctggatccagacgccttcacgtttgggccgtggaatgaatggacaaagactctaagattcccgtccagcaccggtccagatgcacaatctaacattgccctcgtcgctatgaacctggaccgcaaccgtgctgccctggcccagagaatctacgcattgttctcggccaatgacaattacacgacgttcagtaacaacgtggacggcagctacctggactcggtagaatccatccatgacaccatccatacacttgtcggcggttacgggaacgacagcgatcccacccatcctggacacatgtctttcatccagtggtctgcattcgaccccatcttcttgctccatcactgtaatatcgaccgcatctttgccatctggcaagctcttcatcccgactcctgggtcgagccgggagtctctattctcggcacgtacaccacgcccaaaggcggtattgtggactcaaccaccccgctgacgcccttctatgagactgctaatggcagcttctggacttcagacagcgtccgtgatcacacaaagttcggctacacatatgccgagctgattctcagttcatccagcagcagcggcggcagcagcaacagtaataatcgtctggcgctagcccatagcaccaagaaggccgtgaaccgcaagtacagctccttcagccctgcgtccgtctttctctgcgagcttcgttcacatggtgtccgtcaagaggatggagataccgacaagccagcttcactctcgtcccttctcgccaaacgcctgcccgggaagaagacgaagaacctaccccgctctctgctgggtagcaaactcttcgccgccagcaccgatggaagcgggattaactaccgcgagtggactgcccatgtgattgttggccaacaggccgttgaccagacagggacggtcagtctctaccttcccaacgaggccgtcaacggcaagtcgaataacccgcgcgattggcctgccgagtccttcgttggaaccatgggcgtcttcaccaccgccagacagcagcagcaccccgagcagggacagcatccttgggcacaacagcatgccaaccctgatactaaaagtccccacgctgtccccgtgtcgggcaccgtcccgctcacggccacactgatggacaagcttgcgtcgggccggctcgagagcctcgagcccgagcacgtggtgccctatttgcgggaagcgctgcggatcgcggtgcaaaggccgacggggaaggtggtgagcacacagctggagagccgggaggcggggtgcggtgtcccggggctcgagattcgcgttttgagcgcggtcgtcgaggcgccgtggagcgaggacgagttgcctaagtggggagagaggaggatggagttggtggtgtgttga

SEQ ID NO: 300 - DNA, 1659 bp, Scytalidium thermophilum
atgaggatcgcagcatccacagtgctgctcggcgccgcctcggcgtcgtttcaccagcaggcccaacatgtgctctccaacttcgataacatgaagcccatctcggagtcatttgactccttgggcgacatggccagcgctcctctggaggcgctggagaaggcctttggcaccatgagcgccgaggccaaggccgtctgggaagagatcaagctcctcgtcccagagagcgccttcaagcagggctcgtggttcagcaagcccaagcctcacacccgtcgccaggactgggaccatgtggtcaagggcgccgacgtccagaagctgtgggtgcaggacgccgacggccagagccaccgcaaggtcggcggccgcctcgagagctacgacctgcgcgtcaaggctgttgatccctccgtgctgggcatcgacaccgtgaagcagtacagtggctatctcgatgataatgagaacgacaagcacctgttctactggttcttcgagtcgcgcaatgaccctgagaacgaccccgtcatcctttggctgaacggcggccctggatgctcgtccctgacgggcctgttcctcgaacttggcccctcgtcaatcaataagaagctccagcctgtgaacaacccgttcagctggaacaacaacgccagcgtcatcttcctcgaccagccggtcaacgtcggctattcatactcgggcggctccgtgagcaacacggtcgctgctggcaaggatgtttacgccctcttgaccctcttcttccaccagttccctcagtatgccaagcaagacttccacattgctggcgagtcttatgccggccactacatcccggtctttgccagcgagattctgtctcacaaggaccgtaacatcaacctcaagtctatcctcatcggcaacggcctgacggacggtctgacccagtaccagtacttccgccccatggcttgcggcgagggtggctatcccgccgtcctcagtgagtcggagtgcgccagcatggaccgcgctctccctcgctgcacctccctcatcgagagctgctaccagagcggaagcgtgtggagctgcgtgcccgcctccatctactgcaacaacgccctgatcggcccgtaccagcgcacgggtcagaacgtctacgacatccgcggcaagtgcgaggacagcagcaacctctgctacagcggtcttggctacatcagcgactacctcaaccaacaatccgtcatggacgctctgggcgctgaggtctcgggctacgagagctgcaacttcgacatcaaccgcaacttcctcttccagggcgactggatgcagcccttccaccgccttgtccccggcatcctcgaggagatcccggtcctcatctacgccggcgacgccgactacatctgcaactggctcggcaaccgcgcctggaccgaggccctcgagtggcccggccagaaggccttcaacaaggccgaggtcaaggacctcaagctcgccggcgccagcgaggagtacggcaaggtcaagtcctcgggcaacttcaccttcatgcagatctaccaggccggccacatggtgcctatggaccagcccgagaactcgctggatttcctgaaccgctggctcaacggcgagtggtttgccaaggagtaa

SEQ ID NO: 301 - DNA, 585 bp, Scytalidium thermophilum
atgggcctccttgcgaacctcaccctcctcctggccgctgcctcggccgttatcgctgaggacaaggccgccgtgcccaagatcaccagcatcaagttctcgggcagcgggtgccagaaggaccccgccttctctggcacctttaacgaccccaaggttaccttcagcgagttcgtcgcgaacctcccgggcacgagccagactgtcaactgccaggcccacctccaggccgagggtgccagccagggctggcaagtcgctgtcaagagcaacaccgtccgcggccaggccgtgctgcagcccggcacctctctcacccacttcaccagcgtctacttcagccaggatcccgccaagactgaggtcttcaagggcacccttgcgaacaacggcaacaggaccgtcacccaggccgtcgttctgaccggcaagtcggacaacaacaaggtctggtcgccatgcatcggcaaggacgggtacactggtatcctcaacatcaacttccgcgctgttctctctggtgaaggcagggcctacttcaaggccaacactgagcagtgggacgtcgagtggaggaagtgctaa

SEQ ID NO: 302 - DNA, 1167 bp, Scytalidium thermophilum
atgaagcacagcgttcttgccggtctctttgcgacaggcgcgctcgcccagggcggtgcatggcagcaatgtggtggcgttggcttctcgggctctacatcctgtgtatctggttacacgtgcgtgtacctgaatgagtggtacagccaatgccagccgcagtcgaccacgttacggacaacgacaacgccaggggcaacatcgacaacaaggtcggccccggctgctacctcaaccactccggctaagggcaagttcaagtggtttggcatcaaccaatcctgcgccgagttcggcaagggagagtatcccgggctctggggcaagcactttaccttcccctcgacgtcgtcaattcagacgcacatcaatgacggcttcaacatgttccgtgtggccttctcaatggagaggttggcacccaaccagctgaacgccgcgttcgatgccaactacctccggaacctgacagagactgtgaatttcatcacgagcaagggcaagtatgtgatgcttgaccctcacaacttcgggcgctattatgagagaatcatcacggacaaggccgccttcgccagcttcttcaccaagctggccacgcactttgcgtcgaaccctcttgtcgtctttgacaccaacaacgagtaccacgacatggaccagcagctcgtcttcgacctgaaccaggttgccatcgacgccatccgcgccgcgggtgctacctcgcagtacatcatggtcgagggcaactcgtggaccggcgcgtggacgtggaacgtgaccaacaacaacttggcggcgctacgcgacccggagaacaagctggtgtaccagatgcatcagtacctcgactcggacgggtccggcacgagcacggcctgcgtcagcacccaggtcggccttcagcgcgtcattggtgcgaccaactggctcaggcagaacggcaaggttggactgctcggcgagttcgccggcggcgccaactcggtttgccagcaggccattgagggcatgctcaaccacctccaggagaatagcgatgtctggacaggtgcgctttggtgggcgggcggcccgtggtggggtgactatatctactcgtttgaacctccttcgggtattggctacacctactacaactcccttctcaagaaatacgtgccatag

SEQ ID NO: 303 - DNA, 864 bp, Scytalidium thermophilum
atgaggtggttcgggcgcgcgcttcttctcgcctcattggcggtgtcgacggtgacggcggagctcagtttcgtggcgaccgtgaagcaggacggcaaggaggtggatgcgtcgaagttggacttcaagccgatccctccaattcggcatcggaggcgaggggcgcaccgtggcggacggactgggcaagcagagcagcagccagaggcccgggacttgatcagctacagctccaactggtgcggcgcttcacaacacacgtccgacaaggccgacgcgatcaagaatgtctcgggctacttccaggtgccggatttgcgcctgcggccaggaaacccgccgccgcagttcgccgcggcgtggattggcattgacggcgccgagtgcaacacgacgctgctgcaggcgggagtgacgacggtggtcaactccaacggcgggcagagcgcttcggcgtggtgggagtggtatccggaggcggccttcagcattgatgggctccgggtcaagccgggcgagtggatccaggtggacattacggcgtcgagcccgacgaacgcgatagttatcatcaccaacattgaccggggcacgtcggtgacgctgcacatcaacaacggccccaagctgtgccgggtggacgccgagtggatcgtcgaagacttctacgagtcggagaagcaggtgccgttcgccaagttcaacgacgtctggttcgtcaacgtcggggcgcgtaccaacagcggcaagcggatcggcgtcgacggcgcggccatggtccacctccaggacgagaagggcaggacgctctgctcagccgagcgcttcgacaacaacaactttgtcgccatttcccatgactaa

SEQ ID NO: 304 - DNA, 2469 bp, Scytalidium thermophilum
atgaaggccctgactagaaggctggcgagctttctcgccatcaccggggttgtcggcttggagtatccgaattgcatcaacggaccgttggccaacaacacggtatgcgacgtgaccgcggcgccggcggatcgtgctgcggccttggtcaaggccatgacggtggccgagaagctggataacctcgttgacatgagcaaaggagctccgcggctgggcctaccgccatatgcctggtggaacgaagcacttcatggcgtcgccctatcccctggggtcactttcaatccactggggtctgacttctctaatgcgacctcgtttgcaaacaccatcaccctggcggccgccttcgacgacgacctagtgtaccaggtggccagcgccatcagcactgaagctcgggcatttgcaaacgcagggcttgccggactcgactactggtccccgaacatcaacccgtacaaggacccgagatggggaagaggacatgagacaccaggcgaagaccctgttcgcatcaagggctatgtccgggcgttcctagccggcttggagggcgacggtcccgtccggagggtcatagccacatgcaagcattacgccgcctacgatctggaacggtggcaggacctcacacgacaccagttcaacgccatcgtatcgctccaagacctgtcagagtactacatgcctccgttccagcaatgtgccagggactccaatgtcggctccatcatgtgctcatacaacgctgtcaacggcactcctgcctgcgccaatacctatttgatggacgacatcctgcggaagcattggaactggacaggccataacaactacatcaccagcgattgctacgccattcagaacttcctccccagttggcacaactactcccaatctcccgcggaggcggttgctgctgctctcaatgctggcaccgacaccatctgcgaagttgccgggtggctaccctacgccgacgtcgtcggcgcctacgaccaaggtctcctctccgaagccgtcatcgaccgagccctgcgccgtctctacgaggggctcgtccgggtaggctattttgaccctccaacctcctcctccccagcggccgcctaccgctccctgtccgccgccaacgtaagtaccaccgagcaccagctcctcgctctccagtccgctctggacgggatggtcctcctcaagaacctcaaccaaaccctccccttacgcgacgcaatcccgttcccccctttcaccaccaccgctgcccaagtagcaatcatcggccactgggctgctcccaacgcccacatgctcggcggctacagcggcattccgccctacctcctgtccccgctccacgccgctgagttgctccaactcaactacacctacgcccccggcgcacccgtaatcaccaacgccaaccccgacacacccgacacctggaccaccccagccctcgccgccgcctcttcggcctcgtacatcctctactttggcggctctgacctgtcccttgcgcgcgaagacctcgacagggacagcgtctcctggccgcgcgccgagctcgagctcatcaccaccctctcctccctcgggaagcctgtcatcgtgatccagctcggcgaccagctcgacaccgcaccgctgctctccaacccgaatatctctgccattctctgggccggataccccggccaagcgggcgggttggccgccatgtacaccctgctcggcatctcctcgccggccgggcggctgccagtaacccaatacgccgaggagtacaccaagcgggtagcactgacagacatgcgcctgcgcccggacgcgcaaaaccctttcgatctcagcacgccggtccatctccggcccaacactagcagctcgttccctggcaggacataccgctggctcccgcacccctcctcctcctcctcttcctcatcatccctcgtaaccctccccttcggccacggcctccactacgcccccctccgcgccaaattcggcatcttcaccaccctctccctcaccaccgccgacctcctctcctcctgcaacttgactcttcacaacaaccaccccgacctctgcccattccccctccaaatctccgtctggacgaccaacctctccccatcaaacggaggtctcacgaccgactacgtcgccctcgttttcgtcaccggcgaatacggccccagaccctaccccgtcaaaaccctcgtggggtacacgcgccttcgagccatcgggccgggggagaccaaggcggccttggtggacatcaagctcggggacttggcgcgggtggacgaggccgggaatcgcgtcttgtatcctgggccgtacaagtttatgttggatgtcgcggaggacggaggcggggtggatgaggtggagattgaagtgacgggggaggaggtagtgttggagttttggcctcagccacaggggtga

SEQ ID NO: 305 - DNA, 1467 bp, Scytalidium thermophilum
atggcaaaggctctgaaatactttgcttggggcattgctgcccttgcctcgggcgccgctgccgctccttactgtgctccccagccgtcgacaacctctcaagagcctacgagcactccgtcgcctgtgccaggtccgcggacatttgaagcggaggatgccatcctcacgggcacgagggttgagtcgagcctcgccggctactctggtaccggatatgtagcgggcttcgacgagcccaatgacaagatcacgttccatgtggacagcgagaccacgcggctgtacgacctcaccatccgcgtggccgccatctacggcgagaagcgcaccaccgtcgtgctcaacaacggcccggcaagcgaggtttacttcccggcgggcgattcgttcgtcgacatcgctgccggccaggtcttgctgaaccagggtgacaacaccatcgacattgtcaacaactggggatggtacctgatcgactccattaccatcaccccctccgccccgcggccccctcaccaaatcaacccctcccccgtcaatcctgccgccgacgacaacgcgcgggcgctgtacgcctacctccgctccatctacggcaagaaaatcctctccggccagcaggagctctcctgggcggactggatcgcccagcaaaccggcaaaacccctgcgcttgtgtcagtcgatatgatggactactcccctagcagagtcgaaagaggcacaagaggtaccgccgtcgaggaggccatcgagcaccaccggcgcggcggcatcgtctcggtgctgtggcactggaacgcgcctacggggctgtacgacacgcccgagcgccggtggtggagcgggttttacacggacgcgaccgacttcgacgtcgcgagggcactggcggatacgaccaatgccaactacacgctgttgatccgggatatcgacgcgatcgcagtgcagctcaagaggctgcgtgatgcgggcgtgccggtgctttggcgcccgctgcacgaggccgagggcggttggttctggtggggagccaagggtccagagccgtgcaagaagctctgggggattctgtatgatcggctgacgaactatcacgggctgaataacctgctgtgggtgtggaactcgatcctacccgagtggtatcccggagacgaaacagtagatattgtcagcgcggacgtgtatgcgcagggtaatgggcccatgtcgacgcagtataaccagctcatcgagctgggccaggacaagaagatgatcgcggcgaccgaggtcggagccgcaccactcccagacctgctacaggcctacgaggcgcattggctgtggttcgctgtttggggagacacattcatcaacaaccctcagtggaactcgatcgagaccttgaacacgatctacaatagcgactatgttctcactctcgatgagattcaggggtggaggaacacgcaatga

SEQ ID NO: 306 - DNA, 1293 bp, Scytalidium thermophilum
atgaagctcacgacgccgtggcgggctgcgactggcctgttggccgttgctagccaggcggccgcaaagacaattcagtactgccctggaaatgcggacgggttatgttttagcatcgccgtcccgacttcctccgcaagctccgggtctggaaacatctacttccaaatcaaggctccggcctctctgacgtgggcagccctggggacgggcagcacaatgcccggctccaacatgttcgtcgtgtaccgggacggccagggcaacgtgaccatttccgcgcggcgggctcagggctacaacaccccgctccaggacacgagcgagcaggcggcgcggctgaccttgctcgcgggcagcggggtcaacgaggacggatccttcacggccaatgttgcgtgcgccaactgcgactcttgggccaccggctccatgtccctggcgagcaccgccgcgccgtggatcggcgcctggaggcccggtgaccccatcagcacgacggacgccaactcgcgcatccctcctcatgatccggatggcactacccgcttccaggtcgacctgacgcaggcaaccatcaattctgatagcaatccgtttgtgagctccagctctggtgatgaagacagcgatgagacttcggacagtaacgacaacaatgataacagctccaacagcagcagtagcagtggtgttgtcgagttgggaagcaccatgagggacagggcagtgattgcacacggcgtgatcctagcactcgtcttcgccgtgctctacccgaccggttcgctgatgatgccgctcgtcaagaagtggtggttccatatggcctggcagtcgttcagcttcgggctcatgtggggaggattcgggatggggattggcatcgcgaacgagcgcgattcgctcttcaaaacaacccacacgaccttcggcacggtggtcatcgccatgctcggcatccaacccatcctgggccatctccatcaccggtacttcctcaaacaccgcagccggggcgccatcagctacctgcacatctggtacgggcgcatcctcatgatcctgggcgtggtcaacggcgggcttgggctgcggctggcgcgcgaagaggagggttacgtcattgcctacagcgtggttgcgggcgtcatctttgccgggtacttcgggtacaaggctgcgacgacgctgacgaaggcgagcgaaggggcagacggagacggagacgaggccaaggagctaagggcaaggagcgagttgaggagagctcggcgtaacgaatccgcctga

SEQ ID NO: 307 - DNA, 1536 bp, Scytalidium thermophilum
atggtggcatcttcgcttgtgctcctgacggcccctttggcactcgcccctggggcgtgggcactgccgaacctgctcaacctgggtctcagccttggtagcggtcaggttgctgaggtctcgtgtgaggcggtcacagtcacggagacggtctatctgccagaaccaacggagaaggcgacttccactgaaacggcgagcagtgagaaaacaaccgcatcgccgaaaccagaaactcagatcacggcgtttgtgaatatcacagcgccaaaaaacaacacaggctttgcgggatatcgaaatgccctctatttcactaactgggggatctatggcgccgacatgcaaccacaagacattccggcagaccaagtgacgcatatactctatgcctttgccgacattgggccggatggagaggttaaatcgtccgacagctggtccgacacggacaaacactacgaaggagactcgtggaacgacgttggtaacaacgcctatggttgcgtcaagcagctgtacatcctgaagaagaagcaccgccagatgaagacgctcctctccatcggtggctggacttattcgcccaagttcgcgccagtcgctgccacggcggctggacgcaggcgcttctgcaaatccgctgtcaccctcatgaaagattggggtatggatggcctagacattgattgggaataccccgccaacgcgcaggaggctcaagattatgtcgaccttctgaaaacctgccgtgctgccatggactcttatgccgctaagtacgcaaaaggacaccatttccttctcaccatcgccgcgcctgcggggccaaagaactacgacgtcctcgacattgaagccatggacccgctcctcgacgcctggcacatcatggcctacgactacgcaggcagctgggactcgacatcaggccaccaagccaacctcttccactccgagtccaaccccgaagccaccaagttcagcaccgaacgggctgtcagggattacattgcccgtggcgtgccctcgcgcaagatcgtcctcggcctgcccctttacggacgccagttcgaaaacaccgagggtcctggcaagccgtacaacggcattggctctgaagggtctctgcaaggccagccggggatttggctgtatcgcgacctgcctcgtccgggggctgaagagttctatgacgaagaagcgggcgcggcatacagtttccaaaacggcaccggtggtggctggacaggctggaacaagaacaccaatggcaagggcaggatcagtaagtacggagggggaaccatggtctcgtacgacacactcacaagcgcgaggaggaaggtggagtaccttttggagaacaagctgggtggagcggtgttttgggaggcagcgggagacaagaagggtgacgagagcttggtggcagcagtcaggcaagggatgggaaagctggagcagacgaagaactggctgagttatccggacagccagtatgagaatatccgggccgggatgccggggagttag

SEQ ID NO: 308 - DNA, 4308 bp, Scytalidium thermophilum
atgaagctgttcattcccttaccgtttctcctcctatattggttgatatgtggtgttcttgccaataccgtgcgcgatgaggctgtggccatccagccaaggtccgtacaggctcaccactcaaacggcatcacgcttgaggttcgcgacgaggatgatgaatccgacatcgagaagccccctcgtctggccaacgccactcaggcggacatcgaccgtgctcgtgccattatcaatgctgccatgaaggagttggctgtccgcaacaaggctcgtcttgaccaccctcttcgcaataactaccagctgcggcctggttcagggaagagaaagcggaatgatccaattcccgtcgaagatgcgccacctctgttcaacgtcaccgaggacatcgccgctgccgctgcccttgttgctgaggcagatgcctacgaggaggtcaagagcaacagtaccctgaggcgtcgggccaatattttgaggcgggcccgcgaaagcaactactggatggcgaacaggaagaaactgggcagctggccctttggcaacaacccaagcagtttcaccgtcttccgtgatgttaccaaatacggagccaagggcgacggtgtgacggacgacactgaagccatccggaaagccgtatccgatggaaacatgtgtgggcctggatgttatagctcgacaaccaagggtgccatcatttactttcctcctggcgagtatcttgttagcgggacaatcgagacgtactatgggacacagttcatcggcgatcccaacgaccgtcctgtgatcaaggcagcgtcgtcattcgtgggcctcggcgttatttcgaccgacaaatatgttgaaaatggcggaattggctctgatggaaacgcgaagcagtggttcatcaacaccgcgaatttctacaggcagattcgcaacttcgtgatcgatatcactgcaacctaccccgatgcttatgtctgcggtcttcactaccaagtggctcaagccacgagcctgcagtttgtcgagttccgcgcgaggaccggcacaacccagcagggcatcttcgccgagaacggtagcggcgggttcatgagtgaccttgtcttcaacggtggaaactttggtatctatggtggtaaccagcagttcacatcgcacagactcacattcaacggtctgaccactgctgttcagctgatctgggattggggctgggcttggaagtcgatctacatcaaaaactgcaaaactgggttcaaactgatctccgaggacggagttcgcaataccggctctctcttactcaccgactccgtcttcgacggcgttgacacagccatcttgaccttcccagcacaagccaagttcggcgacggcacaacgggtcttacccttgacaacatcaaattcgtcaacaccaagcaaggcattgtcgacacagagggcacttcgtatttgggaaccagttccgatatcgacacttttgttctgggacgcatttacgtcgaccagaacaaactcgaagccctttccgtagcctaccgtacaaagcgagacccgttgctggttggggacaacccttggggcttgccgaagagtccttaccatgagagggccaaaccgcagtacgagaagcactcggcatctcaattccggcatgtcagggacagctgcaaaggagacggcaaaacggacgacacccagtgcatccaaaacatcttgaacgacagcgccggcaagaatatcgtcttcttcgatgccggatcctacatcattaccgacaccatcacagtcccgccaggctccgtgattgtgggcgagaactggtctcagcttgtggcctatggcagcaagtttggagatgccacgaagccgaggccactcatccgggtcggccagaaaggtcaggttggaaccgtcgagatgcaagatctgctcttcacctccaaaggcccaactgccggagttgtgtttgtggaatggaacatcaaatcgtccggcaacggaggggctgccatgtgggattgccatgtccgcgttggcggtgccgtgggcaccgacctcactgtcaaggagtgcccagctggcagccagaacgacaaatgcaaggccggtagtgccctcatgcacatcacatctggggcgtcgggttacttcgagaatgtctggctctgggttgctgaccacgacattgacgaccctgattggcaagatgacaacaacttcatggaacaatgctccgtctttgtggccaggggtctgctcgtcgagagcaaggcgccagtctggctgtacggcacgtcgtctgagcatgccgttttctaccagtacgagttcttcaacgcgaagcatcttgtggcgtccatgattcagacagaatcgccctactaccaacccaagccaagcatgcctgagccgttcagaaacgcaatcggagctttgcccggagaccctgcctacaggtgtgacaagggcgagacctgcgattcctcctgggcactgcgcatcgtcaactcaagcgatgttatgatccacggagcaggcctctattcctggttcaatgactacacccaggagtgcctccagaccgtggactgccaaaagtcattgatcgatcttcaaggcaacttcgggaacgttcggattcacaacctcatcacaatcggtgcggtgaacatgattgagtccgatggcctcacgatcaaggcaaaggacaaccaagccgtggacttccatccgcgctggagccaaatctctgtcttcgacccacgccagttcacagacgcatgcacagggctgccactagataccaaccccgagattcgcgaaggggaatactacgcctaccaagttgacccaagaccccggcattctcagctcacaattgtcaatggatctccgtacgacttcaagctcctgggtgatcatcaataccaaatgctcgactgggactgggtctcagttcctgctggatcgtcagctcagtttaaaattaactggggttacggctggccggttccaggagactcggctggagaggcctacttccagctcgatggcaccgacaagacgtttcacgtcgaagccgactgggtgggcagcaaacccggggagggtagggtttttctcagctataccaacctcgaaacacgcgacgttcgaaaagggtcgttccttgacctcggctggcccgtcactaacggaaacccaatccagtgggtgctgacgggcagcgaaaagtacggcttctggacaaacctcaaccctccggttacgtggatgcaggccattttggacgtcatcggcgaccgaaagctcaagtatatctgcatgccgggtagccacgacgcagggatcagccgaattgacggccacgctaacctgggcaacgcccagaacacgagaacccaaggcctcgacatctacgggcagctttatcgaggatctcggtggttcgatattcgcccatgcattggtaacggcgggaagtacatgctttgtcattatggtgaaaaggatatgatattccacggcgccaatgggctgtctgtcgatgacatgattgagcaaatcaacaggttcatggatgagtacccaggtgaattggtcatccttgacgtcaacgacgagagtggctacgatacagatgttccgcacacactcccgggaatgggttactaccgtcttacgacaagacagtggcggcccattatcgagaggatccgcgacggcatcaagaagcaatgcaaaggcttcggaaccggctacctcggcaacattaccctgaacgagttcattggcgacggccagggttgcgttttaaccatcgtccgcaacatcagagcgcccatgcaacctgaaaggggcttatacgtctacggtcaacttggccagaccaatcaatactcggacacgaattccgccagaagaatggggccagatcagcttgcaaaaatgaaactccacagaagacttgggcccgaaggtcacgaagatacccgagatggcttttttatcctgtcgtggaccctgacatacaagcctggtgatctgttgtctctcatggatatggcctccatcgccctcaatactctcttctggcaagcctatcaccagttcacgccctattcttacccgaacgtcctctacgtcgactacctcggtttgccatacgcgctggacaacggatgggatgaacagcaattcttcaatgcgagctcaggccatatgatcgcccttgctatggcggtcaatcttcaaattgccagccaaaactgttatgtgggtggtggaaagatgccggtgtga

SEQ ID NO: 309 - DNA, 1251 bp, Scytalidium thermophilum; identical to SEQ ID NO: 24

SEQ ID NO: 310 - DNA, 2688 bp, Scytalidium thermophilum
atggcccccgggcctctgatgcttgctgtctctgctgtctctgctgcctctacctcgggcagcagttctgatcaattctccttgagcccatctgatcagctctctatccgtctctctttcgccctcgccatggcacgcactgtcgtggacatcaactccaactgggagttccgccaggcagacaaggaggattccaagttcctccctgtcagtcagttcccggccaacgttcacctcgacctcttgcaccacgggttgatcccggaccccttcattggcaaaaacgaactcgccgtgcagtgggtgggcgaggcgacatgggcataccggacgacgtttgtgtcgccgcccgtgccggccggagctcgcgccgtcctcgccttcgacggccttgacaccttcgcggttgtcaagctcaacggtacgaccatcctggagtcggacaacatgtttctgccctaccgggtcgatgtgtctgcccatcttgcccctgaagggaattccaacgagctgtccatcacctttgacagtgcttacctgcgcggctgcgagctggtcgagaagtacccggaccacaagtggggatgctggaacggggatacatctcgtctggcggttcgcaaggctcagtatcactggggttgggattggggtccgacgctcctgacatgcggcccatggcggccaatccgtctcgaggtgtacgaggcgcgagtggctgatctcgcggccgatgtagatgttgacaagtctctagaacgtgccgtcgtgactctgacggccgaagtcgagggaccggctgaccaggtccggttcgagttatccctgaacggcaagcaagttgcggctggaactgccgaggccaatgccccgactatctcgttcacactcgacaagccggccttgtggtaccctgcaaggtacggggcgcagccgctgtacgaggtgcgggctactgtgctacgcaatgacatcgagttggatacgataaccaagcacatcgggctgcggcgcgccgagctggtgcaacggccacttgatggccagcccggcacgagcttcttctttgaggtcaacaacattcccatcttctgtggcggcagcaactggatcccggccgacagcttcatcccgcgcattgggcggaagcggtatcatgactgggtcaagcttgtgctcgatggaaaccagggcatgctgcgtgtatggggtggcggcatctacgaggaagaagacttctacaacgcctgcgacgaactcggcatcctcgtctggcaagatttcatgttcggctgtggcaactacccggcatggcctgccctgcgcgattccatcgacgctgaggcacgagctaacttgaggcgactgcgacaccatccttgcatcgtcatctgggcagggaacaacgaagactaccagtaccaggagtcggcggggctcacctacgactacgccaacaaagacgcggagagctggcttgccacggacttccccgcgcgctacatctacgagaagatcttggccgatgcttgcgctgcgctggtgccgcgcaccgcctaccaccctgggtccccatggggcgctggccgcaacacgcatgacgcgactgtcggagacattcatcaatggaacgtgtggcacggcactcaggagaagtggcaggactttgacaagctggtcgggcggttcgtgtccgagttcggcatgcaggcgttcccgtcggtacggaccatcgaagcgtacctgccgcagggccgcgatgacccggaccgctatgctcaatcgtcgactgtcgacttccacaacaaggccgacggtcacgaacgccgcatcgccctgtaccttgcggagaacctacggtatgcgcctgacccgcttgagcagtacgtctacagcacgcaattaatgcaggccgagtgcctggcgtcggcgtaccggttgtggcgccgcgaatggcgcgggccgtcgcgagagtactgcgctggtgctctggtctggcagatcaacgactgctggccggtcacaagctggagcattgtcgattattacctccggcccaagcatgcctacttcaccgtcaagcgcgagatggcgcccatcacggtcggtattgcgcgccgtacacacaagcatcccatccccggggcgcatcgtcattctcgcatcggaactgagtcgcgcacacggatcgaggtttggggcagcaacctcaccctccaggatgcaaatgtcgactgtgtcctgcgcgcatgggatgtcgtaaccggcgaggagacgttctcccagacggtggcctcgggactggtgctgggtgccaatcggtcgaccgagatcgtcgagcgcgatgttcccgtccgcacgccgggggacgagggacgcacggtcgtggccgcatatctcgtgcaagacggtcggcatgtcgcgcgatatgtcaactggcccgagccgctcaagcacgtgcacctccagaagccgaaggcacttgaggcacgactgtcacctgacttcgcgtcagtccacatcagcgcggaagtaccggttaaaggcgtggcgctcgaaaccagcgatgaccgggtcgcgtttgacgataacttgattgatgtggtgccgggtgaggtggtaacggtggctgtacggggtgcaggcgcagacacgaagatcgggacgaggtaccttggtatgtgctaa

SEQ ID NO: 311 - DNA, 1266 bp, Scytalidium thermophilum
atgaagcttcagctgctcgtttcctcgggccttttggcccttgcctcggcggcttccatccaggctccggcgccgcgcaagtcgtacagcggctacaaggtcttccgcgtcgatgttggcagcaatgcggaccggctcaacgctgtcgtcgacaagctcggcctgtcgacctggaagggccgcccccgcccgaacacccaggccgacattgtggtgcctcctaacgtgcttgaggccttcgaggccgaggtcgccggtctcaacaaggtgaccatgcacgaggacctgggtctgtccattgaggacgagaccaccttcggcgtctatgctgctggctctgccaacgccacgtggttcaactcgtaccacgcctacgccgaccacctccagttcctgaaggacctgcaggcgtcgtaccctacccgctctgcgatcgttacttcgggcaactcgaacggcggcagggccatcacgggcatccacttctggggctcgtccggtaagggcaagccggctgttgtcttccacggcaacgtccacgcccgcgagtggatcaccagcatggtcgtcgagtacttcgcctactacatgctgaccaactccgagacggctgaggtcaagagcttccttgacaagtatgacttcatcttcttcccgatcgtcaaccccgacggtttcgtctacactcagaccaacgaccgcctctggcgcaagaaccgccagaccaactcgggcagcagctgcattggccgcgacatcaaccgcaactggccgtaccagtggtctgtctcgggcggcgcttcgaccaacgcctgcgctgaggactacaagggcaaagctcagagcgatgcccccgagactaccgctctcgccaacttcctccagaccaccaagaggaaccagggcgtcaagctcttcattgactggcactcgtactctcagctgttcatgactccctatggctactcctgcacggcggtcgctcccaaggactcggagctgcagtctctggctaggggcgtggcgagcgccatccggtctgtgttcggcaccagcttcaagaccggccccatctgcaacaccatttacaaggccaccggcaacagcgtcgactatgccaacgacgttgtcggctccgagtacactttcaccgctgagctccgcgacaccggccgttatggcttcgtcctgcccgccaaccagatcctgcccagcggccaggaagcttgggctggtgttgcttacctcctcaagaacatgaaatag

SEQ ID NO: 312 - DNA, 1017 bp, Scytalidium thermophilum
atgaagttcaacgccatcgcgctgggcttcgtagccccggccaacgccctgctgcgttttggctgctctcagctcacgatccagcgtctggatcccctggtgacgccgggccagaacccgtcgcctcacctccaccagatcatcggcggcaactccttcaacgtctccatgcactaccccgaacacgacctcgttgagcggtctacctgcaccacctgccagtttacagaagacttttcgaactactggacggccgttcttttcttccgtgcgcgcaatgggacgttcaagcgtgtgcctcagctcgcgcagctgggcatggagggcacgaagggtggcatggtcgtgtactacatgtcagacgctctcttcgacaccgctcaaaggtccacagtgacggccttcaagcccgggttccgcatgttcatcggcgacgccgccgccaacacgcgggatcaagtccgcaagtaccgccagctgacgtacacatgcatggagaactggggatctcgcgctcctgagagcgtcaacttccccaagcgcccttgcaagctgggcatcatggcgaaccaccgcttccctacctgctgggatggcaagaacctcgataccccgaaccaccaggaccacgtggcataccccgaggagggcaccttcgagtccggcggcaagtgcccggacacccaccccgttcgcctgccgcagctcttcctcgagaccgtctgggacacctcccagttcaacaacgaggaggactggcccgaggatggcagccaacccttcgtgtggtccagcggtgactccacgggctacgccaaccacgccgactatgtctttggctggaaggacgactcgctccagcgcgccatggacgcgcacacatatgtcgttgcgccgatgctcaagacccagagcatcgccgagcagaaccgctgcggcgagaacttcccggagatggtgtttgaggatatcgacggatggctcccggagctgccgggtggcaatcctatcttctga

SEQ ID NO: 313 - DNA, 3678 bp, Scytalidium thermophilum
atggccgtcctcttccaggtgttgccaatcgtcgtggcggtcgcgatcgtcatccgactgctgttcacaggtcgtcggccaaagggcctgcccccgggacctcctactcttcctgttatcgggaacctgcatctgatgcctaagcgcgatgctcatctccagttcgagaaatgggcgcgggaatatgggcccatctacagcttgatcctcgggaacaagacgctcatcgttctctcgagcgacaaggctgtcaaggatcttctggacaaaaagagcaacatgtactctcaccgtcaggagatgtacattggccagaccctttgcagcggcgacctccgcatcttgatgatgggctacgatgcgcggtggaggatgtgtcgcaagctcgtgcactcgcttttgaacatctcggccgccaagtcgtacgtcccgtaccagatgctcgaaaacaagcagatgctctgcgagatggtgactcaaccggaacgctgcatgtacaacatccgccgctataccaactctctcaccaccaccatggtgttcggctggcgctctaccacctacgacgaccccaagatggtgcaattgttcgagggattttccgagtttgccgagctcaaccagacgggtctggccgccctggtcgacttctttccctggctgcgctggcttcctgacttcctgctgcctgtgcgtgccaaggccaaggagttgcaccgcaaggagaaggccctgtacctcggacactggctgcgggccaaggaggaaaccaaggctggcaccattatgcgctgcttcagtgaggaactcgttgctgtccagaaggccgagggcttctcggatgaccaggcctcttacatcacgggcaccctgcttgaagccggctccgacaccacgtccagcaccctgtatgctttcgtccaggcgatgctgctctacccggaagttcagaagaaggcccaggcaattatcgatgaagtggtcggtcccaaccgtatgcccaccatggaggatgagcgcgacctgcagtacatccgtgccatcgtcaaggaatcgctgcgctggatgcccacaaccatcatgggcgccgtaccgcacgctgttacccaagatgactggtacaacggctacctgattcccaagggcgccggtgtcgtcaacaacgtctgggccatcaacatggaccctgcccgccatcccgatcctcgccgtttcgaccccgaccgttacaaggacgacttccagtcccttgccgacgccgctgccaacccggacgcctccaagcgtgatcagttcaccttcggcgctggccgccgaatctgccccggcattcacgtcgccgagcgcagtctcttcctgggcgtctcgcgcatgttgtgggcgttcgacatcacccccgtgctcgacgcgcagggcaagcccatcctgcccgacccggacaggctcacgcagggtttcgtgtgccagcccgaggagttcccggtcaagattaccccgcgttccgaagcccaccggcagaaggtgattgaggagtggctggccgccgagaaggaatggctggacccggtgaccaagcagtggcgcgtgtgcccgctgggcccggccaaggggaggaaagattcatactcagccgaggtcatgtctgccagcgctgccaacgaacgtctcttgcaggcgtggagcctcaaccactcccacttttccgccccaccgtaccacagcgagattctcaccgtcaagctgaagagcggcaacatttgctacgtccaccgcaaagtttgcttgtacccggaccctgtagtccacactttcctacatttcctgtacagcaattcctacgatcccgagcggttcgaccctccgaatgtctggcacgacgagggagcctgcaaggacatgtccaaatcccggctgatcatcctcacaatggcgcacataactggcgcccgcgacctcctgggacctgtcatcgacaacctacacaagtgggtcaggctgatgggacccgttgtgttcctcaagtccctgcaggaggcctatcctcgggagatcacggccgatcaggcactgaacgaaaaatggagccttgccaacgaccttccgatggtgaaggaggacgagagaatgggacataactgggagtcaacggagtcgttcagagaccgaattcggcgcgagtggggcattttgagggatgaccaaccgcaggcatggcagttgaacggcgagttccacattgtgtgcgagagcttgaccgaggagtacatcaatgcgatgagagtgcccggttcacggtgggatttggaaaatgccaggcggaaaccttcagatcattggcaacaccgtcgaaatgacagcctatccgaccctgttgtccttacgttcatccatttcctgtacactggaacctacgatcccgcgaggctcgatccccccgaagacgatattgtgaatggctatgatgttgctgttgacctgttcaaaacacggctggtcatggccttggtggctaccctaaccggctaccgcgatgctttctccaagcccatcttcgacaacgttgaggtctggatcagacgcgtgggtccgctccggctgctccaggcgctggaggccgcgtatccatggcccgagaagatcccgagcaatccggcattgcagaaagcgctggcggatttccgtagttacaggatcgtggtagaggaggagaatatggatcctgcgacagggggggtgccattcgaagaccaacttagaacagcattgacgagatccggtcgttcggatgagatcgagagggagatccaaatcgttttttacccagtttcccaagctcgcgaagttggcgacggaggtaccgttctgccacaacaaccctcagcctactccaaccgtcacccatctgaaatcatgtctgtccccgaaggcatgcaatccctctatgatgcgtggagcctaccccatcttccatctgacacgctaccctacgacagcgaggtccttactgtgaagctgaggagcgggaacgtgtgctatgtgcaccgtgcgatttggtcaggacccgaaagccaaaagaacttgccctttccaatggttgacaacaagacggtggacatgagcacatatcccgaccctgttgtccatacattcatccatttcctgtacaccaaggtctactacgacccctcgaggctcgaccctgccgtactcgggccgccgtactacggcgatgggcttgccaagggaattttcaaatcggacttgataatgggcgtgctggctaccatgtctggctaccaggatcagctcttgccgcagatcttccccaccaccacagacttgctcaggcggagaggtcctctgctgtttcttgatgctctgaaagaggcatacccccgggagatcacggccgatccggaactgcaaacagcgttgacagatgcccagaaatacatgattgtgaaggagggccagaagtatattgacaaatgggaccggacaaaggactatgcagattggttctgggagcaactgaacattaatgactggtaccttcgagaaaagatgaagagagaattccaggacctgccgaatctcgtgatgggtgcgtatgcgaaggcgatggtaaaataccttgtcatcgagcccatcggtgccctctttgggaggaaatcgtga

SEQ ID NO: 314 - DNA, 1119 bp, Scytalidium thermophilum
atgcatcttcagaagcttgtctctctccttgccggctcggcgtacctcgccgccgccgcgcccgtcgccgagggtcgggatcctctgaccaccggcctccggctcatcaagacgtcgcccgaagaccccggcgtctgggtcacggaggaggagaagatctcagagtacaccgccaagggcaagcacttcatcgacatcaccgacattactgacccggaggtccttgccttcctctccaccccggacaccgagtccgccattgaggcccgggccgtcgcctacccgaccagcgccaccaggcagtccgttgccaaccctctgatctcccaggttagcaccagcaacccgcagagctggctccagagcctcaccaacttccacaaccgttactaccgcagcagctacggtacgcaggctgccgactggctcttcaacaccgccaagtcgatcgccgccgccagccactccatcaccgtcaccaagttcagccactccttcaaccagccctccatcatcgtcaagatcccgggcaacacgaccgacctggttattgccggcgcgcacttcgacagcacgggcgggtcgtcgaccgctcgcggcccgggcgccgaggacaacggctccggcaccgtcgtcatgctcgaggcgctgcgcgtcctggccaacgccaagttcaagcccaagaacacgctcgagttccacttctacgccggcgaggagggcggcctgcttggctccgccggcatcttctccaactacaagtccaaccgcaagaacgtcctcgccatgctgaaccaggatatggcgggctactcgcccagcggcttgctgaccatctactcggactatgtcgactcgtccctgtcctcgtacgtcaaggtcattgccaatgcctacatcggcacgactgcgagtgacaggtgcggctatggctgctcggatcacgcctcggctaggagcaatggcttcccgtcggcctatgttggcgacgagaagatgtcgaccagctcgccgtacattcactcgtctcgggacactatcgatcggatccagtggccgaccgtgctcaggcacgccaagttcaccctcgccttcttggttgaggcttcgtacctctga

SEQ ID NO: 315 - DNA, 1269 bp, Scytalidium thermophilum
atgcgactcacgtccatccttgcccttgcggggttaacatctgcttgggtcgtgccgccccaccaagaaacctccgtctctgatcggcccgggagattttctgtgaagcaagtcccgaacccgaactacgtcccgtgtggccctcttgttcttgccaaggcttacaacaaataccacgtccccattcccgaggagttgagggccgctgtgaagcatgtccgagagggctttgtcaagcgatccaacggcagtgttgaaaccaggccgggcgaccacggcggcgaccgagagtttttgacgcccgtgtctattggcactcccggaaagatcttcaacttggaccttgatacaggctctgcagacatgtgggtgtacagctcactgatgcctgagaatcaagtgaccgaacaaaccatctacgacccagacgagagctccacggcaaaggaacttgacggctacacctggcgtatcacttacggggatggcagccggtccagcggcattgtctacaaggacgttgttaccattggcggcctgaaggtgaagaatcaatccattggcgcggccttgaaggtctcggagtcgttcacgaaggatggcgaaaacgacggtttggttgggctgagttttggcaccctgagcactgtttctccacagcaacagatgaccctctttgagaacctcctggatgacctcgatggccccctctcttcaccgctgacctgcgggcaagcgccagtgactggtcactacaacttcgggtacatcgactcggaagcctatgtgggcagtatctcgtgggtcccagtcaatgaccgccgtggctggtgggagtttctgattcccggctaccgcgtcggagacggttctgtggaggcaacggacctttggggtattgccgacactggcaccacgttgctcctcctccctaagaacattgtgaaggactactaccgcaaggtccctgggagctcgtggcacctgtggtacggtggctacgttgttccatgcgatgttgagatccccaacttctcgatggcgattggcgactctggcttcatgatcgaaatccctggagattacatcaagtaccagaagctgagtcgtgggtattgctacgggggcatccagagctctggccaggacgatgccatcatcggcgatgtcatgctgaagtctgccttcgtcgtctttgatgccgggttgaagcgcctggggtgggccaagaagaaggaactgaactttcccaagtcccaggatgattga

SEQ ID NO: 316 - DNA, 747 bp, Scytalidium thermophilum
atgctcctgaactcggtcatcggctcggccgtcctcctggccaccggcgccgccgcccacggtgccgtgaccagctacgtcattgccggccagaactatcctggctacaacggctacgccccgtccaccacccccaacaccatccagtggcaatggtcgacctacgaccccatctactccgccaccgaccccaagctccgctgcaacggcggccgctcggccacgcagtccgccccggctgctccaggtgacaacatcaccgccatctggcagcagtggacgcacagccagggccccatcctcgtctggatgtacaagtgccccggcgccttcagctcgtgcgacggctcgggccagggctggttcaagatcgacgaggccggcttcaacggcgacggcaagaccgtgttcctcgacaccgagcgcccctccggctgggagatcgccaagctggtcggcggcaacaagggctggaccagcaccatccccaagaacctggccccgggcaactaccttgtccgccacgagttgattgcccttcaccaggccaacgccccgcagtggtaccctgagtgcgctcaggttgtgattactggctcgggcaccaaggagccccctgcgtcttacaaggctgccattcccggttactgcaaccagaacgatcccaacattcgggttcctatcaacgaccactccatcccccagacctacaagatccctggccctccggtctggcgcggcgagtaa

SEQ ID NO: 317 - DNA, 867 bp, Scytalidium thermophilum; identical to SEQ ID NO: 32

SEQ ID NO: 318 - DNA, 1035 bp, Scytalidium thermophilum
atgtggctcaaacccgccctcgcggccctcgccgcgtcccagctcgcctgggcccaggagctgatgcgcttcggctgctcccagctgaccatcgaccggatcgacccgctcgtgaacccgggtagcatcccgtcgccgcacatgcaccagatcgtcggcggcaactcgctcaacgccagcatggaccccagagaacttaacccggcgacggcgtccacctgcaccagctgcacctactcagaggatctgtcgaactactggaccgcaaacttgtatttccgcgctcggaacgggacgttcaagatggtgccgctctttgccaacctgggtctgaacgtcaagggcggaatgacaatttactatatccgcggctatcaacccagcgcgcgcgtcaccgccttcccgccgggcttccgcatgctcgtcggcgaccccaacaaccgcgaccccaacaaggtgccgcggcagctctgctaccgttgcgagcacaacatgcagcaagtccccttcggcggtgcgccctgcacgggctccgacaccaaggccttcccgcgcgacacgtgcggcggcggctggcgcgtcaccgtcaccttcccgtcgtgctgggacggcaagaacaccgacacgcccaaccacaagtcgcacgtgacgtacccggcgacgggcacgttcgagagcggcggcgcgtgcccgtccagccacccggtcaagatcccgcaggtcatgtacgagatcatgtacgacacgcgggcgttcaacaacaaggccgactggccggcggacgggtcgtcgccgtggtactggagccacggcgacccgaccgggtacggcatccacggagactacgtgttcggatggcaaggcgacgcgctgcagcgggcgatggacaccaagtgcgcgggcgatcggtgcccggcgctcaagcggcagacggatgccgaggccattgcttgcaccaagaagcagtttgcgcgcgagagtattggtgacacggagtggctcaaggaactccccggcgcgccgcctctggtttaa

SEQ ID NO: 319 - DNA, 840 bp, Scytalidium thermophilum
atggccctcaagtccttcgtcagccttctcgccgctgcaagcagctcgctgttcgtgctctcccctgcccccgcagccgccgaggagctggcgacgtgcggtaccactccgtacttcccctccgaatacacctgctacaacgaccgcacgctttgcccgttccagttcagccttcccaccaagccatgcgccggcggttgctactcgcccgagcagttcgagtgcctgatgccctcgggcaagggcaaggggaagaataacgaccgggacgacctgggagttctgcggccgctccccgaggctaccagccccttcaccctcaccgtctggggcccgcgctccatcttccgcaacatgacggtccgcgcttgcggagggtatctggctgtgggtgccaacgctaggcaatgccaggcctgcactgcggtggggggcacggattgtgagaagtacagcaacgtgacggctctcctgccggatggaaggatgaactccggacaccccgacccgcagtactggtacgtcgacccgctctcgggcatcctgcgctacaccgagccggtgccggccaacgcaacggagcccatctggggctcggagtgggcgggccagaacgtcaaggtctacgagaacggcttgttcatctggaaccgcgaggacgcgaagacgcactactggatggcctgcctcgtcacgctcaacggcggcgtccacagcaccggccgctcgtggcgtctgtacgcgaccacgagcatgaacctggagcgcggagactgcgagctggtgagggtcgttgctaaggcggtgggggagaatgatggtgtgtatcagtacttgtag

SEQ ID NO: 320 - DNA, 2289 bp, Scytalidium thermophilum
atgcagatccgcgagttcctcctcgtctggctcgccagcgtgggcgggctggtggtgccggcctccgccgcgcgccgctcgacgcggaacaggctggcgcgcagccttccggagactcacgccgtgcacgagaagcatgagaagcggcatcttgagggatgggtcaagcgggggctggtggacgaggatctgacggttcctgtgcgcattgggttgaggcaggagaatttggacaaggggcatgacttgcttatggagatatctgatccccgctcgccgaggtatgggaagcacctctcgccgagagaagtggtggaattgttcgcgcccaagccgcagtcggtggaaagggtcaagcgctggcttgtagaggctggcgtcgacgagaggaggctatcgcagtccgcgaacaaacagttcatccaattcgacgcgccagtgcacgaagttgaggacttgctcctgaccgagtaccacctgttcgagaacgtcgagacgggagctcagagcatcgcctgttctcagtaccacgtccctcacaacatctcccaccatatcgactacatcacgccgggcatcaacctggccacgagggactttgacgacaagatcacgaaacgcatgatcggtcgccgttcgttggttggcgatcttccgcggaagtaccggaaaggaaaagggggtaaaagcggggtgacgtccactgctaccaggccggcggcgacgggggcggcagagggacgcatttccttcgatgcggcggcgaacgggacccaaaagaagaagaagccggagcttgtcacagtggtcacggagagtggaaagcgcaagaagaagtgcaagccgaaagtgccagagccggaactgccagagccggatcacccgggagagctcgaccccttgtttctggtcacggggtcgtgcgcggatgagctgacgccgcagtgcattcgagcgcaataccagatcccgaacaacacgagggcgagcaaggggaacgagctgggcatcttccagagcttgaaccagcactacagccaggaagacctggataactactggaaacatgtcacgcgctgggtcccccacggcactcatcccgagcttcggtccatcaacggcgcttacgggccaaccaacgacacaagtaaggccggtgacgaggccgacctcgacttccaggtggccatccctctcgtctggccgcaaaagactgtcctcttccagacggatgatgagtggtatcagagggaccagcagcgggccgaaaccaggtatcctggcttcttcaacaccttctgggacgccctcgacggctcctactgcacgctcacggccttcaacatgacgggcaactgcaacaccccgcagtgccgcgacccggagtatcccaaccccaacgccgggccggaccagggcgcctaccacggcccgctcatgtgcggtgtccaccgcccgaccaacgtcatctccatcagctacagcggcaccgagcactcgtggcccgccaactacatgcgccgccagtgcttcgaggtgatgaagctcggcctgcagggcatcacggtcgtcgagtcgtcgggcgactttggcgtcggagggcgccgcttcgacacccacggcggctgcctcgggcgcaaccgcaccgtcttctccccccgcgtgctggggaactgcccgtacgtcctcagcgtcggcgccaccaccctcctcgagcctgagtactacaccccgggcacgactcccaagctgaccgaggtcgccgcggagcggttcgcctcgggcggtggtttctccaacgtcttcgagcgcccagcgtaccaggacaagcacgtgcgcgagtactttgagcgcgccaacatcacgcacttgggctacaacgcgacgggcgggcaggggtacgcggcgatccagccgcctcccgaacccgggaagctgttcaacctggcggggcggggatatccggacgtgagcgcgctcggggagagtttccgggtggtgctgcggggttggccgaaccgggtgcacgggacgtcggtggcgacgccgatttgggcgtcgatcctgacgctgatcaacgaggagaggctggcgagagggaagagcacggtggggtttgttcatccggttctttatgctcaccccgaggtgttcaacgacataaccgtcgggtccaaccccggctgtggcagcgatggatttccggtcaaggagggatgggatcccgtgacaggattggggactccaaattatccaaagctgctcgagctgtttttgagtttaccatag

SEQ ID NO: 321 - DNA, 966 bp, Scytalidium thermophilum
atggttcaaacttggggaatggttggggctctctcccttttaccctgcctcagtcatgttcatgccttgcctgagcaatgcctcggcgtgtgtgtgaacagccatgatccgtccatcattcggcggggggatggcacatacttccggttctctaccggcggccgaattgccatccataccgctccaaacattaccggaccatggacgtacagaggagcagcccttccaggcggctcctcaatcaacctgcctgggaatcaagacctctgggcccccgacgtagcccaagtcggaaatcaatactatctctattactccgtcagcacctttggttcacaaaactccgccatcggtattgcccgatcaaccagcctagatgccgggacttggacagaccttggctcaacgggggtggtctccaaccccagcctgccgtacaacgccatcgacggtaacctagtgaatgaggaagggaccagcaactatttcctcacgttcggaagcttctggcaaggaatccacagggtgcgcgtcacgccgaccaaacaacacggcagcccgtatcaggttgcgttcgaccccagggacccggccattgaagggccaacagtcttcaagaatggcgagttttactaccttttcttctccaagggctcgtgctgcggctacgacaggaacaggccgccggcgggcaaggagtaccggatcatggtctgccggtcaacttctccggttgggcctttcgtcgacaaacagggccggtcatgccgcgacggcggcggcaccttggtgcttggaagccatgactgggtgtatggcccgggtggccagggagtctaccgggaccccgtacttggaccgatcttgtactatcactacgttgatactcggattgggtttgctgacggccagaaaaagtttggttggaatcgcatcaacttctcgagcggctggccggttgtgtga

SEQ ID NO: 322 - DNA, 765 bp, Scytalidium thermophilum
atgctcaagtctgctctcctcctcgcggccgcggccgtttcggttcagtcggcttcgatcccgaccatcccggcaaaccttgagcctcgccagattcgctcgctctgtgagctgtacggctactggtccggcaatggctatgagctgttgaacaacctttggggcaaggacaccgccacgtccggctggcaatgcacctacctcgacggcaccaacaacggtggcattcagtggagcaccgcgtgggagtggcagggcgctccggacaacgtcaagagctacccctatgttggcaagcagatccagcgcggccgcaagatcagcgacatcaacagcatgcgcacgtcagtgtcgtggacgtacgatcggaccgacatccgtgccaatgtcgcttatgatgtcttcacggctcgtgatcctgaccatcccaactggggcggcgactacgagctcatgatctggctcgcccgctatggcggcatctaccccatcggcacgttccacagccaggtcaacctggctggtcgtacctgggatctctggactggctacaacggcaacatgcgtgtctacagcttcctccccccgtccggcgacattcgtgacttcagctgcgacatcaaggacttcttcaactaccttgagcgcaaccatggctacccggcacgggagcagaatctgatcgtctaccaagtcggaaccgagtgcttcacgggcggtccggccaggttcacgtgcagggacttcagggctgacctgtggtaa

SEQ ID NO: 323 - DNA, 945 bp, Scytalidium thermophilum; identical to SEQ ID NO: 38

SEQ ID NO: 324 - DNA, 2451 bp, Scytalidium thermophilum
atgaggtttctcctcgccctctgggcggtcctggccgtcgtccaggcggcctactggatggaagacctcaagcgtcagggcgtcgcaccctacagcattgtccctgagtacaaggttttccgcaatgtgaaggattggggagccaaaggagatggagtgaccgatgacacgatcgccatcaacgctgccatcagtgacggaggccgctgtggcggtaagacctgtgccggctcgaccactactccggcaattatatactttcctcctgggacgtacatcgtctccaaccccatcgtcggctactactatacccagatgatcggcgatcccaccgacatgcctgtcatcaaggcttcttcttccttcccgaccggccttttggccatgattgagacaaatccttaccagagcaatggcaagctcaacttccagtccacaaacaacttcttccgccaaatccgcaatcttgtcttcgacatcaccgatgtcccgggctcggcagctagccttcactggccttcgtcccaggctactgttgtccaaaactgtgtcttcaagatggcgaccggagtcgatctagaacacacaggcatcttcatggaagagggcagtggaggtctcatggccgaccttgttttctacggcggcaaatatggcgcccagttcggcaaccaacagttcacgatgcggaacttgagcttttacggctcggatactgccatccagcaaatctggaactggggctggacctataaatcgctcaacattgtcgactgccgcgtgggtatcgacatgtcgtcgacagatatcggctccgttaccctccttgacagcacgttcagcaacgtcgaaaaggctatagtcacgagccgcgctcccgggaacgccactggacttgggtcgttggtgatcgagaatgtggagtacaagaacgtcccgacagtcttggagagtgctgatgggcaacccatccttttgggagatggaaatggcgtcgtttacgacaccggttacgcgatggcaagtggcaacacctatgcccccaggggaccttcgctggtcgaaggccgttcgttcgacttctctcagcctgcccacctgaagcatggggatcgttattacgaacgctcaaagccgacctacgaggacgtgcccgcctcagcatttgtttctgctcgagatgctcatgctgccggagacggggaaactgatgataccaaggctcttaatgagctcttccgggctgcggctggcagtctggccatcgtcttcctggatgccggacactacaaggtcaccgacaccgtctttattccccccaacattcggattgttggcgagagccttgccacagtgatcctgggggttggcgagaagttttcagatcccagcaacccacggcccgttgtcaaaattggcgaacctggtgacgtcggcttcgtcgagatcagcgacgtgattgtgtccacccaaggcccgaccgctggcgccatcggcatccagtacaacctcgagacccaagtttctgacgacctttgcagcggaggccaaaccccctccggcctctgggacgtccacgtccgcatcggcggcttcacgggatcctccctccaagtcaacgaatgcctcaagacacccgagcaattcaactacatcaaccccaactgcgtggctgcgtacatgggcatgcacatcacgcccaccgcgcgcaacctgtacatggagaacaactggatctgggtggccgaccacgacattgacgactggaacgcgacgcagatcagcgtctttgccggccgaggtttgctcgtcgagggcagccgccgcatttggctggtcgccagctccgtcgagcactttgcgctgtaccagtaccagctcgtcaacgccgaggacatctggatgggccagatccagaccgaaacgccctactaccagcccaaccccctcgcgccgtacccgtttaccgagcgcaatgaggcgctccacgacccggactttgacgccgcgtgcgtgaacgacccgacctttcccggcggcgcgccctgcgccatggcgtggggcctgcgcgtggtggattccaaaaacgtggtggtctttggcgcggggttgtacagcttctttaataactactcgaccgcctgcagcacggtagagtccggggagaattgccaggccagaatcttttcggtcgagcagagctcctcattttcattatcatcatcggcattgttgtcgtccagagatgacagcggcgatgatgatacggccgtagaggtgtacaacctcaacacgatcgggtcggtgagcatggtgacgttgggaggcgaggacatggcgacgtgggaccagaacagggccacgtttgcgagcacgctggcggcgtttaggtcggtgccaggtgataatgataataatgatgatgatgaggtggaagcggagagggtttga

SEQ ID NO: 325 - DNA, 633 bp, Scytalidium thermophilum
atgctgtacagcaccgttctcctgggcgtgttcgccatgaaggcggccgctctcccgcaggcagtttgggtttgcggtaacggtgtcgtcgaccctggcgaggaatgtgatctgggctgggggcgcaacggcgcgtataatagcggctgcagtttgaattgtaagacggtgctgattatcgagcaagtgtgcggcaacggcgtcgttgagggtgacgaggagtgtgacgacggtcctgacaacggcaaggacacctccgactatggtgaggagtgtgacgacggccccgacaacggcagcgctacctccacctgcgacgcgacctgccgcctcaaggacacgggcagcggtggcacatgccagacgtgcgaccccaaccccttcctcaaccagtgcaccatcaccacctcgtgcatcaacacgcatccctacggcaagtactactgcgcctgccgcgccgggtaccgcgccgacggcctcgccccaacgaaccctcgccagttccgcctcaagttcatcggccaggagtaccgggtgtttgttgcccccggcatcgagtgcaacacgttgtgcacgaacccgttcccgggcccggattcgtgccaggaggtgccggtgggtgaggggtgctga

SEQ ID NO: 326 - DNA, 795 bp, Scytalidium thermophilum
atgctgtctctgtcgactcttgccctggccggcctcgccgtcgttggcacacaggccacgccggtcgaggtggctcgccgggcgacccctaccgtctaccttgccggtgacagcaccatggccaggatgagcggccagcaccaaggctggggcgagtatctctcgcgctacatcaccctgcccgtggtcaacaaggccatctcgggccgctcggcgcgcagcttcaccaacgagggccgcttcgccgagattgagcggctgctgcagcgcgacgacatcgtcatcatcgagttcggccacaacgacggcggctcgcccaacaacgccaacgacaacggccgcagcgcctgcggcggcaccaactacgaggtctgccgctccggcaagacgggtgagctcgtctacaccttcaaccagtacattgagacggcggcaaggtccttcatcaacaagggcgccaaggtcatcatctcgtcgcagacccccaacaacctctgggagggtggcacgtattacggcggtgccccgccgcggttcgtcccgtacgcccagctcgcggcgcagagggtcggctatggcgcgagctttgtggatcacttccaggctgtggcgaacatgttcaagaggttgggcaaccaggcgacgaacgccctcttcccggtcgatcatacgcacacgagcccgtacggtgcggacctggtctgccaggcgtttgtccaggcggtgtggagggactttaatggcacgacgccgctgaagcagtatgtgagacagccggtgccgaatgtgttttga

SEQ ID NO: 327 - DNA, 987 bp, Scytalidium thermophilum
atgaggaccgtcttcgccgccgcactggcagcactcgctgcccaggaagtcgccggccatgccacgttccagcaactctgggttgacggaaccgattatataagtcacggcagcacctgcgtccgcctccccgccagcaatagccccctgaccgacgtcaccagcagcgacttcgcctgcaacatcggcggccggcgcggcgtgggcggcaaatgccccgtcaaagccggcggtgtggtcacgatcgagatgcatcagcagcccaacgaccggaactgccgcagcgaggccatcggcggcatgcactggggtccggtgcaggtctatctcagcaaggtccccgacgcgtcgaccgccgagccgacgcaggtgggctggttcaagatcttctccaacgcgtgggccaagaagcctggcggtaactcgggcgacgacgactactggggcacgcgcgagctcaacggctgctgcgggcgcatggacgtgccgatccccaccgacctggaagacggcgactacctgctgcgcgccgaggctctggcgctgcacgccatgccgggccagttctacatgtcgtgctaccagatcaccatcacgggcggcacgggcaccgcgaagccggcgaccgtccgcttccctggagcgtataccaacaacgacgccggcatccgcgccaacatccacgccccgctgagcacctacatcgcgcccggcccggaggtgtactccggcggtaccacccgggcgcccggtgagggctgcccgggatgtgccaccacctgccaggttggctcgtcgcccagcgcgcaggctccaggccacggcacggccgtgggaggcggagctggtggcccgtctgcttgcaccgtccaggcgtatggccagtgcggtggccagggatacacgggttgcacggagtgcgcggatggcttcgtttgccgcgaggtctcggccccgtggtactctcagtgccagcctggtttctaa

SEQ ID NO: 328 - DNA, 657 bp, Scytalidium thermophilum
atgctgtggacttcacttgttgggctgctcgcggccgtcggcactgccacggcgcagtccacgcccaatgcccgcgtttacgaccccgacacgggcctgaccttcacatccaacttccagctgtacaaggccgacgggcgcggcatcacctaccgcatcgccatccccgagggtgctgagtactacacgtccttcgacgtcgtcgtccaggccatcctccccaacgacgtcggctgggccggtctcgcctgggcgggcaccatggtgcggaacccgctcctcgtcgcctggcgcaacaacaacaaccaggtcgttctctcctcgcggtgggctagctcctacaccgccccccagccgtcgagcgcggcgcagtacacgctcatccccgcaggcaccaagaacaacgggacgcactggcagtacacggcgctcgtccgcggcgtcaccgcgtacgaggcgaccccgggcgcctggcggtacctgaacccgcgcggcggcaaccgtctcgctttcgcctactcgcccaacaagccgttcaaccccaacgaccccaactctggctttacgtatcacgaggtccacggctactggtcacacgacttcgcgggggcgcagaaccccaacttcaatgagattgttcagcggttgacggtgtaa

SEQ ID NO: 329 - DNA, 759 bp, Scytalidium thermophilum
atgacctccaaagtcatcatcgtcaccggcgccagccgcggcatcggcttggccgtggccaagtccctcctggcagcgtcccacaaggtggtcctggtatctcggtccgccgagaagctccaggaactcaaagatgcttatcccaaccaggttgcttttctcgcggccgacataacagcggacgatacagctcaccgcaccaccgagcttgccgtgctcacctttggcaggctggacggcgttgtggtgaaccacggcgtgctttcccccattacccgcctcgctgactcctcggtggaggagtggaagaagctttacgatgccaacctgttcagtgccctcgctctgacaaaatccgccatcccccacctccgcaccgcccacggccggataatctacgtctcctccggcgccgccaccggcgcctacgttgcctgggccgcctacggctcgtccaaagccgcgctgaactcgctcgccaaacacgtgggcgtcgaggagcccgatatcacgaccgtggccatcagtccgggccgcgtggacaccgacatgcagaaggagctgcgcgagaagggcgcggccatggcaaagaaggactacgagggattcgtggcggactttgaggaggggaggcttatcaagcccgagtttgccggggcgattattgccaggttggcgacggatgtgaaaacggagttgtcagggaggtatttcaagtgggatgccccagagttggaggagtatcggaaagggctgtga

SEQ ID NO: 330 - DNA, 666 bp, Scytalidium thermophilum; identical to SEQ ID NO: 45

SEQ ID NO: 331 - DNA, 3003 bp, Scytalidium thermophilum
atgttcaccaagactctcgccgtcacggccctcgccgtggcccctaccctagcctctaccgccgtcaacgtctactggggacagtcaggcacagaggagcagagactcaggaccttctgtgagaccggcagcttcgaatatgtcaccgtcggcttcatcaacaagtcccccgagcaggacccgtcgggtctgaactaccccggaagcgacttcagcgttcattgcggcggtgacgtgtacaagaactccaacggggacccatcgtaccttcagaaccgttgcggtcggatcgctgccgatgtccggtactgccagagcttgggaaagaaggttctgctctccatcggtggcgactggaatcctccgcaggccaactacaccatctccagccctcctgagggagagtacttcgccgacttcgtctggaaggcttttggtccctacgatccctcgtcgaccacgcctcggccgttcgatgataactacatcgcggatgccggtgaggatgagcactttgtgttcgatggttttgacttcgacatcgagcacaagttcgacgaccaaaccggctatgtcgccatggtcaggaggctgcgttacctgatctcccaggagaccagcaagagcttccttctgacggcggcccctgagtgccccctgagcgaccagtggtttaagatgaagaccatcatccaggagggcgagttcgacgcgctcttcgtccagttctataacaacccgagctgccatggtgttgataacaacaacttcgacgcctgggtcgcccacctgcagtcgacggcgagcaaggatgccaaggtcttcattggtatccctggaagcaaggatgccgctggctcgggctacctcactcccagtgaggttacaaccttggtcaacaagcacaagaacaaggttgcctttggtggtgtcagtatctgggacgtcgtgtcgggcagcgagaactgcaatggccagccgtactacgagtttgtccacgaccttgttgttggcactcctgcgttgactaccagcagcgccgccgcgactcccacgtcgctgcccacgggttgcgtccggtatcacacggtggtggcgggcgagtactgctacctcatcatgaacgcctatggcttgattgaggccgaactgcgggagctcaacccatccctggatggaggctgctcgcttttccctggtcagcaactctgcgtcaagtggggtgtgatcacgaccacgtcgacgaccgctgtgccgacgaccagcactacaagcacttcctcgtcgagcactacacaaattactagcagcagcacatcgagcgaagagcccatcaccacgtcaaccgttgggtcgaccactacttcggaggccgaatccaccaccacttcggaggccgagtccagcactacgtcggagattgagtcgaccacgacttcggaggctgagtcgaccactacttccgaggttgaatcgaccacgacttcggaggttgagtccaccgcgactacggaggttgagtcgagcaccacctcagaggccgagtcaagcactacgaccacctcgtctacttcgacgacccctgaatcagtcccaaccgagactcccgctgatggtgagcctgagacatcctccacttcctcgtcagcgacgaccacgtcttccacaactactgcggcccccgtggagacggacatcactgaggacccggaggagtcggaagaggaggaccccctgccttcaactacgacatctgctgtggagactactagctccgaactcccgagctctacccagagtgtggaggagatcagcagcacgactaccatcgacgtgccttccagcactccttcgtccgagcctgaggaggatgaagaatgtgaagaggacgaggaagaacccctgccctcgactacctcgaccccggcggcgaccacgccctcttcgacgaccgccgcacctgtggaaacggacatcaccgaggatccggaagagtcagatgaggaagagcccctgccttcgacaaccttgacgtctgctgttgagcttaccagctctgagctcccgagctctacccagagtgtggaggaaatcagcagcacggcgaccaccgatgtgcctaccagcacgccgtcgtccgagcctgaggagggcgaggagtgtgaggaggatgaggacgaggaagaggaacccacagcctccaactcggttgtcgagaccgcggccccgtccgtcaccgcctcgttcaccatcaccccatccgagtccaccaccgcggccgtctctccctctaccactgagtccgctgctcccatcgaaaccgtcgacgacggtagcgacgacgaaacagactcggaggatctcccaacacccacgcccaacccgtccttcattgtctcctctttcctgcccgaggatattaccaccagcaccatcagctggaccacctccaccatctactcgaccacgacctacaccatcacctcctgcccgccgaccgtcaccaagagctgctccacgggccaggtcgtgaccgagaccatcgccgtgaccaccaccgtctgccctgtcaccacgactgccgcgcctaccacccctgagccaacctcccctggcggtagtgaggaagaggaggaggaagagaaagagacggtgacggacacggaggcgcctcagccgactgccaccacgacccctgtgcctggtggtagcgatgacagcaacgatgacgaggaagaaaacggagatgatgttgaggagagcacgtcgaccgcggcttcgtcgtggtttgtcgggatcccctcagtctcgaccagcttcaccacgttcaccgttccggccgagactgccgtgccgatcgtgagcacgggcagcgtgaagccatcgaccacgacgacgctgccacccccggttgtgacggccggggctggacggaacgttggcgtggttggcggtgttggagtcgtggtggcggcggttgttgcggcggtgatggctgcttga

SEQ ID NO: 332 - DNA, 1878 bp, Scytalidium thermophilum
atgaagacttcggtctccttcgtggcgctcgccgccagcgcctctgctactttccttaatgcccctgccttcccctggcctggcaacatcgacaacgtctgcactccccagcagcttcctggcttcaactgggcggatctggactttggtgacttcttcaactacaaggacttcatcttcaagggctggaagtgcgaggatgccactggcaagcggagccgcatcaccccgcgcacctttggcaaggtgatcggcggtatctgccaccctgacaagttcaagtcgccctcgttcggctgcggccccaacctcgacaagttctccctgggcaagatcgtggtccagcccgagttcgataccgatctcgagttccactacgacatgcccgatggcagcgtctgcaagcaccgtagcaagtgcagcaagaagggcaccaccatcgtcaacaaccaatgcggcggcgccaagaacgtcaccatcatctacccgccccagcccaacaagcccaagccgacctgcagcatcaaggttcccaccatctccttcgactgcagcacggcctcgagcaccaagcctcccaagaccaccaagactagcacgagcttcacttcgacctcgactgtcctgaccaccacctcgtcggatttcaccctgagcaccaccatcagcagccctgatgttgccacctcgaccagcaccttgccgggcgatgttgactcgacgacccccgtccccatcaccgagaccagcactggtatcgtccctggcacgagcaccaccgactctgagaccagcccggtcgagaccacggactcggtgtcgcccaccgacagcaccagcgtcgacgttagcagcagcactgagagcaccagcgagaccaccggcagcgtgtccactgagactcccgtcacgactgagatcaccgagaccctgaccatcaccaccagcttccagtccacctcgaccatcttcaccaccagcactcagaccatcactcagtgcgagcccaccaagacggactgccctggcaactcggtcaccactgtgatcgtcaccatccccgtctcgaccaccatctgcccggtcaccgagactctcaccacgaccaccgtcctgaccaccgagacgagcagcaaccttcccgtggatactgccacccccagcgatggcgtcgacactggcagcagcacctcggctgatgtcgtcgtttccacctcgtcgggcgttgtcagctccgtctcccccgtccccaccctcgacgtccccgagctggtccctcgctgcctgaacaccttcatcttcaccactggctgctcggacaacactgatgctgcctgctactgccctgatgccgtcttcgtcaagaacgtctacgactgcatgtacgcccacggcacgaccgacgccatcatcgctgaggccatcgccttcttccagggcatctgcggcaagtacctgccccagaaccccggcattgccaccgacgccaccgtcaccagctacatcaccgtgaccgccaccccaagcgtcgcgcccatctcgacgaccgtcaccctcatcaccaccaccgtcgtcccctgcaccgacgaggccggcagcgagatccccagctccagcaccaccgtcaccatcagcaccagcatcgaggtgccgcaggtcgacttcaccagctcgtcgaccgacgtggtcatcgtccccatcaccagcagccagtcggtcgtgctccccaccgacacgggcatcatcacccccatcccgaccgacaccaccagcactgtccgcccgacccagagcatcgtcaccgccggcagcggcaaggcgggcgtcagcctcggcttcgccgccgcggtcgctgctgtggctgcccttgctatgtaa

SEQ ID NO: 333 - DNA, 1608 bp, Scytalidium thermophilum
atgagaggccttttcgctctctcgctcgcggcctgcgtcgctgctgcgccgcgcgccagcgtcgacaccatccacagtgatgccgctcccattctctcgtcttccaacgccgagattgtccccaactcgtacatcatcaagttcaagaagcatgtcaaggacgacaaggttcaggcccaccatgcttggatccaggagattcactcgaaccgtgaggcgcagcgcgccgacctccggaagcgtggcctggttgatgacgtcttccgcggcttgaagcacacctacaagatcggctccgacttcatcggctactcgggccactttgatgacgaggtcatcgagaaggtccggaggcacccggatgtcgagtacattgagcgcgacagcgtcgtccataccatgcgctacgttgaggaggagagcaagtgcgacggtgacgttgagaaggctgccccttggggtctggcccgtatctcgcaccgggaacgcctcggcttctccaccttcaacaagtatctctacgcctctgagggtggtgagggcgttgacgtctacgtcattgacaccggtaccaacatcgagcacgtcgacttcgaaggccgcgcccactggggcaagaccattcccgccggtgactcggatgaggatggcaacggccacggcactcactgctcgggcactatcgctggcaagaagtacggtgttgccaagaaggccaatgtctacgctgtgaaggtgctccgctccaacggctctggtaccatggccgacgtcgtcgccggcgttgagtgggctgccaagtcgcacctcgagcaggtcaaggctgccaaggacggcaaacgcaagggcttcaagggctccgtcgccaacatgtcccttggcggtggcaagacccgtgccctggatgatactgtcaacgctgccgtctccgtcggtgtccacttcgctgtcgccgccggcaacgacaatgccgatgcttgcaactactcgcccgctgctgctgagaaggccatcaccgtcggtgcctcggccatcgatgacagccgtgcctacttctccaactatggcaagtgcactgacatcttcgcccctggtctgagcatcctgtccacttggatcggctccaagtacgccaccaacaccatctcgggcacctcgatggcttcgccccacattgccggcctgctcgcctactacctgtctctgcagcccgatgccgattcggagtacggcatggccaccatcacccctcagaagctcaaggacaacctcatcaagatcgccacccagggcgctctgtctgacattcccaaggacactcccaacctgctcgcctggaacggcggcggctgcaacaactacactgccatcgttgaggccggcggctacaaggttgagcgcaaggccgatgataagtcggacaagttcgacctcgatgatgctgtctcgcgtcttgaggagatgatcgagaacgacatcgatgtcgcctcggataaggtcgccaagggcgtcgccaacctccgctccaaggccaaggagttctccaagaagatccacgagctcgtcgatgaggagctcaaggacttcttggagcaggtcactgcctaa

SEQ ID NO: 334 - DNA, 1524 bp, Scytalidium thermophilum
atgttgatgaagacggcgttgacggcccttttgggtctgtccgtgattaccgaggctgccagcccccaccatcttaggccgcttaggtccctgaaccggcgacaagacgtcaatgctagcaacttcaacggaggtaatcggttcggcggtaacaacaatggtggcaaccggttcggtggcaattttggaggcaaccgcaacaacaacaacggaggcaacaacaacaatggcggtaacaacaacaacggaggtaacaacaacaataacggaggcaacaacaacaacaacggcggcaacaacggcaacaacaacaatgccgcgtccgtgacttgcctggcgcccaacgccatccagactggttctcagtccactggtcagcagggcgatgtgcccattgatggccaggtcaactctgccactgacccggccaacttcatcaacttctgcgctggtcaggtcttgaccaacggtctgcagaaccgggatggttcttgcaacggcattccgatgggcaaaatcccggctttcgacaagatgatctcgactgtcatcttgaaccctaagaatggcgacaacctccagcctctcaccaacttcgacatcacgatccaggtcaacaacatgcagcttggtttcttcaccaacgccacgagcacctactacgctgctccccaggatctgaacggccagggcttcgttatcggtcactcccacgtctccgttcaggataccggtggcaccaccaacccgaccacccctctcgatcccaccaagttcgccttcttcaagggcctcaacgatgcgggcaatggtcagggccggctcaccaccactgtcacgggcggtcttcccgttggttgctaccgtgtttgcaccatcactagcgcttccaaccatcagcctgtcgtgatgcctgttgcccagcgtggtgtccaggaggactgccgctactttgctgtcggtggtggttgccaggacctgaacaacaacggcggcaacaacaacggcaacggcggcaatggtggcaacaacaacaacaacaacaacggcggtaacaacaacaatggtggtaacggcggcaatggtggcaacaacggaggcaacaacaacaatggcggcaacggcggcaatggcggcaatggaggcaatggaggcaacggcggcttccggaacaggttcggaaacaacggcggtaatggcggtaacaacggtggtaacaacaatggcggcaacaagaacaatggcggaaacaataacgctggtgcccggaccgctggcgttgccagtgcttctggtgccattggtggcatcgccgccccggccattgagaatacgaacgaccccgttcgcccgttccgggttgatggcaacacgttcacctccaaggccgacgccgcccagcgcgcctgcgccatccagaacaacgcctgcgccagtgccgtcaacagcgggcaagtccagggcaagacggttcccgactgcaacgcgcaagaagcccaatgccgcgccgagttgagtgcttaa

SEQ ID NO: 335 - DNA, 705 bp, Scytalidium thermophilum; identical to SEQ ID NO: 50

SEQ ID NO: 336 - DNA, 1050 bp, Scytalidium thermophilum
atgcgcgcgcttctgtctactctcctcctcggcctcgcgacggccgtcgatgccctccagtacaagggcgtcgactggtcgtccgtcattgtcgaggagcgggcgggtgtccgctacaagaacgtcaacggccaggagaagccgctcgagtacatcctggccgagaacggcgtcaacatggtgcggcagcgcgtctgggtcaacccgtgggacggcaactacaacctcgactacaacatccagctcgcgcggcgggccaaggcggccggcctgggcctctacatcaacttccactacagcgacacctgggccgacccggcacaccagaccacgccggcgggatggccgtccgacatcaacaacctggcctggaagctgtacaactacaccctcgactcgatgaaccggttcgccgactccgggatccaggttgacatcgtctccatcggcaacgagatcacccagggcctgctgtggcccctgggcaagaccaacaactggtacaacattgcgaggctgctgcactcggccgcgtggggcgtcaaggactcgagactgaaccccaaacccaagatcatggtgcatctggacaacggatggaactgggacacccaaaactggtggtacacgaacgttctctcccaaggccccttcgaaatgtccgactttgacatgatgggcgtgtccttctaccccttctactcggcctcggcgacgctggattcgctgcgccggagcctcaacaacatggtgtcgcgctggggcaaggaggtggccgtggtcgagaccaactggcccacgtcgtgcccgtatccgcgctaccagttccccgccgacgtccgcaacgtgcccttctcggcggccgggcagacgcagtacatccagagcgttgcgaacgtggtgtcgtcggtcaacaagggcgtggggctgttttactgggagccggcgtggattcacaatgccaacctggggtcgtcatgcgctgataacaccatgtttacaccgtcgggtcaggcattgtcgagtttgtcggtgttccagaggatttaa

SEQ ID NO: 337 - DNA, 1380 bp, Scytalidium thermophilum; identical to SEQ ID NO: 52

SEQ ID NO: 338 - DNA, 1896 bp, Scytalidium thermophilum
atgagaaaccttcgacatatcctgcaccacagcctcctcctccttccaggggctacagctctctcggccgaggagtggaggaagcagtctatttaccaagttgttactgatcggttcgctcggactgatctctcgacgacggcagcctgtcggacagctgaccaaatatactgtggtggaacatggcgcggcctgatatcgaaactcgactacattcagggcatgggcttcaccagcgtatggatttcccccgtcgtgaagcagatcgacgggtactctcccagccacggtgccgggtaccatggatattgggcccaagacatctggtctctgaacccggcgttcgggacggaacaggacttaatagacctctctcaagcacttcactctcggggaatgttcctcatgctcgatgtcgtcacaaaccacatgggctatatgggctgcagctcttgtgttgattacagccaatttaaccccttctcatcatcttcatatttccactcgccctgcactatcgactacaacaaccagacttcagtggagatatgctggcaagggagcaccaccattgtcagccttccagacctacggactgaggactcgtttgtaaggaacacctggaaccaatggatatcacacatcgtctcaaaatattcggtagacgggttgagagtggatagtgcgaaacacgttgaaacgtccttttggcctggcttctcaaccgccgcgggtgtctttatactcggcgagatatatcacggcgacccggcatacctggctccttaccagcagcacatggacggcgtgctagactatgccacttattattgggccaagagggctttccagtctccgaacaacacgctgggcgagctcgtcggtggcctcaataccatgaggaacgtggctcgagatctcagtctatatggatcattcctcgagaaccacgatgttgagcgttttgcgtccttgactcaagacaaagcgctcatcaaaaacgcaattgcgtttaccattctcaaagacggaattcctattgtgtatcaaggtcaagaacagctctattctggtacaggaattccaagcaatcgagaagccctctggctgtctggataccaaacggactctgaactctatacatggatatcgaagctgaataagatccgatctcgggccatctctgaggacagcagacacgtcacttatatcagccaaacgatatactccgatgaccataccatcgccattcgaaaggggcactcgggatatcagttggtcagcatcttcaccaacattggatcctcgaaatcaacgacgattacgctcacttcttcggctacgggatttgggcacaacgaagtcttggtagatgtcataggatgtgtcttgttcaccgcagattcaaggggtggactagttgttggtctcttcaacgggttaccaagggtgttgtaccctagaagccgtctcctcaggagtggcatctgccccgagttaaccgacacagttaccacaaagaccgaagcacctggaacaacgatctcgacagcgacatcgagctcgacaatagccacagcaacctgcacgatgacgagtgtggccgttactttgaacgtccttgccactactagttggggcgagactatcaaggtggttggcaacactccagaacttgggagctggagtccaggcagtgctgttacccttggtgcatcgcagtacataccaagcaacccgctctggtctggcacaatcaagcttcctccaggagtggtggttcagtacaagtttattcgggttggttcttcggggacggttacctgggagtcggatccaaatcgtacactcaacgtcccttgtgctgctacaacaatcagccatacgtggagatag

SEQ ID NO: 339 - DNA, 4653 bp, Scytalidium thermophilum
atgtggtctagagcgaagactgggacagcggccctcgccttgtgtgtcaactttgtggactcagtcctctctcttgacaataccattcccaatcccgccttatcacgcaatgatccagagctgttcgactgcccgttgccatgtgtggagtacgacaacattcacacatggactcgatacttctcggtcagccgcctcgagcgctgcaacaagcccatgttgctccaattctcgaccacgcaattgctggatgacccggccaccaccgtcctcatccgtgtttgcactctgacatcgccatcggtgtcgggggacgttcctgaagctggcttggtcgaggtggaaaaccccaagaagtctgaagctctgttcgaccccaaactggactccgctgcttcttgtgtccttgcgacggcagagagcgatggcgacctgcatgtggccatttccactggcgacaactccggcgtagaggttagcgttgcggccggtctcctggagggtatcaaggccttcttcgatgaccctaacaactgcgatgagaactttgtctttgcctggcataatgggacagtgggggctgcctacattggcgctgctcttggaaagcccagcattgtgtcagctctcgacatcttggccaaccacctccaggacaataccgccttcctctccaacctcactgtcgctcagctctgcagcagcgagcggcagcgggaccgcagcatcggtattgccattgacacgacggctgaccttgctggactccaacgaacggcactggggtggagtcagggcgactgcgtcgccgtggatgggactgaactccaggccaccaatgcaatcgacgggctgaagatctttgagattgatgtccttcactccagcagcccccttcgcaagcgggacacctgcgattatatccaagtccaaccaggggatggctgttgggccttggctgatcgttgcggcatctcgctgaacgacttctacacttacaacccggatcccgacctctgttccacattggcagtcgatgactatgtgtgctgctcagaaggagacccgcacacaccgtcaggaccacaaccctttccgaacggcacctgccagtatatccaagtccagccgggcgaaggctgctgggatctttccgtcaggtgtggcatctctctcaacgacttctacgacaacaaccctgatcccaacctctgttcgaacatcctacctgacgactatgtttgttgctcctcaggcacgccctacacgccaccgccgccggagccccaaccggacggcacctgtgccacccacctcatccagaacggcgacacgtgtgccgagttggccaggaggtaccacgtcaccgtcgaggatttggaggactggaacgccggcaagacatgggcctggaccaactgcagcggaatgctccttggctacaacatgtgcatcagtcccggctacgccccgttgccgccccctcagatcgatgcccagtgcggtccgttggttccgggcactgagctcccgagcaaccggagcatttcgctcgccgacctgaatccatgccccctcaacgcctgctgcagtaactggggtttctgcggtccctttccagcccactgcgagattcacgcgccagaagggggcggcccgggaagcaagctgcctggatacatgagcacttgcgtttcaaactgcggcacggacatcaaggtcaacggtccagctcctgcgtccttccagagggtcggctactaccagtcgtacaactttggtcgcccatgcctttggatgagcgctaagtatgccaaccctggcggagcttacacacaccttcactgggcttttgccgagatcgaccctaatggctggcatgtggtcatcaacgatccgtacggccagtgggaggatttcaaggctctgacgggcgtaaagaaaatcatcgcgtttggcggctgggcctactcaacggagccggcgacctacaacattctccgccaggcaattatcgaccacgcggacgatttcacgcagaacatcgccgagttcctcgaggatgagggtctcgatggtgttgacattgactgggagtaccctggtataagattcctgacttcccgccgcatggccgcttcatctcgctcacccgagaccgacggcgccaactacaaagacttcctcacgctgttgaagtcaagagttggctcgaccaaatcggtgtcaatctgtgccccagcctcgtactggtacctgaaggcctacctcattgctgaaatcgcggacgagatcgattacatcgtctacatgacgtacgacttgcatgggcagtgggactatggcaacgtcaacgccttcgactcatgtccctctgggaagtgcatcaggagtcatgtcaacttgacggagacgcggaccgcattgtccatcattaccaaagctggtgtaccgaacaggaaggtctttgtcggcgaggccagttacggtcgctcgtttcacatggctgatcccgagtgctggggtccgatgtgcgacttcactggcaccaggatggagtccgacgcaacgccagggagatgtaccaatacggctggatacatttcgatggccgaggtctacgaaattctcaagtacaacggcagctttgcggaattgttttatgatgattcctctgacagtgacatcatgttgtacaacggggactatatcagtttcatgtcgcctgggatcaaggaaacgcgccgagaagagtggcaggatttgcattttgcgggtaccgtggactgggctgtagacctccagcgctttggcgaagacgatatgaacgcgactgccacgaggcccgtcgatgagaatggcgagggttgtatccatggagatgatctcaccttgaactctgacgatctttgcgttttttcatgtcgactgggcttctgcccggagctcctgtgcgaatgcacggaggtcggcgagttgaaccctctcccaccggagaagtcggtcaacatcagcgacatcatcgcccgtgacgaggacgacatcacactgacccagctctgtcgctttgcctgcaagtacggctattgtcccggctctgtttgcacgacccgcccacaaatcgagactgtgcaggacattccgaaggaacgtttgcccgacttcaaagaacagttcaaaaaccagtgcaccatctcggatgaccccaagtacagagaagcctgggagatacagtgtcgaaatgtctgccgagacgtcctcgagcaggccgaaagagagggcaggacgaccaactacggctgcgtcggtatctacccgctcgatgacccagacccttgttgtgacaactggcttgcgaacgagtttgccaacatgattcttgaagcactgcctgctattggtcagataggttgcggtattttgatgtcatccttccgttcaatcctcaagcttggcttgaatttctttactggtggtgctggcagagcaattgacgccggctcggatatgcttctctcggctgctcaaatggcttcatacctctatgatgaggaagaggaccctgcaggagccttcgaatggtggctgctgccgtgtggcggaagcacccttgtgccgcaggacgtcagagatgtgttcgacattctgacatcgattggcgattttgggggttcgagctcctttaagccgccaaagaatctaggaaaaggctcggggaggaagggtgacgacggcaacccgaccggaagtgccagatccgtgtcccgaccatcacccaccagaacatcgtcggcgtgcctaccgacgacgacaagacacagtagccagaagaacattgtctctgtcataacatgcaactcaaaatcccagaccataacgactgtctacgtcgccacctccgttactccggcagccaccgcgacaacatcctacgtcaggagggtgtgcttggagaggtggtctcaggcatgctatcactacagctcggcaatctcgagacacccggattgggctgagcttccatgtccggcggtagcaatgacgactagcaaagatcgcgggagtggtgggagggcaacaagagtttggttcagccaacatagcggcaaggggtggcagagcccggaacatcgcccatacaccaaagactgcgctagggacgaatacccccctgtgtatctgctggacaaaagtcacacagcgatgatcaaaggcggtattgattggaccggacaagcgatccgctatctgcctggcggcgagaattcgggtgcgggaagcatgtggaaggggatgtgtttcctgccccatttcaacaacatgcccaaccacgaattaatctcgagagtcgtgaacggtgtctccacgaaaatagtgccaaggggcaccgtgaccacaattgaggccatgatcatcgtcgacgtccatcctgtgttcacgatcacaagctgggagcacacgctcattaaatcactgaccaatgacggcctcaatgacaacggctgttggccaagcgattacgccccccttgaccctgggtttgcgctcctgacgttcgacccatactacgggttcccgacccccacgccacctccgtacaattaccggctccctataccgacggcgaccagcacagcgactacgacaccgtaa

SEQ ID NO: 340 - DNA, 1560 bp, Scytalidium thermophilum
atgaaggcagctatcttgagcgccgccgcggccatggtcgctggcgtgagcgcccgttctcacggccaccgccacgctcaccggatgctggaggacaggtctctgagcgacgagacgtgcggctgcacgacggtctactcgaccatctacggcaccgattttaccatcgttcccggccccaagccgacgagcaccgtcgatgccgtcgtcactcctacccccgagcttccgacccccattgctcagacctgcccgactcctggcacctacacgttcccggcgaccaccatcgtcgtgaccgagacgacgaccgtctgcgccgcctcgaccactgaggttccggctggcacccacacccttggcggtgtcacgaccgttgtgaccaccgccaccacggtcgtctgccctgttgccaccaccgagacccaggacggcaccgtcaccagcgtcatcaagaccaccaccttcgtctgccccgagcccggcacctacaccattggccccatcaccaccgaggtgcccgacgtcacgaccgtcgtcgttcctgtcgtcaccaccatctgcccgggtacctacaccgcccctgaaattaccacaaccatcaccgccaccaacaccgtcatctactgcccgttcacctcggttggtgccccggagccgacctctgagcccacttcggcccctcaggaggctcccgaggctcctgaggagccgtctgctccggctgcccctgccccgtcctctaagactgtccctaccggcaagggcaagcactgggccatgacctacactccctacactgaggatggcaactgcaaggcggcctctgaggtcgattccgatgttgccgccattgctagcgctggtttctccaccctccgcgtctactcgaccgactgcaacacccttgagaacgtcggtgctgcctgccgtaagcacggtctccgcctgatcgtcggtgtcttcatcggcgcccacggctgctccaacggcagcccgagcgttgacgaccagctcagcgctctcaagaactgggacggctgggacctcgtcgatctctgcgtcgtcggcaacgaggctctgttcaacggcttctgcaccgtttcccagctcaccagcctgattgagcgcaccaagtcggagctcgcctcggtgtacaccggccccttcaccaccaccgacgtcgtctccgcctggcagaacaacgatgtcacgcagctctgcgccgccattgacgtcgtcgcctgcaacgcccacgcctacttcaaccccgacaccaagccgaagcacgccggcaagttcgtcaagggccagctggccatcgtcgagggcatctgcaacaagtccggtctcatccttgagactggctggcccaatgccggcaagtgctacggcgttgcctgcgctggcccccaggagcaggccgaggccatccactccattgaggacgaggttggcgacaaggccgtcttcttctccttccggaacgacaggtggaaggcccctggcgactgcaactgcgagcgcaactggggctgcgctgaggtcttcggcctttaa

SEQ ID NO: 341 - DNA, 1020 bp, Scytalidium thermophilum; identical to SEQ ID NO: 56

SEQ ID NO: 342 - DNA, 672 bp, Scytalidium thermophilum
atgcagctccccctgaccacgctcctcaccctcctccccgccctcgcggcggcccagtccggcagcggccgcaccacgcgctactgggactgctgcaagccgtcgtgcgcgtggcccggcaagggcccggcgcccgtgcggacgtgcgaccggtgggacaacccgctgttcgacggcggcaacacgcgcagcgggtgcgacgcgggcggcggcgcctacatgtgctcggaccagagcccgtgggcggtcagcgacgacctggcgtatggctgggcggccgtcaacattgccggctccaacgagatgcagtggtgctgcgcctgctacgagctgaccttcaccagcgggccggtggcgggcaagaggatgattgtgcaggcgagcaacacgggaggcgatttggggaacaaccactttgatattgctatgcccggcggtggcgtcggtatcttcaacgcctgcaccgaccagtacggcgcgccccccaacggctggggccagcgctacggcggcatcagccaacgccacgagtgcgacgccttccccgagaagctcaagcccggctgctactggcgcttcgactggttcctcaacgccgacaacccgagcgtcaactggcggcaggtcagctgcccggccgagattgtggccaagagcggctgctcgcgttaa

SEQ ID NO: 343 - DNA, 1992 bp, Scytalidium thermophilum; identical to SEQ ID NO: 58

SEQ ID NO: 344 - DNA, 2535 bp, Scytalidium thermophilum
atgacaacaacaaccttgttactcctagccatcatggccatcttcgcccagacggccatcagcctctccgttcccagggcctcggatgtcctcaaggtcgtcggcgtctccatccagcggcaggctccgcggaatccagtccatcgtgacaggctgaggatgagaaagagggactcgtttactgctggccttgacaatgccgaaactctctactacatcaacgccaccgtcggcactccccccgtctcggtccgactccacatcgacacgggcagcagcgacctctggttcaacacgccttcttcctccttctgctcctcctcctccaacccctgcgccgccacgggcatgtacgaccccaacgcatccaccacgtcgcagtacgtcaactccaagttcaacatcacctacgtcgacggcaccagcgccagcggcgactacgtctccgacacggtcaccgtcggccctcagaccctctcccggctgcagttcggcatcggctactccagctccaaccgccaaggcatcctgggcatcggctacagcgccaacgaggcgcaagtcacgcgcggcgggctgccggcctaccccaacttccccgagcagctggtcaccgacggcgtcatcaactccccggcctacagcatctggctgaacgacctcgacgccagcacggggagcatcctcttcggcggggtcgactcggcctactacactccgccgctgatgtcattgcctgtcgaaaagctcaaggacggcaaatatcgcgagttcatgatcaccctcaccggtctcaccctgggcaacctggcgctgggcaaaggcgaatccctcgccttagcattcctcgtcgacacaggctccacgctgacctacatccccaaccgcctcgccttcgaactcttttccgctctcggcgcatcgtacgacgaagccaacggcatcggctacgtcccctgctcactcgccagcaacacgagtgcgagcttatccttcgcctttactactcctaccatctccgtcggcttcgacgagctagtgctggacgcgtacacctcatccgacggcagccggccgcgcatgcccgacggttcccccgcctgcctcttcggcgtcgcgcccgcgggcacggggacctacgtcctgggcgacacgttcctgcggtccgcgtacgtcgtgttcgacctcgccaaccacgaggtggcgatcgcgccgacgaggtttgatttgaccaaggacccggcggcgttggccgcggctacggctcccgggtcgagtaccaccgtgaaggagattgggaaagtcggagaggatggcatccccggggcgacgagggtggagaatccggtcagggcgacggaggggttgaaagggggaaggacgtcaggggtgccgccgagcgggatggcgaatccatttcacaactccgccaactcggtcatcgtcaacatggcatacggcaggaacaaaaccctcctcactccccctagcatcgacaagggcaagcaggacaagtcggtcgcctttcctccaggcccgaccgacaccgtctcggccctgcgctggtcgcccgtgtccaaccacctggccgccgcctcgtgggacggtaatgtctatgtctacgatgccaccgttgccacgaagaccgagtccatcaagcccatcgcctctatccgcatcggcgcccccgtcctcgattgcgacattagcaaggacggaaccctcgccgccggcgcttctgccgacaaaaagatccacctcctcgacatgccgaccggccaagcgatggaaatccggggccactccaagccggtgcgcagcgtgcgcttcatcgacgtgcccttcgccaaccagcccatggtcgcctccgggtcgtgggacaagaccatccgctactgggacctgcgccagcccaaccccgtcaccaccatcgaccttcccgagcgcgtctacgccatggacgctagtcccaagttcctcgccgcggccaccgccgacaagaacgtgcatctgatcgacctccgccgcgacaactacaaggtctggaacacggtcgaggacccgctcggattgcagcttacttccctttccatgacggcggatggctcgcgctgggccgtgggctgcatcggcggccgtgctgttgtgcaggggtccgatgacaagatagaaaacttcagcaagctcaccttccgatgccaccgcgagccccaccctccccagcccaaaaccccgaccgacgtctactcggtcaacgccgtcgccttctcccccgccgacaaggacgttctggccacggccggcggcgacggcacctttgcggtctggaacgtccagcgcaagatccgcctccgggctccgttcaaggtggaaaacgaccaccccatcaccgccctcgccttccgcacagacggcaaggcgctcgcctacgccatgggctacgactgggcccggggctacctgggcaacaagaacgcggggaaggagggggagaacaagattgtgttgcatgtgtttggggaggagttgaagtag

SEQ ID NO: 345 - DNA, 978 bp, Scytalidium thermophilum
atggctatccgccgccgccacaccatcccggccacctttctccttctctccgtcctcctgcttctcaccttcatccacccaaccctcgcggcctgcgagtgcggctacctcgccaccatccgccccgacctatccgacccatccacccataccaccgcgctcttcaccgacatcctcgaaaccgacttctcccgcttactcccacccgccaaccaagatggtgaccccagcagcagtatcgtcggcaccgacctcgcaaagtacaccccggactgggcgccgcaggcattcaacctgacagcgaagcgggcgcgcggtgagtatggggagatgtttgacgtgggcaacgtacgagtcgtggacccggcggcgcagggccgggggatggccggggacgggaggacgttggagctggtggtcaggaaggggttggtggacgggatggtgcccgtcgcggaggtggatacgaggaggttggatgtcgggtatgggacgtttcgggcggtgatgaaggttccgggggtgaaggggacttgtgcagcgtttttttggtaccacaacgacacgcaagaaatcgacatcgagttcctctccaaagacttctccccctcccgctcgcacttccccgtcaacctggtgctccaatcccgccgatccgccgaggccggacacgacgcttccggcacagaaaactttgtccaaaccaccctccccttcgaccccaccgccgacttccacgagtaccgcatcgactacctcccggggatggtcgtattttacgccgacggcgcgcccctcgccaccatgacctccgcatccggcgttccgaccaccgcgggccacttgatcctctcgcactggagtaacgggaacccgctctggagcgggggcccgccgagggaggatgcggtgttgaaggtgaggagcgttaaggcgtattttaattcgtcggatcccggatgtgatgccggggaataa

SEQ ID NO: 346 - DNA, 2487 bp, Scytalidium thermophilum
atgaggaccgcgtctcgtcttgttggcgccctcgcggcgacggcagcgttcctgccgtctgccctggcccagaacaatgccccgaacaccttcactgaccccgacaccggcatcaccttcaacacatggggcctctctcccgacgacccccggacccagggcggcttcacctttggtatggccctgcctgagaacgccctcagcaccgattcttccgagttcatcggctacctggaatgctcctcgcccgacggccatggctggtgcggcttctctcttaacggcggcatgcccaactcgctgctcatcacggcctggccgcacgaaaacgaggtctacacctcgctgcgccacgccaccggctacgccatgcctgacgtcttcaagggcgacgccgagattacacaaatctcgtccaagatcaacggctcccacttctccctcatcttccgctgccagaactgcctgcgctccgacacgggcggcgcccctgcctccaccagctccggcttcctcgttctcggctgggtccaggccttcccgtcccccggcaacccgacctgcccggatcagatcgagctcgagcagcacaacaacggcatgggcatctggggcgccgtgctcgacggcaacgccgtcagcccgtcgtaccccgagtgggcggccctggcgacgcacgtgcccgaggccgtttgcgacggcgagggcggcggcgaggttgagggcgtgcccgtccccgaggacgccgagtttgattacattatcgttggcggcggcgccggcggtctgccactggcggaccggctcagcgaggcgggcaagaaggtccttctgattgagaagggcttcgcctcgactggcgagcacggtggcagcctgggcccggagtggttggctggcaccggcctgacgcgcttcgacgtccccggtctctgcaaccagatctgggttgactctaagggcatcgcctgcgaggacaccgaccagatggccggctgcgtgctcggcggtggtacggcggtcaatgccggtctgtggttcaagccgtactcgctggattgggattatctcttcccgtccggctggaaagctagggatgtgcaggcggccatcaaccgcgtcttctcgcgcatcccgggcaccgacaccccgtcgatggatggcaagcggtactaccaggagggctttgaggtgcttgccagcggcctagcggctggcggctggagccgggttaccgcgaaccaggctccggatcaaaagaaccggaccttctcccctgcgcccttcatgttctcgaacggcgagcgcggcggcccgctggccacgtacctgcgcagcgccaagtcgcgccccaacttcaccctgtggctgaacacgtcggtgcgccgcgtgatccgccagagcggtcacgtcaccggcgtcgaggtcgagccgttccgcaacggtggctaccagggcgtcgtccccgtcacccccgtctcgggccgtgtcatcctgtccgcgggcaccttcggcagcgctaagatcctgctgcgcagcggtatcggccccaaggaccagcttgaggtcgtcaaggcttcggagatcgacggtccgactatgatctcggaggactcgtggatcgagctgccggttggctacaacctggatgaccatctcaacaccgacaccgtcatcctccaccccaacgtgagcttctacgacttctacgaggcctggatcaaccccatcgagggcgacaagaaccagtacctcagcagccgcagcggcatcctcgcccaggccgctcccaacattggtcccatgttttgggaggaaatccgcggcaaggacggcatcgtccgccagctccagtggactgcccgcgttgagggcagccttggcactcccaatggccaagcgatgaccatgtcccaatacctcggccgcggcgccacctcgcgcggccgcatgaccatcaccccatccctcaccaccatcgtttcggacgtcccttacctcaaggaccccaacgaccgcgaggccgtcatccaaggcatcatcaacctgcagaacgccctcaagaacgtccccgggctggagtgggctcacccagatcccgccatctcgccgcgcgagtacgtcgagagcatggtcgtctcgcccggcaaccggcggtccaaccactggatgggcacggccaagctgggctgggacgacgggcggaccggcggcacggcggttgtcgatctggacacccgcgtgtacggcacggataacctgttcgtcgtcgacgcaagtatcttccctggcgtcccgacgacgaatcccagctcgtacattgttacggctgcggagcacgcggcgcagaggatcctggcgctcaggactccccaggcggtgcccaagtggggacagtgcggtggtaggcagtggacgggcagcttcttctgtgagaagggcttgacttgcacgccgcttaatgagtggtattcgcagtgcctgtaa

SEQ ID NO: 347 - DNA, 993 bp, Scytalidium thermophilum
atgaagtccctgacctacgccgcgctggccgccctctgggcccagcagaccgctgctcatgccaccttccagcaactctgggtcgacggcgtcgactacggcagccagtgcgcccgcctgccgccgtccaactcccccatcgccagcgtcacctcgaccgccatgcgctgcaacaacggtccccgcgctgccgccaagtgccccgtcaaggctggcggcaccgtcaccatcgagatgcaccagcaacccggtgaccggtcctgcaaccaggacgccattggcggtgcccaccacggccccgtgatggtgtacatgtccaaggtctctgatgccttcaccgccgacggctcgtcgggctggttcaagatcttccaggacggctgggccaagaaccccaacggccgcgttggcgacgacgacttctggggcaccaaggacctcaacacctgctgcggcaagatgaacgtcaagatccccgccgacatcgcccccggcgactacctgctccgcgccgaggccatcgcgctgcacgccgccggccccagcggtggcgcccagccctacgtcacctgctaccagctcaccgtcacgggcggcggcaacgccaacccgcccaccgtcaacttccccggcgcctacagcgagcgtgaccctggcatcgccgtcagcatccacggcgctctgtccaactacgtcgttcccggccccccggtctactcgggcggcagcgagaagcgcgctggcagcccctgcgagggctgcgaggctacctgcaaggtcggctcgagccccagccagactcttgctccttccaacccggccccgacctctcccgccaacggcggcggcaacaacggtggcggcaacactggcggcggctgcaccgtgcccaagtggcagcagtgcggcggccagggctactcgggctgcaccgtctgcgagtctggctcgacttgccgcgctcagaatcagtggtactctcagtgcgtgtaa

SEQ ID NO: 348 - DNA, 2658 bp, Scytalidium thermophilum
atgacacccttgggagggcttttgtgcctcctcgccggcatccctctgtcggctgtaacggcacacccgtcgagggatgagcatgtcggcaggaatcttaatcatcatcatcatcgcagccagagagagcttgcctcttcacccccctcctatccctcaccatggatggacccaaaggctgcagagtggcaggatgcctacgttaaggccaagaagttcgtttccaagctgaccctcctcgagaaggtcaacctgacaactggcgttggttgggagtctgagcaatgtgtgggaaacactgggtctgttccccgtctgggtcttcgcagcttgtgccttcacgactcgcccctggggattcgaggtagcgactacaactcggccttcccctcgggccagacgactgcagccaccttcgaccggcttctcatgtaccgtcggggctacgccatgggaaaggaggcaaagggtaaaggaattaacgtcctgctcggcccggtggctggccccctcggtcgtatgcctgctgccggcagaaactgggaagggttctcgccggaccctgtccttaccggtgttggcatggccgagacgatcaaggggattcaggatgcgggtgtcattgcctgcgcaaagcacttgattggaaacgagcaggagcatttccggcaggcaggcgagggcggattcaacaccaccgaggccctgtcctccaacatcgacgacaagaccatgcatgaactgtacttgtggcccttcgtggacgctgtgcgcgccggcgtgggctccgtcatgtgcgcctacactcaagtcaacaactcgtactcttgccagaactcgtacgtcttgaaccacttgctcaagaacgagcttggattccagggttttgtcatgagcgactggcaggctcagcacgcaggcgtttccgccgcggttgcgggtctcgacatgtcgatgcccggagataccacgtttaaaaccggtgtcagcttctggggagccaacctcactctggctgtgctcaacgggactgttccgcgttatcggatcgacgatatggccatgcgcatcatggctgccttcttcaaggtccacaaggacattcacctcgaccccgtcaacttctcattctggacgcgcgagacatacggcccgcttcattggggcgcccaggatggccaccagcagatcaacttccacgttgatgttcgggaggatcatcatttgctcatccgggagattgctgccaagggcactgtcctgctcaagaacacgggcggtcttcctctgaagaagcctaagtttattgctgtcattggtgacgacgccggaccgaacccctatggccccaacggctgcgccgaccgcggctgcaacaatggcaccctcgccatgggctggggctcaggcacggccaacttcccgtatcttattaccccagacgctgccctccaggcccgggccctccaagacggcacccgctatgagagcgtgctgaccaactacgccccaaatgaaaccaaggcactcgtatcccaggccaacgcgacggcgattgtctttgttaatgcgaactcgggcgaggggtacatcaattttggcggcaatattggcgaccggaacaatctgactctctgggggaacggcgacgatctggtcaagaacgtctccaggtggtgctcaaacaccattgtcgtcatccactcgacggggcccgtcttgctcacggactggtacgacagccccaacatcaccgccatcctctgggccgggcttcctgggcaagagtcgggaaaagccatcgttgacgtgctttacggcgacgtcaaccccgccgggcggactcctttcacctggggcgccacccgggagagctacggcgtggatgtcatgtacgagccaaacaatggcgatggagcgccgcagcagaactttgacgagggtgtctttatcgattaccgctacttcgacaaggaggatacacacgtcatctacgagttcggacatgggctcagctacacaacgtttaactattccaacatcaagattgagaagcataatgccaaaccctacaagccgacgacgggcaagacgaaacccgcgcccacatttggccaggacgatgaatacggctatgctggccacgagaaatatctcttccccccaagccccttccgccgcatcacgaattacatttacccatacctcaactcgaccgacccacacgaggcatcgctagacccgcactatggtcagaccgccgagcagttcctgcctccaggtgcacttagggccgatgagcagccccttctgcgagcttcaggcctgcaccaacccggcggcaacccagggttgtgggacgtgctgtataccgtcacggctgacatcaccaacacgggctccgtcacgggcgacgaggtgccgcagttgtacgtctccctcggcgggccgcaggatcccaaggttgtcctgcgcgggttcgatcggttgatggggatcgggccgggcgagacgcgtcagttcatggcgcatcttacgaggcgcgatttgagcaattgggatccggctcttcaggattgggtggtgagtgggcataagaagaaggtgtttgtggggaagagtagtaggaagttggagttgagtgttgagcttccgtga

SEQ ID NO: 349 - DNA, 1035 bp, Scytalidium thermophilum; identical to SEQ ID NO: 64

SEQ ID NO: 350 - DNA, 3105 bp, Scytalidium thermophilum
atgctcataaagcggtgcctcgcgctgccgtacgcgctcgcgagcctcccggcactggggctagcgctccttgaagagcgcttcattgctttcgacgtcgatgtcgccgacaaacccaccgcaattagcatcaccaatgcgcagatcgtagtggcagaggacgatttcatcggggtgcacatcgccgccaacagtcttgcccgcgacttggaggctatcacaggcatcccgagggcggtcagcaacgcgaccttgactgatatttctgtggtcgatgacacggatccagttatcatcgcgggctctttgaactcatcattgatccgcgacttaacttccgagggtctgattgattcttcagaaattgaggggaaatgggaagcgttcaagacgacagtgatcacagtcccctcgtcagggcacaaacgagccctggtcatcgccggtagcgacaaacgaggtaccattttcggcatccacacactggcagagcagagcggacaaagcccctggcattggtgggcagatgtgccacctcagaaacacgagcagctgtttgccctcaacaagacgacggtccatggtgagccttcggtcaagtaccgcggcttgttcatcaacgatgaggagcctggcttgaacaactggtgggcacgccggaataacgcaacgcggtatcctctcaactcggagttctactcgcacgtgtttgacctgctgctccggctgaaggcaaacttcctctggccagcgatgtggaactcgttcacacctcccccgggaaacatcttcttcacggacgaccctcgcaaccagcagctggccgatgattacggaattgtcatttcaacagcacaccatgagccaatgcacagggcgaccaacgaatggaacgtgacggagcttggcccatgggactggtccaagaaccgggagaacataacgaagttcttcgacgaagggattgcgcgcgcagggaagaatgagagcttgatcaccatcggtatgcgtggtctcggagacgaggctgcacagacagagaacgccatcaagatgctggaggaggtgttcgccgtgcaacgaggtatcatcaagaaataccacggatccgaggacgcattcccccaggtatgggctctgtacaaggaggtcacgacgtactacgacagcggactcaacccaccggatgacgtgacaatcctcttcccggacgacaatcaaggccaggcctaccgactgcccaccggaaacgagacaacgagacccggcggcaccggattctatttccacctccagtaccttggccttcctcgagcatacaaatggcacaacagcaacaaccttgctaaggtcctcaaggagctgttgcatgctcatcttcgaggtgctaaccagatctggatcatcaacgtcggtgaccttaaacccatggaactgcctctcactttgtcgatggatttagcatggaatgcttcgagcatctcgttcgagagtctcccagaatacgtggcgcagttcgtggcgagggagattggtccagacattgctgaagaggttgccgaggtgctgatggaacattctcgtctggtcggcatgcgccggtatgagcatgtcactcatgacacctactcaaccctgaacttccacgaagccgaaagagtactcacccgatgggagcagctcgctgcccgggtgcgcgacctggctacgcgagtcgaggaagcccgtcagccggccttctttcagttggtgcagcagcctgtcctcgccggagcacacttccatgccgtggctatcaagaccgccttcaactaccgatatgccttggagaggcgcaactcagccaatcttctcgcgtctcaggttctcgaggagtttgaagctgcgtacgacctgagggaggagtgggatgccatgctggatggcaaatgggccgacatcatgctgcaagccgtctacgacgcggtcgaagaaccgaaacgctgggccaacccctcgagagacatcgccgtgaacctgtcctacgtgcagctcagacaaaacatgcaaccatctctgggcaatctcgggatctacgccgagggctcgaccagccccatcaaccaaggccgctgggccgagagcgttgacgcgtccatgcccaccaccaactacggagccgtcctcccgcagatagacccctacggtccgccggtcagacacgtcgacctcttcatgcgcggcgactaccgcgtgccgatcgaatgggcgctggatccgatccccgttccctggctctccatcacgccgaccaacggcaccctgcacaaagaccacccagaccagcggctcaacatcaccatctcctggccctccgttccgaccgatttcaacgataccgtcctcgtcggcatccgcgccaagccctcgcgcatcccgtacttcgacctcatccgcatccccgtcctcaaccgccgcacgccgcccgacttcaccggctttcctgaatccgcgggctacgtctccatcgaaggcgcacactttgaccggttcctatccaccgttgctgcacctcctagtagccttaacaacaacaccaaagccgaccacccacgcgtcggattcgcccacatcccccacctcggcacgcgcagcacctcaggcagcctcgccctccgccccttccacgccgcgcgggaagaccaggaatccgcgcgcgccgcggtcgccgtgttccccttctacctcttcacgcccgccgacaacctcgtcgcgacggtgtacatcaacgcggggctggacaccgaccccgcgctcaagatggaattctcgctaaccgtcgacgcggcgccggccaacttcacccgcgtgttgggcgactacattgaagtgcccgcggccggggcgatgccgcccgagtggatgccgcaggtgatggatcaggtgtggacgaagagggtggaattggggagggtggagcagggagagcggtggttggtttggaggacgaattcaccagaggtgtatctggagaagattgttttggataagacgggggagaatgtcggggcgagttatcttgggccgccggaaacaaagtgggtgagaggggagtttggggagtga

SEQ ID NO: 351 - DNA, 897 bp, Scytalidium thermophilum
atgcacgtccaatctctccttgccggagcgctcgctctggctccgtcggcgtctgctcacttcctcttcccacacctgatgctgaacggtgtccgcacgggagccttcgagtatgtccgggagcacgacttcggcttcatgccgcacaacaacgactggatcaactcgcccgatttccgttgcaacgaggggtcctggcgtcatcgccgcgagcccaagactgccgtggtcacagctggcgttgatgttgtgggcttcaacttgcacctggatttcgacctgtaccatccgggtcccgtaactatctacctctcccgcgcccccggtgatgtgcgcgactacgacggctcgggtgactggttcaaggtgtaccagctgggcacccgccagcccttcaacggcactgacgagggctgggccacttggaagatgaagaactggcagttccgcctgcccgccgagatccccgcgggcgagtacctgatgcgcatcgagcagatgagcgtgcaccctccttaccgtcagaaggagtggtacgtgcagtgcgcccacctcaagatcaacagcaactacaacggccccgcgcccggcccgaccatcaagattcccggagggtacaagatcagcgatcctgcgattcagtatgaccagtgggcccagccgccgccgacgtacgcgcccatgccgggaccggcgctgtggcccaacaacaatcctcagcagggcaacccgaatcagggcggaaataacggcggtggtaaccagggcggcggcaatggtggctgcaccgttccgaagtggggccaatgcggtggtcagggctacagcgggtgcaggaactgcgagtctggctcgacatgccgtgcccagaacgactggtactcgcagtgcctgtaa

SEQ ID NO: 352 - DNA, 459 bp, Scytalidium thermophilum; identical to SEQ ID NO: 67

SEQ ID NO: 353 - DNA, 2358 bp, Scytalidium thermophilum; identical to SEQ ID NO: 68

SEQ ID NO: 354 - DNA, 1356 bp, Scytalidium thermophilum
atgagctccctcatgcttccattcatggctggctccggcaacccggtccacggcccgcccgatgcgccctgccctcgcatcccgccggggccaggtcgcatcgacgacacccaaccactccgtcatgcgacctcgcgccgcccctccatcctcagctcgcctgggtcctgcctctccctcctcaggcacacgcttcccactgccgacttgtatctgcccgtcaagatgcatctcgcttcgtcgctctttctgctcgccactctgcccttcggcttcgctgctggcaagggcaagggcaagggcaaggacaacagcgatgttggcctcgacgtcctggccaagaaggccggcctgaagtacttcggtgccgccaccgacacgcccggccagcgggagcgcgccggtcttgaggataaatatcccgagtatgacaggatcatgtggcattcgcccgagttcggctcgaccacgcccaccaacggccagaagtggctgtttgttgagcccgagcgcggcgtcttcaacttcaccgagggcgacgtcgttgcctccaaggcccgccagcacggcaagctgctgcgctgccacgctctcgtctggcacagccagctggctccctgggtcgaggagaccgagtggactccggaggagctgcgcaaggtcatcgtcgaccacatcaccgccgtcgccggccactacaagggccagtgctacgcctgggacgttgtcaacgaggcgctgaacgaggacggaacctaccgcgagagcgttttctacaaggttctcggcgaggagtacatcaagcttgccttcgagaccgccgccaaggtcgaccctaaggccaagctctactacaacgactacaacctcgagtggccctcggccaagacggagggcgccaagcgcatcgtcaagctcctcaaggacgccaagatccccatccacggcgtcggcctgcaggcccacctcatcgccgagcagcaccccacgctcgacgaccacattgccgccatccgcggcttcacccagctcggcgtcgaggtggctctcaccgagctcgacatccgcctcaagaccccggccaccgaggagaaccttgccctgcagcgcgaggcctacaagaacgtcgtcggcgcctgcgtccaggtctgcggctgcgtcggtgtcaccatctgggacttctatgatcccttcagctgggtcccctacttcttcgagggcgagggtgctcccctcctgtggttcgaggacttcagcaagcaccccgcctactacggcgtcgttgaggccctcaccaacaagactcgccgctcgaagcgcagcatttcggaccgccgggccaagctcctggcttaa

SEQ ID NO: 355 - DNA, 798 bp, Scytalidium thermophilum; identical to SEQ ID NO: 70

SEQ ID NO: 356 - DNA, 1059 bp, Scytalidium thermophilum; identical to SEQ ID NO: 71

SEQ ID NO: 357 - DNA, 1446 bp, Scytalidium thermophilum; identical to SEQ ID NO: 72

SEQ ID NO: 358 - DNA, 732 bp, Scytalidium thermophilum
atgaagactctcgcatccgccctcattgccgcgggccttctggcccagcacgccgctgcccatgccattttccagtttgccagcagcggtggcactgactttgggacgtcctgtgttaggatgccgcccaacaactctcccgtcacgagcgtcaccagcagtgacatggcttgcaatgttggcggatctcgcggtgtatctggcatttgcgaggtgaacgccggctccgacttcaccgtcgagatgcacgcgcagcccaacgaccggtcgtgcgccagcgaagccattggcggcaaccacttcgggcccgtcatggtgtacatggccaaggtggacgacgcgacgcaggcggacggtgcgtcggcgtcctggttcaaggtggacgagttcggctacgacgccggctccaagacatggggaaccgacatgctcaacaagaactgcggcaagcggacgttccgcatcccgagcaagatcccgtctggggactatctggtgcgtgcggaggctatcgctttgcacaccgcgggccagccgtcgggtgcgcagttttatatgagctgctatcaagttcgtatcaagggcagcaacaacggtcagcttccggctggtgttcggattcctggcgcctacagcgcgacggacccgggcatcctcgtcgatatctggggtaatggtttcagccagtacactattcctggccctcgtgtcattgatgggagctttttctga

SEQ ID NO: 359 - DNA, 1473 bp, Scytalidium thermophilum
atgcgttctgtttcccttcttgcggccgctttcgcgccgctggctacggcacacacggtctttacagctcttttcatcaacaacgtccaccagggcgacggcacttgcgtccgtatggctaagcagggcaacctcgccacccatcccgtcagtctgaacagcaatgagatggcctgcggtcgcgatggccaacaaccagtggcatttacttgcccagcacctgcgggagccaagctgaccttattgtttcgtatgtgggcagatggctctcagccaggttccatcgacaagtctcacgttggtcccatgtccatctacctcaagaaagtctcagatatgaacaccgactcggccgcagggcccgggtggttcaagatctggagtgagggctacgacgctgcgacgaagaaatgggccacggagaaactcatcgccaacaacggtttgctcagcgtcaacctacctcccggcctccctgcaggctactacctcgcccgccacgaagtcgtcactctccaaaacgtcaccaacaacaaggccgatccgcagttctacgtcggctgtgcgcagctgttcgtccaagggttgggcaccgccgcctccgtacctgctgacaaaaccgtttccatccccggccatctgaaccccaacgacccggcgctggtattcaacccctatacccaaaacgctgcgacatacccaagcttcggcccaccgctcttcttcccaagtgctgcttcggcgggatcaaacaaggcccagtcaacactcaagcaaacctccggcgtcatcccctccgactgcctcatcaaaaacgccaactggtgcggccgtgaagttcccgactataccaacgaggcgggatgctggacggcggcggggaactgttgggagcaggctgatcaatgctacaagacagccccgccatcgggccataagggatgcaagatctgggaggagcagaagtgcaacgtcatccagaactcctgtgaagcgaaacggttttctggcccgccaaacaggggggtcaagtttgctgatatggatgtgaatcagcctgttccgtgggcgatccccgaggcagtgaatgctggacagcagggggaggcggttgttgttgacggcacaacgagctcggcggatgagaaggcgagcgagaatttgacgacatcgtctctaccgacgccgacgcctgcggcagaggaaaacgagaaggaggatgaaagactgactcttgatccgaccctgacggaggacgagtcgtttttctcagttgagccaacgtctgagcctactggtgttcaggttgaggtgcctttgacaactgtggtcctcctgccaacgctcacctcatctttgaattcattgccaaccccgacctcaatttcccagccggctcaccccggaagaccatgcacaggtcgccgtcgtaggccgaggccaggttttccgaaacacccgcgcgatttttaa

SEQ ID NO: 360 - DNA, 939 bp, Scytalidium thermophilum
atgaagttcctcagctacttctcatccgcgctcgccctcctgggcagcgccgtcactgcgcaccccgtcttcaacgagttgatgacgccggtggcgccgttgaagcgcgctacgggagctttccagcaggttcccaacttcggacccaacccgtcgggggctaagttcttcctttacactcccaaccggattgcggagaaccctgccatcgtcgtggccattcactactgcaccggcacggccagggcgtactacagcgggtcgccctatgcgcagcttgctgaccagaagggcttcattgtcattttccccgagtcgccctacagcggcacctgctgggatgtctcgtcccggtcgacgctgacgcacaacggcggcggcaacagcaacgccattgccaacatggtgacgtggacgctcgagaggtataacgctgatcccaagaaggtcttcgtcgttggcgagtcctcgggcggcatgatgaccaacgtcatggcggccacgtacccggagatgtttgccgcgggtatcgtctactcggggacgccggccgggtgcttctacagccagagtggtgccgtcaatgcctggaacaacacctgctccaatggccagatcaacagcacgccggaggtttgggcaaagatggtcttcgacatgtaccccggctatgacggcccgcggcccaagatgcaaatctaccatggctcgaacgacaatatcctccatgccaacaactacagggagaccatcaagcaatggtgcggcgtgtttggctacgatcccaaccggccggatactacgcagtccaacacccctcagtggggttacaccacgtacacctggggtaacggccagctggtgggtgtttatgctcagggcgttgggcacagcgtgccgctccgtggacaggacgatatgaggttcttcgggttgtga

SEQ ID NO: 361 - DNA, 1356 bp, Scytalidium thermophilum
atgcggttcttgtcacttactgttgtggcgacgctctcgcgcctagtttcagcttctttgcagatcgtgcctggagggacctggaccacatccgacggcgagcatctccaagcacacggcgccgggtttgtttacgaaaatgggacatactacatgatcggcgaggacaagagcggcggccacagtttcactaatgtcaactgctatgcctccacggacttggttcaatggaccaaagtcggcgccttgttgtcgcagcagccgtctggggaccttggcccgaaccgcgtggtcgaacggccgaaggtgatctacaacgaccgcacacggaaatatgttttgtggatgcacatggatagcagcaactatggcgaggcgcgcgttgcggtagccactggcgatagcgtgtgtgggaggtaccagtatattcggagtttccaaccacttgggaggcaaagccgtgacatgggcttgttcaaggatgatgacggcaaaggctacctactaactgaagatcgccagcacggcctccgcattgtggccctctccgacgactacctcaaccccacgcaagatgtcttttcatggcgtctcgaaggcggaaaccgcgtcgaagctccggccatggtcaagctcggcggcacatattacctcttcgcaagcatgatgacgggctgggactccaacgacaaccagtacacgacagccacaaacctgcgcgggccgtggtctccgtggaggaagttcgccgactctgggtccaatacttacaactcccaaaccacttacatcctgaaaaccagcgagaacagcgccatctacatgggcgaccgctgggtcaaggacaacctgatggctagcacctacgtctggcttcccttacaaatcagcggcacgaccgtgaccatgaagaaccgcgtcaactgggtccctaccaaccagcccgccttctggacagccggccctaccgagacccaatacgagggcgagaatgcgatctatggcggcagagcgcgcactgtcgattgttctcagtgctcaggcaagcgggcggcagggtacatcggcgggccggatcggggcaccgtcacgttcaccggcattcgcagcgacatcgacggtatgaccacaatccggatcaagttcctcaatggcgacagcacaccccgctacgcctgggtgcgggtgaatggagatgccggaaggaaggttgctttcctgactgcgaggggcgatccggcgagcagcacgctccacgtctccttgaggaggggcaacagtaacaccatcacatttgagggatacaacggcggttggggcccggatattgaccggctgatggtgccagtgtcttag

SEQ ID NO: 362 - DNA, 1338 bp, Scytalidium thermophilum
atgcgcgtttctcttgcgatcctcgcctacctgctcagcgccgccggcgcctcgcccgtcccggagctcgagccccggcagtccggcaaccccttctccggccgcaccctgctggtcaactcggactatagcagcaagctcgaccagacgcgccaggccttcctgtcccgcggcgaccagaccaacgctgccaaggtcaagtacatccaggagaaggttggcaccttttattggatctccaacatcttcctcctgcgcgacatcgacgttgccatccagaatgcgcgcgccgctaaggcccgcggcgagaaccccatcgtcggtctcgtcctgtacaacctccccgaccgcgactgcagcgccggcgagtcctctggcgagcttaagctctcccagaacggcctgaaccggtacaagaacgagtacgtcaacccgttcgcccagaagctcaaggccgcgtccgacgtggagttcgccgtcatcctcgagcccgatgccatcggcaacatggtcacgggcaccagcgccttctgccgcaacgcccgcggccctcagcaggaggccatcggctatgccatctctcagctccaggccagccacatccacctctacctggatgtcgccaacggcggctggctcggctgggccgataagctcgagccaactgcccaggaggtcgccgccatcctccaaaaggccggtaacaacgccaagatccgcggcttctccagcaacgtctccaactacaacccctattccaccagcaacccgccaccctacacctcgggcagcccgtcgcccgacgagtcgcgctacgccaccaacatcgccaacgccatgcgccagcgcggcctgccgacccagttcatcatcgaccagagccgcgtcgcgctcaacggcgcccgcagcgagtggggccaatggtgcaacgtgaaccccgccggcttcggccagcccttcaccaccaacaccaacaaccccaacgtcgacgccatcgtctgggtcaagcccggcggcgagtcggacggccagtgcggcatgggcggcgccccggccgccggcatgtggttcgacgcgtacgcgcagatgctgacgcagaacgcccacgaggagatcgcccgcggcgccgccggcagcggtggtggcaacaacggcggcggcaacaacaacccgtccccgaccaacccgaccaacccgggcccgaccagcaacccgggcggcggcaactgcgcgagcaagtggggccagtgcggcggtcagggatgggccggcccgacctgctgcgaggctgggtcgacttgcacccgccagaacgagtggtactcgcagtgcctgtaa

SEQ ID NO: 363 - DNA, 1263 bp, Scytalidium thermophilum
atgcctctcgctctatttcatcttgccctccttctcttctgggccccatacaccgctgccgccccatccaacaacatccagaaacgctccttcaagctcgaccgaatccggaatccaaacttccaacgccatgggcctcggcagctcttgaacgcctatcagaaatatcgcatgcccattccccaggacctcttgaatgccctggagaccggcgacgaggatgccacttctgaccaccggcccgcttcagcgagcagctttagactcactgaggccagcggctccagcaccggcagggtcccggccacgccagccaacggaggcatcgagtacgtttctcccatagagattggtggtcaaacggtccatgttgccatcgactcaggttcggcagatctttgggttttcagtaccctgcttccccctttcgccagagccggccatcaagtgtacgatcctgctcgctctgcttcatccagagtcctcccaaacgccaacttctccatctactatggagatggcaccagcgcctcgggcgttgtggttctcgatacagtgaatgtgggcggtgcgtatgtgaggaaccaggccgtgcagatggccaactgggtctcggcaacctttgttcaggacaagagcctcagcggcctcctcggtcttgctttctccaagctcaacacggtgaagcccgttcggcaagccacgtttttcgaaaatgtcatgcccttccttgcccagcccctctttaccgctgatcttccccacgacgccgtcggtgcctttgagtttggctacatcgacacaaacaagtttgtgggccctctgacctgggtccaagcagatacagctatgggcttttggcaggtctcgacctccttttttcgcgtgggtgacgtcgagacccagcacgcacctggacaggccatcatcgacaccgggaccacgctcatgttggtttcccaagaactcgttgatggctactaccagcacgtcccagacgctcacaggagccccgtctatggcggtatcgtatttccctgcaacacgactctgcctgatctttggcttgacgtgggcggcgttcatatggctcgagtccgaggttctgacatcaattttggtccgctcaaagatggattgtgctatggcggtctccagcgaactacctccccgttgcaaatatggggtgacatcttcttcaggtcgcagtttgtcgtttttcatgggggtaaccactcgctgggactggcacctcgtgcctga

SEQ ID NO: 364 - DNA, 2202 bp, Scytalidium thermophilum
atgggtatcttcggtctcgcattgctggccgccgcggccattgcccgggccgcgcctaactgccctgtggtgccccgccaggcatcgggcaccgctgcttgggatacggcgtacgcctcggccagagccgccgtggcccggctttcccagcaggacaagatcaacattgtcaccggtatcggttgggagaggggcccttgcgtcggcaacacggcgcccgtcaactccatcggctatcctcagctctgcctccaggacggtcccttgggtattcgcttcgccacgggcacgaccgcttttacccccggtgttcaggcggcgtccacctgggatgttgacctgatccgccagcgtggtgagtacctgggcgcagaggctcgtgctgtcggtgttcacgtgctgctgggtcctgtggccggcgccctcggcaagattcctcatggtggacgcaactgggagggtttcggctcggacccgtacctcgcgggtatctgcatggctgagaccatcgaggccattcagtcccagggtgtccaggcctgcgccaagcactacatcgtcaacgagcaggagtggatgcgtgagacgatgagcagcaatgtcgacgaccgcaccatgcacgagatttacctgtggcccttcgccgatgccgcccactccaacgtggccagcttcatgtgcagctacaacaagatcaacggcacctgggcctgcgagagcgacagcgtccagaacaagcttctcaagcaggagctcggcttccgcggctacatcatgagcgactggaacgcccagcacaccaccgtcggctccgccaacagcggcatggacatgaccatgcccggcaccgacttcaacggcggcaacgtgctctggggcccgcagctcaacaatgccgtcaactcgggccaggtttcgcgcgcccgtctcgacgacatggccacccgcatcctcgccgcctggtacctggtcggccaggataagggctacccgcaggtcaacctccgcctcaacgtccagggcaaccacaaggagaacgtgcgcgctgtggctcgcgacggcatcgttctgctccgcaacgagggcaacatcctgcccctcggccgcccgtctcgcatcgccgtcgtcggctctggtgccgtcatcggccgccacgcccagaacggctgccaggacaagggctgcaacgacggcgccctcggcatgggctggggctccggttccgtcaactacccctacttcgtcgccccctatgacgccatccgcgagcgcgccagccgcgacggcacccaggtttctctccacagctccgataacaccaacggcgtccagaacgtcgtccagggcgccgacgtcgccatcgtcttcatcacggccgactcgggcgagggttacatcaccgtcgagggccaccccggcgaccgcaaccacctcgacccctggcacaacggcaaccagctcgtgcaggcggtggccgcggccaacaagaacaccatcgtcgtggtgcacagcacgggccccatcattctcgagaccatcctcaacacgcccggtgtccgcgctgtcgtctgggccggtctgcccagccaggagaacggcaacgccattgtggatatcctctacggctcgacctcgccgtcgggtaagctcgtgtacaccatcgccaagcgccctgaggattacggcgtcagcatcgttcgcggcgatgacaacttccgtgagggcgtgtttgtggactaccgctggttcgaccagaacaacatcgagccgcgcttcgagttcggcttcggcttgtcctacaccaacttcagctactccggcctctccatcacctccaacgcgcgcgctggcccggccacgggccagaccatccccggcggccccgccgacctatgggagacggtcgccaccgtcaccgcccagatcaccaacacgggcggcgtcgccggcgccgaggtcgctcagctctacctcaccctgccgccgactgccccgcccgccggcccgcgtcagctccgcggcttcaccaagctcaagctccagcccggccagaccggcacggccacgttcaagctccggaagagggatctcagctactgggatgtcggtcggcagcagtgggttgtcccttcgggcaggtttacgattagtgtcggtgctagctcgagggatattcggttgacgggcagcattgatgtttaa

SEQ ID NO: 365 - DNA, 1380 bp, Scytalidium thermophilum
atggtcgaccactcgggaacattgtctgtttcgtcttcggaggctcggaaggtgctccgtggtggtgtgaagggggaggtgaaggaaggacataagaaggcggccgtgatcgcctcctcgctggcttggggcttcttcttggtcaccgtcgttcacggcctgggttgtagatcgtcctgctccctagaaaccagtcactcattcataatgcgttctatcgctctcgctcttgctgcggctccggccgtcctcgcccagtcccagctctggggccagtgcggcggcattggctggaacggccctacgacttgcgtctcgggcgctacctgcaccaagatcaacgactggtatcaccagtgcctgcccggcggcaacaacaacaacccgcccccggccacgacctcccagtggacccctcctcccgcccagaccagcagcaatcctcctcccaacaacggcggcggtggtggcaacactctccatgagaagttcaaggccaggggcaagcagtacttcggtactgagatcgaccactaccacctcaacaacaaccagctcatggagattgcccgccgtgagttcggccagatcacccatgagaacagcatgaagtgggatgctactgagccgagccgtggcagcttcagcttcggcaacgctgaccgcgttgttgactgggccacttccaacggcaagctgatccgtggccacactctcctgtggcactctcagctcccgcagtgggtgcagaacatcaacgaccgcaacaccctcacccaggtcattgagaaccacgtcaagaccgtcatgacccgctacaagggcaagatcttccactatgacgttgtcaatgagatcctcgacgagaacggaggcctccgcaacagcgttttctctcgtgtcctcggtgaggacttcgttggcatcgcgttccgcgctgcccgcgccaccgaccctgatgccaagctctacatcaacgactacaacctggacagcgccaactacgctaagacccgcggcatgatcaacctggtcaacaagtgggtttcgcagggtgttcccattgatggcattggcactcaggctcacttggccggtcccggtggctggaacccggcttctggtgtccctgctgctctccaggctcttgctggcgccaacgtcaaggaggtcgccatcaccgagctcgatatccagggcgctggtgccaacgactacgtcaccgtcgccaacgcttgcctcaacgtccagaagtgcgtcggtatcaccgtctggggtatctcggaccgcgacagctggcgctcgaacgagaacccgctgctctacgacggcagctaccgcccgaaggctgcttacaacgccctgatgaacgctctctaa

SEQ ID NO: 366 - DNA, 1602 bp, Scytalidium thermophilum
atgcgtaccgccaagttcgccaccctcgccgcccttgtggcctcggccgccgcccagcaggcgtgcagcctcaccaccgagaggcacccttccctctcctggaagaagtgcaccgccggcggccagtgccagaccgtccaggcttccatcactctcgactccaactggcgctggactcaccaggtgtctggctccaccaactgctacacgggcaacgagtgggattctagcatctgcactgatgccaagtcgtgcgctcagaactgctgcgtcgatggtgctgactacaccagcacctatggcatcaccaccaacggtgattccctgagcctcaagttcgtcaccaagggccagtactcgaccaacgtcggctcgcgtacctacctgatggacggcgaggacaagtatcagaccttcgagctcctcggcaacgagttcaccttcgatgtcgatgtctccaacatcggctgcggtctcaacggcgccctgtacttcgtctccatggacgccgatggtggtctcagccgctatcctggcaacaaggctggtgccaagtacggtaccggctactgcgatgctcagtgcccccgtgacatcaagttcatcaacggcgaggccaacattgagggctggaccggctccaccaacgaccccaacgccggcgcgggccgctatggtacctgctgctctgagatggatatctgggaggccaacaacatggctactgccttcactcctcacccttgcactatcattggccagagccgctgcgagggcgactcgtgcggtggcacctacagcaacgaccgctacgccggcgtctgcgaccccgatggctgcgacttcaacgcgtatcgccagggcaacaagaccttctacggcaagggcatgaccgtcgacaccaccaagaagctcaccgtcgtcacccagttcctcaaggacgccaacggcgatctcggcgagatcaagcgcttctacgtccaggatgggaagatcatccccaactccgagtccaccatccccggcgtcgagggcaactccatcacccaggattggtgcgaccgccagaaggttgcctttggcgacattgacgacttcaaccgcaagggcggcatgaagcagatgggcaaggccctcgccggccccatggtcctggtcatgtccatctgggatgaccacgcctccaacatgctctggctcgactcgaccttccctgtcgatgccgctggcaagcccggcgccgagcgcggtgcctgcccgaccacctcgggtgtccctgctgaggttgaggccgaggcccccaacagcaacgtcgtcttctccaacatccgcttcggccccatcggctcgaccgttgccggccttcccagcgatggcggcaacaacggcggcaacaccaccgtccagcccccgcccagcaccaccaccacctctgccagcagcagcaccacctcggctcctgccaccaccaccaccgccagcgctggccccaaggctggccgctggcagcagtgcggcggcatcggcttcactggcccgacccagtgcgaggagccctacacttgcaccaagctcaacgactggtactctcagtgcctgtaa

SEQ ID NO: 367 - DNA, 1242 bp, Scytalidium thermophilum
atggtccggtccttcgccgccctcctcgcggtagccgccgtccgggtggccgcccagacagaaaccaccacctctgagctgccatggccaactgacaatctgcctacctacaatggcacggggccgaccatgctccggttcggttgccaccagctcgtcattgaccgtattgatcctctcgtggctcctggccaggtgccttcgcaccaccagcaccaggtcgtcggcggcgatgccttcaacccgaccttgccgtacacagacctctcggccctctcgtcctgcaccacgtgcagctacagcgaggaccgttccatgtattggacggccaacctctacttccgggcgcgcaatggctcgtacaagcgcgtcaagcagatccccaactactccgacatcttcacccacgacaccttcatcaaccggaccaatggcggcatgaccgtctactacgtctcccctggccagaaccaggtcactgccttccctcccggtttccgcatgttcgtcggcgacgccatgctgcgctccccgccgagcagcccttacgatttgaccacccagaactgctaccgctgcttcaccggccccaactttgaaggcgacatttaccgcccgtgcaccgaccctgccgtggatacgatgcacctccctaacaagatgtgctggggcatccgctccaacattgtcttccctacctgctgggacggcgtcaacctcgactcgcccgaccacaaatcccacgtcgcctaccccgtcgaagggccgcacgtcttcgacggcatcggcaccgccgagacctgccccccaacccacccggtcaagatcccccaggtcatggtggagatcatctgggacacgacgcccttcaatgacccagacctgtggcccgaggacggctcgcagcccttcgtgctcagcacgggcgacacgacgggctacagccagcacgccgactacgtgttcggctgggagggcaacgccctgcagaccgccatggaggccggctgcttcatgggcaactgccccggtctggccgtgcagacggtcgaggaggccgccgagtgcgttgtcggtgaggttgctggggatgattatgatggctggctggatgagctccccggtaacccggttcagccgcctgtgaccaccaccactactgcggcgccagagccaactggcaagggcaagggcggcaagggaaagaagggcaagaagaggtccttgatgtggtcggcctga

SEQ ID NO: 368 - DNA, 1221 bp, Scytalidium thermophilum
atgcacaagtcccataccgttgccgcggctctcgccgctggcttccgcttggcagcagccgctccttgcccaagtggtaatgccggagccccatccgcatccgactacctctgggttgccagttatcccatcatctggaaccaacagggcaagctcatcacccttcaactcgacgggtcaaacctcaagacgatcgacgcctcggatgcctgcggcacccatcctgcgtgggtaactcaagccggcgacactctctactgcgtcaacgagtggtggggtggtgcaaatggcacactctcgaccttgagcgtcggcagcgacctgagcctcacgaagctgggcgaggctaagactcttcctgggccggtgagcacggctctttatggcaaagatggccatggtctggctgtcgccaattacgctggaagcggtatcaacgcctacaacgtcgaggatccgtcggccattcagttgctccagaccgaatattatggttctcctggcgacaaccagccgtcaccccaggatgtggcgcatcctcaccaggcagtcgttgatcctacgggagagttccttgtctttcccgatctgggtgccgacaggatccgcgttttcaaggtgaaccaagagacgctcgcgctcgagaccaaggagggtttcgtgtatccgccagaggagcgtggcactggccctcgtcatgtcgtcttttacaaggccggcgacaagaccttcctctacgtcgcctgcgagctcaagaacctcgtccagggtttcgccgtcgaatactcggatggtgatttgaagctcacccgtatctttaacaccaccactcacggtgatgataagccacttcctgccggcaccacggctgccgagatcctcctctctccggacaacaagttcatcacggtgtcgtcgcgcaacgaaaagtccctcgagttcaccctcgccgacggcaccaccgtggcctcggaccccctcgtcacattcaagatcgacccggcgtcgggcgccctggaattcgtccaggaggcccccgccggcggcgtcaacccccgccacttctcgttcaacaaggacggcaccctcgtcgccagcgccctgcagtccgacagtcgcatcgtcgtctttgagcgcgacgtcgcgacgggcaagatcggcaaggccattgccgagggcaacgtcgagggattccccaactttgtcatcttcaaggagtaa

SEQ ID NO: 369 - DNA, 672 bp, Scytalidium thermophilum
atgaagctcctcctccccgccctcctggctctggccgccgagtccgtctcggcgcactacatcttccaacaactcaccgtcgccgggaccaagtaccccgtgtggaagtacatccggcgcaacagcaatccggcgtggcttcaaaacggccctgtgaccgacctcgcctcgaccgacctgcgctgcaacgtaggcggacaggtcagcaacggcaccgaaactctcacagtccgcgcgggcgaccagttcacgttccacctcgacatggcggtgtatcaccagggcccgacctcgctgtacatgtcacgcgctccggggaaggtggaggactatgatggcagcgggccgtggtttaagatttatgattgggggccgacggggaataattgggtcatgagggattcgtacacgtacaacatcccccgctgcatccccgacggcgagtatctcctgcgcatccagcagctgggtctgcacaacccgggcgccgcgccgcagttctacatcagctgcgcccagatcaaggtcaccggcggcggcaccaccaacccgacccccacggctctgattccgggagcgttcagggctacggatccggggtacactgtcaacatctacaacaccaacttggccaactatgttgtgccgggtccgcgggtgttctcctgctag

SEQ ID NO: 370 - DNA, 1410 bp, Scytalidium thermophilum
atgagccggctcctgacggcattccgccgctgtctctcctccgtcgccaccaccgcgccgtccccaggaccaactaccaccacagtcctacgatcatccgtctccgcgtcgagcatagctgctgtcactgctgccagcatggtcgcatacacgagcgccgtggccgttctcgacccggctggtgacatccccgaggatggccgcaacaaaatccaccatgtcaaggatggctccgggaagacagtcaagttccagaacccgtacccctcggctgcgagggagacgtcgccatggagtattgcgcctaagatcctttggctcaccatcaccggaaaactaaagatgcccaaacccgacccttccaagcccgagacgttgggcgtcagtgtcgtcacccccaatctcccctccgcagacgcaacccgcaccccaccctcgaaactccgcgccacttggctcggccatgcgtgttacttcgtcgagttcccctcagggctacgcgtgctcttcgaccctgtttttgagtcgcgttgcggtccgcacggcatcctcggtcctccacggtacacaccgcctgcatgctcgctggctgacctgccgcccgtcgacgctgtgattatttcgcattcgcactacgatcacctctccctgggttcggtcaagacgttggctgcgaggaatccacaagtgcagttctttgttgggctggggctggcaaagtggttccgctcgtcgggcattgagagggtgacagagatggattggtggcaggatgcggagttgacgttgacgaagaaggaagaagggcgagaagcgaaggcggaggaggggaatcagggacaacagtcaacaacaagcccagatgtttccaaccctgcctcaacaactcccaactccattaccgctcgcatcacctgcctcccctgccaacacgcttcgggccgcaccggcttcgatttcgacaccaccctctgggcctcctggtccgtcaaatccggcgacaaatccgtctggttcgccggggacacgggctatcgcctgcacaccgccgactcggccgaagaggcgcacaaggacgacaacacacccgatgtggtaatcacgcactgcccgcagttcaagcagatcggggagctccgcgggccgtttgatctggccctgatccccatcggcgcgtacaggccccggtatttgtttagctggatgcacgccgatccgtacgacgcggtggatatctttcgggatacgcggtgcaggagggcgttgggcatgcattggggcacgtgggtgctgacgtatgaggaggtggatgagccgccaaggttgttgaagaaggcgttgaaggagagggggttggaggaggaaggggtgtttgaggtttgtgggattggggagacgagggagttttag

SEQ ID NO: 371 - DNA, 1827 bp, Scytalidium thermophilum
atgaggctcctcaccttcacatcgctacttgtcctaaccgccgcgcacccggcgcgctactcaaaatggaggccatcatgctcggagattgagacgccgtcaccgtcaagcgaagcatcgatcactacagaccctccagagcccagcactactactcccgtgatcacgcacatattttcatacatcagcacctcgtctgctgagcctaccgggtcatggattcctcccgaggagaccgatagcactgcttcggaatcgacaagctcatccgcagagaatgagatctcgacgcagtccgacgcgacgtctgtttcgacagtttctactgagattagcaccactgaagaaccgccgacgaccacgttcacggagcctgagacatcgaccctgtctgaagagccgtcaacttccgaggagcctgttaccactacgtcggcttctgaggagccaacgactacgccggtttctgaggagccaaccactaccccagtgtctgaggagccgacgactatgccggtttctgaggagccgactactgtgccaacgtccgaagaacctaccacggctgttccgacttccgaggaacccactgctgtgccgacatctgaggaacccaccactgagccgacatcagcgccaacggctagtcccacatgccccgagcccgggactggtccacggcggttcaaggggtccgtctccgatgtggccaacatcggctttgccacgctcaacgggggaacgaccggcggagctggcggtaaggtggtcgtagtgtcgactctgtccgagttctcctcggctgttagcgagaagaacacggagcctgtcatcgtcgtcgtcaacggcaccatcaccggcaacaccaagatcaaggtcgggagtaacaagaccattatcggcctgccgggctccggcttcgtgggaatcggcctcaccttcaaaaaccagcgcaacctcatcctgcgcaacatcgtctcctccttcgtcgaggcggccaacggcgacggcctcaccatcgacgccagcaccaacgtctgggtcgaccactgcgagttcttttcgactctggctgtcgacaaggacaagcacgatgggctggtggacgcgtcccacggggcggactttatcaccatctctcacacctacttccacgaccactggaagggctccctcgccgggcacaacgacaacaaccacgccgaggacgtcggcaagctgcacatcacctacgccaacaactactggtacaatatcaactcgcgcggccctctgttccgctacggcactggccacgtctacaactcctactatacaggaatggcctccgccatcaactcccgcatgggcgccaagatgctcgtgcaaaacaccgtattccgcaacgtcaacgtgcccatcacgagccgcgactcgagcgagctgggctacgccacggtgcttgacagcgatctgggcggacggtacaacgacgcgcccgaggcggccatgggcgtctgcgagatcgggtatccgtatacgctgattccgacggagaaggtcgctgaggttgtgcagaagacggcgggcgcggtattggggttggtggagtttgaggaggacggggagggggagtgtttggtgagtgaggaggaggtggaggaggttgcgggggcgaggagggtttgtggggaggaggaggaggagagtgatggggaggagggtgaggaaggtggtgaagagtgtgacggagaaggtggagaggacggtgagggtggtgaggaggagggagacggggagaatggtgaagagggtggtgaggaggacggtgaggatggtgatgagtga

SEQ ID NO: 372 - DNA, 909 bp, Scytalidium thermophilum
atggtatccttgggcttccatcagttgtttctatatttcgtcgcagcatccctccccgccgcctccgctctcccagcccttgctcccaaagacaccacctcgcaagagtacatcgccaatggcgtccctctccgcatcatgcctctcggggcatccatcacctacggcatgggctcgtccgacaacaacggctaccgcgccgagctgcgcagcatgcttctctccccgaccaccaacctcccgcacgccgtctccgtcaacatggtcggctcgcgacgaaacggcgccatgatcgacaacgacgtcgaaggctggtccgggtaccggatcgaccaggtccacgcggtggccaaagcctcggtgcccgcgtggaagccgaacctggtgctggtgaacgcgggcaccaacgacgctgcgcaaaaccacgacatcccgcacgccggggagaggatggagcagatgctggccgacgtctgggtcctcagcccgcgcgcgacggtgttgctgagcacgcttctgctcaacaccaacgaggatacggagaggaacgtggtggagatcaatgagcagtatgccaagctggcggagaagctcagggaggagggcaggaggatcgtgctggtggacatgcatggccccgaggggccgctggctgaggatctgccggataatacccacccgtcggatgaagggtacaggaagatggcgaggctgtggtacaagggcatcgaggaggcgtccaacatggggttcatccagccgccggaggccgtggatgggctgccggacgacggcgaggtgcaatatagacgcggcgcagacgcaaaggggggcgcggtggatgcggcttgtcactacctgtttgggatgggcgaatggttgggttgggttccggtttgggttggataa

SEQ ID NO: 373 - DNA, 708 bp, Scytalidium thermophilum
atgaagttcatccacatcctcggcgctgccggccttgccgcatcgctgcccagcgaccctgtggttggaagaaacgataccagagctttcaacgaaatccataatgtccatatccagcaaggcatcgtccggaatgatctggtcaacggcaatcctggatcctgtcccaccgccatcttcattttcgctcgcggcacgagcgagtttcttaacatgggggtcgtcgttggtccgctcgttgccaaaaccctcgagaacaagatcgccaacatggccgacgatgccaccctctgggtccagggcgtcggcgtcccttacacagcaagcatcatcgacagcgtgagccctctccgcacctcgcaagacgccatcgacaaggcgatcgagctcttcaacagggccaacgaactctgcgccgacactccgatcctagcagccggatataatcagggaacggcggtgattgcccgcgctatagaagacctagaccagtctgtgatagaccagatcgccggcgtcgcgctgttcgggtataccttgaaccgccaaaacagcggcctgatcccgggatttccggaagaacggacgcaggtgtattgtaggtggtttgacctcacatgccgcggcgtactggtcccttactcgtcgctttatctgcatgaggcgcaccatgaaggtccggactttttggctgggcaacttccctga

SEQ ID NO: 374 - DNA, 687 bp, Scytalidium thermophilum
atgaagttcttcgctatccttagcaccgctagccttgttgctgctctccctgccgctgtcgactcgaaccataccccggccgctcctgagcttgttgcccggcagctcggagccatcgagaacggcctcgagcgcggcaacgccaacgcctgccccgacgccatcctgatctttgcccgcggctcgaccgagccaggcaacatgggcatcaccgtcggccccgctctcgccaacggccttgagtcctccatccggaacctctggatccagggcgtcggcggcccttacgacgccgcgctggccaccaacttcctgccgcggggcacctcgcaggccaacatcaacgagggcaagcggctgttcgcgctggccaaccaaaagtgccccaacacgcccgtcgtcgcgggcgggtacagccagggcgcggcgctcatcgccgccgccgtcagcgagctcagcggcgccgtcaaggagcaggtcaagggcgtcgccctcttcggatacacccagaacctccagaaccgcggcgccatccccaactacccccgtgagcggaccaagatcttctgcaatgttggcgatgccgtctgcaccggcacgctcatcatcaccccggcgcatctgtcgtacacagtcgaggcgcgcggtgaggccgctaggttcctgcgggatcgcatccgtgcttaa

SEQ ID NO: 375 - DNA, 1233 bp, Scytalidium thermophilum
atgaaggcctccgtgctcgccttgttgctcccggctgtcgccgctcgctttgtcgagcccaacgagccgaaccgcgtccatctctaccccaacggcgtccccgagtcttccgaatctgtcgagaagtatcacatcgagctggctccgggagagacccgctgggtcaccgaggaggagaaatgggagctgcgccgccaaggcaagcgcttcttcgatatcaccgaccatcccgacctgggcgcccttcgcgcgaggagcctagctaagaagaaggccgtcttccctcccaagccggcccttcagcccgaggtcgagccgctcctagccaacctgtccaagtccgagatggaaacccatctgaccaagttcacatccttccacacccgctactacaagtccgaatggggccgcaaatccagcgaatggctcctccagcaggtccggagcaccatcaaggacgccggcgccgagggcctcgtcaaggctgagccgttcaaacacccttggggccaaaactccatcatcgccaccatccccggcaagaccaaccagaccatcgtgatcggcgcccatcaagactccgtcaacctgtggctacccaacatcctcgccgctccgggcgccgacgacgacggcagcggcaccgtgaccatcctcgaggcgttccgcgtcctcctgcagtccgacaaggtgcgcaacggcgagagcgagaatacgatcgagttccactggtacagcgccgaggagggcggtctgctcggcagccaggccgtcttctcggcctacgagcgcgccggccgcgacgtcaaggccatgctgcagcaggatatgacgggcttcgtcaagcgcacccttgaggcgggtgagcccgagagcgtgggcgtcattgtggactttgttgaccccagcttgactgatttcatcaagaaggtcattgaagagtactgctccatcccctacgtcgagaccaagtgcggctacgcctgctctgaccacgcctcggcctccaaggccggctacccctccgccttcgtcatcgagtccgccttcgagtactcggacaactacatccactccacggaggatgtgattaagcacctgtccttcgaccacatgctgcagcacgcccgtatgaccctggcttttgcctacgagctgggctttgccgactttgccgcgctggaggcgggcgaggagggacagacgggaccggaccattcggattcgttgtag

SEQ ID NO: 376 - DNA, 873 bp, Scytalidium thermophilum
atggtcgcctcatcgccgttcaagggcgctctgctgctggccctcggtggcctctcgcagcgggccgcggccgcttgtactcgcaccatcaccgcccagccgggcgactcgtgcgcatcgcttgctcgggccgccgggatcaccatgaccgacttcctccgctcgaacccggacgtgtacgactgcaacaacctcatccccggctacgcctactgcgtccaaggagtcgcggaccccggcagcggcggctcccagcccatcagcaaggatggccgatgcggcgggggcgtcacctgctccaactcgggcttcggcgattgctgctcccaggccggctattgcggaagcaccctcgaccactgcggcaccgggtgccagccgcaatggggcgtctgcctcggccccggcggcggcagcagcagcagcgctagacccagcacgacccccggcggcggcaaccccggcggcccctcgaccgtgaccgtcacagtgacccggaccaccggcgcgtccaccgtcacaacgacgcgcaccgtgtcggcgtcggccacttcgacagtgagattgacaagcatcattaccagtgtgtcaaccatcacctctgtttctacctctacgcgcttagtcacggccacgacgtgcgttggctcaccgactactgtccgtacaacagcgacgccctcgccgaccggtcgccccattatcccgggcacgccaacgaactgctggagttacgaccaaatcctcaccggcgattcatgccgcagtttggcgcagaggaacggccttactttgttggacttctatgccatgaatcctcagatcgattgcgacaggttgctggttgggtggtacgtctgtgtgaggagataa

SEQ ID NO: 377 - DNA, 1005 bp, Scytalidium thermophilum; identical to SEQ ID NO: 92

SEQ ID NO: 378 - DNA, 861 bp, Scytalidium thermophilum
atgcgtctccctacctctctcaccctcatagccgccctgctcgtcccggccatctcagcctgggacgccccctattacgatggctggcaccttgcctggtcggatcctttctggggaccggcgggtaccttccccgacgaagccagttggaacatcttggacatcaacctgcacgtcaacaacgaactccaaacgtaccggcgcgacagtcgcaacgtgcagattagcggagggggcaccttacaactggtcccctggcgggatcccgtgttccaatggacctcgggccgcgtcgagtccaagtacacttttgtcccgcacgcggggaagaggacgatggccgaggctatgatcaggtttggcggcaatcctatacacaccaaaagggggctttggccggcgttttggctgctgggggattcgatccgacagggcacaccttggccggcttgtggagaagtggatatcctggaaacggtgaacgggttgttgacggggtatgggactgttcattgccatatgtaccccggcggcatttgcaatgagccccacggccgaggaggtccggtgggcataccgagccaggactggcaccgctggcgcgtcatctgggaccgcacgtctggcgactggagggccgaaactataacgtggttcatgaatgaccagcagtttttccaagtccgcgggagcgacatcaacgactatgaggtctgggctagcttgtctgcgaggtccttgtacttcattctgaacgtcgcggtgggcggagactggcccgggtatcccgatggaaatactcaagacgggtatggagccatgatggaggttggctatgttgcccaatactacagttattga

SEQ ID NO: 379 - DNA, 747 bp, Scytalidium thermophilum
atgacgcttcgctcgctcttcctcctgtccgccgcgaccatcctcgggcccatcagggcctccgccgaggaaatcctcttctgcggtacggcaccttactacccgtccgagtacacgtgctacgacgggcacttcctctgtccgcgcttgtacggacaggcgacgctgccatgcggcggcgcgtgctacagcccggacatgtactggtgcgacggtgcgcagcaactgcagcttctgccgcgcatggcgcagggaacacccttcaaaatcgtcgtgcaaagcgacgtcccggccctcaacaaccggcagttggaggtgtgcggactgcagtttcgcgcggggcctgatgcgcaaacgtgcgtgtactgcttcaacgcgccgccacaatatgtttgctcggagtatcagaataagacggttcttctgccctcagggtctatgtctgtgagcgttcccggtggacagtactggttcgttgaccagaccaacggccgcctgaggaccacagcagccgggaaggccgcaggagagggattgaacctggccggctttggtgttacgatttaccacgagggatacttctcgtatgatggaaccagccactggcttgcctgccgggaacctggaaatgccgaagtttatggcatctttgcacccatcccgggttctccggagggctgccatcggatcaagcttgcgacggagttgagcacggtgcccaaggagggtgcttattcgtacacttga

SEQ ID NO: 380 - DNA, 1029 bp, Scytalidium thermophilum
atgcgcttctcctggatcatcgctggcgcttcgctcgccctggccaagcccaagaaggctaactttgacaccttggtcacgtttggcgacagctggaccgacaacggccgcctgggctactacatcaacaatggtggcaaggcaccccctccgggtcagatgcaccccgagtcgaccgagacggcgagcggcggtctttcgtgggcccaatatgccgcccgtgatgccaacgctgctctcagggactatgccgtcggtggggctgtgtgctccaactcgatcgtggcgcgccacttcgccatgatcaaccggaccttcccagccattgtggatgatcagctgccgtccttcaagaccgacatcaagttcaaatccttgtatccccaccggacggcggacaacaccgtgtacgcggtgtggatcggcaccaacgacctcggctttgacgccttcctgtccgactcgcaggcgcccggcaagaccatcagcgactttgtcagctgcgtctttggcgtcctggacgagatctacaagacgggcgggcgacgcttcgtggtgctcaacgcgggcccgctcgagctcacgccgctgtacgcccacccggacaacggcggcacctatgacagcatgttctggactaccaagacgcagtacaacattacccagtactcccaaaagatccgcgagttctcgaccagcgtcaacaccatgtacgagtacggcctgcccgtcatggtacagctcaagaagcgctggcccaaggccacggtcgacctgtttgacgtgcacagcctattcctcgacatctaccagcggccgaccaagtacctgtcgaagccgtacaacgtcaacagctactaccaccagtgcgagcctgcgggcagcccgtgcgtcgacctgcctggttcgctcgacggctatatgtggttcgacgagttgcacccctcgaacaagacgagcgctattgtggccgagcacttcctcgatgtggtcgcgggtcgctccaagtatgggactcgactgcagtga

SEQ ID NO: 381 - DNA, 1191 bp, Scytalidium thermophilum
atgctcttcaagaacactcttgccggccttgccctgctcgcgggcctcgcggccgcccatccgggccacaacgtggctcaggaggctgccgagcgccgcgagtacctccagtcggtcaagcgctcgtcgctcgcccactgcgccgacaagctgcgtgcccgcggcatcgaggcccgcaacattgctcgccgtaacgctgtcgtcgagaaggctcgccagaagcgcggcatcaccaagcgcggcttcgaggacgtgctcaacaccgaccatgacaagactggccagggcttcagccgcaacaccgacccggagacgctgttcgctgggtacaactcttgcctgctgaccccggagacgaccgagggcccgtactatgtcgctggcgagctcgttcgcgagaacattgtcgaggaccaggccggtgtgccgctcctcctcgactaccaagtcgtcgacatcaacacctgcgagccgatccccgacgtgtacgtcgagatctggcactgcaacgctaccggcgtctacggcggtgtcgtcgcccaaggcaacggcgactccagcgaccagaccaacctcgacaacacctggctgcgcggcatccagccgaccaacgaggacggcgtggcgcagttcgagtccatcttcccgggccactacgtcgggcgcaccacgcacatccacatcgccgtgcacgccaacgcgacgctgctcgccaacaacacgcttggccacgagacgtttgccagccacgtcggacaggccttcttcgaccaggcgctcatcgacgcggttgagaaactggcaccctacaccgacaaccgccagccgctgaccaccaaccgcgccgactggatcatggcgcaggaggcgggtactgatggcgttgaccccgtcatggagtacaccctgctcggcgacaagctcgaggacggcctgttcgcctggcttgcgttcggcgtcaactcgacctttgtgcgcaaggtgcagccggccgtgctcctgggcccggatggcggtgtcccgaaccccaacggtggcttccccggcggcggtttccccggcggtccgggcggtcctgggttccccggcttcccgagcgggttcccgtctggcttccccacgggcttcccgaccggtttccccggcttccctcagccgactggcgctccggctccggcgccgaccccttaa

SEQ ID NO: 382 - DNA, 2328 bp, Scytalidium thermophilum
atgttgctccatcctcgtcttgtcgctggcctggctgcactatgggctgccgggggagctaacgccgcttgctcatccaacctcctggtagatgattttactcgatggacgactggccttaacaacctcgactggcagaacggagatgatgggtccatgaacgccattgccgcttcggccggccgtgttgtcttcatccccaagagcgccaattcttatttctacgaatcttttgagtgcatcctggctgcgaccgagggctatgccagcgtccagttcacggtcgaggggccggcagggggctcgttcgtcctcgaagcacagactacctcgagctgcgcagcagaccgttcaacatacaagagctcgtggtactatgtcgacggtttgacgggccagcgacagacaataaccctgcccctgagcggattcagcgatgatcccaacacgaacgcccttgtgggcttggtttggggttctttctcgcaggcgggggtgcaatggtctgttggcaacatcacgctggtttgcagcaaccctgccccgaccacagcggccccgacgacatcgacagtcagacaatccaccacagccccgattaccactggcactggcagcccgtcttcgtgcccgcatcggctgattgatgactgggagtcccagtcccgcctcaccttcctggggtacaacgccatgggccaagcgtctggagacgatggaaccatgacttcggtggtggtcagggacaaccgcctgaacctgactccgcggaacgcaaactcgcacttttggagccagttcggctgcctcgatgctcgtacgtacgggggcatctcgttccgcgttcgggccgcgcgggggacgaccttttccatcacgctgggctacgtgaactcgtgcggtgccagcaccgtccagacggtcacgcgcacgacgacgcagctggggtggaccttcgacggcaccgagcgtctgtactcgttccccttgtccgccttcgccggcctcgacacctccaagctggccatgatctatttttccggcttcaacgggggcgtggcgtttgggcccatggccttctactgcggttcgacggcgtccgagtacaacctgcctcaggccccgatcccaagccccgttacgcggtcaacatcggccgtcaacgtgccagccccgacccaggcgctcgtcatcgacactttctccaaccaggcaagaaacaacctgggcgcgtggcacgggtctgacgacgacgccgccatggggatcacctttggcaacaacgccatgaccatccaaaccaacgactcggatctgtcgtggtacacgcagctgcagggcggctgcgccgacatccgctcctacgccggcgcctacctgcacatcgccttcaccggcagcaacaagttcagcgtcgccctgcagcagcacaacgccctctgcgacgaaaccatcaagcccttcccggaaacctgggactcactcgaggctgcgcgctacctcgccacgcccaatgacatctacatgcccctcaaccacttccacatcaacttcacccgcgccatcggcttcgcactcaagggtttctacaccccgaacccgacgaccatcaccaaaatcgaaatcgtcccctccccgccggcaggctaccgcccgcccaccaaactcgcctcggggaaactcgtcttcgcctgcacccgccccaactcgatcgccttcgccatcgacgacggcgccccgcacttcacccgccgcgtcatggacatcatcaaccaggccaacatcaacgtcaccttcttcaccgtcggcttaccgctgctcgactccagcaacggcctcgccgccgcgtaccgcgagatggcggcgcgcggccaccagatcgcgctgcactcgtacacgcacccgaagatggaaggcctgccggacatctcggacatcgactgggagtactccaactccatcggcgcggtgcggcaggtgttcggcgcgagcggcgtgtcgagctacttccgcccgccgttcgggacggagggggcgcgcatgcgccagcggctggcggcgaacttgggggacccggagccgtacattgtgaactggagcatcgatgtggaggattggttgtgggcgatgagcgacacgccgtataagcagctggatgcgttcaagcgggatttggagaagggcgggaatctggtggtgatgcattatttgtatgagtcgacggtggagttgttgcccgagtttatcaggttggcgaaggcgacggggaagaggttgatgagggtggatcagtgcttggaggatcctagggcgccgccgttaacgtag

SEQ ID NO: 383 - DNA, 717 bp, Scytalidium thermophilum
atggtccgtcacgccgccctcgccgctctcgctctcctccccttctccctcgctcaagtcaccgtctcggaggactttgagtctggttggaaccaagcggaatggcccacgtatgcccctgattgcagccagggcggccgcgtcagcctcgacagcagcacggcgcacagcggcaggaactcggtcagggtcgatggtgctggtggctactgcgggcacatcttctttggcaccgacaagattccgagtggtgacctttacgtcaggacctggcttaaggcctctcgtgccttcactgacgcccatgtcaccttcatcaccatgccagacccggcccagggcaccaagaagcacctccgcatcggcggccagaacaggatcctgatgtggaaccgcgagcaggacgacgctactctcccagaactctcgccgcagggtgttgcttcctccgctcagctccccgcgaaccagtgggtgtgcttcgagtacaaggttggcgccgatgggtccattgagacatggctcaacgacgctcccatctccggcctgacgtacggccccggagtcagcaacccgtatgccaaccagtggcagaggagcagcatcaggcctcgtccctcggccgtctactttggctgggaatcgtacggcggggactccaacactttctggtatgatgacattgtcatcagctcgtctcggattgggtgccagtga

SEQ ID NO: 384 - DNA, 762 bp, Scytalidium thermophilum
atgcttgccgaaactgtcattaccggtctgctgctggcctccagtgccgtggcctatccggctcccaaccccgtacagttcctcaagcgggctcccgaggcgggcgtcgtcatccaacggtgcgccaacccgggccagctggccctggcgtacgacgacgggccgtaccagtacacctcgcagctggtcgatatcctcgaccgcggcggtgctaaggccaccttcttctggactggcacgctgtacggctgcatctacaaccaggctgcggctgtcaggaaggcgttcgcctctggccaccagatcgcctcgcactcatggagccatggctacatgggcaacatgaacgagcagcagatccgcagcgagatgacgcgtctcgaggaagctctcgtcaacctgatcggcaagaagcccgcgtacatgcgcccgccgtacctccagaccagcggcgtcttcctgcccaccatgcgcgccatgggctacaaggtcatcaccaacgacgtcgactcgggcgactggaacaaccagtccccgcagcagagccagcaggccttccagcgcgccggcaccagcgggcccggccacatcccgctcatgcacgagacctacgccagcacggtcaacacccttactccttggctgatcaactgggccaaccagaacggcttgaagcttgtcactgttgccgagtgcctcaacgatgccgagggcatgtaccagccgggcaacttcactggcaatggccggaactattgctaa

SEQ ID NO: 385 - DNA, 660 bp, Scytalidium thermophilum
atgaagttcttcgccaccatcactaccctcttcgccggcctcgctgccgccatccccgtgactgaggtcaactctcatgagctcgacgagcgccagctcgcccccagtggccacgaagtcgagatcaggggcgtcagctacggcggcagcggctgccccggcggctccgtcggataccaaatctctgacgaccgcacgaccatcaccctcctgtacgatgaattcatcgcgcaggccggaaagggcatcgagcccaaggatcgtcgcaagaactgcaacctcaacctgaagctgcattatccccagggctggcagttctccgtcttccgcgccgactaccgcggccacgtgacccttccggagggcgccaccggcaaggctactgccaactacttcttttctggcggaactggacagatcaccaccaagggcgagtggacgggccccatcgacgaggattatcttaagcaggacaacttctccctcattagctacgctccctggtcgccgtgcggcttctcagggatgctcaacatcaactcggccatccaggtcaatccgctccgtctccaggagccggccctgctgacggccgagtctacagaccttaccttcaagcagatcgcctatctgcagtggcgcaagtgcaagaagaactaa

SEQ ID NO: 386 - DNA, 1197 bp, Scytalidium thermophilum
atgggtcgcctcttcacctcgacaacgctggccctcctagcagccgccccgggcttcatccccggtgtgcaggcgcaagccccgttgtacgggcagtgcggtggcatcggctacacggggccgacgaactgcgtcgcgggctccgtgtgtacagcgtggaatgactggtaccaccagtgcgttcccggtacctcgaccagcagtagcacgtcaacctcgtcctcaacctccagaaccaccgtcgtgaccaccactacaacccctgtgaccacatcgacctcaacattcagctgggtctccacgtcctcatcgacgttcaccacagccaccagcaccaggacctcaagctcagcactcccaaccaacacgggcgacccgtgttcgctgaagttcctcattaccttcggtgactcatactcccagacgggcttcgatatcacgggcaccaagccttcgacaagcaaccccttgggcaacccgccgctgcccggatggaccgccagcggtgggctgaactgggtcggcttcctggcctcgcagtacaacacgtcgacgctgctcgtctacaactttgcctacggcggcgccaccaccaacgcctcgatcgtcgagccctatcgcgaggatgtgctgagcttcattgaccaggtctccctgttcagcggcagcattgctagcaagcccagctacgccccgtggggcgacaacgccctcttcggcgtctggatgggcgtcaacgacgtcggaaactcgtggtggaaggaggattatgaagagatcctggagagggttatggacagctacttcgggcagctgcagatcttgtacaacgccggcgcacgcaacttcgtcctgctcactgtgcctcctatccatcgcacgccgatcatgatgcttgagtcggcagaggtgcgggctgccgaggcagcggccatcgacaagtacaatgaggctctggccacccggcttgcggctttcaaggccaagaacaacgacatctcggccaagattgtcgacactgccgtccccttcaacaaggccctggacaaccctgccgcctatgggatccccaacgccacgtgctggaacaatgacggcacgtcgtgcttctggttcaacgactatcacccgggtgttacgatcaacagatttgtggcccaggccgtggcggatgcttggaaggatagctacttttga

SEQ ID NO: 387 - DNA, 1272 bp, Scytalidium thermophilum
atgaagctactactcaaccttccctccctcctgggagtcctgtgcgcctcaacgctcgctgccgccgcaagcctcactcagatcaccacccccttcggccccaacccccagaacgtttccttctacatctacgtccctgacaccctccctccgaacccagccatcctggtaaacccgcactggtgccacgggacggcgcagcaagcatacgcgtactcgcagtacgcaaccctggcctcgcgtcacggcttcatcgtcatctacccgggcagccccaactcggccgaccagtgctgggacgtgtccagccgggagacgctcacccacgatgccggcggcgacagtctgggcatcgtcagcatggtgcgctggacgatcgaccggtaccacgccgaccctcggcgcgtgttcgtcacgggcgtctcgtccggggcgatgatgacccaggtcctcctcggggcgtatccggatgtgttcgccgcgggagccgccttcgcgggggtgcccttcggctgcttcgccgcgccggggaataactcgggtcagcacggctactggaacgcggactgcgctgaggggagagtggtacgctctgccgaggaatggggtgaccttgtgagggccgcatatctgggataccacgggtggcggcccaaggtgcagctgttccacggcacgaacgacgagattgtcagctacgtgaaccatgttgagggcgttaagcagtgggccgacgtcttggggctggacgagaccgccccggcagctgtggtgaaagacacgccgttgcccgggtggacaaagactgtttatggcgaagggggatggctggaggcttacagcgccgagggcgtgccgcatgatatccgtgtccaggagaccacggtggtcgagtttttccagctcgactgcgcaggaaccggatgcttctcttggggtcagggcagcccaaatggtggatcgtcatctggctccgtcacaccgatattatcgacatcaaccgccgtgacagctccacctccgtcaacgccaacaatgctcagtacagcaaagacgcagagaccagaatccattacgtcgaccacgaacacgggcgatcagacaccaactccgaccacgcctaccgctggttgcacaactcgtgttggcggtgtcccgttgtgggcgcaatgtggtggtatgggatatattggtcctcagcagtgcgcaaacggcgtgtgcaagtcgtataacccgtacttctcgcagtgcgaaccgacctcgtgcccgtga

SEQ ID NO: 388 - DNA, 1149 bp, Scytalidium thermophilum
atgaagttctctctccttttcgccgcggccgtggcagacgttgccctcgctggcaagaaggttcctggcccagacaaggacggtcgctacaccatctctgcgaagggcatcaaggctcagttcatcccttatggcgccaccttgaccaacctgtacgtcaaggacaagaacggcaagccgattgatgttgtcctgggctacgatgatgttgactactaccccatcgaccccggccaccccgtgtacaacgccattcccggacggtacgccaaccgcatcggcaacgggcagtacaccatcgacggggtgacgtactacacggaaaagaacgacgggcccaacacgctgcacagcggcaccaacaactggtcctaccgcttctggaacgtcacggccttctcgcacgactccatcaccttcagcctcctggatgagtccgagtcctcgaaaggattcccaggccgcgtcgaggccaatgtgacgtattcggtcagcgaaaacacgtggaacatcaagatcacggcgcgctcgttggatcagaagacgcccatcctcctcaaccaacacacctacttcaacctcgacgcctaccgcaaccccgcgaccgacaagatctgggaccacctcctctacctcccttactccaagcgctacctggccgccgaccaaggctccctgcccaccggcgagatcctgaccgccgaacccgggtccatcaacgacttcgcctcctcgcccagcctcaccgtcggccacgcgcgcgaccagcccggcttcgagggtaactgcggcgccaacggcgcctgcgaagggtacaacggctactggctgatcgaggacgcgcccaaggacgcggtcgtggtgaccctcgccagcgagttctccggtgtcaaggcggagttgaggacggatcaggccggtgtggtgctgtactcgtgcaactggagtgatgggagcgcgaagctgaagaagacgcaggggattaagggcaagcatgagacggtgacgaggagcagctgtatcgcgatcgaggcgcaggattggccggatgggattaatcacccggagtggaaccggctcgagcaccagatctttgggcctggacagacgtacaactgggaaagctcctggacatttggtttgctctga

SEQ ID NO: 389 - DNA, 897 bp, Scytalidium thermophilum
atgaggctccctcaagtggcttccgttctggccctcgcggcccaggtccacggtcacggctacatctaccgtgtcaccgccgacaacattgtctacccgggatacgacatctatgtcgaccccctccttcaaccgcccccgtaccgcattgcctacggtggtggccagacgggtcccgtctatgatatcaacagcaaggatatcgcctgccagcgcgtccacagccccgctccgggtctgattgcccaggctcgcgccggcagcaacatcaccttctggtggtcgcggtggctgtacagccacaagggtcccatctcggcatggatggctccgtatgagggcgacattgccgatgtggacgtcaacgagctcgagttcttcaagattggcgaggagttccacgatgagaccggcaagtgggcgacggagaagctggtcgacgaccccgagggcaagtggaccgtccagatccccgcggatatcaagcctggtctctatgtcgtgcgcaacgagatcatcgccctccacttcgctgtccgcatgcctcccttctttgccgccttcacccccctcggaccgcagttctacatgacctgcttcgccttcaacatcaccggcgacggcacggccactccccagggctacaagttccctggcgcgtacagcaaggacgatccggccctgtggtgggatctggaggagaacaaggacccgtaccccggcgccggccccaagccccacgtctcggcctacgatgtcgacctcgtccccaacgagttgtacatcgtcagcccgacgaacaacgctacggctgatgagctctactgggaggcccagaggcaggcgcttgctgcccaggcggcgacgacggagtacttcgattccattggtggttaa

SEQ ID NO: 390 - DNA, 408 bp, Scytalidium thermophilum
atgaagttaactcttcttctcgccacctcggccgcctttctgggtgttgcctccgctcttcccaccgacaccgaggaggtcgcccccaatggtatcggaaaagtcacctggttctacccaggccttggtgcctgtggcaagcggcatacccaaaacgacatggtggccgcactcaactcgcaagagttcgaccggtatggtccccgaaacgaccccagcaagaacccgcgctgcgggaacatccttcgcgtcacctacggtggcaagagcgtcgacgtgaccatcgtcgaccgctgcgaaggttgcgtcaggggcgggatcaacctcagtcctgctgcgttcggaaagcttgccaacctcgacgttggggtcatttacgccgactggcgctggatcaagtgggattaa

SEQ ID NO: 391 - DNA, 414 bp, Scytalidium thermophilum
atgttcgccaacaccatcaccttccttctcgccacctcggccgctcttctgggcgctgccgcggctcttcccaccgctgaggccgacaaggcactctctcccagggctgacggaaagttcacctggtactaccccggcctgggtgcttgtggccagtggaacagtgagaaccagctcgtcgctgccctcaacgcggctgacttcgacccctacactcccaacggcaatcctaaccggaattctctctgcggccgccgtattcgtgccaactacaatggcaagtccgttgaggtgaccgttgtcgaccgctgccctggttgccctaggggcggtcttgatctcagccctgccgccttccagcgccttgcccacctcaatgcgggcgtcatctatggcaactggcagtggatctaa

SEQ ID NO: 392 - DNA, 2586 bp, Scytalidium thermophilum; identical to SEQ ID NO: 107

SEQ ID NO: 393 - DNA, 957 bp, Scytalidium thermophilum
atgaggcccttctcactcgtcgctctggcgacggccgtcagcggccacgccatcttccagcgcgtgtcggttaacggcgtcgaccaaggccagctcaagggcgtccgcgctccctcgagcaactaccccatcgagaacgtcaaccaccccgactttgcctgcaacaccaacatccagcaccgcgacggcaccgtcatcaagatccccgccggcgccaccgtcggcgcctggtggcagcacgagatcggcgggccctcgttcccgggtgacccggataacccgatcgctgcttcgcacaagggccccatccaagtctacctcgccaaggtcgacaacgccgcgaccgcctcccccaacggcctgcggtggttcaagattgccgagaagggcctgtcgggcggcgtctgggccgtcgacgagatgatccgcaacaacggctggcactacttcaccatgccgcagtgcatcgcgcccggccactacctgatgcgcgtcgagctgttggcgctgcactcggccagcttccccggcggcgcccagttctacatggagtgcgcccagatcgaggtcaccggctcgggcaacttctcgccctccgagacggtcagcttccccggcgcctacccggccaaccacccgggtatcgtcgtcagcatctacgacgcccagggtaacgccaacaacggcgggcgcgagtaccagatccccgggccgcggccgatcacctgctccggcggtggaagcaacaatggtggcgggaacaacaatggtggtggaaacaacaacggcggcggcaacaacaacggcggtgggaacaacaacggtggtggtaacaccggcggcggctcggcgccgctctggggccagtgcggcgggaatgggtataccggcccgacgacttgcgccgagggtacttgcacgaagcagaatgattggtactcgcagtgcacgccttag

SEQ ID NO: 394 - DNA, 885 bp, Scytalidium thermophilum; identical to SEQ ID NO: 109

SEQ ID NO: 395 - DNA, 1158 bp, Scytalidium thermophilum; identical to SEQ ID NO: 110

SEQ ID NO: 396 - DNA, 2352 bp, Scytalidium thermophilum
atggcgccgttcaaggcgtatctcatttccctccttgccgcggctggcaccgtcctggcgcatccgagggagtatatcccccggttcagccaaaagcagatcgactccggggaagccctgagcgtcctgaacaagatcgccacggccaatgcgtacaagaactttggcggccattgcaacaagtctaatgtcaaaatccggcgggagtggcgtaccattcccaaaccccagcgtcgtcagttcatcgctgccgtcaagtgcatcatggcaaagccgagcaatcttccacctggcgaggtccctggggcgaagtcgttgtatgacgctcttgtttgggctcacgccgaccggactgggtactctcacatgagcgggacgtttttgctcttccaccgatactacttgcacacctacgagcgcgagctggagcgatgcggctgggacggcggcctgccctactgggaatggggtctcgacgccgacgatcctcggaagtctccggtgttcgacggctctgacacatcgctcgggagtgatggggagttcatcccaggtcgcgaaccccaggtcctcgacttcccggggttcgacgagcccttgatcctcccacccggcacgggcggcggatgtgttatgaaagggccattcagcgacatggttgtccgtctgggaccctacaatatcgatccacgcgatccccttccggtccatcccattgaaggcagggaggacaatccacgttgcttggacagggacctcaactcgtgggcgttacggaggtggtccacttttcacaacacaacgacgatgattctgagacatgatagaatccgtgagtttcacggagagttggaaggagacccacgagtccagcgcgagccgagcggacctcatggcggcggtcattctggcattggcggactggcgaataatccagtaatctcaccgtatgatccagctttctggctcacccacaaccagctcgagcgcctctattggatctggcagatgctggacttgaagaatcgacaggaggttcatggcacagggacatacatgaacatgccacccagcccgaatgtaactcccgttgatggtgagcttgtcctagacgccaactggcgctggttgcacgaagtgagcggcactcggagttgctacgagggaaactcctggaacagcgacgtgtgccgcacatcgcaggcctgcaccgcgaactgcgcattggagggagctcagtatcgcgagtacggcatcatcgccccagcgacggcaagcgacaatacgtcagtgattcagaggctccgcaccaacctggactcccgttacaacaagggctcgcgcatgttcctgcttgagtcccgaaatcgatatcaaacattcactctcctagaccatgagctggcattcgacgttgacttgtcgacggtggagtgcggtatcaacgccgcgctgaagttcgtgccgatggacgccgatgggggtcaggcgcgagataagggaaacgaagctggcgcggcatacggaacggggtactgtgacgccagttgtccgcgagacctgcactttgtcccggaacgaggcgccaacgttgagcagtggactccgtcaaacacagacccgaacggcggccaggggtattggggctcgtgctgtccgcagatgagcgtttggaactccaacgtccattccttctcggtgtcgactcacacctgtgcctatccgggacgtgaagagcaaggtccctggatttgtgaagggcaggcaggctgtgaccctttctacatcgaccccgaagaacgcggccgactgtcttgtgattacttcgggtgcagctttaacccatatcgtatgggaaatccatggttctacggcaagggaaagcagctggataccactaggaagttcactgttgtcacgaggttctcagaaaccaacgtcacccagtttttcgtccaagatggccgacgcatcaacgtaccaacaccctttggactgcctggcctcccccctgaggctggcttgtcagatgacatgtgcttcacgcaaccggcggttttcgaagaacgtggtcggttcaccgagatcggtggttggctgaagcatatcaagcagattttgacacagccgatggtcttgacattctcgattggagttgaccacttgacatggaacacctggctagactccatctacccgccatatgacccggcaacaacgccaggtcgagagcgcggcccttgtccagttgaggaaaacgacccgcggagtgttgagcagaagaaccagaacgcgcaagtaatctggtcaaacatacggtttgggcccatcggctctacggtgaaactttga

SEQ ID NO: 397 - DNA, 1809 bp, Scytalidium thermophilum
atgattctctttccagttgcgctgctcctcagcctcatactctctccgtgtgcggcagcaccggaggcgtacaaagtcttaaaagcaccgctcgacacaccctggacagaccagggtcgccagactccatgggcggccacctaccctcggccccagctccgtcgcgacgcatggttatcactcgatgggatatggacctaccagccggcgtcgtcggatggtgacccgcagcctccgagactgccactccagaaggaagtgctggtgccatcatgcattgagagcgctttgtcaggaatccaggaaatgggcgtgacgaatatgttgtttggcactcaatttacggtgccaccccgctgggccaacaaccaccgggtcttgctgcactttgaggccgctgactatgaggcgactgtttttgtcaacggcgctgtggcgggcacgaatcgcggcggatatacgcgcttctctatggatatcacggacaaactcaccaatggtccgaatgaaatacatgtcttcgtctttgatcccacggacgacgctagcatacctcaagggaaacagacaaagaggctgtcgcatattttctacacgccatgctcgggaatttggcagagtgtgtggatcgagacagtccccgtgaactacatctcgggacttgatgtctcggctgacatgactggaaatgtcaccgtaactgtccgcaccaacaagcaacaagaaataccagtggagattcacctcatcgatctaaagactggggaagatgttgccgcggagcagcggatgtccgaccggacattctggtttaaggtggactcccctcggctgtggacacctgactcacctacattgtacaacatcacggtcaagatgggcgatgacttcgtcacgagctacacggcctttcgcacgatttcggcaggacgggtcaatggagtcctccggccgctcctcaacggccgctactggcccgacggcatctacacccctcctacccccacggccatgatccgcgacctacagctgatcaagcagctgggcatgaacatggtgcgcaagcacatcaaggtagagcccgaggtgttctacgaggtatgcgacaggatgggcctgctcgtcatgcaagacatgccgtcgatgcgtgtgtttgaccatcaccgtcccacggacgatgagcaagccgagtttggccggcagctcgaggtcatcattcaccagctgcgcaatcatccaagcatcgttgcctgggtcatctacaacgaaggctggggccagatcacggattacttccccgagtttgagctgacggagcgcgtccggaaactggacccgaccaggctcattgatgccaccacaggttggcacgatcatggagcgggtgattttcatgataatcaccattacgccgagccgcaatgcggaacaccctggttctctctgcccaatgttggccacgatccgggaagaattgccatccaaggtgaatttggcggcatcgggctgcgaccaaacgcagagaacgtctggccgctccgcccagccatcaacacaatcaacgagacatacgagatccattccaacatcgaatcataccactaccgcgcgagggtgttgctccggctcctacgcgagcaggtccagaagtacgcgtgcagcggggccgtctacacgcagacgacggacgtcgagggtgaagtcaacgggctgatgacatacgatcgacgggttgtgcgcatcgacgaaaaggcctggaaagaggacattgctgcgctcttcgaggccgcgaacggccgggccatgtga

SEQ ID NO: 398 - DNA, 891 bp, Scytalidium thermophilum
atgaagggacttctcagcatcgccgccctttccctggcggttggtgaggcttcggcccactacatcttccagcagctctcgacgggtggcaccaagcaccccatgtggaagtacatccgccagcacaccaactacaactctcccgtcatcgacctcgcctccaacgacctccgctgcaatgtcggtgcccggggtgctggaactgagaccgttacggtcgctgctggctcgagcctgaccttccacctcgacacccccgtctaccaccagggccctgtgtcggtctacatgtccaaggctcccggctccgtgtcggactatgacggcagcggcggctggttcaagattcaggactggggcccgaccttcaccggcggcggcgccacctggaagctggatgactcctacaccttcaacatcccctcgtgcattcccgacggcgagtacctcgtccgcatccagtccctgggtatccacaacccctggccggcgggtatcccccagttctatatctcgtgcgctcaggtgcgcgtcaccggcggcggcaacgcgaacccgagcccgcaggtgtcgatcccgggtgccttcaaggagaccgaccccggctacactgccaacatctacaacaacttccgcagctacaccgtccccggcccgtcagtcttcacctgcagcggcaacagcggcggcggctccaaccccagcaaccctaaccccccgaccccgaccaccttcaccacccaggtgaccaccccgaccccggtgtctccgccctcttgcaccgtcgcgaagtggggccagtgcggtggccagggctacagcggctgcaccaactgcgaggccggctcgacttgcaggcagcaaaacgcttactattctcagtgcatctaa

SEQ ID NO: 399 - DNA, 1152 bp, Scytalidium thermophilum
atgaagctttggtcgtttgctgccgccgcagccgctgtgggaagcgtgagtgctttcaacctcccacagtttgcacaagatgccattgactctggcctggctctcgctgcccttaatggtatcgccttggtgaactcagccacaaggttcgggggctcttgcaacattgccaacgtcaaggtccggcaggaatggagacatctgtccgcaacggcgcgcaagaagtacattgccgcggtccagtgcctcatgaccaagccaagtctcctccctgagggcgtagctcccggctcgaagtctctctttgatgactttgtcttcgtccacctcaatcagaccttcttcatccaccagacgggcaacttcctcatctggcaccgctacttcttgcacatctacgagaagaagctcaaggaggagtgcggctttacaggcaccctcccctactgggaatggggctacgacgtcaatgatctccgcgcctcacccgtgtttgatggctcggacacgtccatgggcagcgatggcgagttcgtccctggcggcccgatgtcgatagaaatcccattcaacccaggacccattgttttggcgaagggtaccggcggcgggtgtttgttcaagggcccctttaagggaatgcagatccgtctgggcccagcaacgcagcctgacccgacccaggacaacccgcgctgtctgagccgggatttgaatgtcgatgctggacggcggtttgccaccttccgtaacacgacggaaactatcatccattcgccgaccattgagatcttccgcaccacgctcgagggtgatccgaactacgtccccatgtctcttggaattcacggaggtggtcacttcatgatctcgggcgatccgggagcagatgctttcatctcgcctggtgatccggccttctatctccatcatggccaggtcgatcgggtatactggatctggcagatgctggactacgagaaccgcagaggcgtgttcggcacgaacaccttcctgaatttgctgccgagtcccaacaccacggtcgaggactacgtcgacttgggacacctggctcctcccatcaagatcaagaacctgatgagcaccattgggggcgaggggtcgccgctgtgttatctttacctctga

SEQ ID NO: 400 - DNA, 1641 bp, Scytalidium thermophilum
atgcggatatcaacagccacggctgtccccgccgtcctggcactcgcactctctctgctcccgacagcgagctgcgctggtgtcccacaccccgagccccggttacctcatgatactgccgccgcagctgctcctcccgtcgagcgctccggccccgtcttcccgttcctaagatggcttcgtgacagcgccgttgaggccgtctttggtaaaccctcgtcgtacaagccaaagactcggcagccgcccgccgccaccatccgctcccggtaccgcaacgacgtcgtgatccgattcaatgtcaccacttcagaggaggagggcgccctcgcacgggcgacggaacagatgctgttagatgtctgggccttcacgcctgactttgtggatattcgaatggccaaggatgatgtgccctctctgctctcgctgctgcctaagtccttggagccgtccgtcttgattccggatgtggccgatgccgtgtgggcgacgtttccgtcagcagaagaagacgggttgtctgtgctccttgaatcgagttttgcggcctctcgtaaggcgcggaggcccgtggatggagtgggggatattttcttccagaactatcagcccttatcggtgatcgagagttggatgcggttgttggaagttatgtttccgtccatcgcgaacttgaccagtatcggcaagtcgtacgagcgcagacacatctatgccttgcgcgtaggtgctggtagcaaggcctcagattcaagcaacccccgcaaggcgattcttgtcacgggtggtgtccacggccgagagtggatttcgacgagcaccgtcagctatcttctttggtcggccattacgctgtacgacaatgagcccttcattaccaaactcctccaggagttcgacataattttcatccccgtcctcaaccctgacggctatgagtacacctggcaaacagaccgtctctggcggaagtcgagacagcagaccaaggttcgctactgccgcggcatggaccttgaccactcgttcggttatggctgggacgcagtcgagcgcgataccgatccttgctcagagagctatggcggcgagaagccgttccaggccaccgaggcgtcccggctggcccattgggccaagaaccaaacccagagcggaacccagatcgtggcgcttcttgacctgcactcgtactcgcagcagatcctttatccttacgcttacacctgcgcggtcgacccgcccaactttgagaacctcgtggagcttgctgtaggccttgcaaaggctgtcaggctgtccagcggcgagagctacacagtctcttctgcgtgtcagggggccgttcagctggaaaagggcacaagcaactctctcacgcgtctcgagacgagcggtggagcagctattgactggttcttccacaagctcaagacacgatacagctaccagattaggttgagggacaccggcagctacggatttttgctcccccctgaccagatcgttccgacgggagaagagatgctgagcatgcttaagtaccttggtgatttcctcctcgggaacaatgggatcgaggggccgttccagcaacgcccattagggagcggacatgacctcaggaggaggagatga

SEQ ID NO: 401 - DNA, 999 bp, Scytalidium thermophilum
atgaagtgtttccttgtcacctgcctttccctggccggtctggcttttgctgcccccaagcccaaggcagcaaccgttgctggtggcgacattactccggctctgctgcaaaccttccacaagtacctgcaatggtctgaagcggcgggctgcaacaaccagaagccagctggtgcgaccgtcacctgcgagcctggccagtgctatctgttcgagccccacaatgctaccgttgtcgcctccttcagcggtgccctgctcgacacgaggggctttgtcggagtcgaccatgtggacaagatcattgtcgtctcctatcggggtaccacctcagtcaggaactggattgccaacatccttttcgctcaaagctcctgtgatctggtcaagggctgtctcgtccactcgggcttctatggctcctggaacgaggtcaagtcggccactctgaacgccgtcgcccaggccaagaaagccaacccgacctacaaggtcattgtcacgggctactccctcggcgccgctgtcgccaccctcgctgccggctacatccgcaaggcgggccacgacgccgacctgtacacgtacgcctcgccgcgcgtcggcaacctcgcctttgtcgagttcatcaccaaccagcccggcggcgagtaccgcatcacccacaaggacgaccccgtcccccgcctgccgcccatgatcttcaactaccgccacaccagccccgagtactggctccgcgagaacgatgatggcgtcgtcaccccggacgaggtcacctactgccccggctactccaacacggactgcaacggcagcacgagcggcctcgacgacaccaatcacggcggctacttccagatcattactggctgcggcgtccccgtgatgccctggaagcgcgacctcaccgataaggagcttcaggagaagcttgacttctgggcgcagctggatagggagtatgccaagactcttcacgagaacgggcagcagtga

SEQ ID NO: 402 - DNA, 2664 bp, Scytalidium thermophilum
atgggtcatcacactgccaccgtatgcctctggctcgccctgggctccttgacgcccgtctcctttgcccgcgttgtcgagccccgcgatcctgttcctcaagggtatcatgctgcttcctactaccccgcgccccatggcggttgggtcagctcgtggcgcgaggcctacgaaaaagcctatgcactggtgtcgcagatgacgctggctgagaaggtgaacatcacatcaggcgttggcatttatatgggaaataccgggagtgtggatcgtctcggcttcccccagctctgcctccaagacagcgctctcggcgtcgcctccgccgacaatgtcacggcttttcccgctggcattaccaccggtgccacctgggacaagcagttgatgtatgcccgaggcgtcgcgatcggcaaggagttccgcggcaagggcgccaatattcacttgggtccttcggttgggcccctcggccgcaagcccttgggcggccggaactgggagggctttggctccgacccggtgctccagggcaaggccgctgctctgcacatccgcggcgttcaggagcagggcattattgccaccattaagcaccttgtcggcaatgagcaggagatgtaccgcatgtaccatatttttcaggagggttacagcgccaacattgacgaccgtactctgcatgagctctacctctggcccttcgcggaggcagttcgtgctggagtgggagccgccatgacggcctacaatgccgtaaatggctccgcttgttcccagaacagttatctcattaatggcattctcaaagatgaactcggcttccagggattggtcatgtcggactggctcagtcacatctcaggcgtgagctcggctctggccggtcttgacctcaacatgccaggcgatacaaacattcccttgtttggtaacagtctgtggcagtacgagctgactcgtgccgtcctgaacggctccgtgcctgtagacagactgaacgacatggccacgcgcgttgtggccacctggtacaagtttgggcaggataagaaccacccacggcccaacttctcgtccaacactcgcagccgtgacgggcccctgtaccccggcgcccttttttctcccagcggtcaggtgaattggttcgtcaacgtccaggaggatcactatcttgtcgcccgccaggtggctcaagatgccatcacgctgctcaagaataacgacagcctcttgcctctggacgctggggaccttactggcggcaagctcagcgtcttcggcactgacgcccaggtcaaccccgatgggcccaactcctgcctagcacgggcttgtaacaaaggcactcttggcatgggttggggctcgggtatcgcggactatccatacatggacgatcccatcggagccatccgcaagcgcgtccccgacgtcaagttctacaacacggacagtttcccgtggttctttggcacgccggaggatgacgaggttgctatggtgttcatcagctccgactcgggagagaatacgctgacagtcgagggcaaccatggcgaccgcgactcggccaagctgagggcatggcacgacggtgacaagctcgtgcagaaggtggctgagaaattcaagaacgtaatcgtcgtcgtgcatacggttggtcccctggaccttgagccgtggattgaacttccctcggtcaaagccgtcctctttgcccaccttcccggccaagaagccggcgagtctctgaccaacgtcctcttcggcggcgtctcgccgagtggccacctcccctactccatcactcgcaaggcctccgacctgcccgacagcatcgccaacctgaagggtttcacctggggccaagtccaagacacctactccgaagggctctacatcgactaccgctacctgcaaaagcactcgattcagccccgcttcgccttcggccacggcttgagctacaccagcttctccttcaccaatgccacaatccgcgccatcactacccccctctccgtcaccccgccagccccgccagccaccaggcccgcctcggtcgtcgctaaatactccaccgacatcccgcccgccagcgaagcctacgagcctgcaggcttctccaggatctggcgctacctctacccctggctgtccaaatccgacgccgacgccgcccacgccatcggcacgagcaagtccaaaacttacccctaccctcccggctattccaccgtgcagcgcgcgtctttccctcccgccggcggcggcgagggcggcaaccccgcgctctgggacgtggcatacgaggtgacggtgcgcgtcaccaacacgggcaagaggcccgggaaagcctcggcgcagctgtatctgcagttcccggaggggatcgagtacgatacccccgtactgcagctccgggatttcgagaagaccaaggagctccagccgggcgagagccaggagctgaagctgacgttgacgaggaaggatgtcagcgtgtgggacgtgaggaggcagaactgggttgttccgacggcgattgacgacaagaaggggttcacggcgtgggtgggcgaggcgagtgataagttgaaggtggcgtgctacacgggtgaggggaggtgtgtggagggggcgaagcagccagtttga

SEQ ID NO: 403 - DNA, 2970 bp, Scytalidium thermophilum
atgcttgtctcggggtcgctgtcctcatggacagcttgcctgggcttgctgtctgccctctctgccacatttgccccggcagtggctgtcaaagagcatgactggaagaagtgccaccagtctggcttctgcgctcgcaaccgcgccttcgccgaccatgccctcaccgccacctcgtgggagtccccttacaacatcctcgccgacgccggctccttcaaggacggccagtaccagggtgtcatcctcaagaccatcaacgacgctggcgagacggttcggctgcccatcaccatctcgtttctcaagtctggaaccgcgcgtgtcaccgtcgacgaggagaagcgccaaaagggtgaaatcgaactccgtcatgatagcaaggcgagaaaggaacgctacaatgaagccgagaaatgggtcattgtcggcggcctggccctcgacaagaacgccaaggttgcgcaccaagacaagaaccaactgaccgtcaagttcggtcccttctccacttttgaggctgttatcaacttctctcccttcagcatcgacttcaagcgggacggcgagacccatatcaagctcaatgaccagggtttgctcaacattgagcattggaggcccaaggtcgacaagcctgctgagcccgagaaggaggacgacggaaacgacacccctgatgaggaaggcaaggaggagcagacggagaaaaaggaggagccaaagaaggaagacgagtctacctggtgggaggagtcgtttggcggcaacaccgacaccaagccccgcggccctgagagcgttgccctcgacatttccttcatcggctacgagcatgtctttggtatcccgtcccacgctggccccatggctctcaagcagactcgcggcggtgagggcaactatgaggagccttatcgcatgtacaacgccgacgtcttcgagtacatcctcgacagccctatgacgctctacggctcgattcccttcatgcaggcccaccgcaaggaatccagcgtcggtgtgttctggctgaacgccgcagagacatgggtcgacatcaccaagggcaaggactccaagaaccccaaggccctgggcgtcgagtccaagacaagcacgcgcacccactggatgtctgagagcggtcttcttgacgtctttgttttcctcggccctacgcccggggatctgctctccaagtacacggagcttaccggcacgacagccatgccgcaggaattcgctatcgcctaccaccagtgccgctggaactacatctccgaggacgatgtcaaggaggtcgatgccaagatggacaagttcaagatgccctacgacgtcatctggctcgacattgagttctccgacgacaagaagtacttcgcctgggacaagcactccttcccgaccccgctcgagatgggcaagcatctagcgagccgcggccgtaaactcgtcaccatcaacgacccgcacatcaagaacgtcgccgattacccggttgtgcaggagctcaaggacaaagatctcggcgtccacaacaaagacggcaagctcttcgagggctggtgctggccgggctcgtcccattggattgacggcttcaacccggcggcccgtgaatggtgggtgtctctcttcaagtacgacaagtggaagggcagcatggagaacacgttcctctggaacgacatgaacgagccctccgtcttcaacggccccgagaccaccatgcccaaggacaacctgcactttggcaactgggagcaccgtgacgtgcacaacctgtacggcctcaccttccacagcgccaccttcgaagctctcaagagccgcaagcccggcgagctgcgccgcccgttcgtccttactcgtgccttcttctccggatctcagcgcgccgctgccatgtggacgggcgacaaccaagctgattggggtcacctggcgtcctcgatccctatggttcttaaccagggtatctcgggcttcccgttcgcgggtgctgatgttggcggcttcttcggcaacccggacaaggacctgcttactcgctggtaccaggccggtgctttcagtccgttcttccgtgcccacgcgcatatcgattcccgccgtcgcgagccctatctccacggcgagccgtacacaaccatcatctctgccgcgctccgcctgcgctacagcttgctgccggcgtggtacacggctttccgccacgcccacctcaacggcgcgccgatcctcaagcccatgttctacacgcactggtccgaggaagccgggctcaccatcgacgaccaattcttcctcggcaccaccggcttactggtcaagcccgtcacgcagaaggaccagacgacccagaccatctggatccccgacgacgaggcgtactacgactacttcacctacgagcgcatcccgacggtcaagggcaagaacgtgaccgtcgacgcgccgctcgagaagatccccgtcctcatgcgcggcagccacatcttcccgcggcgcgacatcccgcgccggtccagcgcgctcatgaagtgggacgactacacgctggtggtcgccaccagcgcgaaggccgacgagcccgccgacggcgatttgtatgttgacgacggcgactcgtacgactaccagcagggccagtacatccaccgccgcttcacgttcgacccggctgagggcacgctcacgtcggccgactttgagggccgcaacgtcgcgagcatcaaggagggcgagtggctcaagaagatgcaccaggtcggcgtcgacaaggtgattattgtcggcgcaccggcgagctgggcgggcaagacgacggccaaggtgcagagcgagggccgcgagtgggaggtcaaggtggagttcacacccgcggagaaggggaaggcggcgtttgcggtggtgaggaagttgggagtgaagatcggggcggattggaaggtggtgttttga

SEQ ID NO: 404 - DNA, 1146 bp, Scytalidium thermophilum
atgctcttcaacttcctcaaggcttcggtcctcgcggccacgctggtctcggcccagaccttcactgactgcgatcccaccaagcgcgatgactgccccaaccccaaggccgtcggcgccaaggttgtcgacatcgacttccgcaagggcgccagcgacttcttcaagcctgccatcggcaccaccctcaagtatgacggcaacctcggcgccgtcttctccatcacgaatgagaagcaggctcccacccttagcagcgaaaagtacatcttcttcggccaggtcgacgtgacgatgcgggcttcgcagggcgtgggcatcgtcagcagcttcgtcctgcagtcggacgacctcgacgagatcgactgggagtggctcggtggcgataacttccacgtccagcacaactacttcagcaagggctgcaccgagaactacaaccgcggcggtatgaccgacgtccacgaccccatcggcaccttccacacctacacgatccgctggacccccgagaagctcgagtggatcatcgacggcaatgttgtccgcaccctcgtcaacgacggcctgacgggctgcgacggctacccccagaccccgatgcagatcaagctcggcaactgggtcgccggccgcagcgatgctcccgagggcaccgtccagtgggctggtggccgtaccgacttcaagcaggctcccttcgagggctactaccagtcgatccgtatccaggacttcatgggtggccagggcgccacggacgccaccgagtaccactacaccgaccgcagcggcacctggcagagcatcaaggtcgtctacaacggccaggagacgggcaacagcaccaccaccacctcgagcactagcaagtcctcgaccgccacctccaccaccgcggctagcagctcgaccgctggcaccaccctcaccaccgtgaccaaggctagcaccaccactgacgcctcgacgtccgctagcactgccggccagttcgatgccaccctcgctcctagcgcgacccagtccgaggaggagactgccaccacgagcgagcccgctctcgttactggcgctgcccctcgctcgggtgccaacttcgccgctgttgtcgctgctgctctgctcggctacctcgctctttga

SEQ ID NO: 405 - DNA, 1059 bp, Scytalidium thermophilum
atgttgtggactcggcttgaacggtttgttgccgtcgccggcttcgtcctcctctgggccggcctgacctccggcctggccatcgacattccgggcgtggcaaagcgtgccgacccacacctggcagggtaccttggcgtgttcttcctgggagccgatccctacgtctacttctacctcagcaacggcaacaacccgctctctttccgcgcgctaaaccgcggccagcccatcatcaggccgacgaaagggaccggcggagtccgggacccaaccatcgtcccgggtggtggagccgaggccggcaagaagtggtatatcatcgggacagatcttcacattggcaagacaaactgggatgcggctcagcggacgggatctaggggtatcttcgtctgggagagcaccgacctcgtcaactgggggaatgagcgcctggtggtggtagaggatgcctcggccggcatggtctgggctcccgaagctatttgggatcctgcgagaggtgaatacctcgtccactgggcatccaaattctatcccccctccgacccatggcacacgggccccccctccaacatccgtatccgctacgcctacaccaaggacttccgcaccttctccgcaccgcaaaccctcatcgacaagaaccccaccaacatcatcgacctgacgtacctcccgctcaacggcgacgtcaacaactcgaccgcgtttttgcgcttcatgaaggacgagacgcgcaaaaccgtctttgccgaagtctcgtacaacgggctctttggcacgtggacgcgccccggcggggagggcgccatcatccagagcggcgtcgaagggccggccgcgtactgggacaataccgtcccggggagggtgcatttgctgttggatcactacggcgcggacgggtacaggccgtatgtgagtgacaacccggcgagtaattcgggctggagccagagcagcatggcgagctggccgaggaatttgaggcacgggagtgtgctgccggtggatgcgaggttgtatcaggctttgagttcgcggtggggttaa

SEQ ID NO: 406 - DNA, 1092 bp, Scytalidium thermophilum; identical to SEQ ID NO: 121

SEQ ID NO: 407 - DNA, 2553 bp, Scytalidium thermophilum
atgaagggcttctcagccttgcagcttctcgctgctgtggcgggcgccacggcagccacctggaagaatgtcaagacggacggtggcggcggcttcgtccccggcatcatcttccatcccaaggccaagggcgttgcatatgctcgcacagatatcggcggtctgtaccggttgaacgaggatgattcgtggacgcccgtcacggataacctctctacgaacgagagatggggacactggggtatcgacgccgtcgccctcgacccgcaggatcctgacaaggtctatgccgccgtcggcatgtacaccaacagctgggacccgaacccgggcgccatcatccgcagctccgaccgcggcgagacctggacgtccgtcgacctccccttcaaggtcggcggcaacatgcccggccgtggcatgggcgagaggctggctgtggacccggccaactccaacgttctctactttggtgctcgcagcggaaacggtctttggcggagcacggacggtggcgcgacctggtccaaggtgacgtctttcaccaacgccggcacctacatccccgaccccagcgatgttggtggctacaatggcgatatcatcggccttgcgtttgtcaccttcgactcgacgtcgcccgtcatcaacggcactacctcgcgcatctttgtgggcacggctgataccatcaccgcctccatctacgtgtccaatgacgccggcgccacctgggagccccttgccggccagccagggaagtatctcccgcacaagtgcaagctgcagccggatgagaaggccctctacatcacctacagcgatggtgctgggccttacgatggcactgacggcgcagtctaccgctacgaccttgtgaccgaaacctggaaggacatcactcctgtgtcgggcagcgatctgtactttggcttcggtggcctggctcttgacctgcagaacccgggcacgctcgtggtggctgctctcaactcgtggtggccggacacccagctcttccgctcaacagactcgggtgagacctggtcgcgtctctgggagtgggcgggttatcccgacatgaacctctactacagcatcaacgccaacaacgccccctggatcgaagccggcttcctctcccaagacagcaaaaagctcggctggatgatcgaagccctcgaaatcgacccccacgacagcgatcacttcctctacggcacgggtctcaccctcttcggcgggcacgacctcaccaactgggacacgatccacaacatcaccatttcctccctcgcggtcggcatcgaggagatggccgtgctgggcctcgcctccgcgcccggcggctctgagctcctagctgctgtaggcgacaactgcggcttcacctaccccacggccaacgatctcgacaccgccccctccgaaccctggatgaacccgcaatgggccacctccaccgacgttgactacgcgggcaacgacccctcgcacgccgtccgcgtcggctccgggacgggcgaccagcaggtcgccatctccaccgacagcgggaagcgctggacccggcaccccggcgccgacaccgccacgtcgggcggagccgtcgcgtactcggcagacggcgacaccattctttggtcgtcctccaacggaggcgttttgcggtcggaaaaccaaggccccttctcccccgtcgcttctctcccctcgggggccgtgatcgccgctgaccggcgcaacaactccgtcttttacgccgcgtcgtcgtcctcctcgggagctaaattctatcgcagcaccgacgccgcggcaactttctcctcgatctccatccccgccttcaccgctgctggcgccaaatcggtcagagacatcgctccgcaccccgtcatcgcaggcgaggtctgggtgagcaccgacaagggcttgttccgctccgtcgatttcggcgagacttttactcccctcgggcagggagtgttgacgttgacggagcaggtttcgcttggcaagggcaaaggagatagttggaacgtgtacgcctttggcgtgggtccgtccggggccaagttgtatgcttctgcggacgcggggcagacgtgggtggatatccagggcgagaggcagggattcggagcgatgggggcgaatcgggtggtgggcagcgggaatttggaaggggtggtgtatgttgggacgaacgggcgcggggtgttttatgcgacgattgagttgcctgggacgggtgggccgacgacgacgacgagtagtgcgagtgtggtcccgactacgttggttacgtcgacagtcgggggaagcagcactgcggtgacgacgacgacgaccacgacgacgagtgaggtttcgagcacgaccgagagtgttgctagctcaaccagcacgacgacaagctcagcgccgacgcccacagcagttgcgaagcagtgggctcagtgcggagggattggatataccgggccaacgcagtgtgaggagccgtataggtgccatgagtggaatccgtggtacttccagtgcatctcgtga

SEQ ID NO: 408 - DNA, 1506 bp, Scytalidium thermophilum
atgatgattgcccccgccagcaaacgctccccatctaccctggcagcggtcctggcgacagcatgtctgctgtcctcccccagtccggccaacgcccaggccgcatgcccaaataacctgactccggcctacaatccccccgtcgtggccgagggttggaaggcccagctcgtggccaccggtctctcgcgcccgcgcggcatcaagttcgattcggccggaaatctgctggtcgtcgagcccggcgtcggcttgacccgcctgacgtttgaggactacgggggcacctgcttggtggtgaaggagaagaagacgatcattcccgagccggggctcaaccacggcctggatctctcggacgacggcaccacgctgtacgtctcgacggtggagtatgccgaccgctacacctacgacgcggccaccgccaccgtctccaaccgcacgcggctcgtcacgggcatgagccacgcgacgggaggccactcgacgcgcacccttctcctctcccgcaagtacccggaccttctcctcgtctctcgcggcagcgggcccaacatcgacccgctcgcgcaggacgtctccaccggcgtctcccaaatccgcgccttcaacgtctccgaggccgctctcgccgcgaacggcgggcagccctaccggtacgccacctcgggcaccctcgtgggctggggtctccgcaacagcgtgggcgtgggcgagcaccctctgaccggcgagatctggtccgtcgagaacagcgccgacaacatcttccgcgcgggcgtcgacgtgcacgaggacaacccgggcgaggagctcaacttccacggcgtgcccgtcccggacgaggacaaccccaacccgttcctcggcgccaactacggctacccgctctgcctcgccctctggaacacgaccgacttcccgaacatcgactccctgaccgtcggcaagcagttcgccctcaacgacaccaccgcctccgacgagtggtgcgacgccaacaccacccctccccgcatcaccttccgcgcgcacaccgccccgctcgacatcaagttctcccccgccggcgaccgcgccttcgtcaccttccacggcagctggaaccgcgaccagcccgccggctacagcctgagctatctcgactttgacacaaccaccgcccagcccacggcccccgccaacagcctcgacgcggtgcgcaacattctctcggcgcccgacgtgtcgatctgcgcccgctggggaggcggcccggcgtgtctgcgcccggtcggcctggcgtgggacgcgagcggggagaggctgtttgtgtcgagcgacgcgacgggcgaggtgtgggttgtgacgcaggccgctggaggagatggcggggaggtgacgagcgtgacgtcgagagcggcgggtgtgaggagggcgacgccggtgccggctaagtttgggaggggatggatggttgtgggcgcgggtgccggtgcggggatggcgggttggatgcggtga

SEQ ID NO: 409 - DNA, 2322 bp, Scytalidium thermophilum
atgcgaatcctaacggtagtcctggccgccgccagtctcttgacaacagtcacgggctattggcttaacgaaatcccccaccgagggtacgcgccctttgctgagcccaactacccagtatttcgcaatgtcaaggactatggcgccaaaggcgatggcagcaccgacgacacggcggccatcaacgctgccatcctcgccggcaatccgtgcaacgagggatgcgcatccaccaccaaaacccctgccattgtctacttcccgcctggggtgtacctgatctcatcgtccatcaagccggcgtactttactcaactcattggtgaccccaatgaacggcctgttctcaaagccacgtccaacttccagggcttcgggctcatcgacggaaacccgtacactaacatgggccatcagacttggacatcagtcaacctctttttccgacagatccggaattttgtcatcgacaccagggccattcctgcaaacttgccagcgaccgggattcactggccgactggccaggctacgagtctgcagaacattgtgtttgagatgccaaccgaccctaatgttgtccatgttgggctcttcatcgagaatggtagtggcgggttcatgacggatctcactttcaacggtggtaacagaggcgcggagctgggtaaccaacagtacacgatgcgtaatctccgcttcaacaactgcaagaccgccatctaccaaatctggaactggggatggacttactctggcctggaaatcagcaattgcggcattggcatcgacatgtcagacatcaactccgagatcaacagactcaatgtcggctccgttaccctcattgacagcaccttcaggaacacagatgtagccatcaaaaccggctggggaccaaacactctcccttcaaccgccaacagcctgatcctggagaacatccttttcgagtcctgccctgttaccatccagggcgccggcaactctatcctttttcccggcgccggcggctccagccaatggatctctgcctggggcatcggtcatgggtacaccaccaccggcggcccaacgtatctggaaggcgactccatccctgccgccccgcgtccaccggtcctgaccgctcccgatggacgattctacactcactcgaagccgcaatatcaaactctcacaaaggacaatttcctttccgtccgcgcttttggcgctgtgggcaacgcacaggcggacgacaccgacgctctccaacgcgccatcgacgccgccgtcacccagggaaaggttctcttcctggattacggcctataccgcgtcacgtggaccatccagatcccgcccggcgcgcggatcgttggcgaatcgtaccccgtgatcctctcctccggcccatttttcgccgacatgaacaacccccgtcccgtggtgcaggttggaaggtactccggtcaacccggacgggcggagctcgtcgactttatcgtttccacgcagggtcggcagccaggggcgatcgggatcgaatggaacctggccagcccgacaaacgagcccagcgggatgtgggatgcgcacgtccgcatcggcgggttcgagggcacgcagcagcaggttgcagagtgtttgaagcagccaggcagtccggaagtgaagccgcagtgtgtggtggcgttcatggccatgcatgtcactgagaaggccaggggattgtatatggagaatgtgtggctatggacggcggatcatgatattgatgatccacagaacacgcagattaccattttcactggaaggggattgtacatcgaatccgaaaccggccctttctggctctggggcacaagcagcgaacaccacgtcctctaccaataccaagtcgccaacacgcgcaacatcttcatgggccagatccaaaccgaaacgccttatttcatgcccatccccaacgcgctggtgcccttcccctcggacgcatgcttcaacgacccggacttcgagaccagctgcgacaatgtcgagggcaactgcgccgcctcgtggggcctgcgtgtcgtcgactcgcgcgacgtgctggtctacggtgcgggcctgtactccttctttgacaactactcgaccaactgctcgaggtgggagaccggggagacgtgccagcagaggatcgtcagcgtggagggggaggcagagaacgtggtagtgtataatttgaataccatcgggacgagggagatgattacgagggatggacagagggtggcatggtttgcggataatgagaatacgttcgcgcagaatgtggcggcgtattgggcctag

SEQ ID NO: 410 - DNA, 1620 bp, Scytalidium thermophilum
atggagctccgagctgccatccgcctgctcggcgtcgccgcgtcggtcttcgcccccggcgttctcggtgcgtttggttacagctcgtccgggggtaactatgtcatcgacgccggctctgcgaatcccctgatcttcacggttagccagtccaactgcgatatccggtccatcaagtatcgcggcgccgagctccagtactcgtcccagggcagccacatcaactcgggccttggctcggcgacggtctcgatcagccagatcaacgggtcatccaggtacatcaaggtcacctgcacgacgtcgaccctcacccactactatgtcgtccgcgagggtgagagcatcatctacatggcgacctacatcacggccgagccgtccatcggcgagctgcgctacattgcccgtctccgcccggaccagctgcccggcgagcatccctacggcgaggtctccaacaccgccggctccagcgccaccgtcgagggctccgacgtcttcatcgtcaacggccagacccgctccaagttctactcgtcgactcgcttcatcgacgaggatggccactgcgtgtacggcggcagcgacctcaagcacgtgtgcatgctgactccccagctcgagtcgtcctcgggcggccccttcttccgcgacatcaactccaacaacgcgggcgcatcgaccaacctgtacttctacatgaacagcggccacgtccagaccgaggcgtaccgcatgggcctgcacggcccgtacgccatgcagttctcgcgctccggcatcccgcgcgccaaaaccctcgacatgtcgtggttcggtgagctcggcatcaccggctacgtccccgcgtcggcgcgcggcagggtcacgggccgggccacgggtgtgcagagcggtctggagggtgtcgtgcactggttcaacaacaacgcgcagtactgggcgcggaccaacgccgacggcaccttcacctcgccgctcatgaagccggggacgtacaccatggtactgtaccagaccgagttcaagatcgccaccaccaccgtctccgtctcggccggcggcactgcgaccaaggacattgccggcaactacttcaccaaccgccgcacgctctggcagatcggccagtacgacggccagcccacgggcttccgcaacgccgacaagttcctgcgcatgcacccctccgacagccgcatgtcgcattggggcccgctgacgtacaccgtgggcagctcgccgctgacggatttccccatggccgtcttccagggcgtcaacaacccggtcacgatcaggtttaacttgaacagcgcccccggggcggccacgctgaggatcgctacaaccctgagcttcatgggcagccggccccgcgcgactgtcaacaactggaccggcccggcaccgccagcgccgacgaagattgatagccgcggcgtgacgaggggcgcgtatcgcgggtatggggaggtgtataccgtggatatccccgcgggagtcctcgtggcgggctccaatacgattaccatcagctcgatctcgggcagcagcggggatcggtttttgagtcccaactttatttttgatgcggttgagctttacactaattaa

SEQ ID NO: 411 - DNA, 651 bp, Scytalidium thermophilum
atggtcaagttcctcgaaaccctcgcgcaagcagccgctttcctgggccttgcccggaggcagtggggcgccgaatcggaggtctatgaggacccggagaccggcctgacctttgcgtccttcaccaccaaccgcgacgtcaccgtccgcattgccatccccgaccagattcccgacgacaatgtgttcgacaccgtcatccagatcctcgctcccaagagcgtcggctggttcggctgggcctggggcggccacatgacctacaaccccctcgccattgcctggctgaacgggaccagcaacgtcgtcctctcgccacggattgcctacggctacttcagccctcctgagcacctcgagtcgagctacaccgtcctcaaggcgggtaccttcatcaacgaaacccactggcaggtcacggccaaggcctcgggcgtctcgcgctggggcgacgagtggattggctacaccgatctcgtgaccgactccgagaccaccttcgcctatgcctggtccgactggcccgtcgacgtccccgaggacgcggccagcaccttcatgatccaccagggtctgggacatccggttttcgatttgaggacggctaagaatgaggatttcgacgccaaggtggaggcgttgctcgagtaa

SEQ ID NO: 412 - DNA, 897 bp, Scytalidium thermophilum
atgcggaacttcattctccccgtgcttgccggcctcgcggccacggcctccgcccagaaggtcaaagtcatgcttctgggtgactccctgactgagatctcctgctggcggcccatggtctggaaccagctgatctctgccggtctggccgacaaggtcgatttcgtcggcagcatgaacggcattggcgcgagctgccccaggcccgccggtttcgacacgaaccacgagggtcactccggctggcaggtctatgatatcgccaggcaatacattaccaactggatgcggacctatcagcccgacattgtccagttcatgctcggcaccaacgacgtcaacattggcaagcgcaacacccagaccatcatcgactcgtacaccatgttgctgaacaacatgcgtgctgtgaacccgaacgtcaaggtcattatcgacaagatcatccccacgagctggagcgacgcgaccatcgaggctgtcaacagcgccatccccggttgggtccagcaacactcgactgcccagtctcccatcctgattgccgactgctctcgcgccaacggctacaccaatgccatgttggctggtgacggcgtccacaccaaccagcagggtgacgacttcattgccaggcagattggtcccaagctgatccagcacatcaacgaccacctgggcggtggcagcccatcctctacctcgggccccgttgtcaccccgacgactctggccaccatcacgactcctgctcctcctgctcagccgacccctccgcctcagcagaactgctcgcctcgttggggtcagtgcggcggccagggctggtcgggcccgacttgctgctctgagggcacttgcagggcgcagaaccagtggtactctcagtgcatctaa

SEQ ID NO: 413 - DNA, 849 bp, Scytalidium thermophilum
atgcggtggagccacctaacgttcctcggcgcggctctcctgtgcctctcccaagctgcgctgggtgagctcatcttctccgtcacggcgacccacaagggcaaacctatcccgaaggaaaagatccagctcaagcccttcgagttcggcatcagccgcaacggggagtcgaagcaggtctggacgtccaagagccgtaaggtccgccgtgccaacccgaccgccaccagcgcaaactggtgtggcgccgtcaagagcacgagctcgagcagccagatcaccaagattcatgccttgtaccaacatccaggctgcagcattcggtcgggcgtaaatagctacccgcaggcggtggctccttgggtgggtatcgatggaaatacgcatactggcgcattgttccagtcggggacactttgcaagattaacaactcgaccggcattgctgaacacgaggcctggtggcaatgggtgcctgcagcggcatacaccatctcatctctgacagtcagcgctggtgactggatcgaggtcactatcgaggccacctcaaccacctcaggcaaggtgacaattgccaactggaacaccgccaccgcctacgttgtcagcgtcagctcgggtcccaccctcggaagggttgacgccgactgggttgttgagcgcccctactacggtgcgtccctcgcgcccttcgctgctttcgaggacgtctggtttatcgaagcctacgcggagcgcacatcgggcggaaacctgggcatcctcggcgccacacagtaccagatcccgggcctctgcgccagcgaggagtatgacaacgagtcgcaggtttcatggtcactttga

SEQ ID NO: 414 - DNA, 1431 bp, Scytalidium thermophilum
atggccaagttcttccttactgctgcctttgcggctgccgctctcgccgctcccgttgttgaggagcgccagaactgtgcctcgacttggggccagtgcggtggcatcggcttcaatggcccgacttgctgccagtctggtagcacctgcgtgaagcagaacgactggtactcccagtgcttgcccggtagccaggtcaccacgacctcgactacgtcgacttcgagctcgtcgaccacctcccgggccacctcgaccaccagcgccggtggtgtgacctcgatcaccactgctcccacccgcaccatctccatccctggcggtgccaccaccacggccagctacaacggcaaccccttcgagggtgtccagctctgggccaacaactactaccgctctgaggtccacaccctcgccattcctcagatcaccgaccctgccttgagggctgcggcctcggccgtcgctgaggtcccgagcttccagtggctcgaccgcaatgtcacggtcgacaccctgctcgtcgagaccctctctgagatccgcgccgcgaaccaggcgggcgcgaaccccccgtatgccgctcagatcgtcgtttacgaccttcctgaccgcgactgcgctgccgcggcttcgaacggcgagtgggcgatcgccaacaacggcgccaacaactacaagggatacatcaaccggatccgcgagattctcatttcgttctcggatgtccgcacgattctggttattgagcccgactcgctggccaacatggtcaccaacatgaacgtcgccaagtgcagcggtgccgcctcgacctaccgcgagttgaccgtctatgccctcaagcagctcgacctaccgcacgtcgccatgtacatggacgccggccacgctggctggcttggctggcccgccaacatccagcccgctgctgagctcttcgccaagatctacgaggatgccggcaagccccgcgccgtccgcggtctcgccaccaacgtcgccaactacaacgcctggagcgtctcgagcccgccgccgtacaccagccccaaccccaactacgacgagaagcactacatcgaggccttccgccctctcctcgaggcccgcggcttccccgcccagttcatcgtcgaccagggccgcagcggcaagcagcctaccggccagaaggaatggggccactggtgcaatgccattggcactggcttcggtatgcgcccgactgccaacaccggccaccagtacgtcgacgccttcgtctgggtcaagcccggcggtgagtgcgacggcaccagcgacacgaccgctgcccgctacgactaccactgcggtctcgaagatgccctcaagcccgcccctgaggccggccagtggttccaagcttattttattcagctcttgcaaaacgccaatccgccgttctaa

SEQ ID NO: 415 - DNA, 1437 bp, Scytalidium thermophilum; identical to SEQ ID NO: 130

SEQ ID NO: 416 - DNA, 1191 bp, Scytalidium thermophilum
atgaagggcgctctgttgaccgctgccgctctcctgggcgtcgcccagggcgcgttcaccaagatgaagctgcagaagatcccactctctgagcagcttgaatctattcccatcgacacccagctcaaggcgctcggccagaagtacatgggcgcccggcccaagactcacaccagcgccatgttcgatggctcggtggtcgacaccaactccaaccacctggttcccatctccaactttttgaacgctcaatacttctccgagatcaccatcggaacgcctccccagagcttcaaggtcgtcctcgacaccggtagctcgaatctttgggtcccctcggtcgagtgcggctccatcgcttgctacctccactccaagtacgactcgtccgcttcctccacctacaaggccaacggaaccaagttcgagatccgctatggctccggcagcctgagcggcttcgtctctcaggacaccgtttccatcggcgacatcaccatccagggccaggatttcgcagaggctaccaatgagcctggtctcgccttcgccttcggccgcttcgacggcatcctgggtctcggctatgacaccatctcggtcaacaagatcgtgcctccgttctacaagatgatcgagcagaagctcgtcgacgagcccgtcttcgccttctacctcaccgacaccagcggccagtccgaagttgtctttggcggtgtcgactcgtccaagtacaagggcaagatcaccaccattccggtccgccgcaaggcctactgggaggtcgacttcgacgccatctcgtacggcgatgacaccgccgagctcgagaacaccggcgtcatcctcgacaccggcacctccctgatcgccctccccagccagctggccgagatgctcaacgcccagctcggcgccaagaagaactacgccggtcagtacacggtcgactgcagcaagcgcgactcgctcaaggatgtcaccttcaacctggccggccacaacttcactctgggcccctacgactacatcctcgaggtcagcagctcctcgtgcatctccaccttcatgggtatggacttccccgagcccgtgggtcctctcgccattctcggcgatgccttcctgcgcaggtactactccatctacgacctgggcgccaacactgtcggtctcgccgaggctgtttaa

SEQ ID NO: 417 - DNA, 930 bp, Scytalidium thermophilum
atgaaggccctcaccctcctcgccgccgcgaccgcggcctcggcgcacaccatcttcgtgcagctcgaggccgacggcacgcgctaccccgtctcgcacggcgtgcgcaccccgcagtacgacggccccatcaccgacgtctcgtccaacgacctggcctgcaacggcgggcccaacccgaccatgaagacggacaagatcatcaccgtgaccgccggcagcaccgtcaaggccatctggcggcacacgctgcagtcgggccccaacgacgtcatggaccccagccacaagggcccgacgctggcgtacctgaagaaggtggacaacgcgctgacggattcgggcgtgggcggcggctggttcaagatccaggaggacgggcacagcaatggggattggggcacgctcaaggtgatcaacaaccagggcattcactatatcgatatccccgactgcatcgagagcgggcagtatttgttgcgggctgagatgatcgctctgcacgctgccgggtcgccgggcggtgcgcagctttatatggaatgcgcccaaatcgaaatcgtcggcggcaagggcaccgtcaagccgcagacctactccatcccgggcatctacaagtccaacgacccgggcatcctcatcaacatctactccatgtcgccctcgagccaatacatcatcccgggcccgcccctcttcacctgcaacggcggcggcagcaacaacggcggcggcaacaacggtggcagcaacccccccgtccagcagccccccgccaccaccctcaccaccgccatcgcccagcccacgcccatctgctccgtccagcagtggggtcagtgcggcggccagggctatagcggctgcaccacctgcgcgtcgccgtataggtgtaacgagatcaacgcgtggtattcgcagtgcttgtaa

SEQ ID NO: 418 - DNA, 1278 bp, Scytalidium thermophilum
atgggtgtcctcagcacgctcgcgggcgttgtcgccctcacgtctgtcgtcttcgtccctgaagtggccgctcagtcatgccccggcgtcaatggccgcttccagccgcgcatgggctccggataccggtacagcgtcctggctaccggcctgagccaacctaggcatctcgttgtcgactcggctggcaacctccttgtggccgaggctggcaggcaagcggtccgccgctttgtgctgcaggatcagggcaacattgtgtgctcctcgtccaactctcagatcgtcagcgggacgaccaaccatggcatcgccctcagcgccgacggccggacgctcttcacgtccaacctcgcctcggtgacggcctactcctatgatcccttcacgggccaggtcggccagggccggcagatcatcaccggcatgacgatccagggcacccacccgacccgcgccctggccacctccaagttcagcccggacaccctcatcgtggcccgcggctcggccaacaacatcgacacggccaccacctcccagtcctcgggccgcagcatgatcaagaccttcagcatcagccgcatcatgcagtcgcccgtcgactacacccagggcggcgaggttctggcctggggcctgcgcaacattgtcggcatgactgaggatcccgtccacggcggcttctggtccgtcgagaaccagatggacgacctccgcctcaacgggcgcgacatccacaacgacaacccggccgagcggctcagctaccacggccggctcaacgagaccaacaaccggtacaagggcctcaactacggctacccgtcgtgcgtccctgcctgggacacggcgagcgtcggcatcaacggcctgctcgtcggcgcgctcttcaagcccgacaacgtccccaacgtctcgcaggacgagtgctccaacaaccgcatgacgggccgcctgcacttccacgcgcacaccgcgccgctggatatcaagttcaacaagaacgccacgtcggcgtacattgctttccacggcagctggaaccgcaaccccgccgacggctaccgcgtcatgcgcgtcgacttcggacccgacggccagcccgttcaccccgtcaccagcaagaccgctcagatccctgtcatggagaactccaacatcggcgcctgcccgttcaactgcttccgccctgtcggcctggcctttgatgacaagggccgtctctatgtctcgagcgatcagtcgggtgagatttatgtcatctacggggcgtga

SEQ ID NO: 419 - DNA, 684 bp, Scytalidium thermophilum
atgaagctcagcgtcgtcctcacaggcctggcggcagccctcgccgaggctcattacaccttccccagcgtcggcaacaccgccgactggcaggtcgtgcgccagacgaccaacttccagagcaacggtcccgtgacggacgtcaactcggaccagatccgctgctacgagcgtttccccggccagggggcgcccggcatctacaatgtcaccgccggccagaccatctcgtacaacgccaaggcctctatctcccacccgggccccatggccttctacatcgccaaggtccctgccggctacaccgccgccaactgggacggcaggggcgccgtgtggtccaagatctaccaggacatgccgcgcattgcggggagtctgacctggcctaccaatggcgcccgctccgtctcggtaaccatcccccgctgcctgcaagacgggcactacctgctgcgtgcagagcacatcggcctgcacagcgcgagcggcgtgggcggcgcgcagttttacatttcgtgcgcccagctctacgtcagcggcggcacgggtacctggaacccgcgcaacaaggtcgcgttcccgggcgcctacagcccgacgcacccgggcatcatgatcaacatctactggccggtgccgacgagctacacgccaccggggccgccggttgagacgtgctga

SEQ ID NO: 420 - DNA, 1107 bp, Scytalidium thermophilum
atgctgccagcggtgctcctgcttctcgccagcggcctgtccgctgctgcggctttgcaagtcagtgtggacggccaatgcggcggtgaatttacatgtgtcggctcaacctttggcgattgctgctcccctcatggttggtgtggaagttcgccagaccactgcggtgctggatgtaatccggactatggcaactgctggggaagctcgtccccagtggcaacctcgactaagccatctatcacggccagcccaagcagcgatagctgccccaacaccgggacggtcctcgtgacagagaccgtcaggcaaactctgactcaaattctcaccagcctcgtcaggtcaacgaccactgtcaccagcgtggtccgctccaccagcatggtcctcgctagttcagccaccaccgcaactgccaccgtcaccgcgaccgcgacgaggcagaccactgccacggtcaccacaaccgcgacatcgctcgccagctccaccaccgtggtgacctccacgtcgaccgtcacctggaacacggccgtcaaccaaaccgtaaccgtgaccagcacctccctcctcttcgagacctataccaccactcggaccgtcgatgccacccgcactcctccgccactgcacgtcacctcgtggcttaccctcacccaaatcgtgaccaccacgtcaaccgcaacagtcaccacctccatccccgtcaccaccaccttgcagccaacttgtcgtgacgtaaccctcaccgcgacgcgggtgaccacaacagtcaccacggccaccgccaccgccgcgccgagcactgtgacgctcatctccgtctcgcgcgtcacggtgcccgcgaccacggttactctgacccaaacggcgacggctacgctgacgcgcacggccacggcgaccgcgacagtcacgcgcacggcgaccaccacggcaaccaccacccggtcgattacgacgacgcaaacggcgacggtgacgcgcttgccgtgggagacggggaccggcggagggaataccttcaccatcttcccgacgggcggcgggccgattgtgacgattattccggggccgattaggcctggggaggcgggtgcgtaa

SEQ ID NO: 421 - DNA, 1197 bp, Scytalidium thermophilum; identical to SEQ ID NO: 136

SEQ ID NO: 422 - DNA, 978 bp, Scytalidium thermophilum
atgaagccctctgtctcgaacctcgccagcctgggcctcgccctggcctctacagcctcggcccaagcaacgtgcgacctgccttccacctaccggtggacatccaccggtccgcttgctgagcccaggaacggctgggtctccctgaaggactttaccactgccccttacgagggcaagcacctggtgtatgccaccacacatgaccgcggcaccacctggggttccatggctttcagcctggtgaacaacttcaccgagctgtccacggcgaaccagatgcccatgaaccaggccacggtggcgccgagtttgttctacttcccgccgaagaatatttgggtgttggcgtatcaatggggcccacacgccttctcctacaagaccagcaacgacccgaccaaccccaacggctggggtcccgcgcagccgctcttcacaggcagcatcagcggctcgtccacgggtcccatcgaccaggcggtcatcggcgacgacacgaccatgtacctcttcttcgcgggcgacaacggccgcatctaccgcgcgagcatgcccatcgaccggttccccggcaactttggcaactcggcgcagatcatcatgcaggactccaccaacaacctgtttgaggcggtgcaggtgtacaagctccagggccagcagaagtatctcatgattgtcgaggccatcggcgggcaagggcgctacttccggtcgttcacggccacgagcctgtcaggcagctggacgccccaggccgcgagcgagagcaggccgtttgccggcaaggcgaacagcggggcgacctggacgaatgatatcagccatggcgagctgatcagggtcaacgcggaccataccatgacgattgatccgtgcaatttgcaacttttgtatcagggcaggtcaccatggtccggcggcgattatggacagcttccttaccgccctggcctcttgacgctccagagatga

SEQ ID NO: 423 - DNA, 813 bp, Scytalidium thermophilum
atgcgcttctcactccttgtgacggcctgcctctccctgctgccgggcggcgccctctccctgcccgccgcctccaccccaaccaccagcagcagcggcacatcggccccgaccaccaccgccttctcctccctctccaccacttccggctacaacctctccgcgccggccgtcccgcgcttccccatccacccgtcctgcaacgtcaccctgcggcggcaaatcgaccgcgcgttgggggagatggtcgagctggcggcgcacgcgcgcgaccacatcctccgctggggcgacgactcgccgtttgtgcagaagtatttcggcaacaccaccgcggcaggaggcacggcgaccgccctgggctggttcgcccgcgtcgcggaaggggatcggagggatatgctgttcagatgtgacgatccggatcggaattgcgcgacgcaggagggctgggctggccactggcgcggcagcaacgccactcaagaaaccgtcctctgcccgctctccttcgctcccggccgccggctgcatctcgacagcatctgcgggctgggtcacaccgtgaagggctcgccgctcaacaccttctgggcggtcgacctgctccatcgggtgcttcacgtcccgcgcatcagcgagggcgtggtggaccactttgcggatggctacgacgaggtggtggagctggccaagcgggatccccagctcgcggcgagggatagcgaggcgctgcagttgtttgccttggaggtgtatgcgtacgaggtggcggcgccgggggtggggtgtactggtgatgaggagaaataa

SEQ ID NO: 424 - DNA, 3261 bp, Scytalidium thermophilum
atgttgatcaccaaggctctctgctggctcggccttagcgccgtggcctcggcgctgggccaggagaggatcatctcgaccgacggtcgcaaggccgagcttcaaatcgccggcgacaagatcggccgcggccagatcctcgtgtccagtaacgactactggggcgtcatccgcgccgcgggtgacctcgccgtcgactttggccgcgttacgggtgtcaattacaccctcagcaacggcgagaagggggcgaagccggccgagtatgtgtaccatccagtgaataacaagaataacactcatttctctaccaccggcacggagcggttctacggcccggcctactcggacccggagcccggcaagatcgtcatcatcgccggcaccatcggccattctaccgtcatcgacaagctgatttcgtcgcgcgcgctcgacgtgtcggccgtcaagggcaagtgggaggccttcaccagccaggtggtcaagaacccggtgcccgggtgcgccaaggcgctcgtcatcgccggcgccgacccccgcggaaccatctacggcatctacgacgtgagcgagcagatcggcgtgagcccgtggtacttctgggccgacagcccgccgaagaaggccaagaatctttacgttaccaaggccaagaaggttcagaactcgccgtcggtcaggtaccggggtttcttcctcaacgatgagcagccggctttgaccaactgggtcgctgcccattgggaagacacaccctacggtgccgggtacggcgccggcttctacagcctcatcttcgaggtcctcttgcgtctgcgtgccaactacctctggccgacgctgtgggcgtccatgttcatggtggacgacccggccaaccagccgctggcggacgcgtacgagatcgtgatcggcacgtctcacaccgaacccctgatgcgcgcgcagaacgagttcggcaccttctacgagggcccgtgggcgtacaacctcaacaacaagaccatcgacgagtacttccgctacggcgtgcagcgggccaagccgtacgcgcgcaactcgctgtggaccgtcggcatgcgcggcacgggcgacacggccatcgagggcttgggcgtcgagcacatcgtcgagatgctcaccatcctggtcggcaaccagcgccgcatcatggccgagggcctcggcgtcgacgacgtcactaccatcccgcaaacgtggtgcctgtacaaggaggtcatgacgtacctgttcgcgggcttgcaggtgcccgacgacgtgacgctgctctgggccgacgacaactggggcaacgtgcgccggctgccgctgctcaacgagacggaccgcgccggcggcgcgggagtctactaccacttcgactacgtcggcgacccgcgcaactacaagtggatcaacacgatccagctgaccaagacggccgagcagatgcaccacgcctacgcgcgcggtgtggaccgcatctgggtggtcaacgtgggcgacatgaaggcgctcgagatccccatcagccacttcttcgacatggcctacgacgcggagcggtggcacgtcgacagcacggcggaatgggccgaggcgtgggccgcgcgcgagtttggcgagaagtacgccaaggatgccgccgacgtcatgatgcgctacggcatgtacgccgcccgccgcaagtacgagctgctcgagccgcacgtgtactcggtcatcaactacaacgaggccgacgccgtgctggcccagtgggccgacctggtcgcccgggctcaggctgtgtataaccgtttgcccgcggagacgaagccggcgttttttgagactgtcctgcacccagcgcttgcgggcgagattgtccataagattcagatcggcgccgcacgcaacgcgttctacgccggccagcgccgcaatgctgccaacacggtcattaacgaggttctggcccactcggctgcggatgccaacctcacgcggacttgggatgccctgctggacggcaagtggaaacacttcatggaccaaacccacctcggctacgacggttactggcaacagccgatgcgcaacgccctcccgcctctcgtctatgtccagaccgactttgccgccgtgtccggcgaagtcggcttcggcgtggaaggctccaacgccacggtcaagggcgatgaccggtggcatcccaacacgagcaacgacctcgccgtccccccgctcgagccgtacggcccgtcgatgcgctactttgacgtcttctcgcgcggcgtgcgcgagtgcgcctggtccgccgcgcccgagaagccgtggatcaagctgtcgcagtcctccggcgtcgtcggcggcagcaagcccgaccagcgcgtgctcgtgtccgtcgactgggccaaggcgccgcagggaacctgggaggagacggtcaagattaacctgaccgtgccctgcgacggcagcgactcgtatgggttcgcggacccgcacatcctggtccccgtgcgccgccgcgctgtcccggcgtcgtttaagaagggcttcgtcgaagccgatggccacgtctccatcgccggcgagcactactcggccatcatccccgccgcgaaacccctgcccgaggtctggcgcgtcggcaaacgcgaaagcttgcagaagattaccaagcccacctaccacaagttctcgtcctacggccgcaccggctcaggtgtgggtctgatcccgctcgacgcggagaaactcaccgtcgacacggccccggccctcgagtacgacgtctacctcttcaccaaccactccgctgccaacgtcacgctgcttatttcgcctgcgctcaactacctgggcgagtacgacccgcttgagtacgccgtgtccctcttccccgctgccgacagctcgcctgccccggagcaaatcaagcgcgtcgcgcctgtggggaggacggtgggcaccagcatgcccgcgggatggcagggcgccgtggcggatggcgtttggggccgcacgggcggatacacgaccaccagctttgcggtgccgcgcgagggcgcgtacaagctgcgcgtgtgggcgctgatgccgggagtgattgtgcagaaggtggtgattgatttgggaggggtgaagcagagctatttgggcccaccggagagctttttggtggggagggataaggtgggcgcgaggaatgtgacgagctttttgaacgagcccggggtggtgggaggctgggggagggggaggttggagtga

SEQ ID NO: 425 - DNA, 1059 bp, Scytalidium thermophilum
atgctggtgcctctccttgccttcgtgcccctggcatctgcccaggggttctttggaggactgaaccacctccgtttcggatgctcacagctcactatcgagcggcttgacccccttgtcgagcctggcaaattccctacatcgcacatgcaccagatcattggaggcaatgccttcaacgtcagtatgcccgtcaccgacatcgcctcgctggcgacctgcaccacatgtggcccttctgaggaccgctcgaactactggacggcgaacttgtacttcaaggcgcccaacggcagctacaagcgtgtgcctcaggtccccaaccggttcttgttcaacgatcgcttcaccacgcagaccgacggtggtgtgactgtgtactacatcagccccggcagagggcaagtcacggcgttcaagcctgggttccgcatgttcgtcggagacccggcacgccgcactccgttgtacaagtcccagagctgcttccgttgcttcagcgctcccaacttcggcggagatgacctcgctccttgcagcgacagccgccgtgactttgagggcttcccgccccagccgtgccccggcggtatccggtcaaacgtcttgtacccgacgtgctgggatggcaagaacctggacagcccgaaccataaggaccatgtcgcctaccccgtgaacgggccctccaacttcctgtcgactggcaactgccctcctagccaccccgtcaagatcccgcagctcatgctggagattgtctgggatacgaccaagttcaacgaccgttcactgtggcctgccaacggccagcccttcgtgctcagcactggcgatcccacaggctatggccagcacggagactacatcttcggatgggagggcgactcgctgcagcgggccatggacgccaacggctgcttcgctgcggactgcggcggtctgaagtcgcagagcattgagcaagccaagagatgcacgatccccaagagagtcagggaagacgtcgatggatggttcgaccatctgccgggtagggagggtatgcacgacatgtaa

SEQ ID NO: 426 - DNA, 1095 bp, Scytalidium thermophilum
atgcgtttgtcaagcaagtcggcggtgcttgccctgtcggcgacgctcgctgaggcggcgccccagttcggcggcatcttccagcagacgatgcttcgtttcggctgcgccaacatcgtcattgaccgtgtggaccccctcgtcaacccgggccagatccctagccctcacgtccaccagatcgtgggtggcaacgccttcaacgtgaccatgcccaccgacgacgtcgctgagcacgctacctgcacaacttgctcgttcgccgatgacttcagcaactactggactgccaacctctacttccgtgcccgcaacggctcttacaagcgtgtgccgcagggcagccatgcattccagttcaacgaccgctacagcacccagactcagggcggtatcctggtctactatgtctcggaccagcctggccgcgtcacggccttcaagccaggcttccgtatgctcgtcggtgacccgaacatgcggtctcgccccgacaacaggctgaagcgccagaactgctaccgctgctacaccggcccgaacttcggtggcgacactggcgctccctgcatggatgactctgtcgactccgagaggctgcccaacaaggtctgcccgggtggcattcgcagcaacatcctcttcccaacctgctgggacggcaagaacctcgacacccctaaccaccaggaccacgttgcctatcccaccaacggcccgaccaacttcctgggcaccagcggcccctgcccggcgagccacccggtcaagatcccgcagctcatgtacgaggttgtctgggacactacgcagttcaacaaccgcaacgagtggcccgccgacggctcgcagccgttcgtcctctcgacgggcgacccgaccggtctcggccagcacggcgactacgtctttggctggaagggcgactcgctgcagcgcgccatggatacggccggctgcttcggcgctcagtgcgctaacctccgcacccagagcatcgaggtcggcaggcgctgcaccgtcaggcgtgctgctcacgaggatattgatggctggcttgataagcttccgggtgtcgagggcatgccgatgtaa

SEQ ID NO: 427 - DNA, 2334 bp, Scytalidium thermophilum
atgaccaggctgaccaacatcggagtcctcacggcctatgcggccggcgctctcgccggggtcctccccgactgcggcaagccgcctctgagcctcaacaagatctgcgaccagaatgcgagcccgcgggagcgcgctgaggcgctcgtggcagctatgacggttgaagagaagctggccaaccttgtcagcaaagccgctggcgtcccccgtctgggcttccctgcgtacaactggtggtctgaggccctacatggcgtcgccggtgcccctggcatctcattcgccccccccttcgactatgccacttcattccccatgcccttgatgatggcggcggccttcgacgacgatctcatcgagaagattgccgtcgtcattggcaacgagtccagggcgtttggtaacaacgaccgttctggcatcgactactggacccccgatgtcaacccgtacagggacccgcgttggggccgtggatctgagacgccgggtgaggatgtcctcgtcatcaagagatacaccaagcacctgctgcgtggcttggaggggactagcaagacgcgccgcatcatcgccacctgcaagcactatgccggctacgacctcgagtcgtggcagggaacgacccgccatgactttgacgcgcgcatcacgccccaggagcttgccgagtactacatgcagccgttccagcagtgcgctcgcgactccaaggtcggcagcatcatgtgctcttacaaccgggtgaacggagtcccggcctgcgcttcggactacctcctcaacaaggtcctgagggagcactggaactggactgagagcaacaactacatcaccagcgactgcgaggccgttgccgacgtctccctcaaccacaagtatgctccgaccctggccgctggcactgcgatgtgtttcaacaacggcatggacttgagctgcgagtatgaagggtcgtccgatattccgggcgcatggaacagcggagccctcaacgagaccatcgttgaccgggcgctcgtccgcctcttccagggcctcgtccacggtggttacttcgacggccctacgaacgagtgggcatcccttggccgtgctgacgtcgacaccccgtacgctcgtcagctggctctgcagtcggccattgacggccttgtgctgctcaagaacgaccgcaacaccctgcccttacctctcaggaagggctccaaggtggccatgatcggcttctgggccgacgacgggccgaagctcaagggcatctacagcggcccttcgcccttcatccacacccctgtctgggctgcccgtgaagccggctacgaggtcgccgttgctcctggccccattctgcagacgaatgctgcccaggacaactggactgaggctgccctcgctgcggcgaagaagtctgattacatcctctacttcggtggcatcgatacgaatgctgtcaacgagggtgttgaccggctcaccatcgcttggcccgaggcccagctgactctcatcaacaagcttgccgccttgcgcaagccgctcgtcatcatccagcttggcgaccagcttgacaacacccctctgctcaagctccagggcgccccgtcgattctctgggccaactggccgggtcaggacggcggtccggccatcatctccgttatcaacggcactcacgctcccgcgggtcgtctccctgtgacccaatacccggccaactacaccgagatcgtccccatgaccgacatgaacctccgtccaaacccgagcaccggcaaccctggccggacctacaagtggtacccgcacgccgtccagccgtttggcactggcctgcactacaccactttcgacgctcgcttcgaccgtccgctgccagcccctggaaagccgggtacgccgggcatgaagccggtcgtcctgaagctcaacatccaatccctcctcgcggattgcaagaacacttacaaggatacttgcgcccttcccccgctcgaggtgcaagtcaccaaccgcgggccgcgccacacctcggattacgtcgccttggtcttcattaccgaaaccccaggccccaagcctcaccctctcaagagcctggccacatatggcaggctgagaaacatcaagccgggtcgcaccgagcgggccaagctcgaatggactgtggcttcgctggcgaggcacgacaaggatggcaactcgatcttgtacccaggtcgttacactctggttctggatgtgccacagaaggatgaggtcgttgtggagttgagcggcaaggaagaggtgctggacgtctggcctgttgaccccaacctcaagaactga

SEQ ID NO: 428 - DNA, 870 bp, Scytalidium thermophilum
atgttctctaggcgcccctcgttgctgagcaccctgctgctcgcgctgacatggctcagcaccttcgtgctcgcggccccgtcggcgggctgcggcaagaacccgaccctccgcagccaggcttacaccatcaacgtccaaggccgcaaccgctactacaccctccgcgtgcccaacaactacaacaaggacaccccgtacaagatcatcttcctctggcacccgcgcggcggcagcatgcagaagatcgtcaatggcgaggaccccaaccgcggcggcatcctgccctaccacggtctgcttcccttcgccaacgagaccgccatctttgtcgttcctgagggccagaaccagggctgggccaacatgaacaacgaggacacggccttcttcgaccgtctcgtcgagaccatcgagaacgacctctgcgtcgagaccagcctccgcttctctaccggcttcagctggggcggtggcatgtccttcgctcttgcttgcgctcgccctcagcaaatccgtgctattgctgtcatctctggcggtcttctcagcggttgccagggcggtactcagcctgttgcgtactacggccagcacggtacttccgactcggttctcaatgttcagatgggtcggcagctccgcgaccagttcgtccgcaacaacggctgccagcgtcttgcctacgagcctcagcccaacggcggccgctccgtcaaaacggagtaccagggctgcctccctgactatcccgttcaatgggtgatccacaacggagaccacaatccctcgcaggttgatcagggctcgtcgacgccgtttgcgccgggcaacacttgggagttcttctcgcgcttctccccgaaataa

SEQ ID NO: 429 - DNA, 1302 bp, Scytalidium thermophilum
atgccgtcgctgttaagactggccgtctttggccttgcctttatctcccaagccagcgccgtcatcctacaaaatggccaggttagggaggtacacttcccagataccaagattgatcccaagcactacaccttcagaacgtatcccgccaatgcccctgagatctcgtacaaggggcgctgggactcaaagcatgtatcgtggtggtcagccccggggatcaagttcggctatacgggccaaacggttgccatcacctttggcaacctaaccagcaatggcgtgcttgtcggttaccgcatcggcggactcgattggatgttcaccaatatcacggccggtgctacgcacctccttgtgagcccagagactccaggctccgactttgttggccccatccgcccatggatttttgaactgcgcgtcaccaactgggcctacggcgtgcagataaacaaggtccatgtcgctgccggggagaggctcgtcaagattcccgaccattttcgtcgcatcgaggtcatcggagacagcctcgctgcgggcatgtacgctagctacgagggactgtccagctgggcatacggactgggtgaaggcttgggaaacactgagtactccgtgattgcctaccccggtatctgtgttgcggaccaggagtgctggggaaatccccgcggccaggttcatcaatggttttacacgtcggacacgagttatcgtgcctccgtcattcacggtgataatcccgagccgtgggacttcgagaagcatcccccagccgatcttgtcatcattaatcttggaaccaacgacaacaacgagcataacggcgtctctacggaggcgcacatcgatgcttacactaagctcatccaaggagtccacggaaagtggcctaacgcacaggtcattgtgatgtcactctggttgggtttctaccaatccggcaacacatacctctcctacgctccacgcggctgggtcaaagagatctacgacatggttcagtggttcaactcggacgactacctgtacaatccggtcgtgtacgatggcgttaccaagaagacgacaaggctcaagcgccgtgacaagccctttgtgcactacttcaacaccacgggcatcctccagcacaacgacatcgccccgcagtggcaccctacggatgttggtgctatcaaggtggcgagccacttgcagcagtttataagaatgaagtttggctgggagctggaggcgacggggcctgaggtgtatcacgaaaccctttactggaatgatgagtcgggatactaa

SEQ ID NO: 430 - DNA, 1062 bp, Scytalidium thermophilum; identical to SEQ ID NO: 145

SEQ ID NO: 431 - DNA, 864 bp, Scytalidium thermophilum
atgtatcttctacccatcgccgcgaccgccctagcattcaccaccaccgcatacgcccacgcccaagtctacggcttacgtgtcaacgaccaacaccaaggcgacgggcgcaacaaatacatccgctcgcccagcagcaattcccccatcctgtgggaccacgtaacccacccatccctcatctgcaacatccgcgacgacaaccaacccccgggtcccgcgcctgacttcgtccgcgccttcgccggcgaccgcgtggcgttccaatggtaccacgctcgccccaacgacccgacggattacgtcctcgacagctcccacctcggcgtcctcgtcacctggatcgcgccgtacacggatgggtccgggaccggccccatttggaccaagatccaccaggacgggtggaacggcacgcactgggccacgagccggctcatcagcaacggcgggttcgtcgagttccggctgcccggctcgctaaagcccgggaagtacctggtgcggcaggagattatcgctctgcaccaggccgacatgcccggtccgaaccgcgggcctgagttctaccccagctgcgcgcatttggaggtttttgggtctggtgaggcggcgccgccgcaggggtatgatatcaacaaggggtatgcggagagcggggataagttgtggttcaacatttacatcaacaagaatgatgagttcaaaatgcctggaccggaggtttgggatggtggtgtcgatttggagagcgatgggcaactgaggaaccaggcaagccaaggtgaaccaacacagatgagtagccggaaggagtggtactatttttgtgagaagcagttcatcgtgactctgtattattga

SEQ ID NO: 432 - DNA, 3204 bp, Scytalidium thermophilum
atggacttcatttttcgtcaggatggcaaaccagttgggatttcttccctcatcttcatctgcctctgcgccagtcaagctttctcagcaaacgtcacctccccgtggccgttgctaggaaacggcctccaggaggtggtgcaatgggaccactacagcatcatcatcaacggcgagcgcctcctccttctcggtggcgagatacacccttttcgccttccagtgcccgagttgtggtgggacacgctccagaaaataaaggcaatgggtcttcgcatggtctccatttacactcactggggtttccactccccgacccctgataccgtcgacttcgccgctggcgcgcacaacatttcgcgctttctcgagatggccagggacgtgggcctgtacgtcctcattcgccctggtccgtacatcaacggcgaactcaacgctgggggcatgccgttgtgggtgaccaccggttcccatggcactccacgatcaaatgattctgctttcaccgatgcctggacgccgtacctggacggcataggccgcctgacccgcccataccagatcaccgagcagggaacagtcatcatgtaccagattgaaaacgagtacggttatcagtggcgggatgagcgcaacaaggtacccaatcttgaagctgtgtcgtacatggagaagctccaggagagtgcccgaagaaacggaatcgtggtgcccctcgtgcacaacgggcccaacatcaatactggtgtttggtcaagggattatgacaccgttggcgctggagggaatgtggatatctacggggttgacagctatccccaatgctggtcctgcatcctggaagaatgcggcaacatcaccccctgggccgtgtccgactaccacagccacttccagcacatttccccgcgtcagccatcattcatgcccgagttccaagcaggtgccatgaacccatgggctggcccggccggcggctgcaaagagcggacaggcgtcgacttcgtgaacttctactatcgcgatgccctagcccaacgagttaccatcctgaacctctacatgatctccggcggcaccaactggggctggctctccgcgcccttcatcggcagcagctacgactacggcgctgccatctctgaggaccgcagcattggtgacaagttctacgagatcacgaaccttgctctatttgcccgtgtggctcatgacctggctgccgcggatgttgttggcgctgggaccgagtacaccaacaatcctgccgtgtttgtcacggagctcagaaacccagtaactggagccggattctacgtgctccgtcacgcgaaaactgcctcggattctgaggagcgctttcgaattcgcctcaagaccagtgtggccgaaatcccagtcccgcgactctcagtagcggcggccacgttgagcggccgcgaaggcgagatattggtcacagatttccggttcggccggaaccatatactttactacagtctagccgaagttctaacctacacggtcctagatggcggggagacaaccgtgctcgttctatggactccggcaggtagaattggcgagttctatctggctggcgctggttccgctattttcgttggatcgaaacaagttacgatcgcccccggcgacgatggaatcctggtcggatatgtccaaactgaaggaatgatacccgtcaagtttgataacggggtaacggtgctcttgatcgatcgcaaaaaggcgtacgaggtctgggtcccggtattaacttccgatcctcgagtcccagaggatcaaactgctattatcatcacaccctcccttgtccgctccgcctccctctcctccaccactctttccctcactggcgacaccaacacaacagctccagatgaccggtctatagaaatctttacgtcttctcgtgtcaccgaggtcctatggaacaaccgccccctcaactccattttcacgacaccgtggtccagcattcgcggccttatccctccgccttccggacaccttgctcttcccacgccttccatctcgggatggaaatcccgcgatgccctccctgagcgacaccccgactattcccctaccagcgccgcctgggtcttggcaaacgatacttcgtcttccaatccagcagtcgatagaaccacaacgaccacgccgtatctgtttgcggaccagtacggctttcacaccggtgtcaagctttggagaggggtgtttcgccgtcctgtgacgaacagcactccttcttcgaccggcgacatgccggcggccccaaccggagcgtacctccgcattcaaggcgggacggcgcacgcctgggcggtgtatctgaacggcgagttcattgggtcttgggtggttgatagcagcgtgtccgtatcggagaaggagctgcccttccctgcccggctgcttggtaatgaggagaacgtccttctagtcgtccaggaagacacgggtcacgaccagcttgctgcagcggtgaatcctcgaggcatcttgaacgtcacgctgctggcaagccccaccaacgatgccggtgctggctggcagttttcggaatggaaaatcgcaggcacagctggagacgggcgcaaatcgggtcaaccatacggcaggccactcgacacggtccgcacgcggtacaacgaaggcggactggcgcccgagaggcgagggtggcatctgccagggtatgatctctcctcggatgaagattcgacgtcatcttggaccgagtctagcccagaggacgacttcaccggcgctggtgtgcgcttctaccgtggtattttgcatcttgatgtaccccgtggtttggacgtgtcgttggcgtttcgcatcaaggggctcaatggcaatggtacggtgtttggagaggagccggggggctttcgggtgctgttgtttgtcaacgggtggcagtatggccgctactatccggacattgcgtccgaggacacgttccctgtcccaccgggcgtgctggactacgggagtggtggtggggagaacgtgattggcttgatagtgtgggcactgcaggagggcggcgccagtgtcaaggtggatgtggtggtacggtacactttggattcttcccttgatgtgaactttgatggacggtatttgcggccggaatggagtcgggagaggctgcagtatgtgtag

SEQ ID NO: 433 - DNA, 714 bp, Scytalidium thermophilum
atgaagctcctcgctcctctgatgctggctggcgccgccagcgcccacaccatcttcacctccctcgaggttgatggccgcaactacggcacgggcaacggcgtccgcgtcccctcctacaacggccccgtcgaggatgtcacgtccaactcgatcgcctgcaacggcccgccgaacccgaccagcccgaccgacacggtcatcaccgtccaggccggccagaacgtgactgccatctggcggtacatgctcaacacccagggcacctcgcccaacgacatcatggacagcagccacaagggtcccactctcgcctacctcaagaaggtcaacgatgcccggaccgactcgggcgtcggcgacggctggttcaagatccagcacgacggcttcgacggcaccacctggggcaccgagcgcgtcatcttcggccagggccgccacaccatcaagatccccgagtgcatcgagcccggccagtacctgctgcgtgctgagatgatcgccctccacggcgcccagaactacccgggtgctcagttctacatggagtgcgcccagctcaacattgtcggtggcaccggcaccaagaagcccagcaccgtcagcttccctggcgcttacaagggcaccgaccctggcgtcaagatcagcatctggtggccgcccgtcaccaactacgtcatccctggccccgatgtcttcaagtgctaa

SEQ ID NO: 434 - DNA, 1230 bp, Scytalidium thermophilum
atggcgaggctctctcgcgccctgctggcggctgccgccgtagccgccaatgtctcagcgcaacagcaacaacaagcacaagaacagctccccgagggattgcacggcctcatggtggccgccggcaaggagtatttcggcacggcgaccgatgtcaacaacatcgaggacgaggactatcagtccatcctccagtaccagggcgagttcggcatggtgacgcccgagaactcgcaaaagtgggagtttactcaacctcgtcgggacgagttcgtctacaccaacgccgacaaggtcgttgggagggcagaagagattgggcaattagtacgatgccacgccttgacatggcattctcaattgccgatgtttgtctcaaccacgcaatggaatgcttccactctcgcctctttcctaaccacccacatcgacaacgtcgtgacccacttcgccgggcagtgctacgcctgggacgtggtcaacgaggcgttaaacgaagacgggtcctatcgaaactctaccttttaccaatacctgggcgaggagtacatcacgctctccttcgaggcggccgccaaagccgacccggccgccaagctctactataacgacttcaacctcgaaacctccccgaaaaaggctgccggtgccgagcgcatcgtccgtctcgtccaggaggccggcgcgcgcatcgacggcgtcggcttccaggcccacctcgtcgtgggccaaaccccgccgcgcaagaacctcaccgccctcctctcgcgcttcgccagcctcggcgttgaggtggcctacacggagctcgacattgctcacgagttccccaaaaacagctccaaccggatcccggacgccgcggcgctcgagcagcaagccgaagactacgtcgccgtcgttggctcgtgcctggacgagcccaaatgcgtcggcgtcacggtctggcagttcaccgacgagtacagctgggtcccggacgcgtttgaaggccgcgaccaggcgtgcttgtggacgcgcgactacaagaagaagccggcctacgacgccgtgtccaagctgctgcgcgaagcggcagctaacaacacgggcgtgaacaccaactcgaccgaggatatcttggagccgataccctccaatggggcagcggcggcagcggcggcagcgggcggttgggtgggcagggttgctctgggagcggccttggttgtggggatggctttgctttaa

SEQ ID NO: 435 - DNA, 1104 bp, Scytalidium thermophilum; identical to SEQ ID NO: 150

SEQ ID NO: 436 - DNA, 1743 bp, Scytalidium thermophilum
atgcgggtgttcaacgtcgtcgcgaccctcctcctcgctggtctggtcgagtccgccggcaggggtttaggccatgcaggcaaacgccatgtccagcacgccgcgaagagagccatggccgctcagcaacagcagggtcctgagaatcttcacctcccggtcgtgtcttcgcggaaggcggggaataggttcttgactaacaagacggagccattcaccgttgacgggacggccatccccgatgttgacttcgacgtgggcgagtcgtatgccggtttgttgcccatcagcagcgacccgaacgatgagaacaagctctttttctggttcttcccctccaccaacgaggcggcgaataaggagattttgatctggctcaatggcggacctggttgctcggcctttgagggccttcttcaagaaaacggaccattcctctggcagtacggcacgtacaagcccgtccagaacccctggagctggcacaccctgacaaacgtcatctacgtcgagcagcccgtcggcacgggcttctcgaccggcactccgtccatcaccaacgaggaggagctggccgcccagttcatgggtttctggaagaacttcattgacaccttcgacatgcacggttacaaggtgtacatctctggcgagtcgtacgccggctactactgcccgtatatcgccaaggccttcctcgacgccaacgacaaaacctacttcgacatgtcgggcatgaccatctacaacccgctcatcacctccttcgagatccaacaacaccttcccatcgtccagttcgtcgactactggaccggtctgttcccattcaacgactccttccgcgccgacattcaccagcgcgacaagcagtgcggcttctccgactttatcgcccaacacctcgtctacccgcccaagggcccgctgcccagcaagcttcctggcacgagacccgacggcacgctcaagcccgagtgcgataacctctactgggacatcttcgacgcaatcatgctcatcaacccctgcttcgacatctaccaaatcaccaccacctgcccgctgttgtgggacgtcctgggcttccctgggagcatgccttacctgcccgagggcgcgcagatctacttcgaccgggacgacgtcaagcaggccatccacgcgccgacggggttcacctgggaagaatgctccagcgacgacgtgttcgtcaacggcaccgacctctccccgccgcccgtgctcgacgtcctgcccagcgtcatcgaccgcacgcaaaacgtcatcatcgcccactcggcgttggatatgatcctgctcgccaacgggacgctgctggcgctgcagaacatgacctggggcgggaggcaggggttcacgcgccgcccggacgagccgttctacgtcccgctcaacaacatgaccgatctttcaacgctggcggcggctggggtgatgggcagcttggtgtcggagcgcggactgacgtacgtcggtatcgcgctcgcggggcatatggtcccgcagtatgcgccgtcggcggcgtacaggaatgtggagtacatgctgggcagggtgggatgtatgaattgtaccgtgccgtttacgacggatccgtttacgccgcagagccaagggccgttggggaaggggacggcgccgcaggggtggagcgacattacaggctttgggaaggggaagggaaagccgcatcgggtggtgaaggggaagaggctgtga

SEQ ID NO: 437 - DNA, 534 bp, Scytalidium thermophilum; identical to SEQ ID NO: 152

SEQ ID NO: 438 - DNA, 1155 bp, Scytalidium thermophilum
atgacgctcaagaacctgttcgcgagcgcgctgctcgccgccgcgcccgcctttgcccacccgggccacaaggatgtggtgccccagggccccctctacaggcgcaacctcgaccactgcgcctggaagttcgaggagcctgagttcgtcaagcgcaccgttgaggtccacggcgccgagatcgcccggctgaggcagaggctgggtatccgcgagaagcccaagatcagcccgcgtgactacctctccgtgtcgcgcatcgaccacaagagcaacaagaccgtgaccaagggcatggatcttagcaccctgttctcggactctggtgcttgcgtgctcactcccaccgtcgacctgggccctctctacgtccagggtgaggagatccgcaaggacattaccaacggcgaggccggtgtccccgtgaccctggccatccaggtcgtcgactaccgcacctgccagacggtgcccaacgcctatgtcgacatctggagctccaacgcgacgggtatctacgtcggtgtccagggctaccccggcatgggcgaccccaacgatgcttccatcctcaacggcaccaccctccgtggcgtccagccaaccgatagccacggcattgcctccttcgacactctcttccccggccactacgacgggcgcaccacccacatccacgccgtcgtctaccttggcgccaccaagcagcccaacaataccatcactggcggccgtgctgctcagatcggccagatctacttcgaccagaacctcatctacgccgtcgagcagctgcctccctacaacaccaaccgcatggccatcatcgagaacgtcaacgacttcctcttccgcgccggcgctaacggcgatgacccgattgttcgctacgctctcgtcggcaacaccctgcaggagggcatcttcgcctggatccgcttcggtgtcgatgtcaacgccaacaagcctctcaacccggctgctttctggactgagaagggtggtgtcatgaaccccaccggccccgtccagcccggcggtggtggcctcttccctggcttccctggcggtggctggcctggcttccccggcggtggtggctggccctggcctggcggttggcgcaggaggcgcgcggcccagaacgccaactaa

SEQ ID NO: 439 - DNA, 1446 bp, Scytalidium thermophilum
atgcacttcaccatgcgtgcccacgtgggcatcggctacctagccgccctcagcagcgcagcggccaccaactgccgctgctcccaggtgatcaaccgcgatgtggccatcatcggtggtggcgcgtcaggctctcacgccgccgtgtggctgcgcgacaatggacagagcgttgttgttgtcgagaaggctagccagttgggagggcataccgcggctttcaaggaccctgccacagggttggacatcaatgtgggtgtccaggcgtggatggactacaaggattcttacgacttccccgcccggatgaacgtgtcgaccagcggctccatgcagttcactcccaacacgaacaacttcgtcgacacgctgacgggccgccgggttgaaggctgggaagcgcctgtggatgagaccaagtacccggccattcaacggttcctcgatgccatcctgccctacgaggacatcatgcttccgggcttcttcgacttcccggacgaggtccccgaggacctgctcatgccgttcggccagttcgtcgagaagtacgacctttatggcgcggtcccccaggtttgggacgcgacgggtcagggcgttggcgatatgatgaacgtcccgacgctgttcgtgatccaggcttcggcggtgcccatgacgaaggcactcctcgggcaagccgctgccgccaccccggcctcaggccgtctgtacgacctgtacgagagcgtcgccaacttcctgggcgacgatgtgctgtacaacagcgaggtgattaagtcgacccgcactgagtccggcgtctccctggtcgtgtccgggccgaagggcaagaggacgtgcatccaggccaagcggttgctcatctccatccagccgactcgtagcaacatggctcctttcagcctggatgaggaggaggccgaggtcctgggcaaattcttcttccctaccgtcttcaccggcatcctccgccaccctgctctgcccaagctcaacgcctttttgaaccgttccccggctcccggatcgctcaactactccgtcatgcccgtcgcgtcccaggtcggcagcatcgagtacatcggtggcaccgaggacctgttcaggttcactgccgtgggcaccgaggatgagaccgaagagggtatgaagaagcgcatcgccgacgccatcgacgctctgattgctgagggcacgatcgaaagcgcggctccggaaggcccggtgcccgaggtcacctacgccgtcttctccaaccacggccacatgcacgcgcaggttaccgccgacgaccttcgtgatggcttcttcaagaaactgtatgcccttcagggcaagcgcaacacctggtacactggcgcggccttctcgagcgggttttcgacgattctttgggagtacaacaaggtgctgctgccgaaggtggttgaggggttgtaa

SEQ ID NO: 440 - DNA, 885 bp, Scytalidium thermophilum
atggtcgccttctcgtccctcttcctcggcgcttccatcgccgccacggcactcgccgcccccggtgagctgcctggcatgcacctgaacaagcgccagacctacacccagagcgctaccggcactcacgacggctactacttctccttctggactgacggtggtccgaacgtccgctacaccaacgaggccggtggtcagtacagtgtgacctggtctggtaacggcaactgggtcggtggcaagggttggaacccgggtgctgctcgtaccatcaactacactggtacctaccagcccaacggcaactcgtacctggccgtctacggctggactcgcaaccctctcgtcgagtactacgtcgtcgagaacttcggcacctacgatccctcgactggtgcccagcgcctgggcagcatcaacgttgatggctcgacctacaacgtctaccgcacccgccgcaccaacgctccctcgattgagggcacccgctcctttgaccagtactggtccgtccgtgttaacaagcgcgttggcggctctgttgacatgaacgcccacttcaacgcctggcggcaggccggcctcaccctgggtacccacgactaccagatcgtggctactgagggctacttctccagcggctcggcccgcatcaacgtcggcggcggctccactggcggcggcaacaacggtggcggcaacaacggcaaccctggtggcaaccccggcggcaaccccggtggcaaccccggtggcaacccgggcggcaactgctctcctcgctggggccagtgcggtggccagggctggaacggccctacctgctgcgaggccggcaccacctgccgccagcagaaccagtggtactctcagtgcctgtaa

SEQ ID NO: 441 - DNA, 1197 bp, Scytalidium thermophilum
atgaagttctctactgccctcttcgccctcatcgccccggcgatggccgctccggcgccctctggccccatcgacaagcgcgctccccttatccaggcgcgcgctggcgaggtcgtccccggcaagtacatcgtcaagctgaaggagggtgccagcagcgaggctctcgatgctgccctgagccgcatcacccgcaagggcaagaaggccgaccttgtctaccgcaacaagggcttcaagggcttcgccggcaagctcgacatggaccttctcgaggagctccgctacctccctgaggtcgagtacgttgaggaggaggccatcttcaccatcaacagatatgtctctcagagcaacgctccttggggcctggctcgtctctcgtccaagaccaagggcgccaccacctacacctacgatgacagcgccggtgccggcacatgctcttacatcatcgacaccggtatttacaccgcccactccgacttcgagggccgcgccatctgggccgccaactacgccgacagctccaacagcgatggcaacggccacggcacacacgtagcgggtactgtaggatctaagacatacggtgtggccaagaaaaccacactgtatgccgtcaaggtcctgaacgctcagggttcgggtagcacttctggtgtcgtcgctggcatcaacttcgttgcctcagacttccctaagcggaactgcccgaacggcacggttgcgaacatgtcgctcggtggtagctattcggcctccatcaacaacgctgctaaggctctcgtcaacgctggtgtcttccttgccgtggccgccggcaacgacaacaagaacgccgccaactactcccctgcctcggaagccagtgcttgcaccgtcggtgccactgatagcagcgacaagaagtcgtctttctccaactacggtgccgctgttgacgtctgggctccgggcaccagcattctaagcacctggattggtggcaccactcgcactaacactatctctggcacttcgatggcttctccccacattgccggtctcggtgcctacctcctcgccctccagggcaagaagacccccgctcagctctgctcctacattgccagcactgcccacaacggtgtcctgagcggcatccccagcggcaccgtcaacaagctggctttcaacggcaacccctctgcttaa

SEQ ID NO: 442 - DNA, 804 bp, Scytalidium thermophilum
atggggccgacctgggcagtgattctggggctgattgctccttctgtgctcagtcacaatatccatgggatcctcctggtcaatggcacagagacaccagagtggaaatacgtcctcgatgttgcgccggtgattcctatttcaaacccagactctcttccccctggataccaaggttataaggttgatcccatcatcggatccgggaaccccaacatcacttgtggccggctagcatttgactcggcacccaagacgcaaatcgcggatgtgctagccggctccgaggtaggattccgagtctcggctgacggcttgggaaatcgagatctggagaagggctacatcccgacgttctggcacccgggtccggcccaggcatacttgtcacgtgccccgaacgacgacctgtacagctacaaaggcgacggagactggttcaagattgcctacgctggcccggtggacgacctgacgtggtccctttggccgggagtttcagatttcaacttcaccattccatcgacgacaccccctggaaagtatttgctccgaatcgagaacttcatgccaacggcctcgacaggatatcttcagttctacgtcaattgtgcatttgtcaacatcattggaccaggaggtgggacaccgaccgagttcattcgaattcccggggattacaccgacgaggatccaggttttctcgttcccccggagcaaagctccttggatggcagagtcccaagggaccagttgaaactgatgagctacacgccaccaggtcctgcggtgtggacggggtga

SEQ ID NO: 443 - DNA, 453 bp, Scytalidium thermophilum
atggtcaggccagtgcttctctcttgtgtctttctcgggacagtctctgcccaggtctggccacctccgcctccctggtggtcccccgcgcaaccacaacctacaacaacctctacgaccaggacgaccacaacctcgacccgtctgccacctggagccacgcagtctctctggggtcaatgtggcggaatgaattgggatggcccgacccgatgcccaatcggcgcgtactgcaagaatgacggaaacatctggtatgagcagtgcgtccccatcgagacggggactccagcgactacgcggacgtcaacgaccacgatcacctccggtcccgtcgtgattaccacatacatcacctacgtgacacccaccactacaccaccccctaggacatccattgtcactgtcacgctacgcccggacgagccatgcgatcatccgtttttgtgctga

SEQ ID NO: 444 - DNA, 1149 bp, Scytalidium thermophilum
atgcgtgtctcgtcgctccttgccgctctcgccaccggcagcctcgtggcggctgctcccagccccaagagcccgaagccgagcaccccgacgggcgacgtgaaccccttcgagggcaagaccttctttgtcaaccccaagtggtcggccaagctggatcagaccgccaaggctttcctcaagaagggtgatctcatcaactgggccaagaccctgcgcgtccagcagatcagcaccttcgtttgggtctcgaggcgttccgagctctccaacatcgacgacgccattgccgccgcgcgcaaggcccagaagctcaccggccgcaagcagattgtcggtctggttctgtacaacctccccgatcgtgactgcagtgccggtgagagcgccggcgagcttgacagcaccaaggatggcctccagctgtacaaggacaccttcgtcaagccctacgccgaaaagctggccgctgccaaggacctgactttcgccgtcgtcctcgagcccgactcgcttgccaacctcgtcaccaacctgggtgtccctctttgcgagcgcgctgccgacgtctaccgcgagggcattgcctacgctatctccagcctgcagtttgaccacgtccacctctacattgatgctgctcacggcggctggcttggctgggacccgaacctgccccttgccgccaaggagtttgctaccgtcctcaagctcgccggtgaaggcaagaagatccgtggctttgccaccaacgtgtccaactacaacccgttcaacgccctcgtgcgcgagaactataccgagtggagcaactcttgggacgagtcccactacgcctcgtccctggcgcctcacctcgaggctgagggtctgcctgctcacttcattgttgatcagggccgtgtccacctccctggtgcccgcgaggagtggggcgagtggtgcaacgttgagcccgctggctttggccctaagcccactaccaacaccaacaacacctacgtcgatgctctggtttggatcaagcctggtggtgagagcgatggccagtgcggcatggccggtgccccgagggccggcgagtggttcgacgagtatgcccagatgctcgtcaagaatgccgacaagtccatctttaagttctggtaa

SEQ ID NO: 445 - DNA, 1356 bp, Scytalidium thermophilum
atgcagatcaagagctacatccagtacctggccgcggctctgccgctcctgagcagcgtcgctgcccagcaggccggcaccatcaccgccgagaaccaccccaggatgacctggaagaggtgctcgggccccggaaactgccagaccgtgcagggtgaggtcgtcatcgacgccaactggcgctggctgcacaacaacggccagaactgctatgagggcaacaagtggaccggccagtgcagctcggccaccgactgcgcgcagaagtgcgccctcgacggtgccaactaccagtcgacctacggcgcctcgaccagcggcgactccctgacgctcaagttcgtcaccaagcacgagtacggcaccaacatcggctcgcgcttctacctcatggccagccagaacaagtaccagatgttcaccctgatgaacaacgagttcgccttcgatgtcgacctctccaccgtcgagtgcggtatcaacagcgctctgtacttcgtcgccatggaggaggatggtggcatggccagctacccgagcaaccgtgctggtgccaagtacggcacgggctactgcgatgcccaatgcgctcgtgacctcaagttcattggcggcaaggccaacattgagggctggcgcccgtccaccaacgaccccaacgccggtgtcggtcccatgggtgcctgctgcgctgagatcgacgtttgggagtccaacgcctatgcttatgccttcaccccccacgcttgcggcagccagaaccgctaccacgtctgcgagaccaacaactgcggtggtacctactcggatgaccgcttcgccggctactgcgacgccaacggctgcgactacaacccgtaccgcatgggcaacaaggacttctacggcaagggcaagaccgtcgacaccagccgcaagttcaccgttgtctcccgcttcgagcgtaacaagctctctcagttcttcgtccaggacggccgcaagatcgaggtgccccctccgacctggcctggcctcccgaacagcgccgacatcacccctgagctctgcgatgctcagttccgcgtcttcgatgaccgcaaccgcttcgccgagaccggtggcttcgatgctctgaacgaggccctcaccattcccatggtccttgtcatgtccatctgggatgaccaccactccaacatgctctggctcgactccagctacccgcccgagaaggccggcctgcccggtggcgaccgtggcccgtgcccgaccacctctggtgtccctgccgaggtcgaggctcagtaccccaatgctcaggtcgtctggtccaacatccgcttcggccccatcggctcgaccgtcaacgtctaa

SEQ ID NO: 446 - DNA, 1053 bp, Scytalidium thermophilum
atgcaccagtgggcttccctcgccgccgctgcggcgttgctggtcaacggcgccgttgcccagttcaacatgctgcgtttcgcctgctcccagctggttgtcgatcgtgtcgatcccttggttaacccaggaatgcgctatactcctcaccttcaccagatcgtcggtggaaatagcttcaacctgaccatggagccagttacctatgatctggccaagcgctcgacgtgcacctcgtgcagtttcgttcaagacaagagcaactactggactgcggtgatgttcttcaagcacaagaacggctcgtatcaccggattccccaggtcggcaacggcgggccccagggcaggctcatcaacaagggcggccttgacgtctactatatccccagcggccggactaccgcgttcaagcccggcttccgtatgcttgctggcaatgctgccgagacagacgacaacaaggtctccaggggcaacatctgccaccgttgctggacatcgaccaacgaggaccagttcattggtggtgctccctgcactggcagcgataccgttgccatcccccagaacccgagctgcaagatgatccgccagaccatcatcttccctcactgctgggacggccggaaccttgacactccggaccacaagtctcacgttgcctacggccagggttccggtgcgaacggtggtggcgcgtgcccgtcgtcccaccctgtcaggctgccgcaggtcatgtacgagctcatgtggaacgtcaccgacttcaccgacaggagctggtggcccgactctggcccggccttcgtctacagcatgaaccttggtggctcggctgctcacggtgactacgtcttcggctgggagggcgacgttctccagcgcgccatggatatgggctgcaacctcaaccgtgattgccctcaggccggtctcacgtcgcagcctcccgagaagtacaatgcctgcaccatcaagcagcaggctcctgagcccgtcgatggctggctcaaggaaatgcccatgggccaaatggccatcagggcctaa

SEQ ID NO: 447 - DNA, 642 bp, Scytalidium thermophilum
atgggtctcctacaactcgtcacaggtgttctcgccctggggagcgtgggctttggtaaccccgtccctcagtggggtcctgcccccccttccaagttttgcgatgccgctacggagatctgttacgccgaatataagagtcccgagaatatcgcattcagattcgctattccggacactgctaccccgggcaacttttctgtcctgctgcagattagtgctcccaggtcggttggctgggcgggcattgcctggggtggcgtcatggtgaacaatcctcttaccgtgggatgggcgaacggtaatactgctgtcgtgtcgagtcggagggcgagtgctcggagctatcccaatccctggaccggcgccacctatcaggtgctccctggctcacacgccaacaacactcactggacgctcagtgttcttgcaaggggcgtcagttcttgggacaacactcgtcttgacccgtcgagcgtcgtcacactcgcctatgctcaggcccccactcccccgacggaacccgcgaacaatgcgagccgcttcagcatccacacctcgaggaataggttcacgctcgatctcaagagtgctcagatttccaactttactgagctccttgcgaaggctttggctggctag

SEQ ID NO: 448 - DNA, 1293 bp, Scytalidium thermophilum
atggtggcacttacaagtctcacactcacagccgcccttgcggcggttggtcttgcctcggtgttgcccaccaagattggcaccacaggtctcgataatggttacagcgagagctccggtagcgggcgggcgaccctcaagcaagtgcggcgtcccggctaccgcttcaatggcgcccgggccatctacaagacgtatctcaagtacggcgtccctgcgccagactacctgctccaggcggtggccaacacggatgctctggctgctgccgcggcagcgaagcgggactcgggcagtgcagcagcaattcccatcaacccccgatacgacatcgcctatgtgactccagtcaccatcggtacaccgccgcaaacactgtacctcgaccttgacacggggtcctcggacctgtgggtattctccagccacactctggcctcgcaggtccgaggccaaaggatctactcacccgagaagtccagcacatccaagctgctccatgggcacacgtggagtatccgatacggtgacgggtcggggtctttgggaaacgtctacacagacaacttcaccgtgggtggcgtgacagtgcccaaccaggctgtccagtgcgctgagcaggtgtcaaccagcttcacgcgggagtctgagatccatggcctggtcgggctcggcttcagctccttgaacactgtcagtcccaatggccagttgaccttctttgacaatgtcaagccgaacctggacagccctgtgttcacggctgatctgaagtggaagaaagagggcacctatgactttggattcatcgacaaggctaagtacacgggcgagatcacgtaccttccggttgagagcaacccggggtactggaccttcacgtcgtcgggctacgcagttggggacgacaatttcatcccggcctcgatcgtaggtatcgccgacacgggcacctcgctgacgtacttgccggggtcggttgtcgcggcctactaccggcaggtcgagggtgccgtcgacagctggtactacggcgggtatgtgttcccgtgcagctccaagcttccatccttcacgttcggcgtcgggggggccaacatcaccatcccttcgtcgtacattaactatgcggcaatcacggagggttcgccggtatgctttggtgggcttcagagcagtgactggctgggggtcaacatctggggcgatgtggcgctcaaagcagcgttcgttgtcttcgatggctccaatccgcctaaaattggatgggcccgcaagcccctggagcagtaa

SEQ ID NO: 449 - DNA, 681 bp, Scytalidium thermophilum
atgctgggaagcgctcttctgctcctgggcactgccctgggcgccaccgcccactacacgttccctaggatcaacagcggcggcgactggcagtatgtccgccgggccgacaactggcaggacaacggcttcgttggcaacgtcaactcgcctcagatccggtgcttccagagcaggcaccaggccgccccggccaccctcaacgtcaccgccggctccacggtgacctactacgccaaccccaacgtctatcaccccggcccgatggccttctacatggcccgcgtccccgatggccaggatatcaactcgtggaccggcgagggtgccgtgtggttcaagatctaccacgagcaacctaccggcctgggccagcagctgaggtggtctagcgatggcaagaactcgttccaggttcagatcccccgctgcatccgctctggctactacctgctccgtgcggagcacatcggcttgcacagcgccggcagccctggtggcgctcagttctacatctcttgcgcccagctcgccgtcaacggcggtggcagcaccgagccccccaacaaggtgtccttccctggtgcctacagcccgtccgaccccggcattcagatcaacatctactggcctgttccgacctcgtacaggaaccccggccccccggtcttccagtgctaa

SEQ ID NO: 450 - DNA, 696 bp, Scytalidium thermophilum
atgaagctgcttcctgggttgcttctagcagccacggctgcccaagcccattacacattccccaggctcgttgtcaacgggcagcctgaggagagggactggtcggtcactcggatgacaaagaaccaccagagcaagtcgggaattgaaaacccaactagccccgacatccgttgctacagctcgcagactgcccctaacgtggcgattgtgccggccgggtctaccatccactacatctcgacccaacaaatcaaccatcctggcccaactcagtactatctcgccaaggtcccagctggtcagtcagccaagacctgggatggctctggcaacgtgtggttcaagatcgccacgagcatgccggagtacgatcaaaacaggcagctggtttggcccggtcataatacctatcagaccatcaacgccaccatcccggccaacacgccgagcggagagtacctcctgcgtgtcgagcaaattgccctccacatggccagccagccgaacaaggcccagttctacatctcgtgctctcagattcagattaccaacggcggaaacggcactccgggccctctagttgcattcccgggggcatacaggagcaacgaccctggcatcctggtcaatctctacagcggcatgcagccttcgcagtaccaaccccctggaccggccgtgtggcgtggctga

SEQ ID NO: 451 - DNA, 1041 bp, Scytalidium thermophilum
atgaccaaaatactactgaccggaggttccggcttcattgccgcccatatcctcgaccaactcctcgctcagggccacacagtggtgacaacggtgcgcagtgaggccaaagcggccaagatccgcgcggcgtacccgtcgcaggcagaatcgggcgctttgacagtcgcgatcgtgccagacattgctcgcgaggacgcctttgaggaggtcgtcaagaacacccccggtttggaggtggtcctgcacacggcttcgccgttccacttcaaattcacggacccaaagaccgagctggtcgatcccgctatcgtcgggacaacatccatcctcaaatccgtcgcgcagtatgccccaactgtgcgccgcgtcgtcgtcacatcctcctttgctgccatcctggatgaggcgcgcgcaggtgatccggccaccgtcttctccgaggcttcctggaatccggtgacaatcgatgatatccaccgcaaccctccaacggcctatcgtgcgagcaagaagcttgctgagaaggcggcgtgggaattcgtcaaggacaacaacaagtttgagctggtcacgatcaacccgcccatggtgttcggtcctctggcgccgggccaggccgtggagagcctggacggaatcaacacgagcaatcagcgcattgtcgatttgctgcaggggaagtggaagaacgccgtccctgaggttggggtggcgtggatttgggtcgacgtccgggacgtggcggcggctcacgtgaaggctggactcgacgtgaaggaagcggcagggaagaggttgttcgtgacggcaggcgagtacagcaacgccgaattggggaagattgtgcgcaagaacttccccgagtatgccgagcaggtgccggaagatagcgccctcgcggttggggagaagccgccagcggataagaggtaccggttcgacaactcagagacgaacaagttgctggggatttcgtatcgtacgtttgaggaatctatcgtggacacggtcaagagcctgaagaagctcggtgcttag

SEQ ID NO: 452 - DNA, 1989 bp, Scytalidium thermophilum
atgttcggactcgtggtccagcagctccaggctcaactgctctccctctcagcggtcaccgcctccgacctcgtcctgtccgccatgcacaccttctccaagctcctcgtcctgggctctgccgtccagtctgccttcgggcggcctcacggctcctcccgcctccaggaacgcgccgccgttgataccttcatcaacaccgagaagtccatcgcatggaacaagctgctcgccaacatcggccctaacggcaaagccgctcccggtgccgccgccggcgttgtgattgccagcccttccaggacggaccctccttacttcttcacctggacccgtgatgccgccctggtcctcaccggcatcatcgagtcccttggccacaactacaacaccaccctgcagaccgtcatccagaactacgtcgcgtcgcaggccaagctgcagcaggtctcgaacccctcaggaaccttcgccgacggctcgggtctcggtgaggccaagttcaatgtcgacctcactgccttcaccggcgaatggggtcgccctcagagggacggcccgcccctgcgcgccatcgctctcatccagtacgccaagtggctgatcgccaacggctacaagagcacggccaagagcgtcgtctggcccgtcgtcaagaacgatctcgcctacacggcccagtactggaacgagaccggcttcgatctctgggaggaggtccccggcagctcgttctttaccatcgccagctctcacagggctctgactgagggtgcttacctcgccgctcagctcgacaccgagtgccgcgcctgcatgaccgtcgcccctcaggttctgtgcttccagcaggccttctggaactccaagggcaactatgtcgtctccaacatcaacggcggcgagtatcgctccggcaaggacgccaactcgatcctggcgtccatccacaacttcgaccctgaggccggctgcgacaacctgaccttccagccctgcagcgagcgcgccctggccaaccacaaggcctatgtcgactcgttccgcaacctctacgccattaacaagggcatcgcccagggcaaggccgttgctgtcggccgctactcggaggacgtctactacaacggcaacccgtggtacctggccaactttgccgccgccgagcagctctacgacgccatctacgtgtggaacaagcagggctccatcaccgtgacctcggtctccctgcccttcttccgcgaccttgtctcgtcggtcagcaccggcacctactccaagagcagctcgaccttcaccaacatcgtcaacgccgtcaaggcctacgccgacggcttcatcgaggtggcggccaagtacaccccgtccaacggcgcgctcgccgagcagtacgaccgcaacacgggcaagcccgactcggccgccgacctgacgtggtcgtactcggccttcctctcggccatcgaccgccgcgcgggtctcgtcccccagagctggcgggccagcgtggccaagagccagctgccgtccacctgctctcgcatcgaggtcgccggcacctacgtcgccgccacgagcacctcgttcccgtccaagcagacccccaacccctccgcggcgccctccccgtccccctacccgaccgcctgcgcggatactagcgaggtgtacgtcaccttcaacgagcgcgtgtcgaccgcgtggggcgagaccatcaaggtggttggcaacgtgccggcgctgggtaactgggacacgtccaaggcggtgaccctgtcggccagcgggtacaagtcgaatgatcccctctggagcatcacggtgcccatcaaggcgacgggctcggccgtgcagtacaagtatatcaaggtcggcaccaacgggaagatcacttgggagtcggaccccaataggagcattaccctgcagacggcgtcgtccaagggcaagtgcgccgcgcagacgctgaatgattcgtggcgttaa

SEQ ID NO: 453 - DNA, 1788 bp, Scytalidium thermophilum
atgatctcctccccgctgagcctgggcgccgccctcgtggccgccgcatccctcgtcgaggcctccttcgacaggaacattgcctaccgtagcccctcgcgccgccacccgagcctggctgttcccctctcacacgtgtccaagcgccagaccggagacgttttctccccggatgaggtcaacttcacccacggcgtggcctcgggtgatccctatgccgattccgtcatcctttggacccgtctggccccgactgcggatagcgtggcctcggatcttgtcccggatggcgtcgtgcccatctatgatgacccggagggcgcgaagccgtctgccaaggcggcttgtgtcgagttcaagatcgccacggattccaacttgaagaatgtggctgatcaagggcgggcgtacaccacgagcgatgtggattacacggtcaagttcgaggctggcaacctgcaacccttcaccacgtacttctatcagttcaatgtgtgcggttccaacaagacgagcccgatcggccggaccaagacgattcctgcagagacgcaaaaggtcaacagcgacatcaagttcgccgtctactcatgcgccaactaccccgagggatacttcaacgcctacggcaacgtcgcgcgcaaagactcagtcgactatgtgatccacctcggcgattacatttacgaatacaagggcgactcgtcgctgcgcaacccgaagccggaccgcgagacgtacacgctctacgactaccgcgcccgcctcggcagctaccggaccgacccggaccttctctcgtcgcactcgagcttcgcctggatcccggtctgggacgaccacgaggtggccgacaacgcgtggaagaacggtacgggcaactcgtcgggcgacgtcttccgcaagcgcaagcaggccgcggtgcgcgcctactttgagtggatgcccatccgccaggtcgacatggacgacagcctgcgcatctggcggcgcttctccttcggcacgctcctggacctgatgatgctcgacacccgccagtacgaccgcgacctgactgtgctcaacggcttcgcgggcatcggcggcaacagcaaggaagtggagaagctggtggaccaccagaaccgcacgatcatgggcttcaagcaggaggcgtggttctacgacgagctgacgcgctcgtcgaaccgcggcgccgcctggcgcgtcgtcggcaaccaggtcatcttcagccgcatggcgctcgacatcctcggcaaccggcccttcaaccgcgaccagtgggacggctatatcgccaaccgcgaccgcgtctaccagcacctggagagcggcagcatcaacaacaccgtcttcctgtcgggcgactcgcacgctgcgtgggtgtcggacctggcctggctcgggaagcgcgactatgacccggtgacgggcaagggcgcgttcggcgtcgagctggcgggcagcgccgtgtccagccacacgcccgtcggcagctggatgcccaacctcatcaccaaggccttgtcggcctggttggtcaaggataatccggagctgcagtggcaggatctctattacagggggtattttgagatgagcgtcgggtatgaggcggtgaaggcgaggttttacggcatccccaagcccaaggtgcgcagcagtgatgagattatgattgctgagttcttggtgaacagtggggaaaataggttggctaggaatccgaccgtgggaggagggaaggcgaaggctggcgcgctgaagaatggaaaggtggaatag

SEQ ID NO: 454 - DNA, 786 bp, Scytalidium thermophilum
atgcgccccctcctcgccgccctcgccgcggccaccacggtccacgcccacggctgggtcgacaatgccaccatcgacggcatcttctaccagctctaccacccgtacatggacccgtacatgggcgagctcgccccgcctcgcatctcgcgcaagctggtgtggaacggctacgtgaacgacgtgacgtccatcgacctgcaatgcggcggacacacggccgaagggcagatcggtacggaacccgcgccactgcacgcccccgccacggccgggtcgacggtcaacctccgctggacgctgtggccggactcgcacatggggcccatcatgacgtacatggcgcggtgtccggacgagggttgtgataagtggttgcccggggaggaaccagtctggttcaaaatccacgaagccggccggtacaccaccgacaagtcttaccccgacgacatctgggaagttacccgcctcatgtacctcgccaacgaaggctacaactacaccatccccgcctgcctcgcatccggccactacctggtccggcacgagatcatcgccttacactcggcctgggccaaaggcgaagcgcagttctatccctcgtgccaccagctgaccgtcacctccatcggcggtaacgtgcgcgaggcgccggccgagtaccgcgtcagtttccccggcgcgtacaaggacgatgatccgggtattctcatcaacgtttggaaccctggcccctacaccattcccggaccgccggtctggacgtgccccgagtctgagtga

SEQ ID NO: 455 - DNA, 1713 bp, Scytalidium thermophilum
atgaagcctccattaattctctcgtgttacctctccctcatccccgtcgtctcatcccatcccatcaaccatcaggatgtcttgtccgataccccctattcgaccggcaaacgaggagccgtggccagcgagagctccatatgctctaagataggcatcaacaccctcgccatcggcggttccgccgccgacgcgatggtcgccaccaccctttgcgtcggcgtcgtgggcatgtaccactcgggcatcggcggcggcggcttcatgcttgtccgcgacaagcacgggaggtacgaggccatcgactaccgcgagacggccccggccgccgccagtcgtgacatgtacgagcacgacaggaatgccagtgtctatggcggtctggccgtggctgttccgggggagctcagggggttggagtatttgcatcagaagtacggcactcttccatggaagacactggtcatgcctgctgttcgggttgcaagagagggatttcgggtgacggaggacctcgtacggtacatggcggccgcgagtgccaacaacaacacatttcttgtggatgatccaatatgggctgaggattttgctccaaacgggactctccttcaactcggtgacaccattacaaggaaacgctatgccgacacactcgagaagattgcaaatcttggggcgggtgagttctacaagggagagattgcccggtccatggttgactacgtccaaaagatgaatggaactatgaccatcgacgacctggccgaatatgaggctgatatcaaaccggccctgaacatcacgtacggcaactacaggcttttcactacaccggcgcccagcagcggtgctgttatgttgaacatcttcaagatcatggagcagttctctccaaaggacctcgatgacaccaacttgacgacccaccgctttgtcgaagccatgaagtttgcttatgggggacggcttcaactcggcgatccgggtttcgtcaagaatgccagtgacttcgaacaacagctgctcctggacgaaacggcgcgctacatccgtgaccgaatccttgatggccaaacccaaccagttgaggcctacgatccgctcaggctttaccttccagacagccacggcacctctcacgtcgtcactgccgatgcatcaggcctgactgtcacctctactaccaccatcaacctactcttcggcgcccaaataatgactcccgacacgggcatcattctgaacaacgaaatggacgacttcagccaacccaaccggcgcaacgccttcggcttcgctccctctcccgccaactacatcgcccctcgaaagcgccccctttcgtccatcacccccttaatcgccgaagatgctgccgacggccgcctcgtcctcgccaccggtgccgccggcggctcccgcatcatcagcgccaccactcaagcctccttccgtgttttataccaaggcgaaacgcttcacgacgccatcacccatccacgcgtgcaccaccagctacttcccaacgtgctgctcgttgaggacggcacggaccctgtccttgtggatgacctgcgtgccaagggacaccaagtgcagtggatgaagcccgggttgagtgccgtgcaagcggtgaggaggggggaagatgggaggttcgaggcggtcggggagacgaggcagaggaatagcgggggatataccctttga

SEQ ID NO: 456 - DNA, 1215 bp, Scytalidium thermophilum
atgcgtttcacctcggttgcggccctcggggcatgcttcgttggaaccgttgctgggacggattcgtcatcctccagcagctccagcgttacaggcccggattccaatgggaaatattggatctacggggagggaatcaaggccgccttcattccgtatggcgcgtccatctcggatctgatcatcaaggacaagaacggcattgatcgggatattgtcatggggttcgacaaggcgagctcgtacgagacggacaagtcgcacccacacctgggcagtgttcccggccgctatgccaaccgcatcaagaacagcacgttcgaaatcgatggcgttacttataaggtagctgccaacgaaaatcccacggctgagaatcccgatggcgtcaacacccttcacggcggcccggacggctgggactggcgcaacttcaccgtcgtctcgcacaccgagaacagcatcaccttctccattgtcgaccccgacggcaaggagggattccctggagaggtgatttccttcgtcacgtattcgctgggcaatctcacctgggatgccaccatcgtggctgtggcgacgactaagaagacgcccatcatgttgaccagccacacgtattggaacctggacggctttgccaacgatgagaccgataccgccctcaaccacacgttctatatgcccttcagcggccagcgcgtcggggtcgataacatccttatccccacgggcgagatcttggccaacgagaagggctcggtgaatgacttctggagcgccccgaagcagattggcgcaagcttcaatgatccggagctggtcggaaattgcggctacaattgcactggttatgacaactgctacatcgtcaaccgcccgaccaccgtcaactggcgtaaccccgaccaggccgtcgccagcatctggtcgtcgtggtccggcattcgtctcgacatttactcggaccaagaggccttccagatgtactcgtgcaatttccaggacggcacattcccgctcaagtcgagccagggccgggagggtggcccgcggactgtgcctaagtacggctgcgtcgtgctcgaggtccaggattggattgatggtatcaaccatccggaatggggcaggctccataagcaggtgtttggccccggagatgatcctcacattgtgcaggtgaggcacaagttcagcattattgatgagtaa

SEQ ID NO: 457 - DNA, 1587 bp, Scytalidium thermophilum
atgctgggagcgccggccagtctgctcctgcagctgacgctctgggctgcttccgtcaacgccttcttcccttttattcccgaaggtcactgcgcgccagatgaggactgtgcgggccccggccacggcaccaagcggagcaatgtcttggatctgccggccgagggcggccgcggcggcgtcatcacggtcccggtttatcatcaccatgcaactatcacccgcgatcccaccaaaaccgacccggtaaccttggccggctctcgaattgcccggaaatacgcccgtcctgaaacctcccgggggctagagaagcgtgagaacgcgtatcccgtctcggaacccctcgaacccaccgaacccaacagcgccggcatctaccagtatggcccggactactcgtatttcatccaggtgcaggttggcaccccggcccaggaaatgttcatgctcctcgacacgggcgccgccaatacgtggatgatggggtccaagtgcgaatcggacgcttgcaagctgcacgatacctttgatgcgtcggcctccaaaacgtggaagaacacgaccgactactttggcattcagtatggctccggcaacgtgatgggtaccgtgggcaccgacacggccaagttcgccgggcttacgatccccgagctctccttcggcctggccaacatggtgaacgacagcttcaagcacttcgccttcgacggtatcctgggtctgggaatgggcgactcggtcacgggcgggaacttcctcagccacctcaagaaccacaagattgttgattcgctggttcttggcatctctctcaaccgcggctccgacggcgtcaacgacggccaggtcacctttggcggcgtcgacccggccaagttcacgggcgacatcacgtacagccccatccctcaggcgcagcaagccaagggcgaatgggccatcattctagagtcggcagcctacgacggcaaaactgccggctcgtccaacgtgctcgcctacatcgacacgggcacgtccttcatcttcgcccctcccgccgacctcgacgagctgttcaagctcgtccccggttccagctcgtacgacaacagcaagtaccgcgagtacgaagtcccctgcgacactaagacgcccatcacgctctcgtttggcggcgcgcaattcgacatttccccggccgactggatcctgcccaagggcgacaagtgcgtggcgaacctgtacgggtgggaagtccgcaagggcaccgggtcgtggctgctgggagatacgtttttgaagaacgtgtacagcgtgttcgacgcggataagcaccgcatcgggttcgcgcacaagccggccccgcccgagcgcaacgggaccaccacttcggccgactcggcgcataccacgactatgccgggagatgaatcgctgcatccggtcatgccgggctcgtcgacgacgggtgatgagggcacggggtccgcggccgcgcaggctaccggtccgacggggcatcaggtgaatgggggtgtgaggatgacggctggggtggttggcgcgggtctggttgcggcgttggtggctttggtttga

SEQ ID NO: 458 - DNA, 2070 bp, Scytalidium thermophilum
atgaagttcgtcagctcgctcctcgtcgcggcggtggccttcaccgccgaggtcgccgcccaggccaagaaccctgagggccctccgaacctccccaagaactacaagagcattgatctcaagatcgatctcaagaacggagtccggaacaagacctcgccgctgcttcatggcttgttcttcgaggacatcaaccactctggtgatggcggcatctatgccgagctgatccggaaccgtgccttccagggttctgatgatgtgaccggcggaaccagggacctcgttggctacaggcccattggaaagggtgtcaagctcgagctggacattactgagccgctctctgatgccctgaggtactcgctgaaggttaccatcccggccaatgctactggcgaagtcggtttcctcaacgagggctggtggggtatcaatgttcaaccatacacctacaacgcctcggtctacttcaagccgcacatgcccaccttcaagcgggactccagcatcaccggcctgaccttctccctccgctccaacctcaccgacgacatctgggtctccaagttcgtccccttcccggagaacatcagcgcctaccgttacacccacctcacgacgactctcaccccgcccaaagccgctccgaacagcaacaacaccttcgccgtgacctggaacggcactgaggccgccggccagaccttcttcttcaacctgatctctctgttcccgccgacctacaagaaccgcccgaacggtctccgcaaggacctcgcggaggctcttgagggcatcaagcccaagttcctccgtttcccgggcggtaacaaccttgagggtctcagccctgccacccgctgggactggaagaagaccatcggccccctcaccgagcgtccgggccgtcccggcaactggggctactacaacaccgatggcttgggctacctcgagtacctgctctggtgcgaggacatgggcattgagccgctcctgaccgtgtacgccggctactccctcgacgcctccggtgtccaccccgcgcacaccgtcccgcctgaggagctcgactacttcatccaggatgccatcgaccagctcgagtacgccatgggcgacgtcaccaccaagtggggtgctctccgcgcccagcacggccaccccgagccgttcagcatcaagtacgtcgagatcggcaacgaggactggttctccgacagctacgcctggcgcttcccgcgcttcctcgaggcgctcaagaaggcctaccccgacatcacctacatctcgtcccaggccgtcgaggagaacccgaccaagcaaaacatcaccatcccgccgggcaacatgtgggatctgcaccactaccagaccccgcagttctacaaggacaacttcaactacttcgacaactggcaggagatcaatggctaccccaacgtcaccatcttcgtcggcgagtactcagtcctctctcgcgaccgccccggcggcgtcgactgggtcaacggcgagggccgcttcgcctacccgcccgtgctcgccgccatcggcgaggccatcttcgccctcgccatggagcgtaacccgcacgtggtcaagctgtcgtcgtacgcgccgctcttccagaactggaacgcgtaccagtggacgcccaacttcatcgccttctcggccaaccctaaggacctggtcctgtccacgtcgtactaccagcagaagctcttctcggagtactacggcgccgagacgctgaccgtcgtcaacaagaacggcgacttcaacccgctctggtggggcgccaccatcagcgaggaccaatcgcgtattttcctcaagatcgtcaacagcgagaaggacaagaagacggtcaagctcgagctcgacaagcccatcaagtcggccaacgccacggtgctccgccacgacgatccgtatgcgttcaacttcatcggcaactcgaccatcgtgcccaagccgcagaaggtggacaagcccaagggcaagaaggtcgagtttgtcgtccaggggtggagcgtgaatgttttggagttgagggtgtaa

SEQ ID NO: 459 - DNA, 876 bp, Scytalidium thermophilum
atgcgtttctcgaccatcttctcggtcgccgccacggcgtcgacggccctcggcgcgtcgctgcagcaggtcttcaactggggcgccaaccctaccaacatccagttccacatctatgtgccggaccgccgcgctactaacccggccatcattgtggcgctccacccttgcggcggcaacgcccagcagtggttcagcgggacccgtctcccccagtatgctgaccagcacggcttcatcctgatctaccccagcaccccgaaccagagcaactgctgggatgtgcacaacaccgccagccttacgcacaacggcggcggcgacgccctcggcatcgtcagcatggtcaactacaccattgaccgctacagcgccgaccgttcgcgcgtctacgtcatgggcttctcgtccggtggcatgatgaccaacgtcctggccggttcttacccggaggtcttcgaggccggcgctgcctactcgggcaccgcccatgcctgcttcttcggtgcccccggtgccacccccttcagcccgaaccagacctgcgctcagggcctcagccacaccccggagcagtggggcaacttcgtccgcaactcgtaccccggctacaacggccgccgcccgcgcatgcagatcgtgcacggcctccaggacttcctcgtccgccctcagtgcggctatgaggcgctcaagcagtggtccaacgttctcggcattcccttcacccgccaggttcagaactcgccctcgtggggctggaccaccgagctgtacggcgacggcacccagctgcagggtctcttcagccagagtctcggccatgctccggccgttgatgagcagcagctcctgaggttcttcaggcttatctaa

SEQ ID NO: 460 - DNA, 831 bp, Scytalidium thermophilum
atggcctcggctccatggttccctccgcatagcatggcagcccatgcggggatgcgtcacattgaccacggcagtatggatgcgatagacgacctccgccacctccaatccagccacgacactggtgatcgcccggcttttgacaccatgaaggtcccaactctcatctcgagcctcctggctctggtctccttctccgaggccacgccgctcatcaagcgagcgacgctcacgcgggtcaacaacttcggtaacaaccctagcggtgcgcgcatgtacatctatgtgcccgacaggcttcagccacgtcctgccgttctcacggccgttcactactgcacgggcaccgccaacgccttctacaccggtactccgtatgctcgtcttgccgaccagtatggcttcattgtcgtctacccggagtctcccaatgacggcggttgctgggatgtctcgtcccgcgctgcctacacccgcgatagcggttccaacagccacgccatttctctcatgacgaagtgggctctgcagcaatataatggtgacccggagaaggtctttgttgccggcaccagctcgggcgctatgatgacgaatgttctctctgctgtgtaccctgatttgtacaaggctgccgctgcctacgctggtgtccctgcgggctgcttctacacgggcactgttgctggctggaactcgacttgcgccaacggccaactccaagcaaagccggatgtgtccctcgacgctcagctgccccgcgagaagcgcgggaatccgatgccctcgagccagcgtgaagctgcgtggaaccttgtagcgatgcagtag

SEQ ID NO: 461 - DNA, 1296 bp, Scytalidium thermophilum
atggggaccactcgattcactctcgccctcggggcccttgttttcgtgtctctcttcgggtctctcctcgatgctgccagcatcccctccagcgtcaaaggtcttgattaccgttccctgataatctacctcaagcggaaccccgactactctcctaacggtccggcggaatatgcccgtgccctcagaaaatggggggccaaggttcctgagcagctgatcaagagtctcgccgccatggctggggctcatgggcaccccagcaaaggcgaggaaggggaactcggagacgtccccgccgtttcgatccgcaatgaccgggaatatctgagccccgtcggctttggcacgcctgtacaatggttgaatcttgatctggataccggatcggcggatgtctggatctataccaccgacacacacccgtatgttgcccaaagccgggaccacgttttccgcatcaatgagtcgtcaactgccgagaaggttcataacacgacctggtggatcacgtatggcgacggaagcagtgcatacggcggcgtttatcgtgacgttgtcaccttagcgaatattacggtgcacaatgccacggtcgagtctgctatcagcgtctcgaattcgctgattcaagatccatacatggacggcatcttcggccttgcctacaggctcccggtgcagaccagccccaagcagcctacagtgttgtcctcgctgcttcccctcttgaacgagccactcttcactgtcgacctgcgttggcgctcgccggatggggtgtacacgttcggctacatcgaccatgaacggcactccggccacatcaagtacacatcactcctcccgggtgcgcaattctgggaactggagtacacaggcatccatgtcgagggccaggacaggtggtacaagtcgacccaaatcccgtggcgtgccattgtggacacgggcactacgctcatcctgatgccccaggatgtgtctgacttgtacttctcggacgtaccgaatgccatgtttaatgagtccattggtggggtttggacctacccgtgcaataacccggtcttgcctgatttcgagatcagcttcgacagtgggttcatcgccaggattcctggaaaatacatgaactataccaacatgcctgataatcccaaggtctgcatgggcgggctgcagggatgggatgacagcgggagggccatctttggggatgtgttcttgaaggccgtctacacggtgttcgatgtcggccaggggcgcgttggctttgcgccgaagaagttttga

SEQ ID NO: 462 - DNA, 702 bp, Scytalidium thermophilum
atgaaggtcccgaccctcatctcgagcctcctggctctggtctccttctccgaggccacgccgctcatcaagcgagcgacgctcacgcgggtcaacaacttcggcaacaaccctagcggtgcgcgcatgtacatctacgtgcccgacaggcttcagccacgtcctgccgttctcacggccgttcactactgcacgggcaccgccaacgccttctacaccggtactccgtatgctcgtcttgccgaccagtatggcttcattgtcgtctacccggagtctcccaatgacggcggttgctgggatgtctcgtcccgtgctgcctatacccgcgatagcggttccaacagccacgccatttctctcatgacgaagtgggctctgcagcaatataatagtaacccggagaaggtctttgttgctggcaccagctcgggcgctatgatgacgaatgttctctctgctgtgtaccctgatttgtacaaggctgccgctgcctacgctggtgtccctgcgggctgcttctacacgggcactgttgctggctggaattcgacttgcgccaacggccagaagctcaagtatcctagattccaagcaaagccggatgtgcccctcgacgctcagctgccccgcgagaagcgcggaaatccgatgccctcgagccagcgtgaagctgtatggaacctcgtagccatgcactag

SEQ ID NO: 463 - DNA, 1044 bp, Scytalidium thermophilum
atgaaggtctccgtgatctcggctctcctcgccaacgccctctcggcctcggccggcaccatcctctgggatggccgcttcaacgacctcacgtcttcggcggatctgaacaagtggtcgtggtcgaaccaggttggaccttatcagtggtacatccacggcaacggcccggtgaccaactatgtcaacctctcgcctgactacaagaaccccgccgacacggggtccaagcagggcgccaagattacgctcgacagcacggcgtactggaacggccaaaacatgcgccgcactgagctaatcccgcagaccaaccagcccatcaaccgtggcaaggtctggtaccacttctccatcatgcgcaaggacgtcaacccgcccagcatctaccgcgagcaccagatcgccttcttcgagagccacttcaccgagctcaagtcgggctggctgtcgggcgccccgggggtgagcgacacgctcctgcgctggtgcgtcaacggccagacccggtggagcaccgagtgggaggccgacgtctggcacaacgtggcctacgagatcgacttcagcgccaacacggtcggcttctggcactcgaccggcagcgacccgctgaccctcaaggtcgcccccgtcagcgtcagcaccagcagcaacggcgccgactggcacgtcggtgttctcgagctgccccgctccggctacccggacagcaacgaggacttttacttctcgggcgtctacattgagagcggcagcatcaccacctccgtcgctggtcctggcgctcccgttgtcgacccccctgccagctcctcgaccgccgtccctcccaccacaactctggtgacctcgactcgcgtttccactaccactaccagcactaccaccaccagcagcgcggccccgacccctaccaccccgagctgcaccccgcagcagcagtgggcgcagtgcgacggcctcaacttcaacggctgcaaggcctgcgtggctccttacacctgccactacgtcaatgactggtactcgcagtgctactga

SEQ ID NO: 464 - DNA, 1545 bp, Scytalidium thermophilum
atgaggatcacagctacgtttctcgccctcctcccgggcatggcccttgctggggggaagaacggtgggaagtgcaagaagcctctggtttcgtcccagaagctgcagtccctggtcaccatcgacgacctgcttgatggttcgaagaagctccaggagttcgcctatgccaacggcggcaaccgcgccttcggcggtggtggccacaatgccactgtcgactgggtctacaagaccctcaagtcgctcaactactacaacgtggtcaagcagcctttcgagagcatctactcggaggcttccggcaccctgaccatcggcggcgaggacatccagatgcagcccatgacctacaccccggccggcgatgtcagcgcgcccctcgtccccgtggccaaccttggctgcgaggttgaggactacccagccgaggtggctggcaagatcgccctcatctctcgtggctcgtgcactttcagccagaagtctcagaacgcgaaggctgctggcgccgttggtgctctcgtctacaacaacgaggagggcctagtgcagggcaccctcggtgaggctctgcttgactacgccccgatcgccggcatcacccaggccgacggccttgccctcctcgagaagctcgccgagggtgaggtcgttgccgacctcaagatcgacgccaccgtcgagaaccgcatcacctacaacgtcattgctgagaccaagggcggcgaccacgagaacgtcctggttgttggcgcccactctgactcggtccctgccggtcctggtatcaacgatgatggctctggcactgtcggtatcctcaccgttgccaaggcgctggccaagttccgtgtcaagaacgccgtccgcttctgctggtggagcgctgaggagttcggtctcctgggctccgagttctatgtcaactccatcaacggctctcaggctgagctggccaagatccgtgcctaccttaacttcgatatgattgctagccctaactacatctacggcatctacgacggcgatggcaatgccttcaacctgaccggccctgtcggctcggacctgatcgagaagaacttcgagaacttcttcaaggccaagaacaccccctctgtcccgactgagttctcgggccgctccgactacgccgctttcatcgagaacggcatcccctcgggtggtctcttcacgggcgccgaggtcctcaagactgaggaggaggccgcgctcttcggtggcgaggccggcgtcgcttacgacaagaactaccaccagcccggcgacacggtcgacaacctcgccctcgacgccttcctgctcaacacccagtcgattgccgacgccgttgccacttatgctctcagctgggagggcttccccgaggttaacctcaaccagcgccgctgggatgctgagcgctccaagaacatccgccgcagcggcggcagccatggccacgggccccgctctggcggccactcccacgcccacggtgtcgctcactccggcccgtgcggcggtggtgacagggcctaa

SEQ ID NO: 465 - DNA, 1665 bp, Scytalidium thermophilum
atgtggttccgcctcgccctcctcgccgccgttgcatcggcccttgtaatggagagcctgtcggcggtgcccaaggactggtccgaacttcgaccggccttgcccgatgagcctatccgactccgcattgccctcaagcagcagctggatcgagccgtgatgctggaccgggctgcccttgacattgcaacacctggtcatcccaactatggcaagcacttcacccgcgatcagttaaggtccctcacggccccttccgacgcctccatctctgccgtcaccgcttggcttcagaagcacgccattcaacccgtcctggaccacgactggttcaccttcaccacaaacgtgagcaccgcaaacaggcttctcgactctcgcttcgcctggtacgcgcacaaccaggccccgtctcgccctgctcttcgtgttctttcatacagcgtcccagacgacatcgcttcccatatcgatctgatccagcccaccacccgcttcggcaatcttgccgcccggaagtccaccatattcgatgtccaccgccttcataccggcaaggacatagtgccaggcaaaggccgagtggtcctcagtggcgtggacacggacgactctaaggattgcgtcggctttgtcacaccggaatgtctccgtcggctgtacaatgttcgctacaagcctgtcaacccacaaggcaacaaggttgccattgtttcattcctcgaagagtacgctcgatacgatgacatggaggagttcgccgcggaactccttccagaggccacaaatgccaacttctcagtcgagctcgtcaacgggggcctcaatgatcaggccagcacatctgacagcaccgaggccaacctggatgctcagtacgtcctagccttgagctatccaatccccctgaccgagtacagtacaatttcggtatcatacggggaagaagagcagtcggtccccaaaagctacgctatcaaggtatgcaacatgttcaaggagctcggcgcccgtggcgtatccgtgctctttgcctcgggagactctggtcccggatatgaatgtatccggaacacagggaacaatgccaccttcttcgagccaacgttccctggtacctgcccgtgggtcacgtccgttggcgccaccatggatatggcgaacgaacgcgcagtcgccttttccagcggcggcttcagcatgtactacggccgaccggtatggcagaaggaagctgtcgatgcctatctagacagaattggagacacctacgcaccctacttcaaccgcaccggtcgtgcgttcccggaagtgtctgcgcagggcacatcattcgcggtcttcaaccagggagactggttaagcatcggcggcacttcggcttcgtcgcccgtcgtggcgggcgtcgtggcgttgttaaacgcagcgagaaaggcacaggggaaggcgccgctagggtttttgaacccgtggctttacaacaattcggctgccttcaaggatatcatggagggtgccggtatcgggtgccgggagcgcgacgagtttggttgggacggcgcccggtggaatgccacggaaggttgggacccggtgacggggttggggacgccgttgcttgacaagcttttggaagcggctgctcctgggacgaagaatgagtga

SEQ ID NO: 466 - DNA, 1233 bp, Scytalidium thermophilum
atgcacatctcgactgcaaggttgctgatcaccagcctcctggctagtgtcgttgctgcggcgccgcatgttcccaagacgtcgaagttcctcactgtggaaggggggaagttcaagcttggggggaaagacttccactttgcgggaagtaacgcttactatttcccgttcaatgggaaccagcaagacatcgaaaagggcctcacggcagcaaagaacgctggcttgagtgtgttccgcacgtggggcttcaatgacaaaaattcgacgtatatccccggtggccttccgaactatggcggcgagggcgctgggccttccgaggtagtgttccagtggtggcatcctaacggaacaaccacgatcgatgttagcggcttcgacaaggttgttcgggctgcggaaaaagtgggaatcaagctcattgttgccttgacgaacaattgggccgactatggcggaatggacgtatacacagtgaacctcggcggcagataccatgatgatttctacacgatgcccgaaatcaggaacgccttcaagaggtacatcaaagaatttgttacgcgatacaaggactcgcctgttattgctgcctgggaacttgcgaacgagcctcgctgtggtgctgatggggtgcgcaacctgccgcggagccccaactgtacaccggccgtcttgtcggcatggattgccgagatgagcgcgtacatcaagtcgttggatcggaaccaccttgtgacctggggcggcgagggtggcttcaaccgccagtccgacgattgggcatacaacggcagtgatggcggcgacttcgatcatgaactatccctcgatactatcgacttcggtgttttccactcctaccccgactggtggggtaagacggttgaatggacacaccagtggattcgggatcacgcagctgctggccgccgagcccgcaagcctgttgtccacgaagagtatggttggctgacccctgacaaacggcttgaatacacgggaagagtcgataaccgcacccgtgttgaagtgctgggcggttggcaaaggcttactgttgaggagaagttggctgggagcatgtactggcagtatggctactcgtcatattcctacggccgcaaccacaatgatgggttcacaatttacctcgatgatgaggaggccaaggttcttgtctatcagcacgcgagagagatgaacgcacttaaccgtcacgctcattag

SEQ ID NO: 467 - DNA, 1149 bp, Scytalidium thermophilum
atgaagttcacggccaccggactcctcatgtctctgccgagaattgttctcggccatggttatctcacagtgccgttcagtcgaaccaggctaggcgcagaggccggaattgactcttgtccggaatgctccattctcgaacctgtggtggcgtggcccaacttggatgcgacccctgtcgggcggagcggtccatgtggctataacgcccgagtgtccgtggattacaaccaaccttcctcacattgggggacaacaccggtggcaacatattcacctggccagatcgtggaagtggagtggtgtgttgatcacaacggagaccacggcggcatgttcagctatcgaatctgtcagaaccagacactggtggacaagttcctgacgccaggctacctcccaaccgaagccgagaagcaggaggctgaagactgcttcgaagccgggctgcttccatgcacggatgtgtcaggacagtcttgcgaatacagcccagactgcacaccgggccaggcgtgctggcgcaaggactggttcacctgcaatgcgttccaagctgacagtcgacgggcatgccaaggtatcgataatgccccccgtggctcctgctacacgagcatcgccggcggttacccggtcacgaagaagattcggatccccaattacttgtcaaagcatacattgctgtcattcaagtggaactcgtatcaaacgggccagatctacctctcctgtgccgacattgctatcattccggggtctgacccaacgactcccaccagcaccacctctgaggcctcagctactgctacgccaactgcgtcctgcactccggtttcgactgtgacactgaccttctcggaacgcgtcgtcacgacttggggtcaatctatcaaattggttggttctattcccgaactgggaaactggaatctgtctgccgcgccgacattgtcatcttcagagtatacaagcacaaatcctgtctggacacacaccatcatgctcccggtcggcacctcgttccagtacaagtttgtcagggtggaggccaacggtgctgtgacctgggagagtgatcccaatcgcttgtacacggtgccatcggggtgtgcgacaagcataagggttatttctgaatggcgatga

SEQ ID NO: 468 - DNA, 654 bp, Scytalidium thermophilum
atgaaacctgctgccatcttcccagtgcttctcgtcgcctcgtcctcggccaatgccaagaaaatcttctgcaacgaaggcaccacagaaagctgggacctagcacaggttgagcacaacggctacctccacgagactaccgatgtctactttgacaggccaccagccctagtcgctggctacaacattgcccagttcattgcgccattcgacagttcatgcgattcctacatgcccaccacgatgatgtggatggttggctctcaactcttcacccggaccaagcatgggagcgtttgcaaccagactatcgtggaataccctctcgacgtcgatgtcacggccggggactggcacagagtcatcattggcgcttcctggcaggccagcacaaccggctttttgaaggtctggtatgacgggaaaaaggtcctggacgagcaagacattcccacgacggtcaccgagacggagcagtttcaattccggatcggcctgtatgcgaacggctggtatgacgacaggacgcgacaacctcctgagggcatctacgaggtcttttacgacaagatcgctatcgccacaaccaaggatgaagcctccccggacacgtggaagaggaagccgataagctgtcgaaggttgacacgttga

SEQ ID NO: 469 - DNA, 1161 bp, Scytalidium thermophilum
atgcggtccctctcgctccttgtggcgggcgttctgctcgcggggcacgccgccgcggctccccagatccccaacttcacccaggaagaaatcgacagcggctatgctctgcgcgagctgagccgtattgcctatgaaaatgccatggcgcgtgtggaaaagtcgaccagtgggtgcaccaaagagaacgtgcagattcgcagagaatggcgcaacatgactcttgcggaccgcaaggcgtaccaggaggccatccaatgtctgatgcagaagccgtctcgcaacaagggcatcgacggtgctcgcacagcctgggacgactacggcgttctccactacttccaaactccctatgtgcacaactcagcaactttcctctactggcaccgccatttgaactgggttcttgagcaggatatgcgagagctttgcggatatactggcaccgtctcgtactgggaatggggtcttgactgcggcggactcggcaccgtcgagacctcgcctctttttgacggcagcgaatactccatcggaagcaacggcgccaaggtcaacagccctggtggtggaatgcctttcttcggtgctggccccggcacgggaggcggttgcctgctgtcaggcccgttctccaacttcaccgttaaccttggacccaacaccgcccgcgaccctctcaagtacaacccgcgctgcatcaagcgtgatctcaacaccaatatctgcagccggtactcgtcgctccgcaacacgaccgacgtcatcctcaacagcccgaaccttgagatcttccaggccattgtccagggcgacactcgctggcctgaaggcaccagggtcggcatggctgttcatggaggtggccacttctccatcaacggcgacccaggtggtgacttttacttctcctccctggagccgggcttctatttccatcacggaaatatcgaccgcctccacttcatctggcagaaccttgactgggagaaccgccagaccatttccggcaccaacaccatgttcaaccgccctccgacccctgaggcggtgccggaagacatcatgggctttgagcccatcaacaggaacgtgaccatcgggcagaccattgacactgttggcggcacgccactgtgctatgtctatgctccatggtaa

SEQ ID NO: 470 - DNA, 1164 bp, Scytalidium thermophilum
atgcagctcattactttggccgctctcctccccttcgcgctcgccgcgcccgtcatccagcagcctggcgcccagctcatcccggacagctacatcgtgaagctgaaggatggtgcttcggaacgtgccctccaggatgccatccgccatgtcaaggcgggcaacgtcaagcactccttccgcagcagccggttcaagggcttcgcggccaagctgaaccgcgaggcgcttgagattgtcaagaacctgcctgaggttgaatacatcgagcaggatgccatcgtgcgcgcctacgacctcgtcactcaggagaacgtcccttggggtctcgcccgcatctcccaccgcgagaagggggccacgacctatgtgtatgacgagagcgctggtgaggacacctgcacgtatatcgtcgacacgggcatctatgttgatcacaatgaattcgagggccgcgccgagtggctcgccaacaccatcgacacggacaacaccgacggcaacggccacggcacccacgtcgccggcactgtgggaggcgtttctttcggagtggccaagaagacgcgcctgtttgctgtcaaggtgctcgactcctggggctcgggcacctggtccagcgtcattgctggtattgactttgtggcggccgatgctgcgaaccgcactgccgcgggagagtgcaagaagggcaccgtcgctaacatgtccctcggcggtggccgcaacactgccgtgaacgctgccgtcgcggccgctgttcaggctggtaccgtcttcgtcgttgctgccggaaactctggcgacgacgcctactggtactcccccgcgagcgagccgactgccatcactgtcggtgctagcaacatcaacgatggcgtcccctacttcaccaactacggccccggcgtcgacgtctatgcccccggtgtcaacgttctcagcgcttggattggcaaccccactgcgactcgcgccatcgacggcacctccatggccagcccccacgtcgccggcctcgccgcctacttcctcgggctctacggccccaagacccccgccgagattgacaccctgatcaaggagctcagcacccagggtgtcatcaccggcctgccggctgatactgtcaatgctgttgccttcaacggtgccaccgagtaa

SEQ ID NO: 471 - DNA, 720 bp, Scytalidium thermophilum
atgcacttcaccaagatcttctcgaccctgggcctcgccagcctcgccctggccggcccagtccaggttgctgagcgccagacccagaagctgcggatcatgcccctcggtgacagcattacggagatcacctgctggcgcgccttcgtctgggaccagctggccgaggccggtctcgccgacaaggtgcaatatgtgggctcgcagaacagcaacccgcagggctgccgtcccaacacccccaactgggatcagcaccacgagggccactcgggttggctggccatcgacattgccaacaactacctcgagggttggctgcgcagcacccccgctgacattgtcatgttcatgctcggcaccaacgacgtcttccgcggccgcagcaccaacgacatcatcaacgcctacactaagatggtcgagattatgcgcaggagcaacccgcgcatgaagattattgtcgacctcgtcatcccgctgagcttcaacaacgccccgatccagcaactcaacgcgcgcatcccgcagtgggccgcctcgctcaataccaccgagtcccccatcgtcatcgccgactgctacaccggcttcaactcgttcagtgacctccgcgacggcgtccaccccagcctgtcgggcgaccgcctgattgcctcgcgcgtcggcccgctgctgcttaactatgtccgccaggctcttgaggagcgcggtcagtaa

SEQ ID NO: 472 - DNA, 1308 bp, Scytalidium thermophilum
atggctcgcggtaccgctctcctcggcctgacctcgctcctcctggggctggtcaatggccagaagcctggtgaaaccaaggaggttcacccccagctcacgaccttccgctgcacgaagaagggtggttgcaagccggcgaccaactacatcgtgcttgactcgctgtcgcaccccatccaccgcgctgagggcctgggctttggcggctgcggcgactggggcaacccgccgcccaaggacgtctgcccggacgtcgagtcgtgcgccaagaactgcatcatggagggcatccccgactacagccagtacggcgtcaccaccaacggcaccagcctccgcctgcagcacatcctgcccgacggccgcgtcccgtcgccgcgtgtctacctgctcgacaagacggagcgccgctatgagatgcttcacctgaccggcttcgagttcaccttcgacgtcgacgccaccaagctgccctgcggcatgaacagcgctctgtacctgtccgagatgcacccgaccggtgccaagagcaagcacaaccccggcggtgcctactacggcactggctactgcgatgctcagtgcttcgtgacgcccttcatcaacggcttgggcaacatcgagggcaagggctcgtgctgcaacgagatggatatctgggaggccaactcgcgcgcctcgcacgtggctccccacgtctgcaacaagaagggcctgtacctctgcgagggtgaggagtgcgccttcgagggtgtttgcgacaagaacggctgcggctggaacccctaccgcgtcaacgtgactgactactacggccggggcgaggagttcaaggtcaacactctcaagcccttcaccgtcgtcacccagttccttgccaaccgcaagggcaagctcgagaagatccaccgcttctacgtgcaggacggcaaggtcatcgagtccttctacaccaacaaggagggcgtcccttacaccaacatgatcgaggacgagttctgcgaggccaccggctcccgcaagtacatggagctcggcgccacccagggcatgggcgaggccctcacccgcggcatggtcctggccatgagcatctggtgggaccagggcggcaacatggagtggctcgaccacggcgaggccggcccctgcgccaagggcgagggcgccccgtccaacgttgtccaggttgagcccttccccgaggtcacctacaccaacctccgctggggcgagatcggctcgacctaccaggaggttcagaagcccaagcccaagcccggccccggcccccggagcgactaa

SEQ ID NO: 473 - DNA, 1662 bp, Scytalidium thermophilum
atgaggctcacctcgaccgccttcgcggcgggcttcttcctggcccgctgtgccgccgccaacctcctccgcggcaccggtctcgacatcggccccgacgatgactcggtccccgcctccgaactccaaaaacgcgccgaaaccttccacggctggggcgagttcgaccagctgatcgaccactcggacccgtcgcgcggcaccttcaagcagcggtactggtacagccacgagttctggcgcggtccgggctcgcccgtttacctggcgacgcccggcgaacagagcgccgagggattcaaccggacatggctcagcagctcgcggttgcccggatggatggcgaaccagacgggcggtgccgttgttttactggagcatcggtactggggcgagtcctcgccgtttgaggagctcacggtcgagaacttgcagtatctgacgctgcaggattcgatgaaggattttatttactttgccaagaactgggtgccgccttttgatcccagcggtaacagctcggcggataacgctccttgggtctttgccggtggttcttatgttggtgctctggccggatggcttgccactttgtacccggggacgttttgggcttattatggctcgagcggcgtggtcgaggctattggagatttctggcagtactttgtgccggtgcaagaggcgacgccgcggaactgcagtgccgacgtcgacgccgtcattaactacgtcgacacggtgctgacgtacggcaccccgaagcagaagcgcgctctaaaggagaagttcctgctccaagatcttgaagacgaggacttcgccgccgcgctcgaatggggtccctggcagtggcaatcaacgcagttctactcggccaagaacaccagctacggatacaccccgtactaccgcttctgcgactacgtcgagaatgtttggcccaactctaccaacaaggtgcccggtgctcggggcgttgggttgaccaaggccttggatgggtatgccaagtggatgaaggaggagttgatcccgggcttctgcgaagaagccggctatcccgagtggaacggcacctataacacgctctgcttccagaacctgaatgcctccaatgtcgcgtacaaggacctgagccccggcaactggatcaaccgccagtggatgtggatgctgtgcaacgagccgttcgagtggtggcaagacggcgccccgcggggccacgcaactctcgtctcgcgccttgtcaaccccagctactggcgcaagcagtgcccgctgttcttccccgtcgacaagaaaaccaccaacgccacgtacggcatccgcgaaggaaaacgcgcgcgcgacgtcaaccgctggacgggcggctggttcgccactaacacgacccgcctgatgcacaccaacggtcagtacgacccgtggcgcgactcgacgctggccagcatgttccgcccgggaggccccgtcaggagcaccgagcagctgcctctgaagctggtcaagggcggtgtgcattgttcggatttgtactcgccgaactgggaggcgaatgagggcgtgaggaagattgcggaggaggcggtcgagcagatgaagaagtgggtcggggagtggtatgaggagaggggcgttgggaagccgtgggaggtttga

SEQ ID NO: 474 - DNA, 864 bp, Scytalidium thermophilum
atgcgtgcctcattcgctgtgctttctttcctcacctcgctggcgtccgccggcccagcccctgcctacccaggcatgaagctgctgtggtccgacgccttcgacggccccgcgggcgcgacccccgacacctccaagtggaacatcatcaccgacgtccgcaccaacaacgaaatccagcaatactccccctccaacaccaacctccagctctcgggcggcagcacggtccagctcgtcccctggcgcgaccaaaagacaggcgaatggacctctgcgcgcatcgagaccaaattcgtcttcaccccggccgccggcaagctcaccaccgtcgaggctctgatccgcctcggcgagaaccctctcgaccggcgccagggcttgtggcccgccttctggatgctgggcgactccatccaccacggcaccgagtggcccatctgcggcgagattgacattctcgagtcggtcagcgggcacccgctgggccacggcacgctgcactgcgggcgcaaccagggccacggcgggccgtgcaacgagccgatcggtcgcggcggcgcggtttccttgccggattatgccggctggcatacgtggacggtgcagattgatcgccgcgatacgagcagggggttcaggagcgagtcgatcaggtggttgagggatggtgcggagtggtttgtggtgaggggtgaggatatcggggatgagggtgtttgggcgacgctggcgcactcgccgctgtttattatcttgaacgtggcagttggtggtgactggcctgggcacccgaacggcgcgaccctcgatgggtacggcagcatgatggaggtcgactatgtcgccgtttatcaggggtaa

SEQ ID NO: 475 - DNA, 918 bp, Scytalidium thermophilum
atgcgttcctcccccctccttcgctccgccgttgtggccgccctgccggtgttggcccttgccgctgatggcaagtccacccgctactgggactgctgcaagccttcgtgcggctgggccaagaaggctcccgtgaaccagcctgtcttctcctgcaacgccaacttccagcgtctcactgacttcgacgccaagtccggctgcgagccgggcggtgtcgcctactcgtgcgccgaccagaccccatgggctgtgaacgacgacttcgcgttcggttttgctgccacctctattgccggcagcaatgaggcgggctggtgctgcgcctgctacgagctcaccttcacatccggtcctgttgctggcaagaagatggtcgtccagtccaccagcactggcggtgatcttggcagcaaccacttcgatctcaacatccccggcggcggcgtcggcatcttcgacggatgcactccccagttcggcggtctgcccggccagcgctacggcggcatctcgtcccgcaacgagtgcgatcggttccccgacgccctcaagcccggctgctactggcgcttcgactggttcaagaacgccgacaacccgagcttcagcttccgtcaggtccagtgcccagccgagctcgtcgctcgcaccggatgccgccgcaacgacgacggcaacttccctgccgtccagatcccctccagcagcaccagctctccggtcgaccagcctaccagtaccagcaccacctccacctccaccacgtcgagcccgcccgtccagcctacgactcccagcggctgcactgctgagaggtgggctcagtgcggcggcaatggctggagcggctgcaccacctgcgtcgctggcagcacttgcacgaagattaatgactggtaccatcagtgcctgtaa

SEQ ID NO: 476 - DNA, 1176 bp, Scytalidium thermophilum
atgaggtcggttgctgctttcctcgcggctgtgctccccgccgtcgatgcggcgtgcagtctcccatccagcctcagctggacgtcgtcaggtgctctggcccagcccaagaatgggtggaggaacctcaaggacttcacctatgtcccgtacaacggcaagcacctcgtctacggcagctattacgacggcaaccggtatggctccatgaactttggcctcttctccaactggaacgagatggccagcgcgagccagaacgccatgtccaacgccgccgtggccccgaccctcttctacttccagcccaagaacatctgggtcctcgcctaccaatggggccggacggccttctcgtaccgcaccagcagcgacccgaccaaccccaacggctggtccgccgagcagccgctcttctcgggctccatcagcgacagctcgaccggccccatcgaccagaccctcatcgccgacgacacccacatctacctcttcttcgccggcgacaacggccgcatctaccgctcgcgcatgcccatcggcaacttccccagcagcttcggcagctcctacgagaccatcatgacgggcaaccgcaacgacctcttcgaggccgtccaggtctacaccattgacggctccaaccccaagcagtacctcatgctcgtcgagtccatcggctcccgcggccgctacttccgctcctacgtctccaacaacctcaacggcgcctggaccccgcacctcaccagcgagaacaaccccttcgccggccgctccaacgccccgaacgccacctggacctccgacatcagccacggcgacctcgtccgcctgcgccccgaccagaccttccccgtcgacgcctgcaacctccagctgctgtatcagggcctgcagggcagcagcagcgactataacagccttccgtaccggcctggtctgctcaccatggtcggtgcccggcccggcaacggcggtggtaacaaccagccccagcccacgacgactagcagcccgccggcgaacaccccgcccccgaacaacggcggtggcggtggtgcgacggttcctcgttggggtcagtgcggtggtcagggatacaccggcccgacgcgctgcgagccgccttatacttgccagtactcgaatccttggtactctcaatgcctgtga

SEQ ID NO: 477 - DNA, 1047 bp, Scytalidium thermophilum
atgttctggctcggccttctctcgttgccgaccgccgttcaggcgcagttcggcttcagcacgaacatgctgcggttcggctgctctcagctgtcgattgaccgcatcgacccccttgtcgagcccggcaacattccctcggcgcacgtccatcagattgtcggaggcaatgccttcaacgccagcatgccagtgaccgacatctccaagctgtccacctgcactacctgcagcttcgaccaagatcatagcaactactggacggccaatatttacttccgggcgcggaacgggtcgttcaagcgcgtgccgcagatggtcaacgatgtgatcggccctgccaacggcggtatcactgtctactacaccgctccgggtccgaacacggtggttgccttcaagccgggcttccgcatgttcacgggtgacgtgatgaggcgcacgccgaccaacctcggccgccaggtccagagctgctaccgctgctacgacggccccaacttccagggcaacacccaggccccgtgcttcgaccctcagcgcgacaccgaagccttcccgaacagaccctgcccgggtggtatccgctcgagcgtcatcttccccatctgctgggacggcaagaacctcgactcccccgaccacaagagccacgtcgcccaccctgtcgacggcccggctccgttcgccatggtcagcggccgttgcccgtctagccacccggtgaagatccctcaggtccactacgagatcgtctgggacaccagcaagttcaacaaccgcgctgagtggcctgcggacggcaagcagccgttcgttctctcgaccggcgacccgactggttacgcccagcacggtgactacgtcttcggctggcaggacgataccctgcagcgcgccatggacgccggctgcttcggcgctacctgccgtgccctgactactcagagcttcgacaaggccaacaggtgctctgtcaagcctcaggtccgggaggacaacgatggctggctcaacgagcttccgggtggccaccacgtcatgtaa

SEQ ID NO: 478 - DNA, 1407 bp, Scytalidium thermophilum; identical to SEQ ID NO: 193

SEQ ID NO: 479 - DNA, 984 bp, Scytalidium thermophilum
atgaaggcttccctcctcttcctcctggcgcccttcgcggcggcggctcccaccgtcgagccccgccaggctgcccagagcatcgacgccctcatcaaggccaagggcaaggagtacttcggcacctgcacggatcagcgcctgctccagaccggccgcaacgccgccatcatcgaagccaacttcggctccgttacgcccgagaacagcatgaagtgggagtcgctcaacccccagcgcggcgtctacacctggggccaggccgactatcttgtcaactgggcgacgcagcgcaacaagaccatccgcggccacaccctcgtctggcactcgcagctggccgggtgggtgcgcaacatcaacaaccgcaacgagctcattggcgtcattgagaaccacatcaagaccgtcatggaccggtacaagggcaagatctatcactgggacgtgatcaacgagatgttcaacgaggacgggtccctccgtcccagcgtcttctccaacgtcctgcgcgacgagttcgtcggcatcgccttccgtgccgcgcgcgccgccgacccgtccgccaagctctacatcaacgactacaacctcgaccagccgggctacgccaaggtcacccgcggcatggttgacaatgtccgccgctggctgtcgcagggcatccccatcgacggcatcggcacccaaggccacctgcaagccggccaaggcgccggcctggcccagaccatccgcgtcctggccggctcgggcgtcaaggaggtcgccgtgacggagctcgacatccagcagggcaccaacacgcaggactacgccaacgtggtgcgcggctgcctcgacgagcccaagtgcgtcggtatcaccgtttggggcgttcgtgatcaggactcgtggcgcccgcaaggcaaccccctcctcttcgacggcaactacaaccccaaggccaactacaactccatcgtccagctgctgtctcgttaa

SEQ ID NO: 480 - DNA, 1176 bp, Scytalidium thermophilum
atgaagttctccaagtcggctctcctggccctggccaccgccgcctcggcctccccgaccaagcgccagagcgctgctcccggtgcttgcccgtcgccggtccgcctcgacgccagcaccaacgtgttcaggcagtacactctgcacgccaacagcttctaccgcgctgaggttgaggctgccgtccgccagatctcggaccccaccctggctgctaaggctgccaaggtcgccgacgttggctcgttcctctggctcgacaccatcaagaacattgagcgcctcgagcccgccctccaggatgtgccttgcgaccacatcctcggtgtcgtcgtctacgaccttcccggccgtgactgcgccgccaaggcctccaacggcgagctcaaggttggcgagctccagcgctacaagaccgagttcattgacaagatcgccgagatcatcaagcgctatcccaacactgccttcgcgcttgtgatcgagcccgactcgctccccaaccttgtcaccaacatcgacctcacctcctgccagcagtccgcctctggctaccgcgagggtgtcgcctatgctctgcagcagctcaacctccccaacgtcgtcatgtacctcgatgctggccacggtggctggctcggctgggactccaacctccgccctggcgccgaggagctcgcctccgtctacaagcgcgccggctctcctagccagctccgtggtttcgccaccaacgtcgctggctggaactcctgggaccaaacccccggcgagttcgccagccgctcggacgcccagtggaactcgtgccagaacgagaagctctacgtcgagaagttcggcgctgctctccgcaccgcgggcatgccgaaccacgccatcgtcgacaccggccgcaacggcgtcaccggcctgcgccaggagtggggccactggtgcaatgtggacggcgcgggcttcggccagcgcttcacgaccaacactggctcggagctctgcgacgccttcgtctgggtcaagcccggtggcgagtcggacggcaccagcgacccctcggccgtccgctacgacgaattctgcggcaagcccgacgccttcaagccctcgcccgaggccggtgagtggaaccaggcctacttcgagatgctcctcaagaacgccaaccccccgttctaa

SEQ ID NO: 481 - DNA, 2358 bp, Scytalidium thermophilum
atgaagttcctcggccgtattggggcgaccgcccttgcggcgtcgctgtatctcacagcgggcgctgcgcaagccactggtgatgcgtacaccgacgcggaaacaggcattaagttccagacctggtccccggatccgcagttcacgtttggccttgccctgccgccggatgccctggagaaagatgccactgagtacattggtcttctccgctgcaccagggccgacccatccgaccctggctactgcggtctctctcatggccaggtcggccagatgacgcagtcgctgcttctcgtggcgtgggcctacgagaaccaggtctatacgtcgttccgctacgctaccggctacaccctcccgggtctgtacaccggcaacgctaagctgacccagctctccgtcaacatcaccgacaccagcttcgagctcatttaccgctgcgagaactgcttctcgtgggagcacgaaggcagcaccggatctagctcgacctcccagggctatctcgtcctcggtcgtgcttccgcccgccgcggtgtcgtcggcccgacttgcccggacacggccacctttggtttccacgacaatggcttcggtcagtggggtgtgggtctcgagaatgcggtttcggagcagtattctgagtgggcttcgctgccgggtctgactgttgagaccacttgcgaaggatccggccctggtgaggcgcagtgcgtgcctgcccctgaggagacttacgactacattgttgttggtgccggcgccggcggtatccctgtcgccgataagctgagcgaggccggccacaaggttctgctcatcgagaagggtcccccgtcgacgggccgctggaagggtaccatgaagcccgagtggcttgagggcactgacctcactcggtttgatgtgcccggcctttgcaaccagatctgggtcgactcggctggcattgcctgcactgatactgaccagatggctggctgcgtcctgggtggtggcacggccgttaatgctggcctgtggtggaagcccattgacctcgactgggatgagaacttccctgagggctggcactcgcaggatcttgccgcggcgaccgagcgcgtctttgagcgcatccctggcacctggcacccgtccatggatggcaagctgtaccgcgacgagggttacaaggtcctctccagcggtctggccgagtccggctggaaggaggttgtggccaacgaggttcccaacgagaagaaccgcactttcgcccacacccacttcatgttcgctggcggagagcgtaacgggcctcttgccacttacctggtctctgccgatgcccgcgagaacttctcgctctggaccaacactgctgttcgccgcgctgtccgcactggtggcaaggtcacgggtgttgagctcgagtgcttgactgatggcggctacagcggcattgttaagctcaatgagggcggtggcgtcatcttctcggccggtgccttcggttcggccaagctgctcttccgcagcggtatcggccctgaggaccagctccgcgttgttgcctcctctaaggacggagcggacttcatcgacgagaaggactggattaagctccccgtcggctacaacctgattgaccaccttaacaccgacctcatcctcacccaccccgatgtcgtcttctacgacttctatgaggcctggaccaccccgatcgaggccgacaagcagctgtaccttgagcagcgctctggcatccttgcccaggccgctcctaacattggccccatgatgtgggagcaggtgaccccctcggacggcatcacccgccaattccagtggacggctcgcgtcgagggcgacagccgcttcaccaactcttctcatgccatgactctcagccagtacctcggccgtggtgtcgtgtcgcgcggtcgcgccaccatcacccagggtctcgttaccaccgtggctgagcacccgtacctccacaacgccggcgacaaggaggccgtcattcagggcatcaagaacctcattgagtctcttaacgtgattcccaacatcacttgggtcctgccgcctcctggtagcactgtcgaggaatatgtcgattcgctcctcgtctccccctcggctcgtcgctcgaaccactggatgggcacggccaagctgggtactgatgatggccgctccggcggtacttccgtcgtcgacctcgacaccaaggtctacggcaccgataacctgtttgtggtggatgcttccatcttccctggcatgtcgaccggcaacccgtccgctatgatcgtgattgccgctgagcaggctgcggagcgcattcttaagctgaggaagtaa

SEQ ID NO: 482 - DNA, 2073 bp, Scytalidium thermophilum
atgtctctgcgtttcagaaacggcttcatagtcggcctcgccctcgcggcgtcaaagctggctgcggccggctcggagccctccatgaccgtcttgcccgggaccgctgccaattgcgcctggtggtatgaccataacggctttttgtcttgcactcaagtcctacagcaaaactggatcagcttggatgagtttcggcagtggaatccaagcatcggacctggatgttccaatctccaagtcggtcactcatactgcgtcgagatcgaccccagtatccctaccgatggtgtctcaacaacatccgcagtctctaccacggttgcaagcaccttgactacaccatccacgttcaccaccttctccactttggtcacgtcgtccgagacatcgtcaacgaccacgaactcaaccactaccagcacccccagctccagcagcacctcctccagctctagcactagcacagccccctcttctactgccccaacaacagcaccacccacaaccaccgccacagctccgacctccacagccgctccaacctcccccaaacccaccggccccgtgaccaccccctcacccatccaacccggcatggttagcagctgcgacgccttctacttcgtcgccaagggcaccacctgctccgaggtcctctcgcataacgggatcaccctagctcagctgtacgcctggaacagcggcgtcgagcccgactgttccggcctgtgggccaacgtctgggtgtgtgtgtcaacctttgatcacgagccgactcccacccagccagacagcggcgtcaccacgccctcgccgctgcaggagcaggttgtttccaactgtgacgagttctatctcgtccagccgggggagacgtgctcgattgtcgcggggaagaatggcatcaccgtggaggagttgaaggcgtggaacccgtccgtcggcgcggattgctctggactttgggctgatgcctacgcttgtgtttcggtgagtggccatcagcctacgcctgtcgagccggggaacggggttgagacgccgtcgccgattcagggaggtatgacgacgtcttgcaatcgcttccactttgtggatggggagctttgttcgagcattttgaagaagtaccagatcagcctagaggattttgtgcggtggaatccgggtgttggggaggtttacgcatccagcggcgaatcgcaatcccaagcggcggacgccgtcctcttctcaaagcttcttgacggccaaaataacctgcccttagacttcctcgccagccttcttcccaacctccaaacgctctgtgccgcactaaacggcgggctgggcttccgcttcctgacgcccggatcgctgccccggctgtggcgcgtctgcattaccgagcggaacaactggttgaccatggacccatccatggcgaggcgggtgcttgccgcgggccagcacagtctcgagagcgtcgacctgcacatgtgtgatccgtggcagatgtatccggacgaccggccccgccatgcgttgaactatgtggaggtttactgggagatggcttccgagcctgatgattctgagcatgactcggaacattgcggcggtcgaggcgaggcagaggaaggcgaggagggtactcaaccacaagaggagcaagagcaaaaccagggacaaggacaagaacaaccccaacctaccgcagccgcaccccccaaccttgccctacttccttacggaatcgtcgttccccacgtaaagaacctcaccgtcgtacacaccaccctggatgctatcgtgctcactcgcctgttcctcacctttcccggcgttactcgcctccatttcaccatgggcggtccttgccaatgggacgagcagcctccggtccaggagtttccgctaaaacccgtcatatatgagatccaccggcctggcgtttgcttgaccctgcaggtggccgccttgtatacctcgcccactaccacaaaggctattattagtcaccgccgtccagcgagctcctgccccagcccagcaggccaaccagcccaccacttagccagccattga

SEQ ID NO: 483 - DNA, 1074 bp, Scytalidium thermophilum; identical to SEQ ID NO: 198

SEQ ID NO: 484 - DNA, 2397 bp, Scytalidium thermophilum
atgcgcaccttcaccttcaagtggcctcatccgggcgacgaagtttatgtcacgggcgacttcgatgactggtctaagagccaccgcctcgaaaaagttggagagtccctccaagtgacggtgaccttcccggatgacatgggaaagcttctttacaagttcgtcgtggacggaatctggaccaccgaccccacagtgacgcaagaaaaggacgccgaaggcaacgacaacaacgtgcttcttcccgagcaaatggacaaggtcgaggagtccgccgccaccgcggccatcaccaccgtgacccccgagtccaccaccgctcaactcgctgccgctgtaccgctggagcccaaggaagaagctgcccccgctgctcctgctgctgcgactacggaagagaccaaggaggaaccccccaaggcggaagagaagaaggaggaagaggtcgttatcttgagctctgctgctcccgagtcgatcacggcgcaattggctgccgaggtgcccttggagaagaaggaggagaaggtcgaggagacgcctgcccctgaggccgaggctaagccggaggagaaggtcgaggagacgcctgcccctgaggccgaggctaagccggaggagaaggtcgaggcacctgctcctgtcgccgaagagaaggctgaggagaaggccgaggccacacttgcacctgagaccgaggcgaaaccggaggaaaagattgaggagactcctgcccctgctgccgaagagaaggttgagcccacacctgcacctcagaccgaggccaagccggaggagaaggtcgaggagacgcccgcgccggttgctgaagagaacgctgagtctacgcccgcgtccgcgcccgaggctgaggctaagcctgaggagaagcccgaggtgaaggaagaggagaagaaggaggaaaccgccgagcctgttccggaggctaagcctgaggaaaaggtcgaggagaaggccgaagagaaaacggaacccgctcctgagcccgcgcccgaggctcagcccgagaagtcagaggagaagaaagaggaggctaccgaggctgcccccgagcctgttcccgagcctgctgctgctgtggaggagccgaaggcacctgaagctgccgccgcctctctcgaaaccaccgaggtcaagatcaaccctctccccgccgccgacggcgctgtcaaccccatccaactcgcccctggcgaggaagtccctaaggacatcaccaccgccgccatcgacacccacgtcacgctcgacaaggagtcgtacgagcaaagcgaccgcatccccggcctcgaaactgccctccccgctgtgtcgagcaccatgattcccgagtccagcttgcccgtcctctcggccagcgaggccgaggccgcgaccgccgccatcagcacggtgacccctgcggccaccaccgtcgccctcgccgccgaggtccccaaggaggcggaggccacggtgcccgaggtggtcaaggaaagccaagagaaggcccatgccgaccccgaggccagcgccatccctgaagaggtcaaggagaaggccgaggtggagaaggagctgctcgagaaggttcccgaagtcccgcccgccgcggagggcgttgcgatcgaagacccggccaaggctgtgagcgcagccgtggttgacgaaactaccgtcaccgaagctgtcgccaaggcggttgaggaggcaaaggagcaggcggaggtggagaaggcgatcgagaacatctcggaggaggtgcctgccgtcgtgaggaagtcgatctcggaggcgcatgtcagccccgaggcggccgtgaatgccgaggccgtggaggagaagaaggaggtcgaggccgaactggtggataaggtcgctcacaaggcggaggaggccgccgcggctgccgaggcgggccccaaggagtttgtggccggggccaaggaggaggtcaaggaggttgttgctcccgtgtcggttgtgcctgcgccggctgaggaggcgaagcccgctgaggaggttaagcctgtcgaagaagctaagccggcagaggagcccaagcctgctaaggaggccaaacctactgaggaggccaagcccgctgaggagaccaagcctgcggaggaaaccaaggttgcggaggaatccaagcctactgaggagagcaagcccgctgaggagagcaagcccgctgaggagagcaaacccgctgaggaagccaagcctgcggaggagaccaagccggctgaggagacgaagcccgcagaggaaacccaggctgccgaggagaccaagccggccgaggagaccaacggtgctaccgccgcggataagaagaagcataggctcagcggcttctggagcaagcttcgggccaagttcgttggtgcttaa

SEQ ID NO: 485 - DNA, 2793 bp, Scytalidium thermophilum
atgttcagtcaactcctaacaagcctcggcctgttggccgggttgtcctctgcaggacagaccatccagcaatacgctacggaaagacccctcggcgaatgccctgggtacagggcactcaacgtcaagaccactgccacgggtctgacggccgacctgaggctcgccggtccgccatgtaacacgtacggaactgatctggagaagcttcggctggtggtgacctatgaaaccgagaaccggctccatgtcaagattgaggacgcggatgagctggtttaccaggtgcccgagtccgtctttccccggccagcaagccgtggagtgagctctaccaagtcagccctggtgttcaagtacaaatccaaccccttcagtttctccgtatcccgggccaagacgggcgaggttatcttcgattcatcggccgctcagctcgtgttccagtcacagtacctccgcctgaggaccaagcttcccgagaacccgaacctctatggactcggcgagcactccgaccctttccgtctcaaaacaacgggatacatccgcaccttatggtcccaggacagcttcggcacgcccgaaaatagcaatctatacggaaaccacccggtctattttgagcatcgcaagagcgggacccatggtgtctttctgctcaactccaacggcatggacatcaagatcgacaaggaccccaagactggccaatacctagagtacaacaccctcggcggtgtcgctgatctctacttcatggctgggcctggcccaattgatgtgtctcgccaatatgcagaaattgccggccccccagcaatgatgccgtattggggtctgggtttccatcagtgccggtatggttatcgggacattttcgaagtggccgaagtggtgtacaactacagtgctgctggcatccccctggaaactcaatggatcgatatcgactacatggaccggagaagggtcttcacgaacgacccggagcgatttcccatgcctcttctgcgatcctatgttagccacctccattccaagaaccagcacgccattgtaatggtcgaccctgcagtggcttatgccactgacaacaatcccgcatacatccgcggagtcgaggataacatcttcctcaaacgcgagaacggatcggagtggctgggcgttgtgtggccgggagtctccgtattcccggactggttcgctgccaacatcaccaagtactggaacaacgaatttcaccagttcttctctcccgagacgggtcttgacatctctggtctctggatcgacatgaatgagccgagcaatttcccctgctacttcccctgtgacgatccctggacggcggctcaaggcttccctccgactcctcccgaagtccggactcatgcgccacggccgcttcctggctggccctgtgagtttcaaccagagggatcatcctgcaagcgggatatggagcctcgtagcatcgcggcagcggagccacaggctcgtggtgaagtagccattgcacagacacatgctcttccagcagcactccgcgctcgtgttggtggcaagtggcagggtctgcctggacgcaacttgctgttccccaagtatgccatccacaacaaagccgcctacatggattcgtggaacgccgaacaaggtggcatttcaaacaagacagtcaacaccaacctcatccaccaaaacggtctggccgagtatgacgttcacaacttgtacgggtcaatgatgtccattcagtcccgtcatgcaatgctgtctcgccgtcccacggagcgccccttcatcatcacccggtcgacgtttgccggcgcgggcaggtcggtgggcaagtggctcggcgacaatttctccagctgggaacactaccgcgggtccatccgcgccatgatggcttttgcggccatctaccaagtcccaatggtgggtgccgatgtgtgcgggtttgcctcgagcaccaacgaagctctctgcgcccgttgggccatgcttggagcattcgcgcccttctaccggaaccacaatgagtacccgccggccatctcacaggaattctaccggtggcccattgtcgccgaggcggctcgcagggctatcgatatccgctaccggctcctggactacatctacactgccctgcaccggcagtccgtcgacggcactcccctcatcaaccccatgttctacctgtacccgaatgatcccaagacatttggcctcgagctacagtacttctacggccccggcctcctggtggcgcctgtcacggaggagggcgcgacgagtgtcgacgtctacctccccaacgggatcttctacgactggtacacgcacaagcggatccagggccgcggcgccacgatccagatcagcaaccagacgctcaccgatatcccgctcttcctgcgcggtggcgtcatcatccccgtcagaaccaagtcaggcatgaccacgacggaggtccgagagcagaatttcgagctgctcgtccctctcgactctgagggttccgcaacgggcgagctgtacctggatgacggaatcagcctccagcagaaagtgacaacacttgtcacgttcaagtacaagcatggtgtgttgagtgccaggggagagtttgggttcaaaacaaacgtgaagattacgaaggtgacggtcattggtgctggccgtaagagggatggtggggctgagggagagagtaccatcatcacggttgatcaggcgctcactggcgactttgacattttggtcaatgagctggagtga

SEQ ID NO: 486 - DNA, 789 bp, Scytalidium thermophilum; identical to SEQ ID NO: 201

SEQ ID NO: 487 - DNA, 4179 bp, Scytalidium thermophilum
atgaagtgccttccactcgttttgttatctggcgtctcggccatcgctgctctcggggcggccgagaatcccgtggcgcctttggagcaacgggatacagtcgccgtcacgtacggggctgaacacccatcgacgtggcatcaagaggcgaagcgtcaggagcctcctgctcctgtcaccgtctttgccaacgccaccttcggaaatgccaccgcggtcaatgccaccgcaaccgtgagtgaggcaaagctccgcgagctggcgagcaagctgaggctcctctatgcgtactacgccacttacaaggagagccgccagaccgggcttctcaacaacatcctgggcttggtcggcaacattctgcctccgctggaggatgtgacggatgccctgcgccgcgtcttaatcggagagaacatcagcatcaaggagcagcttgcgattgccaatgctctgggggttggtgttgtcacgaaatacgtcacggtcaccggcggcgcgacgggcgttcctgctgccgcgaactttacggtcactgcaatcagtaccttgacgacgaccattgagccggccatcgagcaaccaaccgtgacaatcactgtgtcccccgaccctgagaccatcaccgagatcgagaccgtcgtggttgtgagcgctgccgacccaacaactgtgacaatcgaccaggtcctcgagaccactgtcacggaaaaggtgatcgttgagacgccggttcttatcgtcgagagctcaaccgagacaagaaccatcaccatctttaatgaggttgtgccttcgaccactgcagtgggtagcctggagaccgagctcgcttcgtgtctgggcgaattgtcgtcctgcctggctacctcgacaccgtcgacgtctgatggttctgaaccttctaccccggcgccttcagaccctgagtcgaccgcagatccagagccatcccaaacttccgctgtcgatcctgtggacagcaccgctgcggaaacgacgtcgacgccggagccagctcagacgaccacggcggaggaccctttgtccacgacgaccttgggaaacgacgaggatgacagccccactgctgttgacactactcctgggtcatcccccaccgatgacgtggaggagccgtccacaacgagctcgggaaacgacgaggatgacagctccactgctgttgacaccacccctgggccattgcctaccgatggcctggaagagccatccacaacctcggcgggaaatgacgacgaggattccacggccgttgacatcacccctggaccatctaccactgagggccccgaagagccgtccaccacctcgactggaaacggtgacgaagattccacggccgttgacaccactgccgcaccctcaactactgaggctgatgagccttcgcccacaacctcggcgggaaacggcgaagactcgagctctaccgccgttgacactgaaccgtctaccaccgagggcccggaggagccttcgaccacaacctcggccggaaacgatgaggacgaaagctctactgctgcgccgtcgactactgacgctgacgagccctcgcccacaacatcgacgggaaacgacgacgaggactctagctccactgccattgacaccgatggaccgtcgccgaccgagggcccggaggagccttcgaccacaacctcggcggaaaacgatgaggacgaaagctctacgacaattgacaccacccctggcccgtctaccaccgagggcctggaagagccgtccaccaccacgtcggcgggaaacggggatgaggatgatgacaccacctccacggccgttgacactacccctgggctcttgacgactgagggtccggaagagccgtccacaaccacgccggcgggaaacggtgatgaaaatcccacgtccgttgatactacccctggaccttcaaccactgagggcccggctgaaactgacgccagctccgacgtaacggcggctccaaccaccagcagcgccgaagagccgcagccaaccacttcggacgtggagactccggatttcgacgacccgaccacatcttcagccgtcgacgagccggagacatccggggcttcgactaccgatgataccgccgactcaacgtcgtcagtccatattccgacctccgctccagacagttctgagtcgccggttattaccacgccaccgagggattcgacctcgtcagcgaccccggctgaaacgacgacggagcctgactcggagaccactgccacttccgatgcttctccaacggatgaggaacctacttctgccgcttcagagtctccgaccataaccgagccttctgccactgatgatggcgaggagcccactaccgcacctcccaccgatggcccagagacctcgagcgctgcacaaaccaccggctctgaggaggacccaaccacaacgagcgacgttgaacctaccgcacccgccgagtcgaccttgacagatactcccgagacatctactgctgccgaatctacgggaggagaaaatccaagcacaatcagcgactctgagcccaccgcaccgtccgagtcgacccccagcgaagctgagacctcgaccgcgcaaaccaccgcctccgaggccgattcgagcacagcaagcgagtccgagacacccatcacgaccgaggccccctcgagccctgctacctccagcgccgcctcgaccgaggactccacccctgccaccgagtcccaggaaagcaccgacacaagcttggtcgatgtgacagggtctgcccccagcaccaccgactccgagaatgacacgaccacaactgtgacgtcgaccgtgacatccacgacgatcgtgaacgagcccccagcagacactaccttggactcggatcctaccacggccgactcgtccgcgtctaccccaagcaccgaggacccgtccagcacgggctctgatgccaccagcgacgcaaccaccggaccgactcctgcggcctcaaccccgcccgcaacttctggcgccgacaccaccgcgcaggaaaccgagtccgacgcgacgagcgcccctacgtccacgaccctcgtgacaagcgtcgtctcggattcctcggcagagaccagcacgacatcgagcgcgccggcaaccacgtcggccgccccagtgaccgagcaattcgatgacaagattgccgtgtatttcggcatgccgccgcacgatcggaagaaggttcgccggtcgttcaacttgtttggcgcccgccacgacgacaagccgagtctcgcggagctatgcgacgatccgaacgtggatatcgtgatcctcgggtacctcacggatgtcaggttcggctgggaagtcaaggtctatccgcggttggagatggaccaccgcttcaccgccacccaaacctccgccatgaagaagctcgcccccggcctgcactactaccccgccctcgagaccgacatccagcactgccaggaaattggcaagcaggtgctgatcagcatcggcgggccgcacgccgacatgccgctcgactcggacgagcaggccatcgatttcgccgacaagctctgggagctttttggcccggttaccgacgccatcgatccgtctctccgcccgttcggctcggcggtagtggacgggtttgatctgaacaaacacgacgaatgcgcctccaactacgacaccctggccaccacgctgcgctcgcacttcgccgccgaccccagcaagacgtacctcctgacggcggcgcccggctgcttgtacccggacatgtcgatccatccgggctatcttgcgcaggcagactacgtgtggccgcggtactttgacaatcccaagtgcgacgttggatcccctcggttcctcgactccgtcaagacctggtccaccgtcctgcgcaccaactccatccccgcaaaccacacgcaggcgcagctgctcatcggcctcgaagtgcgcgccgatctgtttacctcgtcgggcagcccggtgacgtcggcgctgctggcggaggcgcgcgaggcggcaggcagggacgtgtttggcggcgtggccgtgacgccggatcgcagcggggtggcgctgagcgagatcaagtttggtggggaggggttgttgagctggttgaggaaggttttgggcggggggttgtga

SEQ ID NO: 488 - DNA, 741 bp, Scytalidium thermophilum
atgaagctctccctgacaaccctcctggcctctgccctgtccgtccagggtcacgccatcttccagagagttaccgtcaacggccaggaccaaggctcgctgactggtctccgggcccccaataacaacaaccccgtgcagaacgtcaacagccaggacatcatctgtggcgctcccgggtcgcggtcacagtccgtcatcaacgtcaatgccggcgaccgcatcggtgcctggtaccagcatgtcatcggcggcgcccagttccccggcgacccggacaacccgatcgccaggtcccacaagggccccatctccgtctatctggccaaggtggacaacgctgccacggcgaaccaccagggtctgcaatggttcaagatctggcacgacggcttcaacccctccacccggcaatgggccgtcgacaccatgatcaacaacaacggctgggtctatttcaacctcccgcagtgcatcgctcctggccactacctcatgcgcgtcgagctgctcgctctccactcggccacctaccagggccaggcgcagttctacatctcgtgcgcccaggtcaacgtccagtcgggcggcaactttactccctggcagacggttagcttccccggcgcctaccaggccaaccaccccggcattcaggtcaacatttacggcgccatgggccagccggataacggcggcaggccctaccagattccgggcccggagccgattcagtgctga

SEQ ID NO: 489 - DNA, 1338 bp, Scytalidium thermophilum
atgtccatcagtccgttctttgaaaactgcaacgccagcccgtgcctgtcccaggttgccgggctggtgaacggggacgcccccatccagtatgaggcctgcacatcgctgtttggggtgccgactgtgaccacttacatcccccctgtgtcgactgactacacgacgatcgtggatacatccacctacattgatgtgatcgtcgaggtcagcacgacgtataccaccgagcagctgctgtcgaccctgtaccagtcgaccaaggtcactaccacgcagttcacctccaccaagacggtcacgtccacggtaaccacgacgaattacaccacttcggggaagggcaagcggaggaagaggtccgcctgcaagccaaagtcgtccagcacattggcctccagcgaggccgagactacgcctgcggaggagaccactcctgctgagactactccggctgaggagactactgctgccgaggagaccacgcctgctgaagagaccactccggctgaggagaccacgcctgctgaagagactactccagctgagaccactccggctgaggagactaccccggctgagactactccggctgaggagactactgctgccgaggagaccaccgccgtcgagaccactcccctcttccccacggccaccgactgcccgagcctcgaggagtactcgtcggcctgctcgtgcatcggcgctgtcgaaacgactatcactgagaccgccgaggctgagaccactgtgctgaccgagtacaccaccaccacggtcacttcggagtccgtgtccctggagaccgccaccatcaccgtgacgacgagcatccccatcacggttaccgtcaccggcacggcgaccacgaagaccaagaccacgaccaccattacctccacgaagaccgtgaacaccgccctcccgacttcctggtgggtcaggtctcttcgggtcgaccagccgcccgctctcgccggcaagaacgtccagttcaccggcaacggcaactctcccaaggacggcgagatcacgaccggcgcgggcacctctctcaatgtcaagtccactgggggccagccttatctgaccagcaactcgtccttcaagctccgcttggagcctggtcagggccttcagcgcaggaagctgcagctccgctccacgaccggcggcgctgcggatgttacctgctcttttggcgtcaacctgatcctctcgtgcaccggcaacggctggacgcgtatcatcgagtgcgatggcgatctctacatggcctcgaactcgtatcagaacgcgcagtgccaggacgtcgtgttgaggttggctgcttaa

SEQ ID NO: 490 - DNA, 834 bp, Scytalidium thermophilum
atgaagaccacgaccctgacgaccgccctcgcctacgtggccgcggccgtggccaagcctctcgagccgcgtcaaggcactccgggctctggcccctttgctccggctgggtggtacaccgtcggccagcttcctcgccacaccatctacgccccgcgcaacacgccccaggacgccaagctccccgtcctcctctggggcaacggcgcttgctcggccgacggtctcagcgcggtcaacttcctctcgcagatcgcctcgcacggcgtgctggtcatctcgcagggcacaccgtggggccagggcagcacgaccggccagcagatgcgcgacgcgctcaacttcatcacgtccccgcaggcgcgcaacgtcaacgccgactttgccaaggtggactcctcgcggatcctggccgcgggcttctcgtgcggcggcatcgaggcgtacgagcagatctgggacgaccgcgtcttcggcgtcggcatctggaactcgggcctgctcaacaactacgagcaggcgcgcaacttccgcaagcccgtcttcttcttcctcggcggaccgtccgacatcgcctaccagaacggcgagcgcgactacaactacatgcagcccggcgtgcccaagtggaagggcaacctcaacgtcggccacggcggtacctatggcgactacaacggcggcaagttcggcacggcggccagctactgggtcgagtggctgctccggggcaacgagacggccaagtcgttcttcacccagggcggcgcgcagcgggatggttggcaggtggtgtttgcggatctggatcggattcaggtcaacccgatttaa

SEQ ID NO: 491 - DNA, 1227 bp, Scytalidium thermophilum
atgctcctcctcctcctcctcgcccttcccagcctcccaggtctgggagccgcccaacaagcaggcacagtcactacagaaagacaccccaaactagcctggaagcactgcatctctcccggcacgtgtttgactctcgaaggtgaactcacgatcgactcgaactggcgctggacctacgacagggaaacctacgacgactgttacagcccctccagtggttggaattctgccgtttgcacggatggccggggctgtgcggaccgttgcgccctggatggggtggataactatgcagagagatttggggtctttacctgcagagactcggtgatgctcgagtttacgaacgcaggggatgaggccgtcaacatcggatcccgcatgtacctgatggccactccgaccaagtaccagacattcagcctccttggcaacgagcttacgtttgacgtcgacacttccagactcgggtgcgagatgaacggggctctctactttgtggccatggacgaggacggtggcatggcaaagtacccgggcaacaaagccggggccaagtatggcacagggtattgcgatgctcggtgtccgcggggggccaggtttgtcaatggcgaggccaatctcggcagtcaaggtgtcaggacgggccgggatggctcgtgctgcgccgagatagatgtctggcatggaaatgtcgtttcgaccacattctccgcacagtcatgtcgaaccagcggccagggcacatgcgaaggcaatgatgggtgcaacactgccatcaagggctgcgatgaaaatgccatcacgttccggagcagcctctacggccctagccgggggcacatcatcgactcgacgcgcaggctgacggtcgtgactcggttcgtgccgggtcccaacaataccctggccgagatccagcgggtgtatgtccaagacggactgggtgtttccgagatcgttgccgaacaatctaatcccaagcaacttggcaacacgctctcccagcctatggtgttggccatggcggtgtgggatgactaccatgcgaatgtgctctggcgagactcggcagcgacaggactggtagatggtgaatgcgaaatgacggcgggagcgccgagtgagattgagctggaggatcatatcggaggtgggaattatgttgttttttccaatatcaggtttgggccgataggatcgacgctgagactgacgtag

SEQ ID NO: 492 - DNA, 1047 bp, Scytalidium thermophilum
atgccttccctccagactatcggcctggccgttctggctgctgcccaagccgtctcggccgctaccgccggctgcggcaaggctcccccgagctcgggccagaagaccatcaccgtcaacggccgtcagcgccagtacatcctgcagctgcccaacaactacgaccgcaacaagcctcaccgtgtcgtcttcggctaccactggctcgatggctccatgaacgacgttgccaacggcggcttctatgagctccgccagcgccagggcggctcggacagcaccatcttcgtcgccccgaacggtctcaaccgcggttgggccaaccagggcggtgaggatatcgccttcactgacgctctcgtcaacatggtcaagaacgacctctgcgccgacgagacccagttcttcgccaccggctggagctacggcggtgccatgagccactctgtggcttgctctcgtcctgacgtcttccgctccgtggccgtcattgccggtgccctgctctccggctgctcgggcggcaacacccccgtcccctacctcggcatgcacggtgctgccgacaacgtcctgcccatcgccatgggccgtcagctccgcgaccactggatccgcaccaacggctgcgccaacaagaacgctcccgagccgtcggccggccagcaggcgcacatgaagaccgtctacgactgcactcgcgcccccgtcatctggatcgccaacggcggtggccacgtccccgaccccaccggcaacggcggccagaagttcgctcccccggagacctgggacttctggaactcgatcgctggcctgcccggcaccggcaccggcggcaccccgaccaaccccggcaccccgaccaccatcgtcacctcggtcatcaacaccccgacccagcccgcctacacccctcctcctccgcagcagaactgctcgcctcgctggggccagtgcggtggccagggctggcaaggcccgacctgctgcgaggccggctctacctgccgccagcagaaccagtggtactcgcagtgcctgtaa

SEQ ID NO: 493 - DNA, 5157 bp, Scytalidium thermophilum
atgctctacctcattgtctttctgctgtcacttactaccgcccttgctcagcaatcttttcctggaggaggcggactctgttccgatgccattccatgcaagattggatgctgcagcaagaataaccaatgtggcttcactccggagcactgcggcgagggctgtaaacacgactgtgattccaaggctgaatgcggccagtacgccgaacgcgggaacaaggactgcccgctcaacgtctgctgcagcaaatggggtttctgtggcatcacggaggacttctgcggcgatggctgtcagcggaattccgatggaaagggttgcggtgcggctccgcggccagctgagtgcctagtcgaaaccaacgcactgaaatacaagcgccgcgttgcctactacatgctccctgactatatggagcgtgtgaggggttgccatatgtttatgcccgaagacctccttgtgactgggctcacagacatcaatgttgccttcatcaacttcggagaggatttcaagcttgtggatgccggcggcgatatcgtacaccgattggcaaaactgcgcctagaccatcctggtcttcatgtcagcattgcgatcggaggctggacctttaacgagggcgaaaccgcggactactggtcaaagatggcaagcacctttaccaatcgccataccttcattacctctgttgttcaatacctcatcaagtatgggctgaacggagtggatctggactgggaatatccagtggcagtcgaccgtgctggccaccctgatgatttccagaacttcgttcttctcgtggccgagatgcgccgtgcgttcgatagggaggacccggggtggaccattacccttaccttgccaacgagctactggtatctgcgcggcttcgatctgcagggactgcaaaagcatgtgtcctggttcaacctcatgtcctatgacctccatggcatgtgggattatggcaacaaatggaccggcccatatctccgaggtcataccgaccttgacgagatcgacctcggccttgatctgctctggcggaacaacatcaagcccgagaatgtcgtccttgggtttgggttttacggccgctctttcaccatggctgatcccaactgccatcaacccaatggcatatgccagttcaccaccggcggcaaccctggcatttgttccaagactcgaggcgtcctcacatatcaggaagtttggggtcgcaacgacagctcggacgcacagacctactacgaccccaaaaccacagtcaagtacaccgtctttgatggaaatcaatggatctcgtatgacgacgcacaatcctttcacgacaaaaaggtcttcctctccaaacgctgtctcagcggcctgatggtttgggccctcaatcaggacaacggtcactttgacgcctatcatgccttgatgggcgatgtgtcacatctggagttcgatggagctgagaacagcgaggaagaaaaagaacgtctggcgaaggagttggccgcttacacaggccagaactgctttgtcaccactcgctgcaccgatggatcttcaagggaacaaggcatcgaccaagtgtgccctggaggaacgcagtcagttgccacagcccacgcaccgttccagctacgatatagcatgggaggcggcgagaaatgcaagaagggctggttcaagcacatctgttgtcccaaggatgcggcgcccaagaactgcgagtgggtcggagttccggagcggaacgtgttggggtgttcgggggtttgtggtcgcacgcagttcaaattggccaccgacacagcccgagatgccaagggagaggccatgtgctatacgggaacccgtgctctctgctgcgactcgaccgcaatcctacacgactgctactggacctcctgtcaggacttgcgaagtgggatgccgacctgttctaagagctacaagttcctgcattaccgcctgaacacgcctgatggaacgggttactgctccaggacctttggtagttccgaccacgagagatatgggagcggcttgtgctgtccggacacctcagcgttctccaactgtcgctggtccaacgatccaggccgaaagagtcctgcgcctgcagtgcccgtgtccgtggactctgcgtgccaaccacgcccgtgcaagagcaacgagatcaaggtcgcggacgcactggatccgcccaggtcatccttcttggcatcaggacagtcctgcgcaggagtcaagtaccctcccggagtcgaactctctcaccatctgtgctgcgaccctcccactcgattcaacaaaaacgctcccgttgcaccagaaaagctgttcccaacgcactacggtcaccacgatgagtacgacctgcagtggcattacaacgatgattaccgccacaattttagggacgatttcgacgacccgactgaagacggcaaggacgccttcggcttcatcacgcttcatgggcctgagggttcgcttgacaactccttctcgacgacgtacacgtttgtcagcgaaaagcgcgaggttcctaaaaccaagcggtctctcataaccctcgaccaaagcgtgctggacagcgtgtttgacaacgcgactcaggtcttacatgtctactgcaactaccctgctgggtcgccagagtgcgacaaaatttggatcgacggtgccgaggacactatcatccggcttccgaatcacgtcggtgaaggcccctttgcgcgcgttgtctcgatgaaaccagtcagctccggcatgaaactgccgcgacaccatgtcgaacaccgttccgctgacggattgcatgagaaccccgtctacgaggtcgtcattgattacaacttcgctgctatcgcgcccaagcgggaggacgaacccatcttcatgcgcgtcgactactctaacatgctcacctactgggaagaggttgtggaggccgagccagaccgggccaagcggggagagggaaatgtcctgaagagacacaccactgatgagtggcacagccgcgtccaacgggcggctcaaaagcacaaagctctccgcaagcgctctggagcggtcaacatctcggtgcccatggaccccgtaatggatgaggtgggcaccgaaaatagctcaagaaaccagaagcgatggttcggcagctttggcaaatggctcgagaaggtgaccacagttgagaaggcggaattgggccatcttcctctggggtgggcagattcaatcaacctcttccgagctcaatatggctgccctgggcaaaccttttcggccaatttgcgcatggatctggaggcccagctcagcatggacgtcacctacgcctactacttcgtgggtagctttattccgccgagcaaacccgatgtgtacgcctatctcagcatttcgccgaaaggctacgtgggtcttcgcatggagggcaacgcggtcatgcagatgacctcgggcaaaaagaagctcgtcgacacgctggcgtatccaggcctggccatcaagggtatcgctgccgtgggcccgactatggatgtttttggtgaaatccgaggcaagatcacgctccacggcgaggcgagggccggcgcgaatctttggttcggctatgcacaggtgtactggccgcagaacgacgaggccagccagcggtacgagaagctgctgggcctcgacaggagccttcatgctcctgaccccgagttcatcactcccacatttgaggctggcgtcaggctggatgcgcagctggatgttattgtgcagccccaagccaatatcggcatcaaaatagggggtggtagccttctcaagaccaccatcatggatgcccagctgagcggctaccttacgggcgatctctccttccaggcgtccagcgacgtcaatactggcacaaactccttccgctactcgtatggcgtgtacttcttctacaacatcggctacacggctaccgccaagatcctgggtctcattgactgggctctcggtcctcgcaaggcctggccccaggaccaaaggataaatgtttacggacctatcaacggttcgataccgctgacgaagcgttctctcgatgctgggttggagtatgcggtcaaccgcagcatgttgttgcccagggcaggtgataacggaaatggaaatcaaggagctctgactccaaatcaacccgtgttcagtcagaacatacaatgtcctccgggaggatctgcgcctgtcaggctccccgaacttcgatttgggatgtgcgatgggtggaagcgaatgcgcaatagaccgacaacattaacctactctggcgcaaagcacctcgtagaggagcgacggaaagtccaatgcaaatctgggttctgcaagggcgcctctgagcagttcgagaaggccaccggtctcggcatcaaatcgccaatgtcctgtgacgaagcgccatgggcctcaactgaagagggaggcgactttcttgataaagcagatcgaaccgcgacttgcgttcccagctacatgaactcgggctttggtgggaattgccagaagcttgtctcaaatcttgtgagcaactggggcaagttagatccgacaatccctaacgacaaaaaaaaggacaactgggtagaatggaagacacctcggccgtggacttcacaaactcgattaggcgacaacgaaaaccgccccgtcacttaccccaaccgcatgcctccgccagagggtatggtgggcaggacagacgaatacgtttcctggatgttccggcgcaattacacctggtctatcattgacaacagtgcacagtcgagtcagtggtggggggtaactggccgcgaatttaacaacaagaaatacaagccacgcccgggccatgatgccatcctttgcgccctcaacacatttggtcaagacgatttgttccggatgccgaagtataacggctactgccttcaagccggcacgcatgtttcatatcattggccggccatcccgcaaattggaaggtgtctgatcacgtttgcgccgccgacaacaacgacgacaacaaagaggtcggatgggtctgagtattatgacggttgggaagttttgagttacatccgacaactgcggacttggctggacgagagccgtggctga

SEQ ID NO: 494 - DNA, 1593 bp, Scytalidium thermophilum
atgatgctattcaggacccagacctcagtcgtggcggcgtcgatggtggcggcctgggcctaccaggttgctgccatccaactttggaccgcacccgcagcgatacctacaagtgtgccagcacgctgtcgggctgctctggtgcagaacattacatgcgccaactacctcgtcactgcgggcctagtgtctagcggagccgctctggaggacgatgaggctgcggaatactgcaccaacacctgttacgactccctcaccacattccaaagacaggtcacggctggctgcggcaccgagatgtatgtgttgcacatgaacagcacctacatgcaatcgccagccgaactggcgaacagcctagtttgggcatacgacgtgagctgcattaaggactcagctggattctgcctccggagcctttatgctggtctcaaagagctgtgctctgactgcaccctcaaatatgccgctgcgatgctcaactcggagtacggcaggcagcagatcagtcccgaagcattctctgagctcctgtcatcgtgcagcgccaacccgaccagctacacgtacacatacacctcaacttctgtcacgaccaccagtacgagttcagcagatgagccattaccgacatgccttggagagacctacacagtcaaagccgaagacacatgcctgtcaatctccagagataagggggttggcacagacctgatgatcaaccgaaactacctggactacaactgcacgaccttgtcacctggaatgtctctctgcctgcaagacaagtgcacaatcaagacgttggatgagaattcgacgtgctccgaactcattcgcgaccagccgtttggtctagttcaactactttcctggaacccatccattcacaggaactgcgataatctggactccatgatcggacgaagcatctgtctttcgcctcctggcggcggtacctacgacgtcaatgtaactgatacatactatgaatattacccaacactgacaagctcactgatctctaattgggtcaccgcagttgacgacgtggggaccatcagcttcaccacatcttggtacactcccacgctcaacctgagcgcaacaccgaccccttggctgacgatcacatacaatgagacactggcgtcggaactggcgcaacaaacacaatactgttggctcaacgacgacgactttgccaacggattcaacgaagaggactatcccgaaggttgccagtctctcctcagcgtatactgcttcccaacccccggtgctcctgtgccaacctctcccgcgcgcattccggccatgtgtacacctgacaggtcagaatatataataattgatgatgatgagccacctgcctcgacgacgagtgcgcctgcgacgactccgacgccatatcagcccaatatgatccatggctgcaagcggttctacaaggttgtcagcggagatacttgccagaagattttagatacgtttggcctttccctgcaacagtttgttcaatggaatccagatgtgggcgaggattgtcgcacaatgttcctcgactactatgtctgtgtggaggcttga

SEQ ID NO: 495 - DNA, 1296 bp, Scytalidium thermophilum
atgatcgtcaccaaccttgttggagtgcttctccttgcctcgacaggcgcttcccgctccatcacgaggagggcatgtggtttctcggtcccagcggaggcaggcgatacttgtgcctccatcgctgagttttggggaattaccgaggcagagttcatcgcctggaacccctctgtcggcgcaggatgctccgccggcgtcgtgcctggactggagtactgcatcgaatggattggaccgatcacgaccaccacctcgtcctcttcatccacttcgacgaccaccaccacggcaagaacgacatccacgacgagcacgagcgccggaccatcgccaactcaagacggcctcatctcgacatgcacaaagttccacaaggtcgtctccggcgatacttgccaaaagattgtcgacaaatacggaaccttcagcctgagggacttctacacttggaatcccgctgtgggaacagagtgctcctatttgatgctggactattatgtgtgcgtggggatcccaggaacacccaccactcggcctaccactagtacctcatctacgatcacgaccacttcagttccaacccagtctggcattactcgtgattgcacgacgttctaccaggttgtctccggtgacacatgccaaaagattgttgataaatatggaaccttcaccctctcaaacttctactcttggaacccggccgtgggatctgattgctccggactccaaccgggcgtctatgtttgtgtaggcgtgcgcggtaccccgacgacgaggcctaccagtacccttccgtcccctacccagaccgggcttgtttcgaattgcagggatttctacaaggttgtccagggagacacatgccagaagattgttgacaagtacaagaccttcacgctcaacgacttctacaagtggaatcctgctgttggcactagctgcaccaacctccaagtcggcgtttatgtctgcgtcggaatccccagcacgcctacgaagcccatcacgacttccaccgctcgcacgacctcgacatccacccggaagacttccacttccacccggaccacgacgacgacaagcagtgcgccaagtccgacacagcctggaattatctcaacctgcaacaagtattacaaggtcaaatcaggagatacttgtgacaagatccgcgctgcgcacaataatagtttcaccttgcagcagttctattcctggaactcgggcgttggtaacggctgcactaccctgtgggtgggatactatgtctgtgtcggcgtccgcaaatga

SEQ ID NO: 496 - DNA, 1458 bp, Scytalidium thermophilum
atgctgcccgttctcgccggaatcaccttgttgtccttcgggctcattcccggggcttctggtttggagcgccgcggcgacggcatcgtccgcgctcctgtccgggccattcccggcgatccactgccgaacctgcggggccgccagaatgccatcgacgtgatcaatcagcttaatgggacccggtacgccgtcgaggtccaactcgggactccgccccagactcagtacttgattctcgataccggatcacccgacacatggttcaacccaacctgcgcgacgtcgcgctcggccgccgaatgtaggagatatcctaggttcgacctcgacagtagcagcacgctggtggacctgcggcagagcagtctcctccgttatggaagcggccaggccatggtcgaatggtatcgggacaccctcacaataggatctgccgagatcaagaatcaaattgtcggaatcaacgtcgactcagaaaagattcccctcggtattcttggagtgtctccctccgtccacggcaccaacgattacgactacgtccttgatagcatggtgaagcagggtctgatcaaatcgcgcgctttcagtctcgacctgcgcagcgtcgagaaccccaatggcgccatcatcttcggcggcattgacacggggaagtacatcggctccctcgccaaactcccaatccttccccagaaacagtccccgcgcggcggcaaccggtactacgtcagcatgaccggcgtcggcctcacccttcccgacggaaccatcctcaaatctgaagccatcgaaacaccagtcttcctcgactccggcgccaccctgtcccacctcccgacgcggatcgtccaggccctggccaacagcttcaacgactctgcctacgaccccgagatgggatactactacctcccctgctccgcgacccaactcaacgcgtccatcgacttctactttggcgacaagggcatcagtgttccgttcaaggaattcatctggcaggtcggaccctactgcctcctcggcgctatcgctgaagataccgaacccatcctcggcgacaccttcctgcgcgctgcgtacgtcgtgttcgatcaggaccagcggaacctgcacatcgcccaagcggccaattgcggcgagaatctggtgccgattgggacagggaagaatgccgtccccagtctgacgggagattgtaccgagctgccgacgccgactcacactggatccaagagtgggagcgacaaactggacgttacagggacgcacgcgccaaccgcgactattacgggcgtagtgccggacttggatgatggtcctggaccggcagcggatggaaccgagtcgaccggaccgtcggagacgaatgctgctcccgctgttggcaagagcgggatgggcttggccgcggctgtggctgtggcgaatgtggtggcttttgcgctctag

SEQ ID NO: 497 - DNA, 585 bp, Scytalidium thermophilum
atgaagctcctctgtgtcctggccggtgcgcttggtctggcagctgcacttccgagtagcggccacccgcccaccacagaacatctagagtttcacaacaacaagagaataaccactcgtcaagtcgaaaccgtccggaatgatctagaggaaggtaacccagctgcctgtccacgcgttatcctcatctatgcgcgggcgactggcgagccgggaaatatgggcatctccgccggtcccaacctcgccacctccctaaccaccacctaccaatccaacggcggcatctgggtccaaggcgtcggcgacccctacctcgcccaaggtgcacacaacttccttcccctcggcaccactcgcgaagctatcgacgagggcaagcgcctcttccagcttgctcacacgaaatgtcctacctcggtcgttgtcgcgggagggtacagccagggcacggccgtcattgtcaacgccatcagggagttatgggacgaggaagcagcaggtgttggggagcaggtccagggtgtggtgttgtttggatacacgaggaatgagcaaaacggtggaaagatccccggcgggtag

SEQ ID NO: 498 - DNA, 1938 bp, Scytalidium thermophilum
atgggcctccttcgtgtggcatttctgtcgctcgtggcactcaccaccgcggcgagtgtgcccaagcaaagagtcagacggcaggtcactgaactccgttcgagctatgactttgtcatcgtcggcggcggtacagctggcctgactgtggccaaccgaatttcggctgcgctcccatcaaaaaatgtcctggtcattgagtatggtgatatcgccgagcatacaccgggcggattcgacccgccggtgaactggggcgaaggccacccggaccaggcaccgagatggtcgttcaattcacttccaaacccagctatggggaatacaacggcgttcgtcatggcaggacaaaccttgggtggaagttcggccgtgaacggtatgttcttcgaccgtcccgcgaaagaggacatcaacgcgtggcatgaattgcaaggtttggcggcattggggcctatcaagtggaattggaacggtctctacccctatttcaagaagagcgtcaccttcacagaaccctcccctgccgttgcttcccaatacggctacacctgggacgtctcggcctacggcggatccggtccgatttacagcacctacgcgaccttccagtgggccgacgaacggatcctcgccgaggcctggcgcgacctgggaatccaggaccagcaagagtgcgcggacggcagcaaggagggtatctgctgggttccggcatcgcagcatcccatcactggtgcccggtctcatgctggcatcggccactatcaggatgtccagcctcggtccaactatgacctgctcgtcaagcaccaagtcatccgcgtggtctacggtcctggcggccccctgagcggttccgcgccaaaggtcgaggtccggtcgttggatgacgatagccggttcaacgtcacggtgactggcgaagtcatcatctcggccggcgccatccatacgcctaccgtcctccagcgtagcggtattggccaggcatccttcctgtccagccgcgggatcccggtcgtcgtcgatctccccggcgtcggcgccaacttccaagaccactccggcccatcagtcaggtggaactacaccgaggagtacgcccccggtttgtggccgctgtcatccgagatggccaagaacgcgaccttcaaagccgaagccatcgccgcctattccgagacccctgctgccggtccttataccctcgccggtggcaacagcgccatctatgtctccctcccgcacctcgccggccagaccgtcacgaagcaaattgctcgcaagatccggcaacaggtcctgaccggcgccgcggcctccttcctccccgccgacctgcgcacgagcccgaccatcgtcgctggctacgccgcccaactgctcgtcctggccaagctgctggaggaccccaactcccccagcctcgagacgccgtgggccatgtccgagggccccgtcacggcgtggaacttcctcctgcacccgctcagccgcggcacggtgaggttgaacccgacggatcccctggagccgccgattctggactaccgcgcggccacgaacccggtggatatggacctccaccgcgcgcacgtgcgcttcctccgccaggtgatctacaccccgacgctgcagcagtttggtgcgattgagctcgggccgggggcgtcggtggctgcggacgatgacgatctcgctgagtacatccagcagaatagcctgctgtcgttcatgcacccgtgctgcaccgcggcgatgatgcccaggttgctgggcggtgtggttgggacggacctcaaggttcacggaaccaagcggcttcgcgtggttgacgccagcatcatccccttgaatccggccgcgcatttgagcgcgacggtgtatgctattgctgagaaggctgcggacattatcattgacgactggagttaa

SEQ ID NO: 499 - DNA, 1416 bp, Scytalidium thermophilum
atgaagtacacactcgccggctcagtacttttatacgcggcgacggcggccgcgcagagctgctctcaggtgctcgtgccctccaaggcgaaaccagttgtggctgaaggatggcaggcccagcttgtcgccggcggtttgaccaagccgcggagtctggtctttgacagcactggggccttgctcattgttgagagcggaaagggcatcagccggcaccgcttcactgacaatggcggtacttgcctccactcgaaccactctcacatgctggttgagatgacgggacttaaccacggcattgccctctccgacgacggcgagaccctctacgcctccaccgccgaagccgtctttgcctggacctacgacgcccgcggcggcgccgtccgcggcgaaccgcgccgcgtcatcgccaacatgagcaacagcgacctggtcacccgcacactggtcatgtcccgctccaagcccggcaccctaatcgtctcgcgcggtagcgccgacgagcacgccctccacgccgagaccatctccagcggtctgtcccaagtccgcgcgttcgatctcaccaacctcaccagcacctctgccccctacgatttctcgtcccagggtatcgtgctcggctggggtctgcgcaacagcgtcggcgtcggcgagcatcctggcacaggcgccgtttatgccgttgagaacagcgtcgatggcgtcaagcggaatggggtggatgtgcatgagaacaaccccggcgaggagctgaacttccttggctatgccaacggcacggataccggcaagaactttggctacccacactgctttgccgtttggcaggtcgatgagatcccggataacgaggggctgtcggtcggcaagcagtttgctatccaggagaactcgacgcatcgcgacgagacttgcgaggagaagtacaccccgccgaggctgaccttcccggctcattatgcgccgatggatatcaagtttactccggatggcaagacggcgtatgtcagcttccgtggtagctttgaccgctcctcccccgtcggctaccgcgtcgcctccctcgcctggaactcggccaccggcgagcccgaggctgccgctgacagcaccgatgcgctgagcgacgtcatcttcaatgctgacctctccgtctgccccgacggctgcttccgtcctgtcggtcttgccctggacggcgaagggcgcttgtggatggcctcagatgccacgggcgagatctacgtcctgcaaaagactggtggctccgagggcgtctttgtccagcccgccggggacaacggtgccagcagtggggagaacgttgcagcgagtgtttctgggaagcagacggctgttcttggctcgattgttgcggcggtggtggtggcttggttgatggcttga

SEQ ID NO: 500 - DNA, 3027 bp, Scytalidium thermophilum; identical to SEQ ID NO: 215

SEQ ID NO: 501 - DNA, 1899 bp, Scytalidium thermophilum
atggctcgtctcacctcgacggtcgtcgccctcctgggcattgccggcactgtgtgcctagcctacccccgggaagtcccagcgtcaaaggtcttcctcaacggacgccaggttgagaaggaatatgactacatcatcgtcggcggcggcacggccggtctcacggtcgctaaccggctgaccgaagatggaacgaccacggtcctcgtcatcgagtacggccagctcagcaactcggcctccgtcacgaccgtgacaggcggcttcgccggcatgggcgacgcttccctcatgttcaacatccagtcggtgcctcagcggaacctgcgcaaccgcaccatcgcggtccagatcggcaaggtcgtgggaggctccagcgccgtcaacgctatgatgacggtgcgcccggccgccgaggactttgaccgttggggatacttcttcagcaaggcttcgcattggtcctggacgggcttgctgccttacttcaagaaagcattgaactttgtgccgccggacgaggaggtcacgaaggctgccaacatcacctacgacactagttactggggcaccacgtcgggagtctatgcgggttggccttctttccagtatcccagcactacagcgcagatggaagctttccgcggcatccccggagttcccttcgtccaggacagcggggcagggcttccgggcgtctactggtacccgaccttcatggacccgaagaaggtcgagcggtcgtacgcaaggacgggccatcacgaccaagctgtcacccggccgaactatcatctcgccacggggtcgaaggtgaggaggattgtgcttgagggtacgaaggcggtcggtgttgcgtttgtgccggcaacaggatcgagcgcggccgagacgctggttcgcgcaaggaaggaagtcatcctcgctgccggtgccatccacagcccgcatattctgcagctcagcgggatcggtccgaagaacctcctgaccgcggccaagatcgacacggtggtagaccttccgggcgtcgggcagaactttcaagaccaccccatgatccaagccagcttctcttaccaacgcttcaacatccggccgaaccccaacgacatgttttccaacgcgaccttccgcgcctgggcacagcaggtctgggccgccaaccgcacgggtcccaactccatcgccaccggcaactccgccgcctggctttccttccccgtcatctcctcccgtgcggacgagatcgcaacggcgctcgaagcccagaatcacgcggcctacctcccctccgacgccgacgagaccgtcgccgccggctaccgcgcgcagatgctcgcctatgcggccgcgctccgcagcaacggctccgccttctacaaccttgtcatcacaggcggcccgagcaacggcatcctggtcgacctgcacccgctgagccggggcaccgtcaacatcgacacctccgacccgtggaaccgcccgccgcgcgtcgactaccgcgccctgtccaacccgctggacgcggtcgtcatggcggagcttgtccgcttcacaaggcggtattacctcgagaacccgctcaccagcgcctggggcccgaccgagatctcgccgggcaggaacgtgcagacggatgcgcagtttgcggagtggttggagcgcacgctcagcccgacggagtaccacccctcgggcacgtgcgcgatgatgccgcgggagctgggcggcgtggtggatgaggagctgaaggtgtatggtgtggaggggttgagggtggtggatgcgtcgattatgtctacgctggttggtgggaatacctgccagacggtgtatgctgtggcggagaaggctgcggacctcatccggttcggcgcgccgaaggctctggagtaa

SEQ ID NO: 502 - DNA, 1182 bp, Scytalidium thermophilum
atggctcgcatcctggccctcatcggcggcgccgcgctagtccccagtgcgctgggcgccactctcatcgcctcacacttcagcggcaacctctacaccttgcaatacaccggaaccaacagcagcggcactttgaccgttacatcccagacccaaggctgcggtaccactccaggatggatccagtactatgacgacacacgccagctgtactgtttcgacgagtcgtggtggggaggcggctccatcacggaatactctgtcggcaacgacggtcgtttgagcatcacgggccaaggccggagtcaggggaacagcgtccatggcgccctgtacggcggtcccaatgggcggagtttcgtggccaccgctgaatactccccgtccacaatcaccacttaccgcctcccgcttagttcctcggccacctacctcagcctgacccggtttaccatgccgcagcgcgggccgaacccacgccaggatgcgcctcatccgcacgaggtgcaccccgatccaacgggccagttcctgctggtccctgacctcggcgcggacctgatccgcatcttccgcattgagtcctccaccggcaggttgatcgcctgccccgacgcgcgcaccgaccccggcgacggcccgcggcacgtcaagttctggaagtccgccgacggccagaagcagaagctgttcagcgtcaacgagctgggcaactctgtctctgcctgggacgtgtggtatccgagcgacctcaacaacggatgcctgtccctgaccaagacccagaccctgtcgaccttcgcgccgggccggaccggaggtccgcagaccaaggcggcggagctccgcgtggtggacaacttcctgtacgcgacgaaccgcgccgaccaggcgtttggctacgagcaggactcgatcgccacgtacactatcgacccgtcgaccggtgccatctcgtggttcgaggcggccaactcgtactcgtactatccgcgcacgttttcgttcaataaggacggcacgctcgcggccatcggcggacagacctcgtcgaacgtggccatcgtcgcgcgggatccggtcacgggcaggctcggaaacttgatcgcgaacatccaggtcggacagagggggcgtgccggccaggaggatggtctgagcgccgtcgtttgggcggattaa

SEQ ID NO: 503 - DNA, 684 bp, Scytalidium thermophilum
atggtctcgatcaagtctgtcctcgcagccgccacggctgtgagctctgctcttgctgccccctttgacttcgttcctcgggacaactcgacggcccttcaggctcgccaggtgacccccaacgctgagggctggcacaacggctacttctactcgtggtggtccgacggcggaggccaggttcagtacacgaacctcgagggcagccgctaccaggtcagatggcgtaacacgggcaacttcgtcggtggtaagggttggaacccgggaaccggccgcacgatcaactacggtggttacttcaacccccagggcaacggctacctggccgtctatggctggacccgcaacccgctcgtcgagtactatgtcatcgagtcgtacggcacgtacaatcccggcagccaggctcagtacaagggcacattctataccgacggcgaccagtatgacatcttcgtgagcacccgctacaaccagcccagcatcgacggcacccggacgttccagcagtactggtctatccgcaagaacaagcgtgtcggtggctcggtcaacatgcagaaccacttcaacgcgtggcagcagcacggaatgccgctcggccagcactactaccagatcgtcgccaccgagggttaccagagcagtggcgagtccgacatctatgtccagactcactaa

SEQ ID NO: 504 - DNA, 1014 bp, Scytalidium thermophilum
atggtctcgttcactaccctcctcacggccgtcgccaccgccgtgtccgccgtcacggccagcccgcttgaggccctcaagcgcggcatccagcccggcaccggcgtgcacgacggctacttctactcgttctggaccgacggtcgcggttatgttgacttcaacaacggtccccgcggctcgtacagggtcagctggagcaacgtcaacaactgggtcggcggcaagggctggaaccccggccccccgcgccgcatcgcctacaacggcacctggaacaactggaatgtgaacagctatctcgcgctctacggctggaccaccaaccctctcgtcgagtactacattgtcgaggcctacggctcgtacaacccgtcgtccggcgcgtctcgcctcggcaccatcgaggacgatggcggcgtgtacgacatctaccgcacccggcgtatcaaccagccttccatcatcggcaccgcttccttcgaccagtactggtccgtccgtcgccagaagcgcgtcggcggcacgatcgacacgggcaagcacttcgaggaatggcgccgccagggcaacttgcaactcggtgcctggaactacatgatcatggccaccgagggttaccagagcagcggctccgccgaaatcgaaagcatcgagcccgcctcgatcgcggcaatatcatctagcctgagctggaactccaaacagagcccttcggagactgacggttgtgctcctgagacgttcacgactggacacattcaacgatgcagctcagaacaaggcgacagcatcacatcacctccgtctcccgtagagggaaggggatcagagccgttgagcgcgtcgaagaagactctcttcctgccgctgttcagtggcaaatccagcagctcaaaggattggttttggccaagcgtcctccggcaccatgttttccacgccggtcagctccgaagcccaaacgaaaggccgaacgttggcttcctgaagaggatcgtcttcttttgttga

SEQ ID NO: 505 - DNA, 1860 bp, Scytalidium thermophilum
atgcgctatcgcctcttgtctgcgcttgccgcctcgtcggcgctccgagtcacggcagctccgtccacgtcttcttccacggagacgtacgactacattgtggtcggcagtggccctggaggaggtccgttggcagtggagctcgcacgagcaggcttctcaaccctgctgatcgaggctggcggcgatgaaggagataacccgacgtatgccgagatcccatggttcaatgaggcagcaaacgacgaggccacgcgttgggatttctgggtcaagcactcggatgaccctgaacaggacctgaagttcgcccataccacctgggacacgggcgatgggactttctacgttggtctcgatcctccggaggatgctaaacttctgggcatccactatccccgcgctgccgtgcttggtggatgtgccatgcacaatgctggcgtttgctccatgcccgcggacgatgactggaatatcattgtgaacaagactggcgacacgagctgggaagccaagaacatgcgcaagtatctgaagaagatggagcgcaacgagtacctagcccctggtgacgagactcatgggtacaatggatggctcgccacgtcaatcatggactcttcatgggcacgcaacgacagccttcccggcagtcgtatcctgcgtcgcctcactgaacttatcggccaggacccggacaaggcagcagatctcattaacagcgaccttcttgaatactttgacggcgttgacgagaagtcgtctgtatacagcatggtgacgcactccgattccaagggcatgcgctacagccccaacaactacatccgtgccacactcgccgaccccgcgggatacccgctgaccgtgaagcttcgcacacttgccacaaaggtcctcttcgacccggccactgtcggcgtcgatggagtcattccacgtgcgattggtgtggaggtcatggaaggcgaatcgctctacaaggctgacccgaagcacgtcccgggaaccaagggtccggtgaagcaatactctgctcggcgagaagtcatcgtttctggcggcgcgttcaattcgccccagctgctcaagctcagcggcatcggtcccaaagacgaactggccaagttcaacatcacgctggtcaagcacctgccgggcgtgggcgagaaccttggcgacaactatgaaggctcaatcctggccttgggcgcggcgccggtcgaaacagggctgatcacggtgatcttccgcacccccaacgcgcccaacaagaagcgcaacatctacgcgtggtgcggcgccttctcctttgagggcttctggcccggcttcccgacctaccacggcccgactcagtactcgtgcgccatggtccacatggctcccaagtcgcaggccggttcggtgaagttggtgtcggccgacccgcaagacaagcccgagatcaacttccggttctttgagaaaggcggcgacgaggatctggcggagctggtgtcgggcgcgaacatcctccgcgaggcgatgcaggcggcgggcgcgcccgtggccccgctggttgagaagcacccgtgccctggcgggaaggacgagaagtgcaccgacgcggcgcaggccgagttcttcaagcttcaggcatactcgcaccacgcgacgtcgacttgcgcgatcggtggcgatgacgacgagatggcggttttggactccaagtttcgtgtgcgcggcgtcgctggtcttcgtgttgttgatgccagcgcgttccctgttgtgccgggcgcgttccccagctgcccaaccatgatgctgagcatgaaggcagcggaggatattcttgcggaggcaaagaagcaagagtag

SEQ ID NO: 506 - DNA, 1350 bp, Scytalidium thermophilum
atgagagcaaacgctcaattattattcctcctaggcgtccaatccggactgtcctcaggacaacaacagccgcttgcccacaactactaccttgatcaacatctcaacgagctttatcaacagagataccaatttgacaatgacccaaccatcccctcataccgaaccgacctcctctccctccatcgctatctcatcgacatcccctcaatcagcggttccgagcacgacgtggccatcctcctccgcgacctcctcctctccaaaaactacacggtgaccctgcaacccattccatccccatccacctcccaccacaacgacaccgacgacgcccgcacgcgctacaatgtcctcgcctggtcgggctcccctcactcccagaccatcgacacccccgcattcctaaaaaaccgcgtcctcctaacctcccacatcgacgtcgtcccccctttcctcccctacaccctcaaccgcaccaccatcccaccctacaaacccatcccctaccccatcttgtcccgcagcacgctcatcggcggccgcggctccgtcgacgccaaagcgtccgtcgccgcgcaagtcgtcgccctcaccgaccttctgcgcaagggcgagatcaacccggagcacgtcgccctcctgttcgtggtgggcgaggaaaccgacggcatcgggatgaagacgttttcccgctggctgggcgatcacgacgtccaactcaaagcggccatctttggcgagccgacgactaatctgcttgcgtgcgggcacaaggggatcctcctcgccactttgcgcgcaaaagggagggcgggacattcggggtatccggggctgtcgggcgcgaagtcggcgacggcgtcgttgattcggggacttgcggcgttgttggatgcggaggcgacgttggggtcgtcggagagatttgggaatacgacggttaatgtgggcacgctggatggaggtgtcgcggcgaatgtgattgcgcaggaggctgaggctcaggtggcggtgaggattgccgtgggaaggaaggagacggggttggggattgtggcgaagaagatggaggaggtggttgggaaggtggataaggagggattgaggctggagggggtcatggggtatggaccggtggagtgtgagtgtgatgttgatggctttgacaccatggtggccagctatggcaccgatgtgcccaaccttgatggtgaccacgtcagctatctgtacgggccgggcagtatcttggtggcccatggtgaggatgaggcgttgaccgtcggggaactggaggactcggttgagggtttcaagcggctggtaaagcatgctcttggaaattag

SEQ ID NO: 507 - DNA, 1899 bp, Scytalidium thermophilum
atgcgtcagccgcagtctctgctcctcctcggggcattgctccccttcctgcccacgtcttctgcggcgtcttcgcagaatattaggattccaggtcacgccactgtcgtcaacaagcgtgccctctttgggaactacaccttcatcattgccggcggcggcatcgccggtctgactcttgccgaccgcttgacggaggacccaaaagtgaccgtccttgtcattgaagccggtccagtcgactggaaccaagatggcattctcactcccggcaacttccagccgtggtggtacttctacccagggcttgagacggttcctcatgccggtctcaataaccggacgcccgatgccatcgctgcccaggttgtcggcggcggcagcgtcatcaacgccatggtgtatctgagaggagatgccaatgattacgacgcctggggcgctcttggaaatccgggctggagctggaagaatatgctgccatattttaagaaggcggagaacttcaccccaccggatcctgccctggccgctgctgggaacatcacctgggacagctcggtccgtggtagcggtggcccggtgcaatattcctaccccaacttcttcttccccagcagcgccaactggtggaacgccgcccgggagatcggcctccccgcaatccgcgatcctcaggccgggcagaaggagggcgtcttctggatcccctcgacgcttgacgcaaagaccatgacgcgcaaccacgcgcgcctcaaccactttgaccgggtcgccgagtcgcggcccaatttccacctcctccactccaacatcgtcacgaatgtcctgttcaacggcaacaaggccatcggcgtgagctacttgccgacgggcgccactgacgcctcgtgcccgaataccgtctacgccgcgcgcgaggtcatcctggcggctggcgggtttgggactcccaagatcctgcaactgtcaggcattggcagtaagaagctgctcaacaagttcaacatctcggtcgttgccgacctgccgggcgtgggccagaacctgcaggaccagccgacactgtcgatcccgtataccttcacgaacaacatctcccccaactacgacaccttcctcaccaacgccacctacaacgccgagatgcgcgccctctacgacacctcccggcaggggccctacaccctcatcagcggcgtgagcagcaacatcgccctcctctcactgccccaaacctccccgtcgtcctacctgcaaatcatcgcctcggccctggcccgcaaccccgccgactccctacccgcaggcaccgaccctgccgtcgtccgcggctacgctgcccagcgcctggccctgctccagcaattcgcgcgcaccgacgtcggcgtgggcacgctgcactgggacacgggctccacggcgctcgtgtaccacctgaagccgctcagccggggcagcgtgagcatcaagtcttccaacccgctcgacgggccggtgattgactttggcacgggcaccgacccggccgacgtggccgtgtataccgctctcttccgcaagaacaggcagttgtttgccgcggggccgatgcaagccctcggccccgtcgagcaggcaccgtttggggaaggggtgcagacggacgaggagatttataacgtcatgaagcagctcattaacccgacgaatgcgcaccagtgctgcacggcggcgatgatgcccaaggagttggggggtgtggtgaatccggagctcaaggtgcacggggtgaaggggttgcgggtggcggacgcgagcatttggccgttccagattgctggttcccctatggcgacggtgtatgcggtggcggagaagttggcggatgcgattaagagggagtatgggatgcagtga

SEQ ID NO: 508 - DNA, 1455 bp, Scytalidium thermophilum
atgcgtctcagctccgtcctcgtcttcaccctgggcctcgctggcccagcactgggcgacgtggtcaagtacttttccgacgaaactgtttgcaactcaatccaccgcgaccctctttggcttacccacctacccaacaagtctactggagataccacacttgacggtgcctacgccatgtcttcaacccacgagaagaagggagtctggttcggaggcaccattccatcgaccatgattctctggtctctgttcctctgcttcctggtgtcggtcaccacggccgccacggcgaccagggacttgcggtgcctcgtctactacaccaagtcccaccaagacactcctccggtcgacgagcttcaacgtgtcacccatgtcgccattgctttcctcagtcctgaattcttcaacgaaccgaagagcggacttgaacccctgttcacaaccgttgacgatgtccgagccaagttcgctcccgacaccaaggttctgatctctctcggcggctgggaagagatggctggcttcgagacggctgcgtggaatgatttcacccgcagcaggtttgccaaaaacttggccgatgcgattaagaagacgggagcggacggagtggacttttactggcagtatccagggggcaacggcgaagactacaaactgatccccaacgaggaacgggtttgggagattgacgcatatcccctcctcctcgaggaggttaggaaacacttggaggagggcaaaatcatttccgttaccgttcccggactcaagcgcgacatgatcgcctacacctccaagacggttcccaagatcgcacaacacgccgacttcctcaacgtcatgacctacgacctcatgaaccgccgcgaccccttcaccaagcaccactcgggactcaaccagagcctcgaggccatcgacacctacctatccctgggcgccgggccggagaagctcaacctcggcttggccttttacgcccgctggttcaagacggaccacgacaactgtatgtgggaccacatcggctgcccgaccatcgggctcgaggacccggagacgggcgccgacctcaacaacagcggcgtcgtctactggagcgacccggcgcccgccaacgtcaacggcgccaaagtggccgagtcgctccagagggcgctcaagtatggcaagtacgagtacaagggcggcggatattattactgggacggctccgacgatctccagaatatctggtggacctttgacacgcccgacgcgatcaagcgtaagttccccctggttgtggaggagaggggtctgggaggcgtttttgccatggggattggggaggacgcgcctaaatatgatcatttcaacgccttcatccggggtgtggaggattatgtccaaggtggagaggagacctcatatggacgagaggggaagaaagggggtcgtttctga

SEQ ID NO: 509 - DNA, 702 bp, Scytalidium thermophilum
atgaagctcaccacctccatcgccctgctggctgcggccggcgcgcaggctcactacaccttcccccgcaccaaggtcgacggcgtcacctcgggcgagtgggagacgatccgcatcaccgagaatcactggtcgcacggccccgtgacggacgtgacctcgcaagccatgacgtgctacgagaagacacccggccagggcgcgcccaagacggtcaacgtgcgggccggcggcaccgtcaccttcaccgtcgacacggacgtgggccacccgggcccgctgcacttctacctggccaaggtgcccgcgggcaagacggccgcgacgtttgatggcaagggcgccgtgtggttcaagatttaccaggacggccccggcgggttgggcaccagctcgttgacctggcccagctttggcaagaaagaagtctctgtccaaatccccccctgcgtgcaggacggcgagtacctgctgcgcgtcgagcacattgcgctgcacagcgccgcgagcgtcggcggcgcgcagctctacatttcgtgcgcgcaaatcaacgtcaccggcggcaccggcacgctcaacccgggccagctcgtctcgttcccgggcgcctacaagcccaccgacccgggcatcctgttccagctctactggccgccgccgacccagtacatcaaccccggtccggctccggtgaagtgctga

SEQ ID NO: 510 - DNA, 846 bp, Scytalidium thermophilum; identical to SEQ ID NO: 225

SEQ ID NO: 511 - DNA, 5364 bp, Scytalidium thermophilum
atgaagccaccgtcgtggtcgtccttgagctctttgctcctgttgaccttgcccacgggcagtattgcaggaatcatcattaatcgtggcaccgaagacacccaagatcagccgcaaacgtgtagaccagagatttcgccatttgattattctgccaagctccggagcgtttatgagctgccagtctgcagcgctggcgacgagaccggtggcatccatggcaggaatgacgggggaagcaacgacgtgtctttcctagcggccgagtcgctgtctttcttgactggccgacaggtcgtgggacttaacgacgactatacctgcgcgccggaccggccttgcaagaacaaagcatgttgcccaaaggcgacgctccagtgcaactacggcccggaggcatgcggcacgtcgggaatcacgcccaatgaagtttgctggcacaactgcgatgccaaagcagagtgcggtcaatttgctgaccctcctgggaagaaatgtcctttgaatgtctgctgtggaaaatggggcttttgcggaatgacaaaagacttttgcgatgtcgaagatcacggcgccacgggtggctgccagtccaactgcgcgcagcctgggcccaagaaaaaggacagcgaacagttggaccgggtcattggatattacgaggcctggcggtacaagtcccaatgccagggcatgggtctggacgacattccggtcaattcactgactcacctgttcttttcctttgggtttatcacgccgggtgatttcaacatcgttccaatggacaacctgcccttcgagctgttccgcaacttcaccaacctgaagaaaaagaatcctggcctcaaggtcatgattgctgtgggtggttggacacacaacgatgagggacctctgcagaaggttttcaccaatctggccagcacccagcagaaccgacaaaagttcatcacgaatctgctgtctttgatgcggagatatggctttgatggcgtcgactttgactgggaataccccggggccgacgacagaggcggtgagccggaagacggcgtcaactttacgctgttgctcaaagagcttcaagaggcgatcaagaagcagccgatgaaatacatcgtctctttcactgcaccaacgagttactggtacctgcgccattttgatctgaaggccgtcgactatgtggattttgtcaacgtcatgtcctatgatcttcatggtgtttgggacgccaagaatccgatcggctctcatgtctacggacacacgaatctgactgagatgaagatggcgtttgacttgttctggcgtaacgacgtcccggcaagcaagttgaacatgggcttcggcttctacggcagagcgtacacgctagctgacccggcttgcaacaagcccggttgcgtcttcaagggaggcgcaacggcgggagcctgcagcggcgagtctggcattctcacctaccgtgagatcatggaggttatccgaaacaaaaaaatcaagcccatccacgacaaggccgccggcgtcaaatacattacgtggaatgtggaccagtgggtgtcgtacgacgacaaggagacgttcaagcaaaagaaagactttgctaaggaactcggtctcggcggattcctcatctgggccatcgatcaggacgatgaccagctggcggcgctccaggccgtcctggatccccagcccctcaaagcttttgcaatgaccaagggcgacgagaactggaccggctccaacgagatgtgctacgtcaccgagtgcgacgggaagtgcaagtccggctatattaagatcaccgatcagaagtgcgccaagaacaagaaaagccagctgtgctgcccgctctcgggagcgccagatcccaaggagtgccactggcgcggcgaccccttaatgtgcaatggccggtgccatgacgatgaggtcatgacacacatgtcaaagttcgggtcaggcgggactgcctgtactgatggccaaaaagcacactgctgtaagagtcctctcgccgaggagaacacttgcttctggaagggggtcgggcaacagtgcccggccggctacgagatgatgacgttctctggaacagcattcgacctgcttgatgacattgccgccgtgatcatacaggtcgtcggcagcttccaccctctcacgcgtcttaccggccgtctcctcgctcaagtcatcgagcggattgatatccggaccaagaagctattctgctgcaagacgaacgacattgaaaagtgggacaactgcgactggtacggcaagcccggcaactgcttcgacggacactgtcccgacatgaggtttgtgcagctcaccgacagctacttcggaggcgactcgacttgcggcagatttttgaaccggaggcgtgtcttctgctgccaaccgaagaacggacaacctctgttcctccctgtgcccctggagaacctcttccctaatccgcctcagggagacagcgtcgacaccgaatttgagctcaagacggacaaggaatcggccggtggaaacactgaccccaacgatgccgcgtttcagttctacatcctcgcctctcccgaggcgatccagcagtcgctcgacaagcgcgatggctcccactgggaagtctttgactgcaaagatgctgttaccgagggcgagcacaaggtcaagatggtctgcacggacacctccgagaacagcaactgttacaagattgggctgggccatggcgtgcccggcactatcttgcagatgccccggggctgcgggccagggaaatatgccgtagcgaagtctttggaacctctgccggtcgaagatcatcgcaagatactgccgcgtcacctcgcgcacctcgcggactcgaaaccggtggtgtacgagttgacttttgactacgacttttcccgcgtcccacgggacctcggagacacgaagttgcgggttgatttcagcaatcaggatgattattggaacaccatcgttgctggagccgcgtccaagaagaagaggggactcagcaagcggacgctcgctgacgttggtggcaaccacgtcaggtggctcgaagaggagttcagggacgactaccactttggcgggctggacaagcgcgaactgcacgagcgctggtttggctccagtgtcatcgagtggctggtgcagctcctcaagcccgagatcaagcgcgagttccattacaagtacgaagacagcatcacggccaagatcttggacgagtcgtggcagtgcaagaatggagatgttggctacgaagggcaccttctcgcccaagcccttctcaacgtcaacgtcgagaccagctttggtttcactctcatcgttgagtcgctcagagcgccgctcgatatcagccagagctatcttaccttttacaataagggcgagatcacggggatccttacgctcgaggctgtcgccaagattctctacgaaaagaagggcgtgattgcgaatatccccttcccgggcgccaccttcaggattcctggtattgcgaccatcggtccgcagattacggtcgagggtggcattgacgcactcttcgccgttggtggcatcgtcgagaccaagttggagattgccaagtgggaggtccggcatgttgtcccagataacaacgatgaaacctacaagccaaaggagatcgccccaggcgaccccaaacttgaccggactggcagctttgagggccttaagagaccctcgtttttcgccggcgtcgccgtccacggcgacgtcacggctaaactttctgcagctgctgagttcgggatccgctttgatgataagtggaagatcaagccggctgccgccgctgttgtcggtgaaaccagtgtcatgctcaagatggcggccggcgcctcgaccgagggcgtctgcccctttacctacggcgtcgacgtcggcgctcgcctctatgccagggtcacggcgccgcaggccttccactggtctggtattgagtacgacctgacgcccaagtggaacaaggccatcatccagggaggaacttgcccagagctggccggcattccgatgaaaagggatctcgacttcgttgatggctccgcaaaccattctgtcaccgcccttgcgcaacggtcacccaattctctggccaaacgatcattggtttttggtccggcgttcaggctcccggttggcagcttcttctgcccgattgatgacggcgaggaactcagctgcagcgaccatgacaagatctgggctgatgagcccgaccccgaagctgtttggaagaggtcactgaacacggctcttttcgacaagggccacggtgacgtggccaatgttacagcggacgttccagaccacctcgacaagagaaccaatgcaaagtcggtcaagatttgcgacaacgatgagaccacatttcaatatccgaccggcggcgagcttggtgccaatgttgacagcttcggctgggtggagccagacaattgtactgattacaaatggggcggccctcttgccgcgcgtgtcgccggtatacagtacgactcggagcacgtcctcgaggcccagctcgtgaacgacttcttcaaaaaacatatggctggagtgcatccccaagtgcctcatccgaaccccgccatgattgactcggccggaaacaggaggcgcattgactggtgcgactacgtgaggttaatgatccgtattcctgcgttcgtgatacctaacctggacacgagcgaagggacgaacgtggcgctcacgccccttagacacatcgctgcacagttccccacaaataattggaaggaggacgagtatattgccctccagagctacatcaactcggtaatcaagaaccacgcatgggcaggaggccgtatcgtcaacacggacaaatgggcgaccgattacacccagccggctgtggcgcggaagatgatcgtgaagatgcgcgggatcatcgggttacggctttaccacaataacccgacggtgatgagcattctgcgggcgcagaagaaccgcatcggcaccatccttaaccttctcgatacgcagtacctgccgaacaaccggcctgcaccaggctgggacgcctggcctgggctcaacctgcaaagcgaatggaacagattcatgtcgggcaggttcaggcatctgagggccaagtgcgacagcattgtcgaggaccatttggatctcttgcttgattactgggctactccggctatgaagcaggcgagccaaaacaacgctggaaacaaggcgatcatcagggatattgaggagatggatatctactggatgaacgagattcctgactgggaggtgcctttctga

SEQ ID NO: 512 - DNA, 2613 bp, Scytalidium thermophilum
atgaatcaactcggtcgtctcttaggtctgggggctctcctgggcttccgccccgcagccgctgctcggctggtctacgaagacagcctccccgatgacctcccttcagcttgctccgaggctctgctggccgacgtggcctgtagccttcttgtgcgcgatctgcacccagacttcttattacctcccgaggatttggaggatatctgcaccccaggctgcgcgacagcgctcgcatcatggaaggcaacagtccaaagcgcgtgcccgagcgacttgaccatcccgtgggaatttgaccttcccgcgtcgccggtggttatcccagacagtcttcagtggctgtttgagtttacttgtcttcgcgtgaacagcaatttctgtggtccggttgcggccctcgccatagtcttcgccgaccctggagagtcacccttcaactacctttccgaagtccctagcggagccacggagcctagcagctgcgatgagtgcctcgtagccaggctgcgcatgcgggcaggatctccctattttgaaggtcccgttctggccgaggagtcggtttatgaaagcatgacgtcgagctgtagtgtaacggacaagccgttgatcacgacaaccctcgacttcttcaccagcgagccagagcctaccgaggaaccttgccccggaacgctgtacaccatccaaagtggcgatgactgctacagcatctcgcaggctcagagcgttggcacagcctggttgctcgctgacaacaacctggccgctgcgtgccataacttcccgacgtcaggaactctgtgtatcaccaatacctgtgacacggtcgttgtccaggtcaaccagacatgtgccgacattgcagacgccgcaggcatttctgagatccagctgatggcgtggaacccggtcatcaaccccgtctgctctaatcttcatctgatgaacggcacaacgctttgcatcagtcctcccgggccccagctgagcgagcctgtgaccacagaccttccgcccttgactccgaccgctcccgcacctgtaccaacaaatgccaaccccgggtctacgaaaccttgtggccgctggtaccatgttgagctgggcgactattgcaacctgttggttctcagattcggaatctctttggaagacttcatgtttctcaaccccgacgtcaacagcaactgcaccaacttgtttgctggagagagctactgcgtccagccagtgggagatatcaatacctactctggccggccaggatacgcgactttcaccttcgaccccacagctcccttcacaggcgtgccatttaccatgctcccagatgccactgagtctccttactcgcgtgtgcgcacgccccgtgtgctggccgatggtgtccgcgacgactgtacattctatttcctcggcgacagataccaggacccagtggaaagcctgggctactggaagagtaattgcgagttagcagcctccatctacaacgttgacaacgacaactttgtcgcctggaactcgctggagcacaacatcacggatccggcatgctccttcgagactggaaaatggtattgtgggtcttggaacctgccgtcctatcctaccttgacctttaccgagaccgagacaacaacgacaacaaccggcaccgccggcccaacccctcctgccccgactcactcaggccaaccggagaactgcaacacatggcacgtcgtcgaatcaggtgactcgtgccagtcggttgccgacgccgccggtatcacgctgagccagttcctggcctggaaccccgcggttagcagtgattgtgtcgacaacttttggctgggtcaggcctactgcgttggcgtctccggagagggcgccaccacgacgacggcagcgaccactgcgagcccgactccccccgctcccacacactctggccagcccagcaactgtaacaagtgggatgttgtggagtccggtgactcatgtgcctcgctcgcggcggacaatggcatctcgcttgctcagttcttcgagtggaatcctgctgtgagcgaagactgtacaacaaacttttggctcgggcaggcatactgcgttggagtctctggacagagttcgtcaacgacgacgacaagcgcagctagcccaactcctccggcccccacgcacaccggccaaccaagcgactgcaacaagtgggatgtcgtggagtcgggagacacctgtggctctatcgcctcggacaacggaatctccctggcacagttcttcgcctggaatcctgcggtcagcgaggattgcacaaccaacttctggcttggccaagcatactgcgttggcgtgtctggaagcgcaagctccacaacatcaaccccaacttccacgactacagccccgcagccccaggcttccactcacactgggcagccgagcaactgcaataagtgggatattgtgaaatctggtgatagctgtgcctccctggcttcagacaacggtataacgcttgcccaattcttcgcctggaacccggccgtcagccaggactgcgtcaataacttctggcttggctacgcctattgcgtcggggtttcctccccataa

SEQ ID NO: 513 - DNA, 2733 bp, Scytalidium thermophilum; identical to SEQ ID NO: 228

SEQ ID NO: 514 - DNA, 804 bp, Scytalidium thermophilum
atgcattctatcctgaccctcatcgtcactgccggccttgtgacggcgcaaaccaacacgaacctccaaaccaagttccccacggccaccagcacgactggtatttccgccgcgcgcacaattgctgctggagctagctttgatggccaaatgctccagtgggaccgcagcccgtcgacctgcaaagagcaaaccgagggcggcgagaaggatgccctgttcgtcctcgagaacggtgctactttgagcaacgtgattgttgggcccggggctggtgagggtatctattgcaaggggtcgtgcactctgaataacgtatggtggaccgacgtctgcgaagatgccgcaaccttcctccaatcctcgggcacgtcgtacgtcaatggcggcggcgcccgcaacgcagccgacaaggtcttccagcacaacggcggcggcaccgtctcggtcaagaacttcctgtcctccaagaacggcaagatctaccgctcctgcggcaactgcaagacacaggtcgcgcgcaagtccatcttcgagaacatccgggccatcgactccctctcggtggttgcgggcgtgaatgccaactttggtgactcgacgacgatcaagaactcgtgcttgctcaaggggcggacgtgcgatatctttgaggggaacaatagcggaaaggagccgactaagattggaacgggcccatcgggaacggccaacacagcaaccacaaaggccaagcatcctgcaggtgttaaacgaatgttcctgcgccaggggatgtcggactttggaaattctgatgcctag

SEQ ID NO: 515 - DNA, 2301 bp, Scytalidium thermophilum
atggcctccaacatgttgttaaaggcagtgttgctagcatccacattgctcacggctgtggcctttcccagcccggctcatctcgacacacgacaaacagcttctaacttctggtatgccaacattgatcacaggactcctggaatcagggggtatgcacccgaccttgacggcgatgaagcgtacgaggtgttccgtgccgtttcggctggcgacggagcggctatccaggcggccatcttgaacggcaccaacggggcacgtcgccacggcatgtggtttgcttcacagccaagggtggtgtatctaccgcctggcgagtacacaattaccgagacaattcacatgaacactgacacggtgctcatgggggatgccacgaaccctcctgttctcaaagccgcgccagggatgcctcgtaatggtgttcttttctcaggaggtgatccaaccaccaacaatcgaggggagctatcattcaccgtcgccatcaagaacgtcatcttcgacacaaccaatattccgggcgatgcgccgttcgtggcacttggctggagcgtggcgcagggttcccacttacagaacgtggttattcgcatgccacccgcaggaagtagcggcactggacactcagggatccgcatgaatcgaggttcgaccttggccgtgtcagatgttcgcatcgaaggcggccagaacggaatctggttcaatggccaccagcaagccgtgttcaagagtgtccacttctacaacaacaaggtgggcttcctcattgacggcggcagtaccgtcaacttggtcaatccaacattcgaaaacgtcggaacctgtgtgctcaacacgggagggtacccgttcatcggcgtggtcgacgcgagttcgaagaactccggcgtgtttctgcgcaccaccacctggccaaattaccacatcgaaaacctccgccgcgagaatagcaccggagacatcgcccaaggtcccggtaactttgtcttccccgctcagcctcacataccacagctcacctacggcaacacagtcggcgccaaccccatctacggaccggtgttatcctccctggctcggccaagcgccctcgtgtccactgctcacaaatatctcacgatccctgcaccaaactatgccaacaaccccatctccgacttcctgaatgtcaaagacccagcccaaaacggcggccgctcggtccgaggcgacggcacaggcgatgaggcagaagtcatcaacgccatcctccaactcgccgcccaactcaacaagatcgcctacttcccattcggcaaataccgcgtcggctcaaccatccacgtccctcccggcagccgcatcgtgggcgaggcatggtcaaccatcgtcgcgcagggtgacttcttcaaagacccgcgcaacccaaggcccgtggtgcaagtcggcagcccaggggacgtgggtgtcgctcacatcagcgatatgcgcatcaccgtcggagacgttctccctggcgccattctcatgcaattccacatggctgggaaccaggccggggacgtggccgtttggaacacgctcaccaccgtcggcggcacgcgtggtgcaaaggcgttgacggacacatgccgggatccgaccaaccagtgccgcgcggtgtttttgggcctgcactttgcgcgcacgtcaagcgtgtacctggagaacgtgtggaactgggtggccgaccatatcacggaggatttcgacggggggagcaacattgcagcggggcgcggggcgctggttgaggcgaccaaggggacttggctccacggtctcgggtcggagcattggtggttgtaccagctgaactttcgcaaggcggagaacgtggtggtgacgatgctgcagagcgagacgaactatgaccaaggagataacaaccccatgttgctgcccgctccgtgggcggcggatgaggatggctggggcgatccgacgttcgatcattgcgcggcgacggacaagcgatgtcgaatggggtatgccaactacttcaacggtgggaggaacatacggtcatatgcttcggcttcgtgggcgttcttctccgggcctgggtaccaaccttgtgcaggggagtatcagtgccaacggcatatgcacttcgtcaaggagacaccgctgagtctagaggcgtttggactgtgcagcaaggatgcccacgccgtgttgcgcctggcggacgggactgagattgtcacttcggagggtttcactggatcatggcctggtggcggaggtgatatcgggcgatacacgacttaa

SEQ ID NO: 516 - DNA, 1389 bp, Scytalidium thermophilum
atgcattttctcgctcggactgggctctcatcagcccttctcacctggctcgccacctccgctcacctttcagccgcatggccgaacactcctttccgagcatcagggcgatggattgttgactcaagcggggacatggtcacgtacgttggagtcaactggccaggccatggcgaggtcatgatcccagagggcctgcagcacgtttctatcgcgtccgtcgtggccaagatcaagagtcttggcctgaacgcggtgcgcttaacctatgccattgagatggtggatcagattttcgacaacggcggggaagatgtgaccattgaaactgcgcttgtgaatgcgttggggaaggaaaatggcacgacagtgctaggaaagattctggggaataatccgcaatttacagcccagacaacgcggctccaggtctttgacgctgttgctaccgaactagccaggcaagagatctacattctgctagataatcatggatcgaaagggcaatggtgttgctccccattcgatggcaacgcgtggtggggagatacatacttctcaatttccaactggacgagagggctgacgttcatggcggagcacgcaaaatcctggcccgcactcgctgccatgtctctccggaatgaactccgccagccgctgagcaacctcacgttggcccaagagtacaactgggcaaactggtacagttactcccaactcggcgcaaataccatccactctgccaacccagatcccctcatcctgctgtctggaatggattcctcgatgcagttcgatgtcattgtcgatggtaagcctctgacaccaagcacgacggtattcgatcgatctgcctttgcgccagactttgccgaccgcttggtactggagatgcatgcatacagcattactgagaaagttgactcttgccctgagtatgaaaagaagcttacaagccggggcttctcaacattgacaaaagatcctgagcaccaatatccacttcttatgacggaattcgggttcgcgcaggacgccgatacctggaagaatgacgtctatgccacatgcattactcagttcttaccaaaacagaaggttggctggttcatttgggtcattgcggggagttactatgtgcgcgaaggtatacaggagtatgatgagacttgggggttgttggatgctaagtgggagaactggaggtcgcccgattttgtggagaatgggttgaagaagatggtgaatgagatgctggaggcagtgaagggagaaacgggagacgggggccaggctccgacagacagcggaagtgcgaagagctatgatgtgtggtgggggatgttggcgtcaattgttgccgtgctaagtgcggcgatttgctaa

SEQ ID NO: 517 - DNA, 684 bp, Scytalidium thermophilum
atggtcaagccgaccgttcttctcaccgccgccctcgccccggccgccgcgctggccggtcccatccagggtccccagaccaagaccgagagcacgctcggtgcccgccagtggtggggaggcggctactacttccagaactggtccgagggtggcagcaacatccgctgcgtgaacggccagggcggccactacacggcgcagtggaacagccgcggcggcttcgtatgcggcaagggctggagctatggcggcaaccgcgtcatccaatacagcggcacctacaacgccaccggccccggctacctcgccgtgtacgggtggacgcgcaacccgctgatcgagtactacgtgatcgaggcgcacgccgacctggcgcccaacgagccgtggcagcgcatgggcgagttcaccatcgacggcgagggcacgtacgaagtcttccagagcacgcgtgtcaacaagccgtccatcgagggcacgcgcacgttccagcagtactggtcggtgcgcaaggagcagcgcgtcggcggcaccgtcacgatgcagaggcactttgatgcctgggccaggtttggcatgcgcctcggcaaccatgactatgtggttgttgctactgaggggtacacgtcggagccgaatgggtgggggagcgcgggccagtcgagcatcacggtggtttga

SEQ ID NO: 518 - DNA, 906 bp, Scytalidium thermophilum; identical to SEQ ID NO: 233

SEQ ID NO: 519 - DNA, 1890 bp, Scytalidium thermophilum
atgtccgacatgttgtcctcacctgcctccttgggcgcgggtatcacgccgccgcctcttacgctacctgctgctgctcccccgatgatctctgctaatacatcggcgccgcctcatcagcctcctcccgctgttccccccgcaaagccgattctacgccgacccccagggtacgtccccctccgccggcgcacccacaaaaagagccgcacgggatgcgccaactgcaaggcccgcaagatcaagtgcgatgagagacatcccgcttgcatcaactgcctgtcccacggcgtacagtgtccctatctcctcaacggtgggggtccgggcacgggacccgggacggggacggggacgggttcgggatcggggtcggccccaactgcaaccccattgaacgccaccaccgttagcaccggcggctctcccgggaactcgagttttattagtactactacaaattccctcgactcccctgtcccctcggtcctcaccccctccagcttcccgacaccttcctctcccaaccacaccaccaccaccaacaaccatggcggcctactcaccccatctcgggcgtctccctcgccctcctcctccggcgggctacccatgctagagctcgagctgctgcacaactggacgacgcagacctaccggaccctgatggctgagccgatctgggacttttggcgcgacgacgtcgtgcgactgggcctgcgctgcgagtacgtcatgcagaccattctggccgtgagcgccctgcatctggccttccaccggccagataggagagatgagtacacgaccgagggtattctgttgcaccagcgcgcgtcgaggtcggcgatgcaggtcatggcggcgatggataaggaggatgcggatcaggcggcgagtttgatggtgttcagtgtattgactgtcttttttgccctcgcctgcccccgccgccccaaccccgacgggaccttcttcatcggcgaatctggcttccccgactgggccctcctcctccccggcaccaagtccctcgtcatgccgctcagcggcgaccgcggcctgcaaaccatcgtcgccccgttcctccgctacagcgtcacccggtggtacgcgcagcgcgccatgctggagaagaagggtattcctctcccgtcgaaaagcaccgccgcgtttcgttccccggatggtgccgttcctcctcctcctccgccgttgtcgtcatccgagcacgatcttcacctccatcatcaacagcattatcagcagcagataaaacaagaacccccctcgccccatgatcaacagcaccaacaacaacaacaacaaccagacgatgtccccaaaccccaacccctcctcgcccctctccacgcccgcatcacctccaccatctccgacccctccctcctcgcagcttacttctttgccctcgacgagctcgaaatcgcctgggccctcgccctgcccgactcctcttcttcctcctcagaagacccttcttccccttccccctccacttccaacccacccaccgaaaccccaagcccgtctactcctaccccgcgcgacgacgtcctcgacgcgatggtctggctctggagggtaggcgacacgctcatcccgctcctccgccgtcccgaaggggagggcgggcccgcgcaggaggcggtggtgatttttgcgcattttgccgtgctgttgaaacaccatgagcgcaggacgtggtggttgaggggatggggggaggcgatgttgagtcgtgcgcgggaggtgttggatggggagcatcgggagtggttggaggaggggttggaggggttgaataggttaggaggggggttgggagcggtgggaggggggtgtagtgttgaggggatgttgaattga

SEQ ID NO: 520 - DNA, 1017 bp, Scytalidium thermophilum
atgaacctcctccttctcctcttccttcccctcgcccacgcgggcctccgcttcggctgctccaccctcaccatccagcggctcgacccgctcgtcgagcccggcaacatcccgagcgcgcacctgcaccaaatcgtgggcggcaacgccttcaacgcgaccatgccgaccgacgacgtggccgcgcacgcgacctgcacgacgtgcaccttcagcgacaacttctccaactactggaccgccgtgctcttcttccgcgccgagaacgggtcgtacaagcgcgtgcccatcatgcagaacacgggcctgcccaacgggatcaatggcggcatgacggtgtattatacgcagcatagtctgagttcgaatgggggtgtgaaggttacggcgtttaagccgggcttccgaatgacagtgggcaacccagctttcgcgtcccaacccagcatccgcggcaacccgggcctgcgtttcgtctgtctcgacaacccgggcactcgcttccccgaactcccaaccttccccgaccgcccgtgtaaggcgggcatcatgacgatacaccacttccctgcctgctgggacggcaaaaacctcgacaccccctcccaccaatcccacatgtactccacgacgcgcgaatccttctccccagcagggccctgccccccttcccacccggtccgcacgccccaaataaccctcgaaaccctctgggacacctcctccttcaaccacctctggccggcggacggttccaacccgttcgtcctttcctacggcggccgcggcgatggggtcggctacggcacgcacgccgactacgtctttggctggaagggggacgcgttgcaaaaggcgatggactcggattgcatggctagcggatgtgagaatggacggccgttgaggagtcagagcgtgcaggttatgaataagtgtgcggtggagagggtggtggaggaggatattgatgggtggcttccacatctccctggccaaggccccgaggatgtctag

SEQ ID NO: 521 - DNA, 981 bp, Scytalidium thermophilum
atgtggcccactcccaaggcagcctacctcatcctcctggctcactcgctgctcgtcagcggctcgcccgtcgacgccgagatccaggcccgccagtcatgccctgagatccacattttcggcgcccgcgagaccaccgtgccgtcgggctacggcagcgccggcgccgtcgtcgacatgatcaagcgcgagttccccggcgccacctccgaggccatcaactacccggcgtgcggcggccaggctcagtgcggcggtatccagtacggcgactcggcccgccagggcacccaggccgtggccaacgccgtcaacagcttccaccagaggtgtcctaacaccaagctggtgctggttggctactctcagggtggtcaaattatggacaacgccgtctgcggcggtcccgactccggctcgggcatcaccagcaccacctctcccatcaacgcctcggcccacgagcagatcaaggccgtcatcctgatgggctctccccgctacgtcgccggcctgtcgtacaacgtcggcacctgcaccgctcagggcttcgccgcccgcccccgcggctacgtctgcggcaccaactctgccagcaagatccaaaactactgcgactcgcccgacccgtactgctgcacgggcaacgacgccaacctgcaccagcagtacggcagccgctacggccagcaggctttggccttcgtccgcgcgcgcctcaccgagagcggcggcggcaacaacaaccccaccaaccctaccaaccctaccaacccgaccaacccgactaaccccaccaacccgaccgacccgtggaacccgggcaaccccacgaacccgggcaacccgggcggcggcaacggcggcaactgctcgcctctctggggccagtgcggcggccagggctggcagggaccgacctgctgcagccagggcacttgcagggcgcagaatcagtggtactcgcagtgcttgaactaa

SEQ ID NO: 522 - DNA, 1287 bp, Scytalidium thermophilum
atgcagaccaagtccatcctcaccgcggcgctcctggcggcggcgcctgcgtcggcccagctccacgagctcgccgtcaaggccggtctcaagtacttcggcacggcgcttcgcgagggcgccatcaacagcgaccagcagtacaaccgcatcctcagcgacacgcgcgagttcggccagctggtgcccgagaacggccagaagtgggacgccacggagccgaaccgcggccagttcaacttccagcagggcgacatcacggccaacaaggcccgccagaacggccagggcctgcgctgccacacgctcatctggtacagccagcttccgggctgggtctccagcggcaactggaaccgtcagacgctcgaggccgtcatgaagacgcacattgacaacgtcatgggccactacaagggccagtgctacgcgtgggacgttgtcaacgaggccgtcgacgacaatggccaatggcgcaacaacgtcttcctgcgcgtctttggcaccgactacctccctctctccttcaacctggccaaggccgccgaccctgacaccaagctgtactacaacgactacaacctcgagtacaaccaagccaagacggaccgcgccgtcgagctggtcaagatcgtccagaacgcgggcgcgcccatcgacggcgtcggcttccagggccatctgatcgtcggcagcacgccgacgcgccagcagctcgcgaccgtcctgcggcgcttcacctctctcggcgtcgaggtggcctacacggagctcgacatccgccactcccgcctccccgcctcgcagcaggctctcgtgacgcagggcaacgacttcgccaacgtcgtcggctcctgcctcgacgtcgccggctgcgtgggcgtcaccgtctggtccttcaccgacaagtactcgtggatccccgagaccttctcgggcgagggcgacgcgctcatctacgaccacaacttcaacaagaagcccgcgtggacctccatctcgtcggtcctcgccgccgccgccaccaaccccccggcttcctcgagcacttcggtcgtcgtccccaccaccactttcgtcacgaccactactactcctccgcccatctccagccccattgttcccagcaccaccacctctgccgtccccaccaccaccgtctcccctcccgagcccgagcagacccgctggggccagtgcggcggcatcggctggaacggcccgaccaagtgccagagcccctggacttgcactcgcctgaacgactggtacttccagtgcctgtaa

SEQ ID NO: 523 - DNA, 1482 bp, Scytalidium thermophilum
atgaagactccccgtaccagcgcggccgtcgcggccctgctgctgtcccctgccgtcagcgccaccggcaacctcctgacgcccgacaagcttgaggcggatatcaccactcgggagctccagaacgtcctgtggaacttcaaccacatcgccgaccgcaacggcggcaaccgcgcctttggcgagcccggctacaaggcgtccctcgactttgttctcgagcgcgccaagacgcggttcggcgactactacgacacgtacgtccagccgttcaaccacacgtacgacaagacgcgcttcatctcggtcacgggccccgagggcgaggacgtcaaggtcgtcagcccccagtacaaccccgccacgccgcttcccgacggcgtcacggccctgctgatcgacacccccgtcgacgacgagaacggctcgggatgctatgaggagcagtgggagggcatcgacgcgactggcaagctggccctcgtgaagcgcggcgcctgcgctgtcgcggataaactgaggcttgctaaggcccatggtgctcttggtgtcatcctgtggaaccaagatccgggcgacatcgtcatgcccaccctcggcgcggacagcattggccagaccgtccctgtcggcatcattccctacgaggttggcctcgcctggaaggcccgcctggccgccggcgaggacgtcaaggtcaagcttgtcgtcgatgccatcatcgagacccgcgagacgtggaacatcatctccgagaccaagcagggcgacccgaacaaggtcatcatgatcggcgcccacctcgacggcgtgcaggccggccccggcatcaacgacgacggcagcggttctgctgctcttctcgagattatgaccgccctgcgcatgtacgacggctacccgcacaagatccgctttgcctggtggggtgccgaggagagcggtctcgtgggctcgctctactacacctcgaagctctccgaggaggagcttgacaagatcaagttctacttcaactacgacatgatcggctcgcccttccccatgttcggcatcggccaggacgagctcagcggcaccggcgccaaggtcctggaggagtacctccggtccaagggcaaggacgtccaacttggctccttcggcggcggctccgaccacgtcggcttcgtcgagctcggtatcccgacggcgaccctcttcaccggcgccggcgctccctgggatccgtgctaccaccaggcctgcgacacgctcgacaacatcgactgggacgcgctgaccgtcaacgccaaggctgcagcccgcgccctcgccacgctggccaactccctcgacggcgtcggcacccgccgcaagacctcgcctaacccgcgcagccgccgcgccgccctgcgcaacttccagaagtgggcggccgtcacggaggaggcggagcgcggacagaagtgctcgcacagcaagcacaagacggttgtgtaa

SEQ ID NO: 524 - DNA, 1278 bp, Scytalidium thermophilum
atgtttacacgaggatggaggagagcggctgctgccgctgccggcgccgtcactctcttcagcaacacagcaatcggacaaacatggtcagcatgtaacccgctactcactagtggctgccccgccaacaccgccctcggcatgaccatcaacgtcgatttcacccaaggcgaagtcaactccttcgtccccagcggtggcaacccaacctacgggcccgacggcgtcagcttcaccgtcgccgggtccggcgactccccgcaactcaccagcatcttctacatcatgttcggccgcgtcgaagtgaccatgaaagccgccccgggcgccggcatcgtcagctctctcgtcctcctctccgatgcgctcgacgagatcgacattgaatggctcggcgccgacgccaacaccatgcagaccaacttcttcagccgcggccggcccatctacaccaacgcgcagttcaacccggcgcccaacaaccaggccgagttcctcacctacatcatcgactggaccaaggaccgcatcgtctggtacgtcggcggcaccgtcgtgcgcaccgtcaccttcgccgacgccggcgaccagtatccgcagacgcccatgcaggtcaagtttggcgcctggtccggcggcgacccgggcaacccccagggcaccatcgagtgggcgcgcggcccgaccgattactcccagggccccttcagcatggtggtccgctcggcgcgcatcaccgactactcgaccggcaaggcctactactacagcgaccagtccgggacgtggcagtcgattcggtccgagggcggcgagatcaacggcaacgcgaacggcgcggcgcccgtcgagaccacggccagcgcagcgccagagaccacctacaccgcctcccccaccatcccgccgggcggcatcatcggccacacctctgccgggtccacggtgatccgcaccgtcggccccatcccctcgggttgggtcatgacctcggatggcaaggtcgtgccggttggttcgagtactacacccccaacctcctcgccatcttcggactcggactcggactcctcctcttccggctctggcaataataacggccaaaccacgttcgatacaagcgtcctccccaccggcagcgccggaggctcggacttcttcccgacggccgcgcccccgatggacagcggtgtcaaaatggtgccctcggcattggtacccctcatgacggcgcttttctcgtctgttttcttccacttcctccgtttgttggtttga

SEQ ID NO: 525 - DNA, 1005 bp, Scytalidium thermophilum; identical to SEQ ID NO: 240

SEQ ID NO: 526 - DNA, 576 bp, Scytalidium thermophilum
atgaaactccaatccctcctcacatccctcctcgcttccgccgccctggcaaccccggtccgccgggacgtcgattttgacctctacaccctcaagatctccaccaaccacccagcccttgacggcctctacctcggccccatccccgcgcccggcggcggcgccaagaacgccacggctggcctcgcgctcggcgtggtccccggcacccaggcgcagtcgggcatcatcgtctaccccgtcgcttcggaggacccggggctgaccgcattgcacaccatcgacggcggggcggtcctcgtggcgggaaggcacggggtgctggacctggccgccttctacggcgatccggcgtcggcgcccgtgccggagggcgtgactatcgattgggattcgttccagctggtggaggaaggggcggaggtgctgtttgccaatgctaagggacggtgggtggcgttcccgagctatgatggcacttcggggtggagagtgacgttcaaagaaaccacggcgttctcgacgacggactatgttcctgtctccgtcgtgtacgagtcgattcggtgggactag

SEQ ID NO: 527 - DNA, 2076 bp, Scytalidium thermophilum
atgatgcgaagaggcctcgtcacaacagccttgggcagtcttgctcaattggcatcagcactctacatcaatagctccgtaacggccccctgcgactcgccgctctactgccagggcgagatcctcaaagccatcgagcttgcgaggcccttctccgactccaagacgtttgttgacatgcccaccatcaagcctctggatgaggtgattgcggctttcagcaagctgtctcttcccatttccaacaactcggagctgaatgccttcctcgccgagaactttgcccctgccggcggcgagctggaggaggtgcctgaagacgagctgtcgacggaccccaaattcctctccaagctcgaggacaccaccatcaaggagtttgtcgagaaagttattgacatctggcccgaccttaccaggcgctatgccggcgccggtaattgttccgagtgcgccaacagcttcatccccgtgaaccgcaccttcgtggtggccggcggtcgtttccgcgagccctactactgggattcgtactggatcctcgaggggctcttgcggacgggcggctcgttcatcgaaatctcgaaaaacatcattgagaacttcctcgactttgttgagaccatcggctttgttcccaatggcgcgcgcatctactatctcaacaggtcgcagccgccgctgttgacgctcatggtcaagacttacatcgactacactaacgacaccagcatcctggaccgggccctccctctcctgatcaaggagcacgagttctggaccacgaaccgcagcgtgtcaattaccgctcctaacggaaaacaatacaccctcaaccaatatgccgtgaacaacaaccagccgcgtccggagtcctatagggaggattacatcacggctaccaaccagtcctactatgctgagtcgggcatcatctaccccgtgaagaaccctctgaatgagtcggagatcgccagcgtctacgccaacttggcgagcggcgccgagtccggctgggactatagctccaggtggcttcgcacgcccaacgatgctgccaacgacgtctacttccctctccgttccattgccgtcaacagccttgtgcccgtcgacctcaactcgatcctctaccagaacgaggtcatcatctccgagttcctcgagcagacgggcaactcctcagcagccgaaaagttcgcctcagcggccaagcaacgcagcgaggccatgttcgatttgatgtggaacgcaacccactggtcatactttgactacaacctcaccagcaactcgcagcacatctacgtgcccgtcgaccccgacgtcaccgaggcggaaagaggtgacgcgcccgagggataccaagtcttcttccacgtcgcccagctttaccccttctggaccggcgccgccccggccagcctcaagtccaaccccttggccgtgaagctcgcctacgcgcgcgtcgagcacatgctcgccatccgccccggcgccatccccgcgaccaacttccgcacgggccagcaatgggaccagcccaacgtctggcctccgctgcagcacatcctgatgcagggcctgctcaacaccccgcccacctttggcgaatccgacccggcctaccgcgacgtgcagaacctcgccctcaagctcgcccagcgctacctcgattccaccttctgcacctggtacgccacgggcggctcgaccagcgacatgccgcagctcgagggcgtcactcccggatcaacgggcaccatgtttgaaaagtactcggacgtggccatcaacgtggccggcggcggcggcgagtacgaggtggtggagggattcgggtggaccaacggtgtgctgatctgggcggccgacgtgtttgggaaccaactgaagcggccggattgcggcaacatcacggccgtcgtgacgcatccgggcaacgataagcgcgaggttgattttgatctgggcaggcgtgcggtcgagctgcacccgagggatgcggcgtggacaaagatgtttgggcggagtagggtgagggcggagatgaggaagcgggcagagaggaattga

SEQ ID NO: 528 - DNA, 1602 bp, Scytalidium thermophilum
atgctcgccacaatctcgaagatcgctgttggcgttctggccctcaccggccggacatctgcggcggatgcccaagaatggaggacacgatccatctaccaggtcatgatcgaccggtttgccctcacggacgggtcgaccgacaaggaatgtgatgtgtcccgcttctgcggcggcacgtggaaggggctcaagaacaagctggattacatccaaggcatgggcttcacagccatccagatcagccccatcgtcaaaaacaccgacgaccacacggccgtgggcgacgcgtaccacgggtactgggtgacggacaactacgcgctcaacaaccggttcggcaccgagcaagacttcaaggatctcgtggccgaagtgcacaagcgcgacatgctgatcatggtggacgtggtggtcaacaacatggcgcagggcttcgacaacaccatcccgcccaagatcgactactccaagttccacccgttcaacgacgacaagtacttccacccgtactgcaacgtgaccaggtgggaggacccggaggactaccagaactgctggctgtatccgtacggggttgcgctcgcggacctggccaccgacaccaaggaggtctcggacgagctgaaccgctgggtgaagcagctggtgtccaactactccattgacgggctgcgcatcgacgcggccaagcacgtcaacgacgagttcctggcgccctttgtggcgtcgtccggggtgtttgcgttcggcgaggtgctctcgggagtgccgcaggacatgtgccggtatcagatgctcggactgctgcccggcatgcccaactacctcgagtactacgcgctggtgcgggccttcaacggcgagtccctcgagaagctggccgacatgcgcaatcaggcagcctcggcctgcaacgagaccaccctcctgggcactttcgccgagaaccacgacatggcgcgcttcgctgcgcgcaacgacgatatggcgctggccaagaacgccatgacgtatgtgatcctgaacgacggtatccccactgtgtatcaaggccaggagcagcacttcaacggcggcgataccccggccaaccgcgaggcgctgtggacgtccaagtacgacacggaggctccgctctatgtcctgacgtccaagctcaacaaggtgcgcaacaacgccatcaagctgtccgagtcttacgtcacggaacccgccgagacgctgctcgccgacgtcaaccgcctgtgcctcaaacagggcggggacaacgcgaccgtcgtcttttgcatcaccaacgagagtagccaggggtccagctactcgaccagcgtgggagggttcaagcctaaccagaaggtggtggaggttgtgcgctgtcggcacaccaaggctgacggtgttgggaatgttgttgtgtatatggaccagggcgagccgcgcgtgtatgttgccgaagaggtgcttgagggcatcgatgtgtgcgaggagacgacgaaggacgggccggctgagaatggtgttgggcgggtgatggttcagggtatgtcagggaccgtcatgttggtaggtgtgttgtcagctatcttcgttgcgatgtag

SEQ ID NO: 529 - DNA, 336 bp, Scytalidium thermophilum; identical to SEQ ID NO: 244

SEQ ID NO: 530 - DNA, 1515 bp, Scytalidium thermophilum
atgaaggttgagcagcgcgcccttctcgccgcggcactggcgctcgccgggacgcccggtgctgaggcgatcctccgtttctcctgctcggagctcgtcactgagcgtctcgaccccctcgtcttcccgggcgttgcccaatccccccatctgcaccaggttgtgggcggcaacatgttcaacatcacaatggatccaaacaggcacaatattggcgaggaggcgacatgcacgacttgcacattttcagaagacttctcgaactactggacggccactctcttcttccgggcacgcaatggctccttcattcgggtccctcagcgaggcaacattgacttcgagtcagctcgtggcggtggcatgactgtctactacactgctagctatcagaaccaaaaggtcaccgccttccgccccggcttccgcatgatcgtgggcaaccccttctaccgcacgcaggctgaggcgtcccggttccggcaattgaccttcacctgcctcgacaccctctacacccgcacgggcgagacgacctccatgcccacccggccctgcaaggagggcatcatggccaacattcgcttcccgacctgctgggacggcgtcaacctcgactcggaggaccacatgagccacgtcgcctacccggcgagcggcaccttcgagagcggtggaccgtgcccagcgtcgcaccccgttcggattccccagctcttctatgaggttatctgggatactcgccagtttaatgaccgcagcctctggcctgaggacggcagccagccgtttgtctggtcgtatggtgacttcaccggatatggcacccacggtgattacgtcttcggctggaagggcgacagtcttcagcgtgccatggatgccaactgcgacggctattgcccacagctcaagacccaaagcatcgctcaggccaaccagtgccggcagcagcaaaaggtcaaggagaacattgacggctggcttgaccgcttgccgggtaacgttgagatcaccggtcctcagcccggctcgggcagcggaaaccccggtggcaacccgggtggtaatccgggaggcaatccggggggcaaccctggcggaaatcccggcggtggtaacccgggtggtggcaatcctggttgcaccgttgcaaagtggggccagtgcggcggccaaggctacaccggctgcactacctgcgcggccggctcaacgtgccgacgaagccgcctcctgcttgaccagatattcctcttctttctcatcgctctcaacaaactctggcgcatctcgagagacgtcagcccagctcatggcagccgggtcggtcagaatggaccattccccaagcgtctcccactcatcgtcctcatcctcgatactgctatcgtgttctcctttgtcactaatcccctcatctccttccggctgttctaccgcttcctctctgcaggactgctccgctgcttcctccacatctctggccggttccgagacttgcactcctcctga

SEQ ID NO: 531 - DNA, 1227 bp, Scytalidium thermophilum
atgcgcttttcacttctcgcccttgtggccctcaaggccgcctccgtcatggcccttgatcccccttccgaagtgccgacggatcctactgaggcgctccaggaactggaaagtctgaccgaatcggcctacttggagatcacctcggcacttcaggaggcagagaacaagaggcgcatcaagcgcagcagctcgtgcaccctgagcaagcttcgcatccgccgggaatggggtactctctcgacctcgcagaagaaggcctacatcaacgccgtcaagtgcctgcagtccaagacggccaacactccctcgtctctggcccctggcgccaagacgaggtttgacgacttcgtggccacccacatcaaccagacgctcaccatccactacaccggcaacttccatgcctggcaccggtactacgtctggatctacgagacggctctccggaccgagtgcggttacaccggcgctcagccttactgggactgggccaagtctgccatcaccggcctgcacaactctcccgtctttgatggcagcgacacctccttctcgggcgatggcgagttcatcccggacaagccgaacctcgagctcggcggtggcctcggcctgccgcctctcatcctccccgccggcacgggcggcggctgcgtgaccagcggtcccttcaaggacatggttgtcaacctcggccctgtgtccctggaccttcccggcggcctggtcggcgccaaccctgacggccctctggcctggaacccgcgctgcctgaagcgcgacctgaccgactggatcaaccagcgcttcgccaacgccacctcggtgctccgcaacatcctgctcccgaccaccacggcccagttcaacgacatgatggagggcgttcccggctcgggcgagatgggcctgcacggcggtggccactactcgatgggtggcgacccgggccgcgacgttttcgtctcccccggcgacccggccttctacctgcaccacgccgccgtcgaccgcgtctggtacctgtggcagctgctcaaccccctgactcgcatgcagggctccagcgccatcgccggcacccgcaccatgatgaacatgcctcccagcgacccggccaccattgaggattacgtcgacctcggcttcgctggtggtgtgcctaccaagatcaaggacctgctggttaccaccggcggccctctctgctacgtctacctctaa

SEQ ID NO: 532 - DNA, 1785 bp, Scytalidium thermophilum; identical to SEQ ID NO: 247

SEQ ID NO: 533 - DNA, 1077 bp, Scytalidium thermophilum
atgttaaaccggaagacgctctcagccctgattgccggggccgccgtcacctcggcatgcaccatccctgaggagacgctgagtgacaccatcacctaccccttcagcatccaggttcagaatgcctctcgccccgaggtgcacaatgagttcttcaaaatgtacccatggggtggtggcgacgcccatctgttcattggtcccgttggtctggatacctatgacttgacactcgtggacggcgtcatcacgcatgacggcatgggcgtccaagccgtcatcaacggcgagtggtccgagatcgacgacaccaccaagctcttcatgaccgggcgttccgatcccagagccttcttccagcccacatacgcctgcaacccggacacggacgagctccagatagagctgaccctcgtgggccggcaatatgatccaccaggtggtgtcatttgcgtgcgcgagtccttcgacaacagccacgagttccgctactcgccgccgggcaacaccctcattgaccccaaccgcgagtgcatcaccgtcactctggtcgtgatcccgacaaccgagcttcctcccacctcgaccgtggccaccaccatcacgaccagcaccgtttccagcaccgtcgccacgacctcgtcgacgagcacctcgtccacctccaccgccccgacagccaccccgtcgaccgaccccagcgacctcttcaccgacctgacggccctgggctggcggttcctgggctgctcgcccgaggagcggtggacgaccgacggggccttccgcacgctgcccgacgtggtgcacagctccgacaccatgaccaaccagtggtgcgtggcgtggtgcgagggccagggcttcaagtacgccggcaccgaatggaaccgcgagtgctggtgcggcaacgcctacgcgtcgacgcgcgccccgggaactaccatcgccagcctggccacctgcgactacccgtgcacgggcgactcgacgcagatttgcggcggcgatgcgtggttgagcttgtatgagaagtgcgaggaggaggagccgtgtgagaaccaggtgtttacgtaa

SEQ ID NO: 534 - DNA, 1167 bp, Scytalidium thermophilum
atgactcgcttctctcttgccggactggccacagtcctgctggccggcgccgtgtcggcgcaggatcctgtgttggccctccagaaccagggccggcctcagatcgacgcggccatcgccaagtcggcgacttgcaccaaggacaagctccaggttcgccgtgaatggggtgacctgtcgaaggcggagcggagggcgtacatcgacgccatgctctgcatcatgagcaagccgtccaggctggaccctcagcagtaccctggcgccaagtcgcggtacgatgacttcgtcgtcgtccacatgaaccagaccatgaccatccacggcactggcaacttcctctcgtggcaccgctggtacacttgggccttcgagcgcgcccttcagactgagtgcggctacaatggcacccagccgtactgggactggtctcggtggtatgaggaccccgagtcgtcgcccatcttcgacggcagcgatacgtcgctcagcggcaatggtgagaagatcgaccacaccatgtcgcctggcatccccgtcggtaacggtggtggttgcgtgaagaccggccccttcaaggatatggtcattaccctcggccccatggctcccgtcatcaaccccgctcctcctcgcaacccgcgtgccgatggctacggctacaacccgcgctgcctgcgccgcgacatctccaacatcctgtccaggcagaacctgcgtccgcaagacgtggccagcctgatcactggctccaacaacatcggcagcttccaggataccatgcaggcggtcggcggcttcggcggcggcttccccggcttccccggcggcggtcagcagcagttcatcatgggcgtgcacggtgccggccactacaccatctcgggtgacccgggcggtgacttctacacctcgcccaacgacccggccttctatgtccaccacgccatgatcgaccgcacctggtacatctggcagagcctcaacttcgagtcgcgcaagtttgtcattgctggcggcacgagtatgatgggctggggcagcccgctggccactctcgatgatcccattcacctgggtcctccgggcctgattgctgacaccacctatcacatccgtgacctcgtcagcaccgttgatgggccgttctgctacatctatgagtaa

SEQ ID NO: 535 - DNA, 579 bp, Scytalidium thermophilum; identical to SEQ ID NO: 250

SEQ ID NO: 536 - DNA, 1857 bp, Scytalidium thermophilum
atggcttcatccctccggacgctgctccttgccgcaagcctcgtgccggcgacgctggcacagatcatcgcgaggaacgaccctgatccgtccgcggagaacgttgtcctggactctcttgacttctctgatgtcggcgagctccagccactcagtttgggaggaggcgcccagtatgcctgcaagtgctatcacggagagtcttgctggccgtcacaacacgagtggaacgtgttgaacaacaccgtcaacggcaagctccaggtacatatcccacccggagcttcatgctacaacaccttcaatggaccgttgggaacggtaaacacgtacaacgccgcaaagtgcgccgaggccacgcagaactgggccaacgagcaatggcatgtcgagcagcccggcgcgggtctctggacctacttcaccaacgacacctgcaggccaaccacgaacccgtctgacagctgcaccctgggctactatggcgtctacgtgatcatggcccagaagaaacaacatgtcaaagccggaattgacttcgcccgtcgccataatctccgcctcatcgtgcggaatactgggcatgatttccttggtcgtagcacgggctacggctccctgatcatcaatacccatgccttccaggatatccagtggatcaattcatatcagggtcctggaggtcctggaacgtaccgcggccctgccgtgaagatcggcgctggcgtccaagccaataccctcctggcggcgggccactcgctgaaccccccgcgcgttgttgtcactggcgagtgccctaccgtaggcatctcgggcggcttcatccagggcggcggccacggcccgtggtcgaccctgaaaggattctctgccgacaacgtgctcgagtttgaggccattacggcttcgggtcactatgtgacggcgaacgagtacaagaacgcggacctcttttgggcgctcaagggtggtggcccggccacttacgctgtcatcctctccaccacgatgaagacgttcgtggacctgccatcggccggcgcaacgctgtacctcaacacgacccacacgctgaacccagatgtgatctggaacggcacctccatcttccacaaatattctaaccactatgtcgacaatggcttgtatgcctactatgagatcctgcccttcacattccgcgtgcgccccttcgtcgccatcaacaagacaaccacccagcttcagagcatcctccagccgatgctcgatgaactggatgctgccggcatcccgtacgacttcgagaccaaggcgtacccaactttctatgatctctacatcgacttgtttgaacccgaaaacgccggcgactcggccctaacgggtggctggatgttcaaccaccacgacgttgccaccaacaacgatgccatcatcgacgccttcaagacggtggcggcgccgcggtccgacttgttcggtatcctcatcggtcacatcttcaacccgggttatggcatgccccaggccaacagcgccacgcatcccgcctggcgtaatgcctccgactttgtcatcaccgtcctgcccgtgcctgtcggctcctcgctcgcccaaaaggccgacctgcagaatgtcttgaccaacgtcatggacgccgctctgcgcgacgccagcaccagtggctgcacttatgtcaacgaggccgacccatatcagcccaactggcagagccacttctggggatccaactacccattgctccgccaattgagggaaaagtgggatcctgagggtgtgttttacgcggtctcgacgccagggaccgaagactgggagattgttaatgacaagttgtgcaagaggctttga

SEQ ID NO: 537 - DNA, 690 bp, Scytalidium thermophilum
atgcggttcttcaacccactcgttgtcctcgccctttcgggattcgcctttggtgcagaaggaggactccttggtgcacgcgcaaaagatggcactgtcgacgctcctgcagctatccgtgcccgcaccgaggtcacaaccaaccacaaccacggcatcaactcggaagtgaagagacgctatgcaccccagcaccagcggcggggtgattggaatggaaaggggaagggcaaaggcccgtacgagactccttgcctactcccgcatgatgtggaggagctcgtcgacgcctatgatcgcatcatttccgcatggaatgatgccgatgctgtttacctcgccgacgagttccgcgacacgtccgacagcatcaacatcctggctgggattccgttggggagcgcaacttttccgactagggatgcattcctttaccatatgcagacccagcccgacaacctgcccctggacatcacccacgcctccccatactcgtgcaccgagatcgccgtcatctgggagaccaaattcggcgtggcagagataccggttcgcgggatcaccattctgggggctaccaagacgaagggcttctggcagataagcagcatggacgtggagttcaactcgctggcctatctcctcaacattggaggcacgtattccaagcctggcgctccgccgtcgtaa

SEQ ID NO: 538 - DNA, 1311 bp, Scytalidium thermophilum; identical to SEQ ID NO: 253

SEQ ID NO: 539 - DNA, 495 bp, Scytalidium thermophilum
atgaagttccccggtgtcctcgctttcctcggtgccgtcgcgacggctgccgctcagtcccccgtccgcggccccaacactcttgtcttcaaggagattggcggtgttcccaacaacgagtgcctgaccttcaccaacgagggcatcatcgttaatgctgcttgcgcctggacccactccgaccggcaggtcacacccggccggatcctgggcaccgacgtgctcatcatccagcgcccgtggcagcagcctttccgcccggatctcgtcggcaagactgcctgcattgcctacaaccagggcaccttccgcgctgaggactgcaaccgcaaggatctgctcttcgtccgcttcgacatcggcaccggccagatcgtcgcaaacggccacaccgcttgcctgagcggccacgacagccgggccatcgtcaccgtcgaccccaacggccagaggtgcgccaagttcaccatcaccgccgtcaccccgacgaactaa

SEQ ID NO: 540 - DNA, 486 bp, Scytalidium thermophilum
atgaggttccacttcttcgcccttgtccatgcggcgttgctggcgctcacagcgctcgcgcagagcacgccaaaggcgcctggcctcacctacctctactctctgaattgcaccctcggtgtcccctactcggttggcaacggcccgcacggcaaccgcgttgtcattcccatcaccggcggcacgttttctgggccgaggctgaaaggcagaatcgccaacctcggcgccgactggggccttgtcgacaaggacggactcttctctgcagacactcgctaccaccttcagacggatgacggcgcgcatatcttcatccgcacgagcggaccgacgcaggcggacggcacgatccatctccgcatcatctttgagaccggccaccagaagtattactggctcaacaacatcatcgctgtgggcgtgctgagggctggcggtggaggtgtgtcgattgacgcctggcagttggatagcccgaaataa

SEQ ID NO: 541 - DNA, 2670 bp, Scytalidium thermophilum
atgcttgctgtctctgctgtctctgctgcctctacctcgggcagcagttctgatcaattctccttgagcccatctgatcagctctctatccgtctctctttcgccctcgccatggcacgcactgtcgtggacatcaactccaactgggagttccgccaggcagacaaggaggattccaagttcctccctgtcagtcagttcccggccaacgttcacctcgacctcttgcaccacgggttgatcccggaccccttcattggcaaaaacgaactcgccgtgcagtgggtgggcgaggcgacatgggcataccggacgacgtttgtgtcgccgcccgtgccggccggagctcgcgccgtcctcgccttcgacggccttgacaccttcgcggttgtcaagctcaacggtacgaccatcctggagtcggacaacatgtttctgccctaccgggtcgatgtgtctgcccatcttgcccctgaagggaattccaacgagctgtccatcacctttgacagtgcttacctgcgcggctgcgagctggtcgagaagtacccggaccacaagtggggatgctggaacggggatacatctcgtctggcggttcgcaaggctcagtatcactggggttgggattggggtccgacgctcctgacatgcggcccatggcggccaatccgtctcgaggtgtacgaggcgcgagtggctgatctcgcggccgatgtagatgttgacaagtctctagaacgtgccgtcgtgactctgacggccgaagtcgagggaccggctgaccaggtccggttcgagttatccctgaacggcaagcaagttgcggctggaactgccgaggccaatgccccgactatctcgttcacactcgacaagccggccttgtggtaccctgcaaggtacggggcgcagccgctgtacgaggtgcgggctactgtgctacgcaatgacatcgagttggatacgataaccaagcacatcgggctgcggcgcgccgagctggtgcaacggccacttgatggccagcccggcacgagcttcttctttgaggtcaacaacattcccatcttctgtggcggcagcaactggatcccggccgacagcttcatcccgcgcattgggcggaagcggtatcatgactgggtcaagcttgtgctcgatggaaaccagggcatgctgcgtgtatggggtggcggcatctacgaggaagaagacttctacaacgcctgcgacgaactcggcatcctcgtctggcaagatttcatgttcggctgtggcaactacccggcatggcctgccctgcgcgattccatcgacgctgaggcacgagctaacttgaggcgactgcgacaccatccttgcatcgtcatctgggcagggaacaacgaagactaccagtaccaggagtcggcggggctcacctacgactacgccaacaaagacgcggagagctggcttgccacggacttccccgcgcgctacatctacgagaagatcttggccgatgcttgcgctgcgctggtgccgcgcaccgcctaccaccctgggtccccatggggcgctggccgcaacacgcatgacgcgactgtcggagacattcatcaatggaacgtgtggcacggcactcaggagaagtggcaggactttgacaagctggtcgggcggttcgtgtccgagttcggcatgcaggcgttcccgtcggtacggaccatcgaagcgtacctgccgcagggccgcgatgacccggaccgctatgctcaatcgtcgactgtcgacttccacaacaaggccgacggtcacgaacgccgcatcgccctgtaccttgcggagaacctacggtatgcgcctgacccgcttgagcagtacgtctacagcacgcaattaatgcaggccgagtgcctggcgtcggcgtaccggttgtggcgccgcgaatggcgcgggccgtcgcgagagtactgcgctggtgctctggtctggcagatcaacgactgctggccggtcacaagctggagcattgtcgattattacctccggcccaagcatgcctacttcaccgtcaagcgcgagatggcgcccatcacggtcggtattgcgcgccgtacacacaagcatcccatccccggggcgcatcgtcattctcgcatcggaactgagtcgcgcacacggatcgaggtttggggcagcaacctcaccctccaggatgcaaatgtcgactgtgtcctgcgcgcatgggatgtcgtaaccggcgaggagacgttctcccagacggtggcctcgggactggtgctgggtgccaatcggtcgaccgagatcgtcgagcgcgatgttcccgtccgcacgccgggggacgagggacgcacggtcgtggccgcatatctcgtgcaagacggtcggcatgtcgcgcgatatgtcaactggcccgagccgctcaagcacgtgcacctccagaagccgaaggcacttgaggcacgactgtcacctgacttcgcgtcagtccacatcagcgcggaagtaccggttaaaggcgtggcgctcgaaaccagcgatgaccgggtcgcgtttgacgataacttgattgatgtggtgccgggtgaggtggtaacggtggctgtacggggtgcaggcgcagacacgaagatcgggacgaggtaccttggtatgtgctaa

SEQ ID NO: 542 - DNA, 1773 bp, Scytalidium thermophilum
atggttgccgcaatggcttcattattacccttacgctcctgtctttctttcttcctcttcttcctcgttgccatccagcccgtcacagctgtttggcctgcccctaagaactttaccaagggcaacacggttttgtatctgcaccaagcggtcaaaatcacttacaatggtgatcctctcagctacacctacggctatgtcccgcgggatatcaccagcaaggaggtggtgcaagccggcgtgtcaagaaccctagatggcatcttcggctccaagttcgtcccttggaaactccataaacccggcagccagttcgagcccgacctgcataagggccagaaatggatttccacattcgagattgtccagacggcgaaggacaagccgagcactttcaagccccttgctggcgaggtggatgaatcgtacaagctgtccgtcagcgctgagggcgccgccaagctgaccgccgcctcgtccattggcatcctccgcggcctcgagactttctctcagctcttctaccagcactcggcaggcaccttctggtacactccctatgcgccagtcgaggtggaagactctcctcagttcccgcaccgcggcatcttgatggacacggctcggcacttcttccctgtagaggacatcctgcgcaccatcgacgccatgtcgtggaacaagctgaatcgtctccatatccacgttaccgactcccagtcgtggccgctcgtgctcccctcgatgcccgaggtctcggaaaagggcgcctatcacccgagtcagacttactccccaaccgacatcgagaatatccagagatacggtgcgatccgtggcgtcgaggtctatttcgagattgatatgccgggacacatcggtgtggtggccctttcgcaccctgaactcatcgtggcgtacaatgagctgccgtaccattggtggtgcgcccagcctccatgcggcgcgttcaagctcaacagcaccgaggtggacaagttcctggaaaagctgttcgatgacttcctgccccgcgtggcgccatacgcagcttacttccacacgggtggcgatgagctgaacaagaacgactcgatgctggacgacggggtccgctccaactcttcagacgtgctgcagcctttgttacaaaagttcatcgatgcacagcacgggcgtgttcgtaaggcagggctgacgcccgtggtgtgggaggagatacctctcgaatggaatatcaccatcgcagacgacacggtcgtgcaggcatggcttggtgagcagtccgtcaagaagctgacggagaagggtctcaaggtcattgacagcaactacaacttttggtacctcgactgcggccgtgggcaatggctcaactgggacaacggcgcggccttccagctcggctacccctttaacgactggtgcaatccgaccaagagctggcggcttgtctactcgcacgaccccgtggcaggactgaccccggagcaggccaagctcgtgctgggcggcgaggtggccgtctggagcgagaccatcgactcgaccaacttcgacacgctcgtctggccgcgcgcctccgccgcgggggaggtcctctggtcaggcaggatcgatttcgcgacaggccagaacaggagtcagttggacgcggcgccaaggctgaacgagttccgggagaggatggttttgaggggcgtgcggagctcgccggtgcagatgactttctgtacccagggtaagccggaggagtgtgagtacgctccgtga

SEQ ID NO: 543 - DNA, 2676 bp, Scytalidium thermophilum
atgggtcatcacactgccaccgtatgcctctggctcgccctgggctccttgacgcccgtctcctttgcccgcgttgtcgagccccgcgatcctgttcctcaagggtatcatgctgcttcctactaccccgcgccccatggcggttgggtcagctcgtggcgcgaggcctacgaaaaagcctatgcactggtgtcgcagatgacgctggctgagaaggtgaacatcacatcaggcgttggcatttatatgggaccctgtgtaggaaataccgggagtgtggatcgtctcggcttcccccagctctgcctccaagacagcgctctcggcgtcgcctccgccgacaatgtcacggcttttcccgctggcattaccaccggtgccacctgggacaagcagttgatgtatgcccgaggcgtcgcgatcggcaaggagttccgcggcaagggcgccaatattcacttgggtccttcggttgggcccctcggccgcaagcccttgggcggccggaactgggagggctttggctccgacccggtgctccagggcaaggccgctgctctgcacatccgcggcgttcaggagcagggcattattgccaccattaagcaccttgtcggcaatgagcaggagatgtaccgcatgtaccatatttttcaggagggttacagcgccaacattgacgaccgtactctgcatgagctctacctctggcccttcgcggaggcagttcgtgctggagtgggagccgccatgacggcctacaatgccgtaaatggctccgcttgttcccagaacagttatctcattaatggcattctcaaagatgaactcggcttccagggattggtcatgtcggactggctcagtcacatctcaggcgtgagctcggctctggccggtcttgacctcaacatgccaggcgatacaaacattcccttgtttggtaacagtctgtggcagtacgagctgactcgtgccgtcctgaacggctccgtgcctgtagacagactgaacgacatggccacgcgcgttgtggccacctggtacaagtttgggcaggataagaaccacccacggcccaacttctcgtccaacactcgcagccgtgacgggcccctgtaccccggcgcccttttttctcccagcggtcaggtgaattggttcgtcaacgtccaggaggatcactatcttgtcgcccgccaggtggctcaagatgccatcacgctgctcaagaataacgacagcctcttgcctctggacgctggggaccttactggcggcaagctcagcgtcttcggcactgacgcccaggtcaaccccgatgggcccaactcctgcctagcacgggcttgtaacaaaggcactcttggcatgggttggggctcgggtatcgcggactatccatacatggacgatcccatcggagccatccgcaagcgcgtccccgacgtcaagttctacaacacggacagtttcccgtggttctttggcacgccggaggatgacgaggttgctatggtgttcatcagctccgactcgggagagaatacgctgacagtcgagggcaaccatggcgaccgcgactcggccaagctgagggcatggcacgacggtgacaagctcgtgcagaaggtggctgagaaattcaagaacgtaatcgtcgtcgtgcatacggttggtcccctggaccttgagccgtggattgaacttccctcggtcaaagccgtcctctttgcccaccttcccggccaagaagccggcgagtctctgaccaacgtcctcttcggcggcgtctcgccgagtggccacctcccctactccatcactcgcaaggcctccgacctgcccgacagcatcgccaacctgaagggtttcacctggggccaagtccaagacacctactccgaagggctctacatcgactaccgctacctgcaaaagcactcgattcagccccgcttcgccttcggccacggcttgagctacaccagcttctccttcaccaatgccacaatccgcgccatcactacccccctctccgtcaccccgccagccccgccagccaccaggcccgcctcggtcgtcgctaaatactccaccgacatcccgcccgccagcgaagcctacgagcctgcaggcttctccaggatctggcgctacctctacccctggctgtccaaatccgacgccgacgccgcccacgccatcggcacgagcaagtccaaaacttacccctaccctcccggctattccaccgtgcagcgcgcgtctttccctcccgccggcggcggcgagggcggcaaccccgcgctctgggacgtggcatacgaggtgacggtgcgcgtcaccaacacgggcaagaggcccgggaaagcctcggcgcagctgtatctgcagttcccggaggggatcgagtacgatacccccgtactgcagctccgggatttcgagaagaccaaggagctccagccgggcgagagccaggagctgaagctgacgttgacgaggaaggatgtcagcgtgtgggacgtgaggaggcagaactgggttgttccgacggcgattgacgacaagaaggggttcacggcgtgggtgggcgaggcgagtgataagttgaaggtggcgtgctacacgggtgaggggaggtgtgtggagggggcgaagcagccagtttga

SEQ ID NO: 544 - DNA, 1059 bp, Scytalidium thermophilum
atgcgtaccgccacagctcttgccgccgccgtctgggctggcgctgtcgccgccctgccgacccagacgcggtctacgactctcccgagcagctggaaatgggtttctaccgggccgctcgtcttccccaagaacgacgaacgcaacatcgccggcatcaaggaccctaccgccgtcctgatcaacggcacctaccatgtctttgccagcacggccaagtccgaaggctacaacatggtgtacttcaacttcaccgactttgccgaggccaacaacgctcccttctactatctcgaccaagcccctctcggctacggctaccgcgcggctccgcaagtcttctacttcgagcctcacaaactctggtacctcgtctaccagaacggcaacgccgcctactccaccaacccagatatcaacgacccctccaagtggaccgcgccggaggtcttctaccccaacggcatgcccaagatcatcgcggacaagatcggcaacggctactgggttgacatgtgggtggtctgcgatgatgaggaggatccgaacaaggcgctctgccacctcttctcgtccgacgacaacggccatctttaccgctcgcaaaccaccctcgcccagttcccgcgcggcatgagcgagcctgagatcgtgctgcaggacacccagaacatctacgccctctgggaagccgcgtgcatctaccgcatcaagggcgccgagggcacccagaagtatctcctcctcgtcgaggccatcggccaggaaggtcacaggtacttccgctcgtggacgtcggatcggattgatgggcagtggattcctctggctgatactgaggccaacccgtgggctggcgaggcgaatgtggtgtttgagggccagaagtggaccaagagcatcagccacggcgaagtgatcaggaccttgacggaccagaccttgacgctggatctgagcgagccgatccagttcctgtaccagggtgtggatcctaatgcgcagactgagtataacgccctgccgtggaggttggggttgatcactcaggtgttgtaa

SEQ ID NO: 545 - DNA, 1131 bp, Scytalidium thermophilum
atgcatctcgcttcgtcgctctttctgctcgccactctgcccttcggcttcgctgctggcaagggcaagggcaagggcaaggacaacagcgatgttggcctcgacgtcctggccaagaaggccggcctgaagtacttcggtgccgccaccgacacgcccggccagcgggagcgcgccggtcttgaggataaatatcccgagtatgacaggatcatgtggcattcgcccgagttcggctcgaccacgcccaccaacggccagaagtggctgtttgttgagcccgagcgcggcgtcttcaacttcaccgagggcgacgtcgttgcctccaaggcccgccagcacggcaagctgctgcgctgccacgctctcgtctggcacagccagctggctccctgggtcgaggagaccgagtggactccggaggagctgcgcaaggtcatcgtcgaccacatcaccgccgtcgccggccactacaagggccagtgctacgcctgggacgttgtcaacgaggcgctgaacgaggacggaacctaccgcgagagcgttttctacaaggttctcggcgaggagtacatcaagcttgccttcgagaccgccgccaaggtcgaccctaaggccaagctctactacaacgactacaacctcgagtggccctcggccaagacggagggcgccaagcgcatcgtcaagctcctcaaggacgccaagatccccatccacggcgtcggcctgcaggcccacctcatcgccgagcagcaccccacgctcgacgaccacattgccgccatccgcggcttcacccagctcggcgtcgaggtggctctcaccgagctcgacatccgcctcaagaccccggccaccgaggagaaccttgccctgcagcgcgaggcctacaagaacgtcgtcggcgcctgcgtccaggtctgcggctgcgtcggtgtcaccatctgggacttctatgatcccttcagctgggtcccctacttcttcgagggcgagggtgctcccctcctgtggttcgaggacttcagcaagcaccccgcctactacggcgtcgttgaggccctcaccaacaagactcgccgctcgaagcgcagcatttcggaccgccgggccaagctcctggcttaa

SEQ ID NO: 546 - DNA, 1518 bp, Scytalidium thermophilum
atgaagacggcgttgacggcccttttgggtctgtccgtgattaccgaggctgccagcccccaccatcttaggccgcttaggtccctgaaccggcgacaagacgtcaatgctagcaacttcaacggaggtaatcggttcggcggtaacaacaatggtggcaaccggttcggtggcaattttggaggcaaccgcaacaacaacaacggaggcaacaacaacaatggcggtaacaacaacaacggaggtaacaacaacaataacggaggcaacaacaacaacaacggcggcaacaacggcaacaacaacaatgccgcgtccgtgacttgcctggcgcccaacgccatccagactggttctcagtccactggtcagcagggcgatgtgcccattgatggccaggtcaactctgccactgacccggccaacttcatcaacttctgcgctggtcaggtcttgaccaacggtctgcagaaccgggatggttcttgcaacggcattccgatgggcaaaatcccggctttcgacaagatgatctcgactgtcatcttgaaccctaagaatggcgacaacctccagcctctcaccaacttcgacatcacgatccaggtcaacaacatgcagcttggtttcttcaccaacgccacgagcacctactacgctgctccccaggatctgaacggccagggcttcgttatcggtcactcccacgtctccgttcaggataccggtggcaccaccaacccgaccacccctctcgatcccaccaagttcgccttcttcaagggcctcaacgatgcgggcaatggtcagggccggctcaccaccactgtcacgggcggtcttcccgttggttgctaccgtgtttgcaccatcactagcgcttccaaccatcagcctgtcgtgatgcctgttgcccagcgtggtgtccaggaggactgccgctactttgctgtcggtggtggttgccaggacctgaacaacaacggcggcaacaacaacggcaacggcggcaatggtggcaacaacaacaacaacaacaacggcggtaacaacaacaatggtggtaacggcggcaatggtggcaacaacggaggcaacaacaacaatggcggcaacggcggcaatggcggcaatggaggcaatggaggcaacggcggcttccggaacaggttcggaaacaacggcggtaatggcggtaacaacggtggtaacaacaatggcggcaacaagaacaatggcggaaacaataacgctggtgcccggaccgctggcgttgccagtgcttctggtgccattggtggcatcgccgccccggccattgagaatacgaacgaccccgttcgcccgttccgggttgatggcaacacgttcacctccaaggccgacgccgcccagcgcgcctgcgccatccagaacaacgcctgcgccagtgccgtcaacagcgggcaagtccagggcaagacggttcccgactgcaacgcgcaagaagcccaatgccgcgccgagttgagtgcttaa

SEQ ID NO: 547 - DNA, 1134 bp, Scytalidium thermophilum
atgaaggtcccaactctcatctcgagcctcctggctctggtctccttctccgaggccacgccgctcatcaagcgagcgacgctcacgcgggtcaacaacttcggtaacaaccctagcggtgcgcgcatgtacatctatgtgcccgacaggcttcagccacgtcctgccgttctcacggccgttcactactgcacgggcaccgccaacgccttctacaccggtactccgtatgctcgtcttgccgaccagtatggcttcattgtcgtctacccggagtctcccaatgacggcggttgctgggatgtctcgtcccgcgctgcctacacccgcgatagcggttccaacagccacgccatttctctcatgacgaagtgggctctgcagcaatataatggtgacccggagaaggtctttgttgccggcaccagctcgggcgctatgatgacgaatgttctctctgctgtgtaccctgatttgtacaaggctgccgctgcctacgctggtgtccctgcgggctgcttctacacgggcactgttgctggctggaactcgacttgcgccaacggccagtccatcaccacgcaggagcactgggccaggacggcgctcgatatgtaccccggctacaccggcccgcgcccacgcatgctcatctaccacggctccgctgacacgaccatctatcctcggaacttcaacgagactctgaagcagtgggccggcgtcttcggctacacttacggccagcctcagcagaccctccccaacacgccgtcggcgccttacaccaagtatgtcttcggtcctaacctcgtcggcatctacggcagcggcgtcacccacaacatccccgtcaacggcgccaacgacatggaatggttcggcatcaccggcaacccgaccaccacctcgacgtctgctactgtgcctactactacgagcagccctggcaccacctcgaccagcgccccggtcactacgaccacctcccgggctcctccccctcctacccagacttgtatacccgttcctcgttggggccagtgcggcggcatcacctggggaggctgcacggtgtgcgaggcgccatacacttgccagaagctgaatgattggtactctcagtgcctgtaa

SEQ ID NO: 548 - DNA, 1995 bp, Scytalidium thermophilum
atgggccaggtcatggcaggtattgctctcctcctggtggccggtaccggcaccagtgcaggtcctgtccggctattacatccagatggctggcctgaccccattccggcctcatcggttgggccattgaactggtcgaccatccatcccccaatctacgcctcacaatggtcattgtcatcatcctcactcagacccagcaacaaggatcccaatgccccacctctcaagtccagcatctctgttactgacacgtccttgcccaacatcgtcgactggcgcaaccgggacggggtaaactacatcacgaccccccaggaccaaggagtctgcaacagctgctgggcgttcgccacaaccgccctcatcgaggccatggtgcgcatcgagcacggggcttggaccaagcgcagcgaagccgacgtccactccggcgtcggggccttgtgcgccgactacggtagtgccgatgaagccctggcctggatggctggaatgccgcaaccctgggaccagcaaaaccgtctccaaaaccctcctggagtcgccgactgggcttgcgggccgtacgaggacagagacccgaccattcgcacgagatgtgcagaccgagatggccgggccacccacgtgcccccgttccaggcattggggacgatggaggatcagaaacggtggctggatcggtacgggcccttggtggcgacgtttgtgctgtactcggactttggaacatggaggccgacggaaaagggaacggtgtatcagtgggacggcatgaaggattcggtgggaaatcatctggcgttggttgtgggatacgatgacaacaagcaggcgtggatcatcaagaactcgtgggggaggcagtggggagaggatgggtttgcctacattgcgtacggcacaggcaacatcgacaactgggtcaagcacggcgtcatgaacgtcaatccggatccctggacgcgaagacgccaccagaatggctgcatgctgcaatccagcaacggtaatacgcatcgcaattttgaactagtcctccctgccccaaagagcaaagacatttaccacgtctaccgcgacggagactcagggaggtggaccaaggccaccaaaatccacaatgccgacctcgtcgggccactgaccatgattggaacctcattcaatcgagacctgtacgccctaggcttggaaaagggcgccgtcctccatcaatggaagttcaaccaggctcaggggacatggtcacatacgagataccaccccgacatacaagacattgatggggttccgggactcacgcagaccgacgattcgcgcctcgtgatggttgtgaaactgtccaacgggactttgattgagctgctacaagagcccaatagtcagggctggatcaaaataaagcaacccatcgccaccaacatctcccaaagcggaccctctctcgttcaatccaacgtcgggctcaacatctatgatccaaacggcaattctcgcggcaacatttacatcgtggcggtccgggacgacggcagactacaactcttctggcggcccggagacggcgacagatggcaggcgggcgagatctttgggcagggagttccctccaactccccgcctgtcatgatccaggactttttcgacacggtcgacgagaccagcgtcggcgggttccagctcgtcgtcgccgtgagtggccaggttcagcactgggtcagagataacaggaacctgagccagcagaagccggtcgaaggggctcaggggccctggaggttggtagaatcagtgggcaacggggtgctgcgcgtctgggcattggtgcagggaagttttggacagaagatgcatatgatcacagagggggcggatggaaggttttcgtattgggagtgggatggacggtgggagaggttggggacgttgcccacgcttgatgaagagtggtcacatgtgacgatcgagagttcagctgtggtggtatga

SEQ ID NO: 549 - DNA, 1248 bp, Scytalidium thermophilum
atgaaaaagacactgctgctctgttttatccatggcttcaagggggatgagaccaccttcggcaaaaactttacctttgttgagtacctacgcaaacatgtctcccaagtcctccccaaggtagacgtgcaagccattgtctatcccacttacgaaacaaggggggatctaggggaatgtgtcacccgcttcaatgaatggcttctcaacaaggtcatcgacctcgaagtcgcggccggtaccccctcacccaccgtcaacccctccgtccgcgtaatcctcgtgggccactccatgggcggcatcgtcgccgccgaaaccgccatccgcatcgcctgggaacggcctattcacgagtctgattccgaggcagaagactccagccaagcaaccaccaccaccaccaccaccgctgccgccgccggcaaagccccgccaccaccaaacagtctcatgtttccctacatccaaggcgtcctcgccttcgacaccccgttcttgggcatctcccccggcgtggtcgcccacaacgccgagcagcactacaccaccgccgcctccgccatcgcccagatcaccagccttaccggcggtctctggggaggagccaagcttgcccaggctgctgagcaatctcactcatcccagaaacccaaaatcgccggcgcgttacccccagcgcaaggaaaggattccgccgccgggaaggacgcgggcaagaaagacagcggcggaggcggcggatggggtaagtggggcaccatcgccctagcggccggggccgcgggcgccgtggtggccggcggggcggcggcgtatctgcgccgggagcagatctcgcaggggctgggatgggtgacgtcgcatctcgagtttgttgggtgtctggcacgcaaggaggagttgcggcggcgtgtggtgcggatggtgcagctgaacgaagagcttggggttgggtttgggaacttctacacccggcttggacagtcggctgcgtccaagcaggtcagcatggtcgggacggtgctcgggaaggatcgaacgttttgcgttgtgccttcgaagaaggacaaggctggggactggcgaccggcggtcaacgataaggctaccgacgagatcggggctcatgtctcgatgttcgaaccaaagaataaccccaattatgagaagctggggaatgaggccagagacatgatcgcaacctggctgcacaatgagtggtatgaaggtagctcgatcgattaa

SEQ ID NO: 550 - DNA, 1311 bp, Scytalidium thermophilum
atgtctcgctcgggctttggtcttcgccggcttctcagcctcgcgctgagcgccaccttcgtctccatcgcgacatgccgcgagcactgggtgcccatctgggcatcgatgccacagcaggttgagccgtacaacctgcctgaagccccttataacggcaccagcgccgtcttcgaagacaccaccatccggcaaacggtctacctgacccaagacgccactaccatccgggtgcagttcagcaacgctttcggcggctccgacctgcccatcaccgcagcgaccatcgcccttccggccaacggcactgccggctcctcctccatccgccaggacacggtgcggcacctcaccttctccggctcaccctccttccgcgtccccaacggcgccctcgtcgtctccgaccccatccgcttccccgtcaaggctcaaaccagcgtcaccatcaccgtctacctcgcctcaggccagcagggccacgccatcacgggccacccgggcagccggaccagctcctggttggcgcgcggcaacctggtggccgcctcggacctgagcaagtccgactcagtccagcgcatcgataagtggttcctcatctcggcgatccaagcctggctcccctctcaccacaacgccctcgccatcatcggcgacagcatcaccgacggccgtgggtccaccaccaacggcaacgaccgctggcccgaccagctcctcgctcgtctgcgcaaggccaccggccgcgacgcctccctcctcaagtccctggccgtcatgaacatggcggcgggcggaaaccgggtgttggctgacggcctgggccccaacgcgctcggccgcatcgagcgtgacgtgctcgctcaccccaacgtgcgctatgcgtttgtctttgaaggtgtgaacgacctcggcaccgccgatccgaccgacgaggcccagactgctgtcggcgaccgtctcatcctcgcttatgaacagattattacccgcctgcacgcggctggtatcgcggtcttcggagcgaccattacgcccatgtctggacctggacaagtatacggcgagccggcgcgggagacgcagaggcagagggtcaacaagtggattaggacgagcgggaggttcgacgcggtcatcgactttgataaggcggtcagggatccgaagaacggcacgatgctgaggcccgagtatgacacgggtgactatttgcatctgaatcccacgggatataaggcgatggcagatgcggttgatttgtcactgttcaagaagttcgaagacggagtgagcgccatggtctaa

SEQ ID NO: 551 - DNA, 768 bp, Scytalidium thermophilum
atgaagtccatcttgatccttctctctcctctcatcaccccagcttatgctgggttccatgattgggagcctccggggccgaatgatgtgcgcgcgccgtgcccgatgcttaacactctcgcaaaccacgggtttctcccacatcacggcagggacttgacacgcaagcaggtagttgacggcctctacaatggcctcaacatcaacaagacggctgccagcactcttttcgactttgccctcatgactagccccaagccaaacgccaccactttctcgctggacgatctcggcagacacaacatccttgaacatgacgccagtctcagccgcaccgatgcttactttggagacgtcttggctttcaacaagaccattttcgaggagacgaagcggcactggggtaagagcccgatcctcgacgtcactgccgcagcacgggcacggctcggtcgcattcaaacctccaaggctaccgacccggagtacttcatgtcggaactgggaaatattttcacctacggcgagtccgtcgcatacatcatgctgatcggcgacgccaagacgggcagggcgaataggagatgggtggagtactggtttgagaacgagaggctgcccactcatctcggctggcgtcggccgagcaaggagctcaccagcgacgttctggacacttacatttccctgatccaaaatatcacgttgactcttcctggcggaacggaccccgtcaagcgccgcgctgcgtcccacttcggttggtga

SEQ ID NO: 552 - DNA, 1656 bp, Scytalidium thermophilum
atgaagatccccgccggtgccctgaccggggcgaccctctctttcgggccatggatatcacctagggcagtgtcgagcggactcacgcaggacgacctgtcgcggccatcagcccgggctgtcatccaggcggccggtgcgtcggcgacttgtgagcggtttcgccagccgattgaccacaagaatccgagctttgggggatggaaccaggtctattgtgttaatccacagtactgggaaggtcctggctcaccggttatcctcacaacacccggcgaaaacccaatcagctcctacgtctacacctacaatggtttttctttcctcagcaacacaaccattaccggcgcatacgccgaggccgtcggtgcggctgtggtcgtggttgagcatcgatactttggcggatcgtcaccgtacgatggactgaattccaacacactccaatacctcaccatggaacaagcggcgtcggatatggtcaactttgcacagaacgtggtctttccttgggacccccaggctggcagtgtcgcttccaagacgccgtggatctacttcggcacaggctacgcaggcacccttggcagctggattgagcacttccatccgggcgtcttctacggctaccatctcagtggcgcgagcgtcgaggtcaacaccgagaactggtactactacgacacgatccgcaagggaattgacgcgttccgtggagacaccgagtgtacccgcgcgctgagcgaagtggtggactttgtcgaccagtaccttctcgcggaggaacgggacgaggagaagattgacgccgtcaagaagttcttcggtgccagcttccccattgaagatgatgactttgcatacgccatcgcaacccccttccgatactggcaagaaaccggcggttaccgccgtgtcctcgacatgtgcgacggcatcgtcgggtcccgcgacaccgtcgacgaccccgacctcggcacgattccaccctctgttgtcgccttcgccggttacttccgtatgcacttccgcgacaacacatgcacctacctcgacacctggggccaagacgaccccctctggtgtgtcaacacgcacgacatctacaaccccttcttcatctcgcgcacgctcggcaacccgtggcggacgtggtactggttcctgtgcaacgaacccctggcgtcgtgggccaccggcgcacctccgggtcagccgtccatcgtctcgcgcaagattgtcgcgtcgtactggcagcgccagtgcgagatgcacttcccgcctgtcggcgacaagacgtacggcagctcgggcgggcgcaggacgccggcgtcgctgaaccaggagacgggcgggtggttgaggaggtggcagggggaggaggcgaggattatttggacgaatggcgagttcgacccctggcgcgaaaccagcatggcgagcgagaaccgccccggcggcccactgcagtcgtctggcaacgtttactcgttcgtcatcaagaacgcctcacacgccgatgatgctttcacggcgcggggcatgcagagtatggggttgccagtcaatccagaggttgtcaaggtccaggaacaggccattgagattgtcaagaagtgggtggcccaggggctggctgagaagggaggtgtgtag

SEQ ID NO: 553 - DNA, 1434 bp, Scytalidium thermophilum
atgatgttgggcagtggccttttgtggacgtccctcctggtcgctgctgtatctccgacgacagcccgccccggtgttgctccaggacgctcggtgaggagaaatgaggacgccgccgccgctgttaacagtctccatgaagccgggtccaggcgcggtcccgggccatggcggattccttcatacgtccggatgcctgtggcccgggagcacttcaacgtcacagggaggggagctttacacgcacggccaccgggaccttctcgaccgccactcgcggtgctcggcaacacctcgacagaaaacccggcggcattggcggcgcgacaggcgggcaatccgaggaaatggggatgggccgggctggaggaattgggagggatcgcgtatatcatcgagctacaaatcggcacgcctccgcaaaaggtcaaggtgttcatcgacacgggatcctacgagctgtgggttaacccaaaatgcagcacgtcggcgtcggaatccatctgccagagccacggcatgtactatccgagccggtcccggtcgtccatgtttgtcggcggggggttcgccgtgacgtacggcaccggggccgtccgggggaagtactgggctgacgatatcaacgtcgcaatgttccatgtcccccgggtgcaattcgccgtggccgacgacagcaattacaccttctcaggggtactgggattgggctatgcgtacccgcacaccatcaactatccgagcgtgctcaacttgatggtgtccaacgacatgatcatggcgcccatcttcagcgttgggttgggcggggaccaggacaacttcagtgagattatctttggcggcgtcaaccggtggaagttcgccggaaaactcgagccggtggccatctggccgcccatcaaacagcaggaccctcgctggctccaatactgggtcaacgtcacgtcggtcggcatgaccaaaccgggcgagcggcccgtcatctacacgcagcgcgacaccttcaccatgccggtgcttctcgacacgggctcaaccctctcgtacatccgtgaggacctcgtcgcgcagatcgggcagcagttccaggccaagatcgaccacatgggatattacaccgtcgactgctcctggcgcaaccgtccgggtaccgttgactttggcttcaaccgcggccgcatggtcatcaacgtccgctacaaggactttatctggcagcagtatccgggccattgtcttttgggcgtccagccggccgatgtcgggtcgacggcgtacgtgctgggggacacgtttattaggggggcatacttggtctttgaccaacagtcggacattgtgtggatgaaccaatactacaactgcggcgacggcgtggtgacggtcggagcggagaagggagatccgggaaatattgtcggggcatgctag

SEQ ID NO: 554 - DNA, 1734 bp, Scytalidium thermophilum
atgaagggcctcgccactcttgtgactgcggctgccctgctcgggcgagccgtcgccgctccgcccgagcctcccacgcgcgtcatcgagaagcgtgccaaccccaccgtcaccgccccggcgggcaagatcatcggtgtcgagcgcgtcggcaccgaggccttcaatggcattcccttcgccctgcccccgacgggttctttgaggctcaagccgccagtccgcctcaacacgtcgctcagcaactttgacgccaccggcatcgcgccggcgtgccctcagttcttcgccgactcggacgacaagggcctcttgtccatggtcttggataacatcacgggcctccccttctttcaaaaggccctcaaggtcagcgaggactgcttgaccgttaatgttatccgtcccaagggcaccaaggcgggggataagctccccgtcttgttctggatctacggcggtggatttgagctcgggtggagctccatgtacgacggcggcccgatcgtgaccagcgccgcgagcctcggcaagcccttcgtctttgtggccgtcaactaccgcgtcggcggctttggcttcatgcctggcaaggagatcctcgccgatggctctgccaacctgggcctccttgaccagcgcatgggcctggagtgggttgccgacaacatcgaggccttcggaggcgacccgaccaaggtgaccatctggggcgagtcggccggcgccatctcggtgtggaaccagatggccctctatgacggcaacaacaagtacaagggcaagccgctgttccgcggcgccattatgaactcgggcagccttgtcccgacgaatccggtcgacagccccaaggcccagggcatctacgacgccgtcgtcaagaaggccggctgctcctcggccaaggacaccctgaactgcctgcgccagctgtcctacagcaagttccttgacgccgccaactcggtgccccacgtgctgtcgtacaactccgtcgccctgtcctacctgccccgtcctgacggcaagactctgaccaagagccccgagctcctggccaaggagggcaagtacgccgccgtgcccatgatcatcggcgaccaggaggacgagggcactctcttcgccctgttccagcccaacctcacgtccacctcccggctcgtcgactacttcaagaacatctacttccacgacgcgcccaagtccaagatcgagggcctcgtagaccagtactcgtcctgggtctgggacggctccccgttcggcagcggcctgctgtacgacatctacccgggcttcaagcgcctcgcggccattctgggcgacattgtcttcaccttgacccgccggaccttcctcgagtacgcgaccgcggccaaccccaacgtgcccgcgtggtcgtacatcgccagctactaccgcggcactccgatcctgggcaccttccacgccagcgacattctgcaggtgttttacggcgtgctgcccaactacgcgagccgcagcatccacagcttttacgccaactttgtctacaacctggatcccaacaacgcgtcgggcggcaccagctccaagtccaaggtgtcggagagctggccgcgctggacggccaaggaccgcaagctgatcaacttcttttgggacaagagcgagtttatcaaggatgacttccgcgagggggccgggaagtatatttcgagcaatatccagtacttgcgcgtctaa

SEQ ID NO: 555 - DNA, 2022 bp, Scytalidium thermophilum
atggttcccaggctcggctactgccttaccgcggccctctcgctgcttgccagcgtcgatgccatcccccaggggggcaaaggcaaaggcaagggcaagggcaaggacgacggccccagcgaggaagtctacgactacatcgttgtcggcagcggtcccggtggcgctcccattgctaccaacctagccaaggccggctactcggtcctcgtcctcgaggccggtgacgaccagagtgctgacccgaccaccagcatcatctcgctggctggcccgagggacaccaacagctggggcttctatgtccgccagtataccgatgagaatctgcacctccagaacaaccatctcacctggcgcaagcctgatggcacgctctgggtgggcagcaatgcctcggctcctgcgggatcgaccctcctcggtgtctactacccacgcggtgcctccctgggcggttcgtctgtcgtgaacgccggcgtggctgtcttgcctcccgccagtgactgggactacattgcggacgtgaccggcgactcgagctggagcgcctcggccatccggaccatcttcgagcaggtcgagaagaaccactatcttccccctggcactcctggccatggcttcaatggctacctcgacatcaacaacaacgacggcgacgtcttcgcccgcagtccagccaccgttgaggtgctggaagctatggtagccgcggttggcgacgacccggccgacgtcattgacctcgtccaacgggatatcaacaataacagcccgacccgcgacaccactcagggcctcttcggcctgcccttccacggcaaccagacctggggccgcgccagcgcccgcgacctcatcctcaagaccctcgccgccaagaagcccaacggcgagcccctgtacaagctcaccgtcaagaccaacagcctcgccactaaggtgctcttcgatcagcagggccagaagccgcgggccacgggcgttgagtacgttcagggcgcctctatctaccgtgccgacccgcgtcacaacccctcggccccgctgcccactgcccaggtcgcccgcgctcgcaaggaggtcatcctctccggcggcgtcttcaactccccgcagctcctcctcctgagtggcatcggccccgccgaccacctgcaatccctcaacatccccgtcctcgtcgacctgcccggcgtcggctcccagctgcaagacaaccccgagatgcccgtcgtcggcttcgcgcagtccggtcccttcgtcaccgagcccctcgagggcgatccggaatgcaccttcggctggggcccgccgggcgtcccggacccctgcgtcgaggcctggttccagggttacggtccgtacacgcgcgccgccagcaacgccaacgccttcatgctcaagaccaaccactcgaccaacggcgagaccgacatcctcatcttcgtgctgaccaacttcgccttccgcggccactggccgctgaccgccgagaacggcatgcccgccgaccccccgggtctcgtcggcttcagcctggtcaaggccaacgtccagagcaacgccggcaccgtccgcctcgcctccaccgacccgcgcgacccgcccgagatcgtctttaagaccttcgagggcacccagggcgagatcgacatcgacgccatggccgacgcggtcgcctgggcgcgctccgtgttcgccaacgtcgacagccccgtcgggcccgtcgaccccgccgaacccccctgccccggcggcgacaacgccgcgtgccgcgccggcgacaaggacttcatcaagaagcaggtgtttggccaccacgccacgagcacgtgcgccatcggcgcggataacgatccgctggccgtgctggatagcaagttccgcgtcaggggtgtggatgggttgcgcgtggtggacggcagcgcgttccctcgcacgccgggcacgttccccatcgtggcgaccttcttgctcagtgagaaggcctcgttggatgtgttggcggatgcttga

SEQ ID NO: 556 - DNA, 1296 bp, Scytalidium thermophilum
atgaagggcatcctcaagactgccgtggccgcggccctcgttgccggcgtcgccgcccagcctcacggccacagtcacaatcacttccacttccacgccaagaagcacgccgccaagtcccaggtcgagaagcgcagcaccgtcgtcgtgaccgaggtggttgagggcccgacggagatcgtgtacgttacgcccgacggcaagaagatcgacggcaaggatgccgagaagggcatcaaggatggccttttcgtcgtcgtcggatcgaccagccccacgttcacggctcccccgccgtccgtttcgacggtcatcgacaacgccgagcacggtggtcagttcttcgaggtcgagagcagcaccagcgccgaggagaagccgaagccgaagccctcccctactcctgagccgaagaaggaggagcctcccaagccgcccgctcccgaggagggccccaagggcctggatgccgatttccccagcggcaaggtcaagtgcgacaagctcccgaccgagtacggcccggtcgagatcccgtggctgggcatcggcggctggacgaccatccagcagatgggcggctggcgcaagggccactcgttcgaccacttctcccaggccgtctcgggcggctgcaggccgggagacttctgctcgtacgcctgccctccgggctaccagaagactcagtggcctgaggagcagggcgccacgggccagtcggtcggcggtctgtactgcaatgagaacggcttcctggagctgacgcgcccgtcgcacaagaagctgtgcgagcccggcgtcggcggcgtctttgtgcgcaacgagctcagcaccaacgccgctgtctgccgcaccgactaccctggtgatgagcgcatgtccatccccgtcgacacccagcccggcggcacctacccgctcaccaaccccgactccaacacctactaccgctggaagggcatgccgaccaccgcccagtactatgtcaaccccatgggcgtgcccgtcgaggaggcttgcatctgggagagctccaagcacggccacaaggtcggcaactgggcccctgtcaacattggtgtcggccgcagcgagtcgggcatcacctacatttctatcttccccaacaagccgaccaccaccgctctgctcgacttcgatatcgagattgagggcaacgtcagcggcgagtgctacctccgcaacaacgtctatgccgttggtcccgatggttgcacggttggcttgcaacccggcaacacggccaccattgtcttcaagaaccgttcgtaa

SEQ ID NO: 557 - DNA, 1482 bp, Scytalidium thermophilum
atgagattcttctcacctcttgccctcgccctttcacttgcttcgtggcccgcggcggtcatcgccgatgagtgtcaaccagtgacatgggacccgaccaaaaaagcacgaagggcagatgaaccaacaggcgcgttcgtggttgctcggcccgtcccgaccatgctgaacaagagggagggcccgatccaaccgggtgagatcaactgtcggcagtgggccaggacgtatgacgacgtcaactactatacatgttaccagctggcgaagaagtacgacatcaccactgatcaatttttctttctaaatccggacctgcaaaaggactgttccaacgtccagccaaacgccatgtactgtgtttttgggttcgtcgaacccctccgcgcttatgatggactctgcggtcctccgaacaagaacgccacctgcctcggcaccgacttccaatgctgcaatgccgaaacgttcacctgcggtaactcggacgacgactgtgcacccgggacgtgctacgagggcgcctgcgtgggcgacaaggtctggagtaccgacgggacgtgcggcttccaacatggcaaccggatgtgcaccgggaaatggggcgattgctgcaacatggaggggaaatgcggcactggcgacgactactgtggcagtggccggtgccaatcgggtaactgcatggatttcatcccaggcgagcccgtcgacaccacgccgccgtggctcgagggcaacacgacggatggcacttgcggagggccccagcgctacacttgcagtgtggtctacggaaattgctgcaacaggaatggcatctgcgatccgccggaatccatggatcctggcctcggtgaaaagtcaaagttagcccgagccaaaagggcaatcgcggggacacaggtgacgcacttcggaacacgaaggtcacataagcaacccaccatgcggtttgtcactctgaaccttgcctgggcgattcctgctctcgccatctctggtccactggccagccgcgccgactgcggcgaaacggccgcccgagtctgcttcggcatcgacggcggcacggcgcaagacatcgacccggaggacatcgaatatgcgggggcattcctgcgctacatcgcggaaacccacgaaaacccgttgtggaccatgccgcccgagttcacctgctccgagtggaccatccccgtcgacggcgcgggtaccattctggttctggccaagcacatcaacccgcgtaccaactcgtccgtcacctacagcgacctcgcgcgcaccattgacggcggcgccaacgcaactcccgagcaaaaggccgcctcgctgctgggcgcctgcggcggcaacggtggcatgatgggcgtcacggttgacaccagcgaccctgcctacaacacgcccgagtacattgccagcaaggccaagccacaggacatcattgttaaacttgtcagagcgccaagcttgtga

SEQ ID NO: 558 - DNA, 2337 bp, Scytalidium thermophilum
atggcgcgccgtctcctcaccctgtgcctggccgcgaccttggtcgctgccatcaaccctccccggaagccacagcaacctaccggcggcggcagcaagctggtcacctacaacaacaccgtcctcagcccgcagttcggagcctcaaccacctacgttacttgggtggcctcgaacacggacggcgatttcatcacctgggcctctgatggttctcttgtctttgagaacgtcgtgagcgggaatcgcacagtcttcctctcggccgacaagatccccgcgaacagctacgactaccagatttcccctgacaggaccaaggtcctctgggccgtcgactacaccaagcagtaccggtactcgtacttcgccaactacctggtccaggatgtggccacgggcaagacggagcagctggttgccgaccctaagggtgatatccagtacgccacctggagctctgcctcctcgtctcagattgctttcgtgcgcggcaacgacctcttcctctgggacaagggaaccgtcacccaaatcaccaacgacggctcgccggaccagttcaatgccgtccccgactgggtctacgaggaggaaatctttggcagcgaccacgctctgtggttctctccggatggggagaagatcgccttcctcagcttcaacgagaagggagtcgagaccttcaccgtcccgtactacatggacggcgagaagtacccgccctcgtacccgtatgagctgaagctccgctaccccaaggtcggcacgaccaaccccaccgtcgctctcaacatcttggacgtcaagaccaagaaggtcactcccatctctatcgatgcctggccggctgatgaccttatcatcggcgaggtcgcttgggtgacggacaagcacgacaagctgatttatcgcgctttcaaccgggtgcagaacaaggagaaactcgtcgttgtcgacaccgacaccggcaagtcgaccctcagccgccagcgcgatggctcagatggttggctcgagaacaatgtcgccatcacctacattggcgaggtcaagcgcgccggtagcaagaacgacaagaccaagtggtacctcgatctgtccgacgcctcgggctggaaccacctctatctcttctcccttgacggccgcaacatcacgctcacgtccggcaagtgggaggttggcggcatcgtcaaggtggacaccgaacgcggcctggtgtactacctttctaccgagaaccacccgaccgagcgccatctctactcggtctcctacatcaccggcaagaagacggctctcgtcgaccccaagaccccggcctactggaccgcttccttctcctatcgcggcggatactatatcctccgctatgccggccccgatgttccctaccaggagctgtactcggtcgacagccccaagaagcccatccgcgtcgtgaacgacaacgccaagctggtcaacactatcaaggagtacaagctgcccaagatcgagtacatcgatctcccgcacccctccggctacaagctgagcgccatgctgcgcctgcctgccaagttcaacccggccaagaagtaccccgtcctgctgactccgtacggcggtcccaactcccagcaggtcaccaaggccttcaaggccatcaattggcacgcgtacattgcttcggacccggagctcgagtacatcaccttcaccgtcgacggccgcggcacgggctaccggggccgtgcgttccgttccacggtgacggataacctgggccacctcgaagcgcaggaccagatctgggcggccaagtggcttgccaagacctattcgttcgtcgacaaggagcggatcggtatctggggctggagctacggtgggtatctcgcggccaaggtggttgaggtcggcgatccgatcatctcgttcgccatctccacggcgcctgtcacggattggcgtttgtacgataccatgtacacggagcggtacatgaagacgcctgctctgaacgaggctgggtacaacaagtccgcggttcggaacgttgagggcttcaagaagctcaggggccagttcctcatccagcatgggaccggcgacgacaacgtccatgctcagcagagctttgccctcgaagacctcctcatgggtgccggcgtcagcccggagaagttcgatgtcacctacttcaccgactcggaccactccatcgtctacaacaagcagggcgtctacctctacaagcagctcaccaccaagctgtttgaagagaagcagcgcaagggcagcggtggtggccaccagtggagcaagaaggcggtcgcctggagggggtga

SEQ ID NO: 559 - DNA, 1911 bp, Scytalidium thermophilum
atgaccctcaagcgccttgtcgtgctggccctcgccagcaagctcgtttcgtgcgtgcccgcgcccacggacgagcccaatgagcccgtgcccacggacctcccctccgacgagccgaccgaggacatcgctagcagcttcgtctcggatctgatcgcgaacctcacgcaggctgaagagcctgagaccaccaatgagaagcgcggcctcttctcgtgcaagcaggattccctcactgtcaacctgggatatgccaaataccggggctactacaacgcttccactgggctgaactattggaaaggaattcgctatgccgcccctcccacaggcaacctccggtggcagccgccgcagtctctgcccctgaagttcaacccgcccgtcacggacgcgtatgagttcgggcccatctgcccgcaggcgatgccctcgctccccgtggcccctcacatcccgggtaacgaggactgcctcttcctgaacgtctacgctcctgctggtgccaagaacctgcccgtccttgtctacatccacgagggtggctacggctatggcgatggccgccgtgacatgaccgacatcatcaatgccaacgacaagggctttgtggccgtcaccatccagtaccggcttggtgctttcggttggctctcgtccaacgaggtgaagcagaagggcgtcgtcaatgctggtatgctggatcaggcgcttgctctcgcctgggtgaagctgcacatttgccagttcggtggtgacccgagccgtgtcaccatctcgggcgagtcggccggcgccggttccgtcatgtaccacggcatcgctcttggtggcaatctcggcactcttctctacaagcagggcatcgctgcttcgccgtatctcccctatcagtacaagtacaacgacccggatccgaccagcaagtactatgccttctcccaggcggccggctgcccgagcagcggcaatgtgttcaactgcctcaagagcaaggacaccgacaccctccagctggccaactaccaggtcactcagtcggtgcctttcggctactgggcgttcggtcccgtcaccgataacgtttacatcctgaaccgcccggttcagcagatggcgaccaagaagatgaacggcaacaagctgctcgtgggccacaccgccaacgagggcagcctcttcgttcctcccggcatcgtcaccgaggctgatctcctgggctggctccagtcggcgcagctcaagaacctgtcccccgctcagatcaacaccgtgctcgccgccaaccccaacagcgccgacaccgacctgagcgcccccaagtgggacaccctgggcaacagcggccccaccgccgtcgagatgtcccaggatgccaacggccagcagcagcgcgccttcaacatctacgccgaggccaccttcgcctgcccggccttctggctcgcctcgtcctacagcaagcccggcaaggccgcctacgtgtaccagtacagcgttcccttcgcctcgcacacctccgacctgggcgcctacttcggtccccaggagcccaaccactcggacgacttcgccctggccttccgccgcatctggggcaacttcatccgcacgggcaacccgtccatcgccgcacccatcgccaacggcgccgcggctcccaacccgtcggccccgcacccggcctccaactggcccgcctggagcgacgcccagcccaagttcgtcaacctcaacatcacgggcggcacgccgtaccaggccccgaccttgtatggcaccttcgtcacgcagtacgcccagccgggtctccagaacgccatcagcgtcgtctcggcctccaactgggagggcggtcgtctgtcgaggtgcgatgtctacaagagcctcgcgccgagcatcccgatttaa

SEQ ID NO: 560 - DNA, 2775 bp, Scytalidium thermophilum
atgctctggatcagcgcagcccttgcgctcctggccggcaaggccatcgccaactcggcccccgaggccgtcaccgagcctcccgccattgtccctggcgcgtacatcgtcgagtatgagggcgatcaggacaccaactccttcgtcaaggagctcggcggcgaggcgtcgctgcgccgggacctgcgcttcaagctcttcaagggcgcctccatccagttcaaggacaccgagaatgccgaggccttggttgccaaggtggcagaaatgcccaaggtgaaggccatcttcccggtccggaagtatgcggtcccgcaccacgtcgtgcattccaccggctcggccgccatcgagaccaccctggccaggcgtgccgagggcaacgagaccgacaccttctcgacccacatcatgacccaggtcaacaagttccgcgatgccggtatcaagggcaagggcatcaagattgccgtcattgacacgggtatcgactaccttcacccttctctcggtggctgcttcggccccggctgcctggtttcctacggcactgacctggtcggcgatgacttcaacggttccaacaccccgaagcccgatccggaccccatggactgccagggccacggcacccacgtcgccggtaccattgccgctcagcccaacaacccctacggcatcatcggtgctgccacggacgttgagctcggcgcttatcgtgtgttcggttgcgatggcgacgtcggcaacgatatcctgatcgccgcctacaacatggcgtatgaggctggtagcgacatcatcaccgcctcgatcggtggtccctctggttgggcggaggatccctgggctgctgtcgtgactcgcattgtcgagaacggtgttccttgcgtggtctctgccggaaacgacggctctgctggtgtcttctacgcctcgaccgctgccaacggccgcaaggtcaccgccattgcttccatcgacaacgccatgaccccgaccctgctcagcaacgcctcctactcggtggatggcacccgcggtggcgactttggcttcacggccggtgacccggacaactggaccgagatcagcctgcctctgtgggctgtcaacttcgacacgaccgacgaggccaacggctgcgacccctatcccgaggacactcccgacctttcgggccacattgtgctgattcgccgtggcacttgcaccttcgttcagaaggccgagaatgctgttgccaagggggccaagtacgtcatctactacaaccactcgcctggcaccgtcatcgtctctgccagcggcgttgagggcctcgaggctgtcgctatggttactgccgagcagggtgaggcctggatccgcgagctcgccgccggccgcaaggtcgtcgtctccatgccgaacccggccactgctggcaagttcctcatctacaccccgaacaacaactcgggcggtttcatgagcgacttcaccagctggggtcccacctgggaggttgaggtcaagccccagcttgccacgcccggtggtctgatcctgtcgacctacccgcgcgctctcggctcctacggtgtgctctccggcacctccatggcttgccccctggccgccggcgtctacgctctcatcatgaacgtgcgcggtaccaaggaccccaagaccattgagaacctcctttcgtcgacctcgaagccgaacctgttccacactggcggcgagacggcgccgttcctcgcccccgtcgtccagcagggcgccggtatcatccaggcctgggacgctgcccacgccactacgcttctcagcatttcgagcatctccttcaacgacactgagcacttcgccccggtccagaacttcaccgtccacaacactggcaagaccgaggttacctactccctgggccaccgcggtgccgccaccgtctacacgttccgggacgccagccagaccacccccaacgccttccccggcgtcctgactgaggaatacgccaccctgactttcaacgacgacaagttcaccctgcctccgggccaccgcaagatcgtcagcgtgcgcgtgcagccgcccgctctcgacgccaagctcctccccgtctacaacggctacatcaccatcaacggcaccgacggctccaacctgtccctcccctacctcggcgtcatcggcagcatgcgcgagcactccgtcctcgacgccagccgcacctacgtccgcagcaaccgcgtcgagggccgcgtccccgccaacaccaccttcgtcctcccccccgccggcttcgccaacgacacctcgtaccgcaaccgcaccgagatgccgcgcatcgtgctccagctgaccatgggctcggcgcacgtgcgcgcttacgtcgtgcccgtcggcggccgcaccgccgtgggcgtcccccgcgtcgagaaccccttcggcatcgacgccattggtctcgcagagggcttcccctcgatgtggaacccgcgcggcacgtcgcagtttacttgggacggcaagctcgagcacggcgccttcgcccccgccggcaggtacaagcttgctctgcgcgcgctgcgcatctttggcaacccggagcgcaaggaggattatgacgcggctgagtcagtcgagttcaacattcgctacctgggcggcggttcggcgaagttgaggcggtggaaggagcgctgccgcagtgaggaggcggctactgctgcgggcgcggagaagatgaagcggtctgcgaggttggctttggaggagaggtag

SEQ ID NO: 561 - DNA, 1395 bp, Scytalidium thermophilum
atgaaactgtcaacactccaagccgccctcgggcttttggccgcccaaccagttgtcgcgagcatcggccaccggcacgctcatcaacacgcgaggcgccatggccacggccatggccacgctcatccatctcccaagcaagcgcggaaagccggctgccagctccctgatcacccagatcttgtccgtgttcccggcgccatgaacaacggcttcgccatgagccccgatgagccctgtgtggatggcacgtggtgcccgatcgcctgcaagtccgggaaggtcatggcgcaatggaagccgggcaccacgtattcctatcccgagtcgatgtatggcgggttgtattgcaatggcggaactgctgagaagcccttccccaatcggccgtattgcgttgacgggacaggcactgtgaaggccgtgaacagggccgggagcattgtgtcgttctgccagactgtcctgcccggcaatgaggccatgattatcccaacagatgtcgacgacgtcgccacccttgcggttccagggccggattattgggccggtactgccgcgcactattatgtcaacgctcccggaatttctgcctcgaggggttgcatctggggtacgccagatgagcccatcggcaactgggcggcgtatgttgccggcgccaataccgtatccgacggcaccacctttgtgaagatcgcatggaacccagtgtacctcgacgagccgcggtatgccaacgtcaagcccacgtacggcctcaagatcgagtgccctggtggtggctgcaacggtttgccttgcggcattgacccatccaagcacgacgtcaaccaggtccaaagccccgttgccgctaacggcgtgagcaatgctgccttctgcgtcgtgacggtccccaagggccagacggccaacatcgttgtttttaacaccgacggctctaagggccccggaggcggtggcggcgacaagaagaaggatcctcccaagccgccgaagccctcgcccaaggagcaggaaccaagcaaacccgaggagcagccccccaagactaccaaggccgtcgaaatcgtcaccaccgctgccaacaatgacactaccacctcctcgtccaagaacaacagcaccccgtcgtcgtcttcgtctgcgtcctccacgaccactgccgacgactggatgggcggtgtcttccaggaagtcgacgcccagggcgacacgacggtggctgccggtctgtctagggcaacacccaatgctgtcaccgaacatcatgccgacgaggtccacagcgccgtgtcgccgacctcaagcagcgagggcgctgccgccgaaggcgggtcggcgattgctgggttggtggtcgccatcgtggctgcggcggcgctgatttga

SEQ ID NO: 562 - DNA, 1098 bp, Scytalidium thermophilum; identical to SEQ ID NO: 277

SEQ ID NO: 563 - DNA, 834 bp, Scytalidium thermophilum
atgaagcgattcgcaatcctcctcaccgttctcgccgctctcgccgcttgcatcggcgccatcactctcaacttcccgtctgacagctaccctcacacatccctcagtcatcacccaccggtcccaaacgcgaacagcaatgacccacctgctaccctccaggacgaccccaaccgaccgagagaggtacgcgaaaaccccttccgagccggcgcagtgctcctcggagccggcttcgacgtcgtccgcgccgccgtgcagatccccatcctccacttcgctcccggtgccaatcaaaccaaacaacacgccctctcggcctggatcgggttggacggcgagtccacctgtcctcataccttcctgcgtgtcggggtggatatgtttctgagcaagacgggcccggcatatctgccgtggttcggctggtaccccaacaacgtccaccatatcaccttcctcgatccccagcccggcgactggctggacctgagcatccatgcgaccaacctcaccttcgcgtggctgtccatcaccaaccggcgcaccaacgtcacgggccaggccacggccgagaaccacccgaccttgatgtgcgggttcaatgcgctgtggatggtccaggatttgtggtcttcacagggcgtgccgctgccgaactttgggacaatgctgtttagcgaggtccaggcgcagacggtcatgagagtcgcgagaggcgtagaagatgcgtatctagaggcggtgagggaacgagatggacagttggcggtcacttgcgagaagttgggcgaggagatgttgtggttcaaatatcaagggggacatccgtaa

SEQ ID NO: 564 - DNA, 1860 bp, Scytalidium thermophilum
atgatcaagatgttacgcgctattgtaagctctgttgccttgctcgcagcagttgtgctggccaacgatacaggccacgagagacctccccgcacaagggaatatgactatatcatcgtcggcggcggcaccgctggactcgcgctggcaaccagacttagtcacggcctcaggacatcacagatcctcgttgtcgaggctggccctgcagcgctggatcacgacggcatcaatgtccctggtctcaaaggaaccgtcttgggcgggccgctggactgggctttcaccacacaaccacagcgcggcctcaacaaccgctctctcttcatcccgcggggacgcgtgctaggaggatcgtcggccgtcaacctcctcgcatggaaccgggcatcggctgctgagtatgacgcgtgggagtccttgggcaacccaggatggaactggaaggccttgtcagccgctatggagaaggccgagacgtatgttaatgggccgcccggctcaggaacccatggccccatcaaggccgtcatcagccggttcatgacagagcaccagaaggccttcgtccctgccgtggccaggcacttctcctatctgccgaacaatcacgactccctccaggggaatcccatcggcgtcatggtgcagcccagcaacatcgaccccgtgccgtacaaccgctcgtacagcgccaacgcctacctgccgttggccgggcgcaacctcgaagttctcaccgacacgccggttgccaaggtcaacctcgccaaacctcaagacggggatcggaacgctccgtacacagcgaccggcatcaccttgcgcaacggcaccattcttactgcacacaaaggggtggtgctcagtgcaggcgctatcggcagccccgtgttgttggaactctcaggtattggaaagcgcgaggtgctgcgctcggcgggaatcacaacgctggtcgacctgcccggcgtgggtgagaactaccaggagcatccgcgtgtgcacatcgcgttcgcgctgaaggagggccaggtatctggcgatttgctgcaggtgaacgagaccttcagggcggaggagtgggccaagaggctgcgcggcgagcctggcttcttcgatgatgttggcgccaactacatctttactgactggtccggggctgtcgagtcgcgcacggtgtatggtgagctgactcggctggccaaggaggtggtggacagcgccccggagatcaacaagtatgagctgaaaaagcagctagagctgctcgacgacaggcgtgtgccgcaggttgaggtgatatactcgggccgctacgtcgggcccaaggggtacccggccccgacctcgaggctctacgggcggggattcttcagtcttctcgccggcatccagcacccgcttagccggggtagcgtgcatgtggacccaacggacccggtggggaagccgccggtgctggatccggggctcgtgagcaacaaatacgatgccgcggggctcgtggcactgctcaagttctgccgacgactggcacatgccccggggttccgggagtactgggaggttgagtacgaaccaggcgaggcggtccagacggacgaggactggcaggcgtatatccgcaacgtgacggagaccatttaccatccgacgggaacggcagcgatgcggccgcggcgggatggcggggtggtggatgcgaagctgactgtgtatgggacgacgaacctgaaggtggtggacgcgagcatcattccggtgcagctctcggcgcacccgcagacggcggtgtacggcattgccgagcgggcggccgagatcatgattgcggagcaccgtcttagaggttggtga

SEQ ID NO: 565 - DNA, 1476 bp, Scytalidium thermophilum
atgcgccacatcgcgcctctcctcgccctcctgggcgccaccgccgcctctccgctctcggctgaccggaccgcggcgctcctcgactgcctcaccgcggccggggtgcccgtcgatgaagtcggctcggccgagtacaagctcgacgccacgggctttaacctggcgctcaactacactcccgcggccgttgcggccgtcaccacggccgagcacatccgggacgccgtgacgtgcgcgcgcgagctagggtttaaggcgacgcccaagtgcggcgggcacagctatgccaatttcggactcggcggggaggacgggcatttggtgattgagatgtcgcggttcaacaaggtggtgctggacccggagacgggcatcgcgacggcccagggcggcacgaggttggggcattttgcctgggaggtgtataaccaggggaagagggctattagccatgggacgtgtcctggcgtcggagccggcggccacgtcctgcacggcggcttcggcatgagctcgcacacgcgcggtctcgcctcggactggctggtcggcgcgaccgtcctgttggccaactcgacgtttgtcaactgctccgagacggaaaacccggacctgttttgggcgctgcgcggcgccggcggatctatgggcgtcgtgaccgagttccgcttcaagacgtttgaggtgcccgagaccgtcaccttcttcgtggcgtcggtgcagtggccaacggaggagcgcgcgttcgcggggctcaaggcggcccaggagttcgctgacaccatggcgcccgagctcaacatgcgcctgttcatcgccaagcgcttcgtcaactttgagggcttgtaccacgggaaccgtgcgggtttgcaggaggcgttggcgccgctcctcaaggcgacgggcgccgtgctcgccatggcaagggagggcaactgggtcgatcaggcgaggcatttcggcggcatgaccaacattgatcagcagcacggccatgaagatcacgacaccttcttctccaccagcctctacaccaaagccctgagcgacgacaagctccagaccttcgtcagctactggttccggcaggccaaagccagcccgcgcgactggtacgtgcagatcgacttccacggtggcaaaacgtcggccgtctccaagccggaccgcgactacacggcgtacgcgtaccgcgatgcgctcttcctgttcctactctacgaccgcgtcgacgacggccacgccttcccggccgacgggcacgagctcatgagcgacctcgtcaacaacatcacgcacggcttgagcagggacgattggggcatgtacatcaattacccgaaccaccggctcagccaggacgaggcgcaggtgaattattggggcaggcacctgcccaagctgcaggccatcaagaaggcggttgatcccgaggatttgttccacttcccgcagggtgtgctccccgcgtag

SEQ ID NO: 566 - DNA, 867 bp, Scytalidium thermophilum
atgcggttcactgctctcgctttcgccgctgcggcggcccgtggcgtcttcgccgctcctcgcccggacgacagccgtagcaccttcggctgcgctgctccggagcctgatgctgagcaccgtcgcatctcgcagatgttcgccgcccaggaggccgaggtggtcgcctctggcaacttcaccatgatggccactgtcaccatcgacacctacttccacgtcgtggcctcgtccacctccctgagcggtggctatgtcaccgacaagatgctctacgaccaactggatgtgctcaacgccgcctacgcccctcacggcttccagttcaacctcaaggagatcacccgcacggtgaacgctcagtgggctgttgacggcaacggctacgagatgactatgaagcgccagctccgcaagggcagctatgctgctctcaacatctacttcctcaaggacctcggctccaacatgggctactgctacttcccgacctcgggcgccggtgctggcaccaccactcgcatccgggacggctgcaccgtgctctacagcaccgtccccggcggcagcaagaccaactacaacctcggtcacaccgtcacccacgaggtcggccactggatgggcctgtaccacaccttccagggcggctgcaacggcgtcggtgactcggttgccgacacccccgcccaggccagcgcctccagcggctgccccatcggccgtgactcgtgccccaaccagcccggtcttgaccccatccacaactacatggactactcttatgactcttgctacgaggagttcacccctggccagcgcgctcgcatggagagcttctggaaggcctaccgccagggcaaataa

SEQ ID NO: 567 - DNA, 1536 bp, Scytalidium thermophilum
atgcggttctctgtgcaacatctcttggtggcagcgctcggcctgagcgtgttcgacgccgcagaagcctcctgcgcatgctggaacaaggggcttgaggcatgcttgagaaccaaaaagatcccgtacaaggtcaagtgtgactcagactgggagaactacagcaaaacacccaacctccgtctccctttcaagcccgcggccattgctctcccagagacagcggcgcaagtatccgaagctgtccgctgcgcggccaagaacaacgtcaaggtccaggcaaagtctggtggcaactcgtatggcgcctttagctttggcggcaaggatggccagctcaccatcgatcttgcaaagttcaacaaaacggtgctggccaaggatggcgtcaccgccatcgtgggcggtggtgttcgcctggggagcatggcaaaggatctttatgaccagaacaagcgggcagtctcccacggcatctgcccgcccgtcggcatagggggtcactcaactcacggaggttggggctttacctcgcgtgcttggggtttgactcttgaccacatcctcgagctggaggttgtccttgccaacggcaccatcgtgcgggcgacgccaaagaagaactctgacatcttttgggccatgcgcggcgcggcggacagcatcggcattgcgctcagcttccaccttcggacgcagccagcccctgaagaggtcatcaacttcatgtacgagttccagtccgccgctgaaagcgtcgacgttgccgtggacactttctccaagctccaagcgttcatcagcaacgaaaccctcgtggaccggcgcttttctttcgccctccaaaccatcgccaacttccaccctgaatctcacgagctcctgagaaccttcttcgttgagggaaccttcttgggatccttcgccgagtacaacaccaccgtcgaacctgcgctgctggcgggccttccggagcctaccaaccgccatgtctcatccaacggctggctcgactcacttgcactcctgagcccaaccgaaacccttgacactgcgcctctcttcctggacttttttgccaacagtgtcaccatcgacgacccgggcatgagtgaagatgctattcgcaaatacttcacctacctgctccagggcccgccggctcccacgtcctacctctcgagcatggagctctggggaggcgccgacagccagatcaaccagccggatagcaagggcatcaactttgccgccttcccccaccggaatgtgttttggactgcgcacaacctcgcccgcgtcggacccggccaggcgttcccggctgagggcatcacttggttgaatgacctgcgcaaggtcatcctcgattccgtagatgtgcataccgctgcgtaccccaatcttcttgaccccacgctgacgcgcgaggaggctcacgaggtttactatggccaggaggtgctaaagaggctgcgtcaaattaaaaagaaggttgaccctggtgatttgttttggaacccgcattctatctga

SEQ ID NO: 568 - DNA, 2181 bp, Scytalidium thermophilum
atggccacccctcacaagcctatccgtgtcggacttattggactctcctcagctgccaaaactgcttgggcatctcgagcccatctcccttacctcctttcgcctcgcggaaagtccaaatatcagatcactgcactcctcaactcatccatccaggcagctgaatccgccatcgagacctatggcctcccaaaagagacgaaggcctacggagatccagcctcccttgcagccgatcccaacatcgatctagtggtttgctcaaccagagttgacaagcactacgagacggtccttgacagcattaaagccgggaaggacgtctttgtcgagtggccattggctcacaacgcccaggctgcccgggagctggcggatacggcaaacagaactggcgtgagcaccatcgttggcctgcaaggagtcgtcgctccggtggccttgaaaattcgagagctattggaaacggaccggatcggaaaggtcctaagctcagagctgagggtgtttggtgggctaaatgacaggaaggtacttcctgaaggcttggcctacttcactgataggagcgttggtggaaacatctacacaatcgggttctcgcatcagaacacggtcaggggagctactggagagacgtggaccgtcacctccaatgtcccggatctgatccaattgtctggaaagtgggaagaatcgagcctcacccagaaaaacgccaccttgcactaccgataccgccgaggccaaccatttcctggggagccggcactcgcatggacgatcaatggcgagaagggggagctgagagtcatttcccagcagcacaccagcattcaggtcggtgatgctacagaatcacgggtcatcgaaatccacaattttgaaacaaacagcgttgagaaggttgagtgggactgggaggattggcagcaggaactcccattcccagcccgcagcatcgggaagctctatgagaactttgcggcaggcaaaaagattgttcagccatcaacggttcaccccgccctccggcgtcgcacagcagcacttgcaccattgagaaatatttacgacgtttactatagcatcgaccttgtggttggcaaccaaacagttcctgtgagcgttgatacgggctcgagcgacacatggatggttcagcagccgtatgagtgcgtttccttttggtttgatccgagaaatccagacggcacgcgggactgtggccttggagcagggttcaagggaaatctttccggaggggttctgcccgggcttccgccgttctatcgcgcctacgttgacggcacctttgtctatggcttttacggggttgaagatgttacaatcggaggcgtcacagctcacaatcagcgaattgctatcgtcaattacacctactggcatggggatggacagacttctggacttctgggactcgcctacccttatctcaccagcctcgacggacccgaccaaaaccaaccgccgtacgaccctgttttcacaacaatgtggaagagcggggcgatagacccaatattcagcatcgctctgtcaagaaacgaggaccaaggaaatggcccaagcgggactcaggaggaatcttatctggctctggggggcctgccacccgtcgaggtcgatgaatccacctgggcgagcactccaatccatggcatgaattctgtcccccagtggggattcgaaacggacgagcgtggaatgtacatcatcaagccagacgcgttcgtcctcgagaaaggaggcgccggaccggacgccggtcaggagattttgaggaacaccactcaaattcctattctgatcgatgttggcgcaacattgagttacctgccaaagggtcttgtaaaccagctgtatgccgcgtttgacccgcccgcgcaatacctcagctccaggggattgttctatgcgctctgcaatgccactgttcccaggtttggtgtccagattggagactctaccttttttatggccccggaagacctgctcaggcaaacagcccgagatcccacaggagaatggtgtcgtgttggtgttactgataccgactcaccgccgcatgtgcttggagtcagcttcctgacaaatgttgtggctgtatttgatgttgggaagcacgaaatgcggttcgcagctcgcaaggattactga

SEQ ID NO: 569 - DNA, 1278 bp, Scytalidium thermophilum
atggccggccgactgctcctttgcttcactgctgccctcgctgccttcggcgtctcagccctcccggccgacgccaaggctaaggcggatggtttctacctcggtgtgcccgttgtaaacccgggtatcaagaacgccattccccaccgatacattgtcgtgtacaacaacaccttcgacgatgaggccgtcgaggcccacgaggctgccgtcatcaagaccatcgccaagcgcaatatcaacaagcgcagccccttgaccggcaagaccctctcgacacgcgtccagaccttcaagattggcgggtggcgtgccatgtcccttgaggccgatgacctcctcgtcaacgagatctacgcagccaaggaggttgcctacatcgagcaggaccaggtctacactatcgctgcgcggaggtctcaggcccgggcccccagtggcctggctcgcctcagctcttcccaggctggcagctctgccctttacaccttcgatgactcggccggtgaaggcatcaccgtcttcgtcgtggacaccggcatccgcgttactcaccagcagtttgagggccgcgctagctggggcggtaacttcatcgacaatgtgaaccaagatgagcagggccacggcacccacgtggctggtactgtgggaggccgtgacgtgggcgtcgccaagaaggtcaagcttgtggccgtcaaggtgctcggcgctgacggcggcggttcgaccaccagcgtcattgctggcatggatttcgttgcccgcaacgttactgcttccggtctgcgcggcaaggctgtcatgaacatgtccctcggtggtggcttcagcaatgcgatcaactctgccgtcaaccgcgtcgagcaggctggtgtcgtcccagtcgtggccgctggtaacgaggctactgacgcctcgctcacctcccccggctccgctgaacgcgctatcaccgtcggtgccatcgaccagcggacggaccgcattgcctcgttctccaacttcggcccgatcgtcgacatcttcgctcccggtgttcgtgtccagagcgccatcatcgactccaacaccgcgcttggccctctcagcggcaccagcatggcctctcctcacgtcgctggtcttgccgcttacctcatggctcttgaaggcctcgacaatgctcaggctgtttccaaccgcatcaagcagcttgcccgccaggctggcggccgggtccggggtggcccgaggaacaccacgactctcattgccaacaacggcttcctcaactaa

SEQ ID NO: 570 - DNA, 1539 bp, Scytalidium thermophilum
atgcggctcccatccctctccccaacggccgcggccgccaccgccgcggtcctgctcacccaactcaccaccgcctcgcccaccacccacatcaccaaacgccaggccgccctcgacgactgcctcgccgccgccggcgtgcccaccgccgcgcacaactcgtccgactgggactacggcgcgcacgccttcaaccagcgtctcaagtacacccccgcggcgatcgcgatcccgaccaccaccgagcatgtccgtctggcggtggagtgcgcggcgcggacgggcgtgaaagtgtcggccaagtgcggcgggcacagctacgcgtcgtttggcatcggtggggaggacgggcacctggtggtgcatttggattcgatggacgaggtggtgctggataaggagaccggagtggcgacggtgcaggccggtgcgaggctggggcatgtcgcgaccgtgttggcggcggaggggagggattttagtcatgggacttgtcctggcgtcggcgtgtccggccacaccctccacggcggcttcggcttcagctcgcacacgcacggcctcgctctcgacgccgctgtcggcgccacggtggtcctcgccaacggcaccgtcgtcgaaacctccaagaccgtcaacccctccctcttctgggccctccgcggcgccggttccaacttcggcgtcgtcgtctcctggtccttccaaaccttctccgtgccccccgtcgtcaccgccttcgaaatcaacctcccgcaatggcgctccaacgcgaccaacctcgcggccggcttctccaacctccaagactggttgctcgccggcggcatgccgcgggagctgaacatgcgcatcctcgccaacggcttcaccttccgcctcgaagggctctaccacggcgacaaaaccggcttctggtccgccatcacccctcttctccctcttctcggcaccaacgtcaacgcaaccaacgtccgcgaactggactggatgtccggcttccgcgccttcgccaacgccttcgtcatcgacacgaagcgcccgcaccgcgagcaagaaaccttctacaccaaatccctcgtcaccggcgcactcccggccgacgtcctccaaaacgtggccacctactgggtcaacgcggcgcgcacggcgtccggacggtcgtggtacgtcatcatcgacatgtacggcggtcccaactcggccatcactgccgtcggcaaagacgagacgtcgtacgccttccgcgaccccaagaagcacctgttcctgtaccagttcaacgacagcattttcttcgggtcgtatccggccaatgggttttcgttcctggataactggatcaaggcgttcacggacgggctgagcgaggatgagtggggcatgtacatcaactatgccgacccgcggttggatcgggacacggcgcaggaggtgtattaccgcgacagcttgccaaggttgaggcagcttaagaaggagctggatccgaacgaggtgttttactacccgcaggctattaagccggcggagttttag

SEQ ID NO: 571 - protein, 360 aa, Scytalidium thermophilum
MRFSASLLLALTGSAAASPIRAEEEIRVAFTPRQVQGLDAAMKAAGREYIGTSLTVRNDFQEQNIIRTEFGSITPENAQKWDATEPNRGQFTFGSADQHMDWARQNGKHVRCHTLVWYSQLPGWVSNSGFNNATLQQVMQNHINQVMGRYRGRCNHWDVVNEALNEDGTYRDNVFLRVIGEAYIPIAFRMAAQADPSAKLYYNDYNLEYLGPKVEGAARIVRLVQQYGVRIDGVGYQAHLVTEPTPTQSTPTPSEEDLIKALRITADLGVDVAYTEIDIRMRTPSNAQKLQQLADAYYRVARSCMKVPRCVGMTIWGVTDRYSWVPNTFRGEGDALLWDSNYQRKAAYNAFLRGIQEPVN

SEQ ID NO: 572 - protein, 298 aa, Scytalidium thermophilum
MRPQVGLLLLPALSAHGIRIIQSNDDGWAELYVRSFHEALLASGHDAVLSAPAENKSATSSLDIEPSPRKSRCQYDSCPVTNAPIGRNESSPRLNWVNSFPVTSIRYGIDFIGPQFWNGQDAELAVTGPNVGSNLYVQAPFSGTIGAAVFAAKERKIPAIAFSGLSGGNLAWNTTPVPERSTLYAELATILTNAVIESGKPYLPEDVFLNVNFPTVGNKCNKASQFKWVLSRINIGLFSAPDIQHCGSTRLPMEAAVVLSDGCYISVSVGDARDKTTAPKEKQAIVRDKLQGLLTCLP

SEQ ID NO: 573 - protein, 511 aa, Scytalidium thermophilum
MKAESFALFLSALSGLTVGASAQEREPRTWGFVPGLLKPWVDSRRLQADIKTENLVKNLQVLNDIAFANGGNRAFGLPGYAASVDYVWKKISKVPGTRAWKQDFDALFSQVLSISLKVDGEDIYVYGLSYSPSTPPEGITAEIVAGPEGAAGCNDEAYADLDVAGKIVLVQRFRCPTGGTLAGRLLPAARAGAAAVIIYHDLTTNATAGSLSAPNPEHVPGGFINKVDGERIKARLDAGEKLEAYFQQTQTVENRTTQNLFVETIDGDPDNVIVLGAHLDSVQAGPGINDDGSGTSLILELFLALSKYRTRNKVRFAWWGAEENGLLGSKHYCSTLDPREANRILAYLNFDMVAKGYIGVSDTDGSTHGSVAPPGSEVIERLFNDYFASKGITVTPAIMTNGSDYASFWSILNKPFGFLHTGTGVEQDPCYHQACDTIDNPDPETHTKNAKAAAHVLSILAMDGTRLIPKGPPINATTLAAMRTRDLTPDHARIEDLEAMGERHLGCGHDI

SEQ ID NO: 574 - protein, 193 aa, Scytalidium thermophilum
MQLKTALLSLLAAVASAAPSGKSCPAPVRKFGIMALRSASPIHFARVSATQNTLVLNLPDDKQDAQCEDGQAPSSATFYIKDEELYLYGKNPKQWLVADRSGMGLGILQYHNKTSDTPSGRLEVKGWAIDENDNLTFNGNGLLACPSTTDDTWFIRIDVGVEKPHGIEGCLGFSARTVTVTDPVKCTYSLYSA

SEQ ID NO: 575 - protein, 558 aa, Scytalidium thermophilum
MLGLKVLCLSAVVGTAVSVPHAGNLPRQASTFTNPVLWEDHPDLEVFRVGSVFYYSSSTFAYSPGAPVLKSYDLVHWTPVTHSVPRLNFGSNYDLPSGTPGAYVKGIWASTLRYRRSNDRFYWYGCVEGRTYLWTSPGGNALANNGEVPPSAWNWQHTATIDNCYYDAGLLIDDDDTMYIAYGNPTINVAQLSPDGTRQVRVQQRVYAHPQGQTVEGARMYKIRGNYYILVTRPADAEYVLRSTTGSPFGPYEARTLVSRIQGPLANAGFAHQGGIVDAPDGTWYYVAFMDAYPGGRIPVVAPLRWTADGWPEVVTDSQGRWGTSYPIPVRGAKNATEGLASTDLDEFRGTRFSEHWEWNHNPDTSKFTLLGGNEGGLILRTATVTGDLFAARNTLTRRIAGPKASGIFRLDVRGMRDGDRAGAVLFRDRAAYIGVWKQGNEARIVMVDDLRLNEDGWRTASTGRVAANGPVIDTNAQQDIWLRIDADITPAFGTNTERTTTFYYSIDGGRTYTRLGPAFAMTNSWRYFTGYRFGVFNFATKSLGGEVKVKGFKMNMI

SEQ ID NO: 576 - protein, 206 aa, Scytalidium thermophilum
MKSFIVYSLLAAVATALPAPAPMPTPPGIPSKSTAQSQLNALTVKASYDDGKYKRDLFPHWNTVSGTCNTREYVLKRDGVNVVTNSACAATSGTWYSPFDGATWTAASDVDIDHMVPLKNAWISGASNWTSTKRTQFANDINLPQLWAVTDDVNQAKGDKSPDKWKPPLTSFYCTYAKSWITVKYNYGLSITSAEKSALTSMINTC

SEQ ID NO: 577 - protein, 498 aa, Scytalidium thermophilum
MAASILYTVSVLLLGLVHHVAAAALPQPTPHDDGCVHLPIIHSTNVNFFSGKRGIQMALANRSDIAYYAQLSIGTPPQPVFVQLDTGSFELWVNPDCSKVRGADALFCERVGQYDTSRSSTVTSLGTSKFLKYGIGSANISYVTDTITLAGSATSLRNVQFGVATSSSDTFSGILGIGYGQGIATKYPNFVDQLHDQSAIRVKAYTLALGSKDAREGIVVFGGVDTAKFSGKLARVPIIPADRSPDRVPRFWVDLRSITLTPPSGISRVYEDSARPVFLDSGSTMTLLPRNLTAAIARDFGANEPDSNGFYRIDCALTQMSGTLDFAFDGVTVKVPYKELTREVPTNPPACFLGIMASDKFTLLGDTFLRSAYAVFDLESDSIWLSQATNCGSSPAALDDINSLATITGDCGGSGVVDSSTSVPTSTSEAIQTGVETGGQAGPVSQTSPGGRTPQGQTGTDGTASGAALPLLPTGLGRWVRSWALLFVFQRVVLTCMW

SEQ ID NO: 578 - protein, 301 aa, Scytalidium thermophilum
MSMPRPLSFGFSSGFLGKPSPKPRQTSFFPSPPSPQLSSVLDLPASITQYLLPSMGRFVSVWAIIGLAGVVLGDLLDCGPARYDPAQYVCWDNQFLCPVVAGEPLSHCAGACYSKFMYTCTNNILTLLPPQDTPFTLTVDNPNILIHGKPVTASGLHWLLNGETSSYCPTVVPRETCPPGNITVMVASGGSVAMSVMVPGGQQAYLDPYWNMKYTQAHSAYIPPGSLTTGFGAYKGGGFVNLNGNGWGWVACPPRASGGGGTAWNLVAKNASTADLLKDCHAVNLKINPLPAGTFGAWQYT

SEQ ID NO: 579 - protein, 417 aa, Scytalidium thermophilum
MAALFLPLLLLVPLAAAASLPPLPLHTSSRWILDANNHRVKLRCTNWAGHMETHLPEGLHHKSVDHITSWIAAQGFNCVRLTYSIDQALNPNRTVAAAFSIAASAAGVSVNDMNNFRDRVVQNNPWINPQQTTTRNVIEYIVAKLADKGIMTILDNHTSSAKWCCNIDDGNGWWDAGAYYNHWNSRDFKTNEWLAGLQAMAAWAKGRKGIVGMGLRNEIREFLLQGILNGREDWYRFIKQAGDLVHATNPDVLIIVGGTQSSTDLLHIRSRQLDTSGWAGKHVWEMHAYSFTVTFPDALKNCDVTKVQYGLFDGFVLEQNKPWTGPLFLSEFGVGMEGGPFDGLSEKDDRYLKCLVSWMESNDADWAVWAIQGSYYVRDKIPDRDESWGLLKHDFSDWRNPKFPAMLGKMWNVTQGP

SEQ ID NO: 580 - protein, 645 aa, Scytalidium thermophilum
MLPRREASGGTSTSTARITAQLLLSFLALSPSPVAAVANAPAQPQAVLPPGAVIPEQPQPVAPGEHSFTLRHIFHHGTYKYPNLHRKKDIDPSVSNVWLAAEDGFEAEPLPPLRARSNGVRIQRLVDRRPSVVDPMVAHARRFGYANVLAPSAWTLDEVPAPDITDRDTILTLAYMASDAYVQSPDEADWDDVGGGFNRSVDFGWESDGLRGHVFADDTNSTIVIGLKGTSPAVFDGEGTTTNDKVNDNLFFSCCCAQQGPWTWHQVCDCATGPYQCNNTCVVQALHEENRYYQAARELYANVTELYPNSNVWITGHSLGGAVSSFLGLTYGVPVVTFQAVPEALAAGRLGLPVPPGINPDIPQTREYTGAYHFGHTADPIYIGTCNGATASCSFGGYALETVCHTGFECVYDTVGDKGWRVGIGTHKIRAVIRDVILKYNTVPECKRKPECRDCGSWTMYESNGTETTTTSATSSPTSTSKTRTRTETCKTPGWWGCLDETTTATGTKTSEVTPTTTSTTTCHTPGWFGCRDKTTTTTTTPTSTTTTTTTTCLTPGRFWGCYDETTTAEETAAPTVTTTRELSSTSTITSPPSLPSTSTPTSAAPTTSPTCVDRAWYGWCREWAGDDGENGDDDDEQVNKKEDM

SEQ ID NO: 581 - protein, 477 aa, Scytalidium thermophilum
MRTLSTLLTAAAVATAATVSPRQSGTITVNLGQTFQRIDGFGFSLAFQRANLITNMSDKTKQKELLDLLFNKTTGAGFTIIRNGIGSTPNSNSDFMNTIAPNNPGGPNATPQYVWDGKDSGQLWVTQQAVSLYGVKQVYANAWSAPGYMKTNGRDTNGGTLCGMPGAFCASGDWRQAYANYLVQYIRFYQQSGVNITHLGFLNEPDYSASYASMQANGNQAADFIKILDATLRREGLSEQVGITCCDSMGWGNQANMMNAIRSQGAEGLLKAVTTHTYTGAPNGPVNYRAPLWFSEQCDLNGQWTTAWYAFGGAGEGLTWANNIFNAIVNNNASGYLWWEGVQWPNPNTNEKLIRVDNTTNTYEVSRRLWAFANWSRYVKPGAVRVGTSGAPGGLRVAAFRNEDGTIAVVAISSSGSPVNVSIRLSGGGVGGASAVRAYVSDNTRNCENTPASVGADGSITGSVAARSITTFYILPA

SEQ ID NO: 582 - protein, 586 aa, Scytalidium thermophilum
MASLLPLRSCLSFFLFFLVAIQPVTAVWPAPKNFTKGNTVLYLHQAVKITYNGDPLSYTYGYVPRDITSKEVVQAGVSRTLDGIFGSKFVPWKLHKPGSQFEPDLHKGQKWISTFEIVQTAKDKPSTFKPLAGEVDESYKLSVSAEGAAKLTAASSIGILRGLETFSQLFYQHSAGTFWYTPYAPVEVEDSPQFPHRGILMDTARHFFPVEDILRTIDAMSWNKLNRLHIHVTDSQSWPLVLPSMPEVSEKGAYHPSQTYSPTDIENIQRYGAIRGVEVYFEIDMPGHIGVVALSHPELIVAYNELPYHWWCAQPPCGAFKLNSTEVDKFLEKLFDDFLPRVAPYAAYFHTGGDELNKNDSMLDDGVRSNSSDVLQPLLQKFIDAQHGRVRKAGLTPVVWEEIPLEWNITIADDTVVQAWLGEQSVKKLTEKGLKVIDSNYNFWYLDCGRGQWLNWDNGAAFQLGYPFNDWCNPTKSWRLVYSHDPVAGLTPEQAKLVLGGEVAVWSETIDSTNFDTLVWPRASAAGEVLWSGRIDFATGQNRSQLDAAPRLNEFRERMVLRGVRSSPVQMTFCTQGKPEECEYAP

SEQ ID NO: 583 - protein, 443 aa, Scytalidium thermophilum
MRLLNSLTLLSALHAPLPVKAGSEQRHLQQQEQQPMQNVDVTHDERLTGRAPPPPLQSTEPPGVSKPLFSSLERAARLVDISYCVGTTGISPPFSCVSRCKDFPSLHLERTWNTGVLMSDSCGYIAVDHGPQGATDDGKEIIVAFRGTYSITNTIVDLSTVPQEYVPYPGNGDRDDDPNDQPSDDPPPRCANCTVHTGFMSSWRAARDVVIPALRSARDRHRGYRVHLIGHSLGGAVAALAALELRLGLGWKDVRVTTFGEPRVGNAALARYIDAAFGLNATAPGTEDIQYRRVTHIGDPVPLLPLTEWGYRSHAGEVYIAKSDLPPGPGDLRLCRGDADPECMAGAETEDWLGKAMGWLRRGRKTWWLGGPRQEDEVVVENAGELGPRGFPARLKLWQLLFAHRDYFWRLGLCLPGGDPADWWREKYNFTEPMDVGLEVGDL

SEQ ID NO: 584 - protein, 691 aa, Scytalidium thermophilum
MLHLRRSLVLLPLFYFVNTLAVAQYSGYDYGFDVHQLVKRQIGRRSDLVVNETTPDDGIRIRQEIRELEKDQDLWTLYILALSMLQFTDQSYPLSYYSLAGIHGMPHATWGGVNPVPGSEDLGYCAHSSVLFPTWHRPYIALYEQILHGLVQMIASFWNDTERPRYQAAARRFRQPYWDFAAPPPEGESVLPWSVGGSQYVDVDGPNGRQRIANPLYTYYFRPLDPDAFTFGPWNEWTKTLRFPSSTGPDAQSNIALVAMNLDRNRAALAQRIYALFSANDNYTTFSNNVDGSYLDSVESIHDTIHTLVGGYGNDSDPTHPGHMSFIQWSAFDPIFLLHHCNIDRIFAIWQALHPDSWVEPGVSILGTYTTPKGGIVDSTTPLTPFYETANGSFWTSDSVRDHTKFGYTYAELILSSSSSSGGSSNSNNRLALAHSTKKAVNRKYSSFSPASVFLCELRSHGVRQEDGDTDKPASLSSLLAKRLPGKKTKNLPRSLLGSKLFAASTDGSGINYREWTAHVIVGQQAVDQTGTVSLYLPNEAVNGKSNNPRDWPAESFVGTMGVFTTARQQQHPEQGQHPWAQQHANPDTKSPHAVPVSGTVPLTATLMDKLASGRLESLEPEHVVPYLREALRIAVQRPTGKVVSTQLESREAGCGVPGLEIRVLSAVVEAPWSEDELPKWGERRMELVVC

SEQ ID NO: 585 - protein, 552 aa, Scytalidium thermophilum
MRIAASTVLLGAASASFHQQAQHVLSNFDNMKPISESFDSLGDMASAPLEALEKAFGTMSAEAKAVWEEIKLLVPESAFKQGSWFSKPKPHTRRQDWDHVVKGADVQKLWVQDADGQSHRKVGGRLESYDLRVKAVDPSVLGIDTVKQYSGYLDDNENDKHLFYWFFESRNDPENDPVILWLNGGPGCSSLTGLFLELGPSSINKKLQPVNNPFSWNNNASVIFLDQPVNVGYSYSGGSVSNTVAAGKDVYALLTLFFHQFPQYAKQDFHIAGESYAGHYIPVFASEILSHKDRNINLKSILIGNGLTDGLTQYQYFRPMACGEGGYPAVLSESECASMDRALPRCTSLIESCYQSGSVWSCVPASIYCNNALIGPYQRTGQNVYDIRGKCEDSSNLCYSGLGYISDYLNQQSVMDALGAEVSGYESCNFDINRNFLFQGDWMQPFHRLVPGILEEIPVLIYAGDADYICNWLGNRAWTEALEWPGQKAFNKAEVKDLKLAGASEEYGKVKSSGNFTFMQIYQAGHMVPMDQPENSLDFLNRWLNGEWFAKE

SEQ ID NO: 586 - protein, 194 aa, Scytalidium thermophilum
MGLLANLTLLLAAASAVIAEDKAAVPKITSIKFSGSGCQKDPAFSGTFNDPKVTFSEFVANLPGTSQTVNCQAHLQAEGASQGWQVAVKSNTVRGQAVLQPGTSLTHFTSVYFSQDPAKTEVFKGTLANNGNRTVTQAVVLTGKSDNNKVWSPCIGKDGYTGILNINFRAVLSGEGRAYFKANTEQWDVEWRKC

SEQ ID NO: 587 - protein, 388 aa, Scytalidium thermophilum
MKHSVLAGLFATGALAQGGAWQQCGGVGFSGSTSCVSGYTCVYLNEWYSQCQPQSTTLRTTTTPGATSTTRSAPAATSTTPAKGKFKWFGINQSCAEFGKGEYPGLWGKHFTFPSTSSIQTHINDGFNMFRVAFSMERLAPNQLNAAFDANYLRNLTETVNFITSKGKYVMLDPHNFGRYYERIITDKAAFASFFTKLATHFASNPLVVFDTNNEYHDMDQQLVFDLNQVAIDAIRAAGATSQYIMVEGNSWTGAWTWNVTNNNLAALRDPENKLVYQMHQYLDSDGSGTSTACVSTQVGLQRVIGATNWLRQNGKVGLLGEFAGGANSVCQQAIEGMLNHLQENSDVWTGALWWAGGPWWGDYIYSFEPPSGIGYTYYNSLLKKYVP

SEQ ID NO: 588 - protein, 287 aa, Scytalidium thermophilum
MRWFGRALLLASLAVSTVTAELSFVATVKQDGKEVDASKLDFKPIPPIRHRRRGAHRGGRTGQAEQQPEARDLISYSSNWCGASQHTSDKADAIKNVSGYFQVPDLRLRPGNPPPQFAAAWIGIDGAECNTTLLQAGVTTVVNSNGGQSASAWWEWYPEAAFSIDGLRVKPGEWIQVDITASSPTNAIVIITNIDRGTSVTLHINNGPKLCRVDAEWIVEDFYESEKQVPFAKFNDVWFVNVGARTNSGKRIGVDGAAMVHLQDEKGRTLCSAERFDNNNFVAISHD

SEQ ID NO: 589 - protein, 822 aa, Scytalidium thermophilum
MKALTRRLASFLAITGVVGLEYPNCINGPLANNTVCDVTAAPADRAAALVKAMTVAEKLDNLVDMSKGAPRLGLPPYAWWNEALHGVALSPGVTFNPLGSDFSNATSFANTITLAAAFDDDLVYQVASAISTEARAFANAGLAGLDYWSPNINPYKDPRWGRGHETPGEDPVRIKGYVRAFLAGLEGDGPVRRVIATCKHYAAYDLERWQDLTRHQFNAIVSLQDLSEYYMPPFQQCARDSNVGSIMCSYNAVNGTPACANTYLMDDILRKHWNWTGHNNYITSDCYAIQNFLPSWHNYSQSPAEAVAAALNAGTDTICEVAGWLPYADVVGAYDQGLLSEAVIDRALRRLYEGLVRVGYFDPPTSSSPAAAYRSLSAANVSTTEHQLLALQSALDGMVLLKNLNQTLPLRDAIPFPPFTTTAAQVAIIGHWAAPNAHMLGGYSGIPPYLLSPLHAAELLQLNYTYAPGAPVITNANPDTPDTWTTPALAAASSASYILYFGGSDLSLAREDLDRDSVSWPRAELELITTLSSLGKPVIVIQLGDQLDTAPLLSNPNISAILWAGYPGQAGGLAAMYTLLGISSPAGRLPVTQYAEEYTKRVALTDMRLRPDAQNPFDLSTPVHLRPNTSSSFPGRTYRWLPHPSSSSSSSSSLVTLPFGHGLHYAPLRAKFGIFTTLSLTTADLLSSCNLTLHNNHPDLCPFPLQISVWTTNLSPSNGGLTTDYVALVFVTGEYGPRPYPVKTLVGYTRLRAIGPGETKAALVDIKLGDLARVDEAGNRVLYPGPYKFMLDVAEDGGGVDEVEIEVTGEEVVLEFWPQPQG

SEQ ID NO: 590 - protein, 488 aa, Scytalidium thermophilum
MAKALKYFAWGIAALASGAAAAPYCAPQPSTTSQEPTSTPSPVPGPRTFEAEDAILTGTRVESSLAGYSGTGYVAGFDEPNDKITFHVDSETTRLYDLTIRVAAIYGEKRTTVVLNNGPASEVYFPAGDSFVDIAAGQVLLNQGDNTIDIVNNWGWYLIDSITITPSAPRPPHQINPSPVNPAADDNARALYAYLRSIYGKKILSGQQELSWADWIAQQTGKTPALVSVDMMDYSPSRVERGTRGTAVEEAIEHHRRGGIVSVLWHWNAPTGLYDTPERRWWSGFYTDATDFDVARALADTTNANYTLLIRDIDAIAVQLKRLRDAGVPVLWRPLHEAEGGWFWWGAKGPEPCKKLWGILYDRLTNYHGLNNLLWVWNSILPEWYPGDETVDIVSADVYAQGNGPMSTQYNQLIELGQDKKMIAATEVGAAPLPDLLQAYEAHWLWFAVWGDTFINNPQWNSIETLNTIYNSDYVLTLDEIQGWRNTQ

SEQ ID NO: 591 - protein, 430 aa, Scytalidium thermophilum
MKLTTPWRAATGLLAVASQAAAKTIQYCPGNADGLCFSIAVPTSSASSGSGNIYFQIKAPASLTWAALGTGSTMPGSNMFVVYRDGQGNVTISARRAQGYNTPLQDTSEQAARLTLLAGSGVNEDGSFTANVACANCDSWATGSMSLASTAAPWIGAWRPGDPISTTDANSRIPPHDPDGTTRFQVDLTQATINSDSNPFVSSSSGDEDSDETSDSNDNNDNSSNSSSSSGVVELGSTMRDRAVIAHGVILALVFAVLYPTGSLMMPLVKKWWFHMAWQSFSFGLMWGGFGMGIGIANERDSLFKTTHTTFGTVVIAMLGIQPILGHLHHRYFLKHRSRGAISYLHIWYGRILMILGVVNGGLGLRLAREEEGYVIAYSVVAGVIFAGYFGYKAATTLTKASEGADGDGDEAKELRARSELRRARRNESA

SEQ ID NO: 592 - protein, 511 aa, Scytalidium thermophilum
MVASSLVLLTAPLALAPGAWALPNLLNLGLSLGSGQVAEVSCEAVTVTETVYLPEPTEKATSTETASSEKTTASPKPETQITAFVNITAPKNNTGFAGYRNALYFTNWGIYGADMQPQDIPADQVTHILYAFADIGPDGEVKSSDSWSDTDKHYEGDSWNDVGNNAYGCVKQLYILKKKHRQMKTLLSIGGWTYSPKFAPVAATAAGRRRFCKSAVTLMKDWGMDGLDIDWEYPANAQEAQDYVDLLKTCRAAMDSYAAKYAKGHHFLLTIAAPAGPKNYDVLDIEAMDPLLDAWHIMAYDYAGSWDSTSGHQANLFHSESNPEATKFSTERAVRDYIARGVPSRKIVLGLPLYGRQFENTEGPGKPYNGIGSEGSLQGQPGIWLYRDLPRPGAEEFYDEEAGAAYSFQNGTGGGWTGWNKNTNGKGRISKYGGGTMVSYDTLTSARRKVEYLLENKLGGAVFWEAAGDKKGDESLVAAVRQGMGKLEQTKNWLSYPDSQYENIRAGMPGS

SEQ ID NO: 593 - protein, 1435 aa, Scytalidium thermophilum
MKLFIPLPFLLLYWLICGVLANTVRDEAVAIQPRSVQAHHSNGITLEVRDEDDESDIEKPPRLANATQADIDRARAIINAAMKELAVRNKARLDHPLRNNYQLRPGSGKRKRNDPIPVEDAPPLFNVTEDIAAAAALVAEADAYEEVKSNSTLRRRANILRRARESNYWMANRKKLGSWPFGNNPSSFTVFRDVTKYGAKGDGVTDDTEAIRKAVSDGNMCGPGCYSSTTKGAIIYFPPGEYLVSGTIETYYGTQFIGDPNDRPVIKAASSFVGLGVISTDKYVENGGIGSDGNAKQWFINTANFYRQIRNFVIDITATYPDAYVCGLHYQVAQATSLQFVEFRARTGTTQQGIFAENGSGGFMSDLVFNGGNFGIYGGNQQFTSHRLTFNGLTTAVQLIWDWGWAWKSIYIKNCKTGFKLISEDGVRNTGSLLLTDSVFDGVDTAILTFPAQAKFGDGTTGLTLDNIKFVNTKQGIVDTEGTSYLGTSSDIDTFVLGRIYVDQNKLEALSVAYRTKRDPLLVGDNPWGLPKSPYHERAKPQYEKHSASQFRHVRDSCKGDGKTDDTQCIQNILNDSAGKNIVFFDAGSYIITDTITVPPGSVIVGENWSQLVAYGSKFGDATKPRPLIRVGQKGQVGTVEMQDLLFTSKGPTAGVVFVEWNIKSSGNGGAAMWDCHVRVGGAVGTDLTVKECPAGSQNDKCKAGSALMHITSGASGYFENVWLWVADHDIDDPDWQDDNNFMEQCSVFVARGLLVESKAPVWLYGTSSEHAVFYQYEFFNAKHLVASMIQTESPYYQPKPSMPEPFRNAIGALPGDPAYRCDKGETCDSSWALRIVNSSDVMIHGAGLYSWFNDYTQECLQTVDCQKSLIDLQGNFGNVRIHNLITIGAVNMIESDGLTIKAKDNQAVDFHPRWSQISVFDPRQFTDACTGLPLDTNPEIREGEYYAYQVDPRPRHSQLTIVNGSPYDFKLLGDHQYQMLDWDWVSVPAGSSAQFKINWGYGWPVPGDSAGEAYFQLDGTDKTFHVEADWVGSKPGEGRVFLSYTNLETRDVRKGSFLDLGWPVTNGNPIQWVLTGSEKYGFWTNLNPPVTWMQAILDVIGDRKLKYICMPGSHDAGISRIDGHANLGNAQNTRTQGLDIYGQLYRGSRWFDIRPCIGNGGKYMLCHYGEKDMIFHGANGLSVDDMIEQINRFMDEYPGELVILDVNDESGYDTDVPHTLPGMGYYRLTTRQWRPIIERIRDGIKKQCKGFGTGYLGNITLNEFIGDGQGCVLTIVRNIRAPMQPERGLYVYGQLGQTNQYSDTNSARRMGPDQLAKMKLHRRLGPEGHEDTRDGFFILSWTLTYKPGDLLSLMDMASIALNTLFWQAYHQFTPYSYPNVLYVDYLGLPYALDNGWDEQQFFNASSGHMIALAMAVNLQIASQNCYVGGGKMPV

SEQ ID NO: 594 - protein, 416 aa, Scytalidium thermophilum
MYLLLAAALLGAAVLYYLYRSESRLHRPWIPDPESRKFAERPLPPPIDDSFLSSPNYTLPLRTRGRDIVDANGRRFKLAAVNWYGGSDELFVPGGLDVRHRDDIARTIRRMGFNTVRLPYSDELVIKNPVVAPHLLSANPDLAGRRALDIFAAVVEALTAQGIAVIVNDHITTATWCCGADPCDSGWANDHIPSIFCRVRQTEEEWIEHWEEVMKRFVDNPLVIGADLRNEVRGLWGTMPWERWAAAAERAGNRLLRMNPDWLIIVGGTESQNDLTGVARRPIVLDVPDRVVYSAHVYSWSGWGSLGGRYAQRTYPSFVQSMRKNWAYIVEQDIAPVWIGEFGAPVNPGQGDANYWQNLLRYLKVVDADFGYWAINPRKPHENEKESYALLEDDWETPVLDYRMKDLVELMRAGLE

SEQ ID NO: 595 - protein, 895 aa, Scytalidium thermophilum
MAPGPLMLAVSAVSAASTSGSSSDQFSLSPSDQLSIRLSFALAMARTVVDINSNWEFRQADKEDSKFLPVSQFPANVHLDLLHHGLIPDPFIGKNELAVQWVGEATWAYRTTFVSPPVPAGARAVLAFDGLDTFAVVKLNGTTILESDNMFLPYRVDVSAHLAPEGNSNELSITFDSAYLRGCELVEKYPDHKWGCWNGDTSRLAVRKAQYHWGWDWGPTLLTCGPWRPIRLEVYEARVADLAADVDVDKSLERAVVTLTAEVEGPADQVRFELSLNGKQVAAGTAEANAPTISFTLDKPALWYPARYGAQPLYEVRATVLRNDIELDTITKHIGLRRAELVQRPLDGQPGTSFFFEVNNIPIFCGGSNWIPADSFIPRIGRKRYHDWVKLVLDGNQGMLRVWGGGIYEEEDFYNACDELGILVWQDFMFGCGNYPAWPALRDSIDAEARANLRRLRHHPCIVIWAGNNEDYQYQESAGLTYDYANKDAESWLATDFPARYIYEKILADACAALVPRTAYHPGSPWGAGRNTHDATVGDIHQWNVWHGTQEKWQDFDKLVGRFVSEFGMQAFPSVRTIEAYLPQGRDDPDRYAQSSTVDFHNKADGHERRIALYLAENLRYAPDPLEQYVYSTQLMQAECLASAYRLWRREWRGPSREYCAGALVWQINDCWPVTSWSIVDYYLRPKHAYFTVKREMAPITVGIARRTHKHPIPGAHRHSRIGTESRTRIEVWGSNLTLQDANVDCVLRAWDVVTGEETFSQTVASGLVLGANRSTEIVERDVPVRTPGDEGRTVVAAYLVQDGRHVARYVNWPEPLKHVHLQKPKALEARLSPDFASVHISAEVPVKGVALETSDDRVAFDDNLIDVVPGEVVTVAVRGAGADTKIGTRYLGMC

SEQ ID NO: 596 - protein, 421 aa, Scytalidium thermophilum
MKLQLLVSSGLLALASAASIQAPAPRKSYSGYKVFRVDVGSNADRLNAVVDKLGLSTWKGRPRPNTQADIVVPPNVLEAFEAEVAGLNKVTMHEDLGLSIEDETTFGVYAAGSANATWFNSYHAYADHLQFLKDLQASYPTRSAIVTSGNSNGGRAITGIHFWGSSGKGKPAVVFHGNVHAREWITSMVVEYFAYYMLTNSETAEVKSFLDKYDFIFFPIVNPDGFVYTQTNDRLWRKNRQTNSGSSCIGRDINRNWPYQWSVSGGASTNACAEDYKGKAQSDAPETTALANFLQTTKRNQGVKLFIDWHSYSQLFMTPYGYSCTAVAPKDSELQSLARGVASAIRSVFGTSFKTGPICNTIYKATGNSVDYANDVVGSEYTFTAELRDTGRYGFVLPANQILPSGQEAWAGVAYLLKNMK

SEQ ID NO: 597 - protein, 338 aa, Scytalidium thermophilum
MKFNAIALGFVAPANALLRFGCSQLTIQRLDPLVTPGQNPSPHLHQIIGGNSFNVSMHYPEHDLVERSTCTTCQFTEDFSNYWTAVLFFRARNGTFKRVPQLAQLGMEGTKGGMVVYYMSDALFDTAQRSTVTAFKPGFRMFIGDAAANTRDQVRKYRQLTYTCMENWGSRAPESVNFPKRPCKLGIMANHRFPTCWDGKNLDTPNHQDHVAYPEEGTFESGGKCPDTHPVRLPQLFLETVWDTSQFNNEEDWPEDGSQPFVWSSGDSTGYANHADYVFGWKDDSLQRAMDAHTYVVAPMLKTQSIAEQNRCGENFPEMVFEDIDGWLPELPGGNPIF

SEQ ID NO: 598 - protein, 1225 aa, Scytalidium thermophilum
MAVLFQVLPIVVAVAIVIRLLFTGRRPKGLPPGPPTLPVIGNLHLMPKRDAHLQFEKWAREYGPIYSLILGNKTLIVLSSDKAVKDLLDKKSNMYSHRQEMYIGQTLCSGDLRILMMGYDARWRMCRKLVHSLLNISAAKSYVPYQMLENKQMLCEMVTQPERCMYNIRRYTNSLTTTMVFGWRSTTYDDPKMVQLFEGFSEFAELNQTGLAALVDFFPWLRWLPDFLLPVRAKAKELHRKEKALYLGHWLRAKEETKAGTIMRCFSEELVAVQKAEGFSDDQASYITGTLLEAGSDTTSSTLYAFVQAMLLYPEVQKKAQAIIDEVVGPNRMPTMEDERDLQYIRAIVKESLRWMPTTIMGAVPHAVTQDDWYNGYLIPKGAGVVNNVWAINMDPARHPDPRRFDPDRYKDDFQSLADAAANPDASKRDQFTFGAGRRICPGIHVAERSLFLGVSRMLWAFDITPVLDAQGKPILPDPDRLTQGFVCQPEEFPVKITPRSEAHRQKVIEEWLAAEKEWLDPVTKQWRVCPLGPAKGRKDSYSAEVMSASAANERLLQAWSLNHSHFSAPPYHSEILTVKLKSGNICYVHRKVCLYPDPVVHTFLHFLYSNSYDPERFDPPNVWHDEGACKDMSKSRLIILTMAHITGARDLLGPVIDNLHKWVRLMGPVVFLKSLQEAYPREITADQALNEKWSLANDLPMVKEDERMGHNWESTESFRDRIRREWGILRDDQPQAWQLNGEFHIVCESLTEEYINAMRVPGSRWDLENARRKPSDHWQHRRNDSLSDPVVLTFIHFLYTGTYDPARLDPPEDDIVNGYDVAVDLFKTRLVMALVATLTGYRDAFSKPIFDNVEVWIRRVGPLRLLQALEAAYPWPEKIPSNPALQKALADFRSYRIVVEEENMDPATGGVPFEDQLRTALTRSGRSDEIEREIQIVFYPVSQAREVGDGGTVLPQQPSAYSNRHPSEIMSVPEGMQSLYDAWSLPHLPSDTLPYDSEVLTVKLRSGNVCYVHRAIWSGPESQKNLPFPMVDNKTVDMSTYPDPVVHTFIHFLYTKVYYDPSRLDPAVLGPPYYGDGLAKGIFKSDLIMGVLATMSGYQDQLLPQIFPTTTDLLRRRGPLLFLDALKEAYPREITADPELQTALTDAQKYMIVKEGQKYIDKWDRTKDYADWFWEQLNINDWYLREKMKREFQDLPNLVMGAYAKAMVKYLVIEPIGALFGRKS

SEQ ID NO: 599 - protein, 372 aa, Scytalidium thermophilum
MHLQKLVSLLAGSAYLAAAAPVAEGRDPLTTGLRLIKTSPEDPGVWVTEEEKISEYTAKGKHFIDITDITDPEVLAFLSTPDTESAIEARAVAYPTSATRQSVANPLISQVSTSNPQSWLQSLTNFHNRYYRSSYGTQAADWLFNTAKSIAAASHSITVTKFSHSFNQPSIIVKIPGNTTDLVIAGAHFDSTGGSSTARGPGAEDNGSGTVVMLEALRVLANAKFKPKNTLEFHFYAGEEGGLLGSAGIFSNYKSNRKNVLAMLNQDMAGYSPSGLLTIYSDYVDSSLSSYVKVIANAYIGTTASDRCGYGCSDHASARSNGFPSAYVGDEKMSTSSPYIHSSRDTIDRIQWPTVLRHAKFTLAFLVEASYL

SEQ ID NO: 600 - protein, 422 aa, Scytalidium thermophilum
MRLTSILALAGLTSAWVVPPHQETSVSDRPGRFSVKQVPNPNYVPCGPLVLAKAYNKYHVPIPEELRAAVKHVREGFVKRSNGSVETRPGDHGGDREFLTPVSIGTPGKIFNLDLDTGSADMWVYSSLMPENQVTEQTIYDPDESSTAKELDGYTWRITYGDGSRSSGIVYKDVVTIGGLKVKNQSIGAALKVSESFTKDGENDGLVGLSFGTLSTVSPQQQMTLFENLLDDLDGPLSSPLTCGQAPVTGHYNFGYIDSEAYVGSISWVPVNDRRGWWEFLIPGYRVGDGSVEATDLWGIADTGTTLLLLPKNIVKDYYRKVPGSSWHLWYGGYVVPCDVEIPNFSMAIGDSGFMIEIPGDYIKYQKLSRGYCYGGIQSSGQDDAIIGDVMLKSAFVVFDAGLKRLGWAKKKELNFPKSQDD

SEQ ID NO: 601 - protein, 248 aa, Scytalidium thermophilum
MLLNSVIGSAVLLATGAAAHGAVTSYVIAGQNYPGYNGYAPSTTPNTIQWQWSTYDPIYSATDPKLRCNGGRSATQSAPAAPGDNITAIWQQWTHSQGPILVWMYKCPGAFSSCDGSGQGWFKIDEAGFNGDGKTVFLDTERPSGWEIAKLVGGNKGWTSTIPKNLAPGNYLVRHELIALHQANAPQWYPECAQVVITGSGTKEPPASYKAAIPGYCNQNDPNIRVPINDHSIPQTYKIPGPPVWRGE

SEQ ID NO: 602 - protein, 288 aa, Scytalidium thermophilum
MNLLSAVLSFLALSAAPAVAVRPSPGCGKTPRLVNSGSTTTPLRMTINGKQREYFVRLPPNYNNNNPYRLIFTLHALGGNAAQVISGQGGYVPYYGLANLVNDTAGAVFVVPNGLNNGWANQGGEDVTFLRSVITAVEDDLCIDQDRRFSTGFSYGGAMSYSLACSLGSELRAVAALSGNPMISGCSGGTGSVAYYGQHGTQDFVLPISGGREMRDRFLRNNGCTPGQQEAPDPPRGSNAKVKTVYQGCQKPVVWVVFDGQHTPTPRENGQADTWTPRETWEFFSQFE

SEQ ID NO: 603 - protein, 344 aa, Scytalidium thermophilum
MWLKPALAALAASQLAWAQELMRFGCSQLTIDRIDPLVNPGSIPSPHMHQIVGGNSLNASMDPRELNPATASTCTSCTYSEDLSNYWTANLYFRARNGTFKMVPLFANLGLNVKGGMTIYYIRGYQPSARVTAFPPGFRMLVGDPNNRDPNKVPRQLCYRCEHNMQQVPFGGAPCTGSDTKAFPRDTCGGGWRVTVTFPSCWDGKNTDTPNHKSHVTYPATGTFESGGACPSSHPVKIPQVMYEIMYDTRAFNNKADWPADGSSPWYWSHGDPTGYGIHGDYVFGWQGDALQRAMDTKCAGDRCPALKRQTDAEAIACTKKQFARESIGDTEWLKELPGAPPLV

SEQ ID NO: 604 - protein, 279 aa, Scytalidium thermophilum
MALKSFVSLLAAASSSLFVLSPAPAAAEELATCGTTPYFPSEYTCYNDRTLCPFQFSLPTKPCAGGCYSPEQFECLMPSGKGKGKNNDRDDLGVLRPLPEATSPFTLTVWGPRSIFRNMTVRACGGYLAVGANARQCQACTAVGGTDCEKYSNVTALLPDGRMNSGHPDPQYWYVDPLSGILRYTEPVPANATEPIWGSEWAGQNVKVYENGLFIWNREDAKTHYWMACLVTLNGGVHSTGRSWRLYATTSMNLERGDCELVRVVAKAVGENDGVYQYL

SEQ ID NO: 605 - protein, 762 aa, Scytalidium thermophilum
MQIREFLLVWLASVGGLVVPASAARRSTRNRLARSLPETHAVHEKHEKRHLEGWVKRGLVDEDLTVPVRIGLRQENLDKGHDLLMEISDPRSPRYGKHLSPREVVELFAPKPQSVERVKRWLVEAGVDERRLSQSANKQFIQFDAPVHEVEDLLLTEYHLFENVETGAQSIACSQYHVPHNISHHIDYITPGINLATRDFDDKITKRMIGRRSLVGDLPRKYRKGKGGKSGVTSTATRPAATGAAEGRISFDAAANGTQKKKKPELVTVVTESGKRKKKCKPKVPEPELPEPDHPGELDPLFLVTGSCADELTPQCIRAQYQIPNNTRASKGNELGIFQSLNQHYSQEDLDNYWKHVTRWVPHGTHPELRSINGAYGPTNDTSKAGDEADLDFQVAIPLVWPQKTVLFQTDDEWYQRDQQRAETRYPGFFNTFWDALDGSYCTLTAFNMTGNCNTPQCRDPEYPNPNAGPDQGAYHGPLMCGVHRPTNVISISYSGTEHSWPANYMRRQCFEVMKLGLQGITVVESSGDFGVGGRRFDTHGGCLGRNRTVFSPRVLGNCPYVLSVGATTLLEPEYYTPGTTPKLTEVAAERFASGGGFSNVFERPAYQDKHVREYFERANITHLGYNATGGQGYAAIQPPPEPGKLFNLAGRGYPDVSALGESFRVVLRGWPNRVHGTSVATPIWASILTLINEERLARGKSTVGFVHPVLYAHPEVFNDITVGSNPGCGSDGFPVKEGWDPVTGLGTPNYPKLLELFLSLP

SEQ ID NO: 606 - protein, 321 aa, Scytalidium thermophilum
MVQTWGMVGALSLLPCLSHVHALPEQCLGVCVNSHDPSIIRRGDGTYFRFSTGGRIAIHTAPNITGPWTYRGAALPGGSSINLPGNQDLWAPDVAQVGNQYYLYYSVSTFGSQNSAIGIARSTSLDAGTWTDLGSTGVVSNPSLPYNAIDGNLVNEEGTSNYFLTFGSFWQGIHRVRVTPTKQHGSPYQVAFDPRDPAIEGPTVFKNGEFYYLFFSKGSCCGYDRNRPPAGKEYRIMVCRSTSPVGPFVDKQGRSCRDGGGTLVLGSHDWVYGPGGQGVYRDPVLGPILYYHYVDTRIGFADGQKKFGWNRINFSSGWPVV

SEQ ID NO: 607 - protein, 254 aa, Scytalidium thermophilum
MLKSALLLAAAAVSVQSASIPTIPANLEPRQIRSLCELYGYWSGNGYELLNNLWGKDTATSGWQCTYLDGTNNGGIQWSTAWEWQGAPDNVKSYPYVGKQIQRGRKISDINSMRTSVSWTYDRTDIRANVAYDVFTARDPDHPNWGGDYELMIWLARYGGIYPIGTFHSQVNLAGRTWDLWTGYNGNMRVYSFLPPSGDIRDFSCDIKDFFNYLERNHGYPAREQNLIVYQVGTECFTGGPARFTCRDFRADLW

SEQ ID NO: 608 - protein, 314 aa, Scytalidium thermophilum
MMRSIYLGLAAALCWTGALSVNLDAAKDGIDVVALAAQRRALKARFGASHVASLLGIRQSGIQCGPSAGRCPNDLCCSDYGWCGDSVDHCHPLFDCQPQYGYCGWPRLPPTTTVVPTTSSTSTSSTSTTTTITPSSSSTSTTTTSQSSTSSTSTSIIPFPTGELQVTTNGQCGNNTVCIGNPNFGPCCSQHFWCGSSMEYCGPGCRSEFGACVGIPGLPGYPAGNETSPVTSAVPSSTTTTSTTTTSTTTSAAPSFTLPPGQRSSTDGRCGNGVNCLGSPFGRCCSQFGWCGDGDQYCPYIVGCQPEFGYCDPR

SEQ ID NO: 609 - protein, 816 aa, Scytalidium thermophilum
MRFLLALWAVLAVVQAAYWMEDLKRQGVAPYSIVPEYKVFRNVKDWGAKGDGVTDDTIAINAAISDGGRCGGKTCAGSTTTPAIIYFPPGTYIVSNPIVGYYYTQMIGDPTDMPVIKASSSFPTGLLAMIETNPYQSNGKLNFQSTNNFFRQIRNLVFDITDVPGSAASLHWPSSQATVVQNCVFKMATGVDLEHTGIFMEEGSGGLMADLVFYGGKYGAQFGNQQFTMRNLSFYGSDTAIQQIWNWGWTYKSLNIVDCRVGIDMSSTDIGSVTLLDSTFSNVEKAIVTSRAPGNATGLGSLVIENVEYKNVPTVLESADGQPILLGDGNGVVYDTGYAMASGNTYAPRGPSLVEGRSFDFSQPAHLKHGDRYYERSKPTYEDVPASAFVSARDAHAAGDGETDDTKALNELFRAAAGSLAIVFLDAGHYKVTDTVFIPPNIRIVGESLATVILGVGEKFSDPSNPRPVVKIGEPGDVGFVEISDVIVSTQGPTAGAIGIQYNLETQVSDDLCSGGQTPSGLWDVHVRIGGFTGSSLQVNECLKTPEQFNYINPNCVAAYMGMHITPTARNLYMENNWIWVADHDIDDWNATQISVFAGRGLLVEGSRRIWLVASSVEHFALYQYQLVNAEDIWMGQIQTETPYYQPNPLAPYPFTERNEALHDPDFDAACVNDPTFPGGAPCAMAWGLRVVDSKNVVVFGAGLYSFFNNYSTACSTVESGENCQARIFSVEQSSSFSLSSSALLSSRDDSGDDDTAVEVYNLNTIGSVSMVTLGGEDMATWDQNRATFASTLAAFRSVPGDNDNNDDDEVEAERV

SEQ ID NO: 610 - protein, 210 aa, Scytalidium thermophilum
MLYSTVLLGVFAMKAAALPQAVWVCGNGVVDPGEECDLGWGRNGAYNSGCSLNCKTVLIIEQVCGNGVVEGDEECDDGPDNGKDTSDYGEECDDGPDNGSATSTCDATCRLKDTGSGGTCQTCDPNPFLNQCTITTSCINTHPYGKYYCACRAGYRADGLAPTNPRQFRLKFIGQEYRVFVAPGIECNTLCTNPFPGPDSCQEVPVGEGC

SEQ ID NO: 611 - protein, 264 aa, Scytalidium thermophilum
MLSLSTLALAGLAVVGTQATPVEVARRATPTVYLAGDSTMARMSGQHQGWGEYLSRYITLPVVNKAISGRSARSFTNEGRFAEIERLLQRDDIVIIEFGHNDGGSPNNANDNGRSACGGTNYEVCRSGKTGELVYTFNQYIETAARSFINKGAKVIISSQTPNNLWEGGTYYGGAPPRFVPYAQLAAQRVGYGASFVDHFQAVANMFKRLGNQATNALFPVDHTHTSPYGADLVCQAFVQAVWRDFNGTTPLKQYVRQPVPNVF

SEQ ID NO: 612 - protein, 328 aa, Scytalidium thermophilum
MRTVFAAALAALAAQEVAGHATFQQLWVDGTDYISHGSTCVRLPASNSPLTDVTSSDFACNIGGRRGVGGKCPVKAGGVVTIEMHQQPNDRNCRSEAIGGMHWGPVQVYLSKVPDASTAEPTQVGWFKIFSNAWAKKPGGNSGDDDYWGTRELNGCCGRMDVPIPTDLEDGDYLLRAEALALHAMPGQFYMSCYQITITGGTGTAKPATVRFPGAYTNNDAGIRANIHAPLSTYIAPGPEVYSGGTTRAPGEGCPGCATTCQVGSSPSAQAPGHGTAVGGGAGGPSACTVQAYGQCGGQGYTGCTECADGFVCREVSAPWYSQCQPGF

SEQ ID NO: 613 - protein, 218 aa, Scytalidium thermophilum
MLWTSLVGLLAAVGTATAQSTPNARVYDPDTGLTFTSNFQLYKADGRGITYRIAIPEGAEYYTSFDVVVQAILPNDVGWAGLAWAGTMVRNPLLVAWRNNNNQVVLSSRWASSYTAPQPSSAAQYTLIPAGTKNNGTHWQYTALVRGVTAYEATPGAWRYLNPRGGNRLAFAYSPNKPFNPNDPNSGFTYHEVHGYWSHDFAGAQNPNFNEIVQRLTV

SEQ ID NO: 614 - protein, 252 aa, Scytalidium thermophilum
MTSKVIIVTGASRGIGLAVAKSLLAASHKVVLVSRSAEKLQELKDAYPNQVAFLAADITADDTAHRTTELAVLTFGRLDGVVVNHGVLSPITRLADSSVEEWKKLYDANLFSALALTKSAIPHLRTAHGRIIYVSSGAATGAYVAWAAYGSSKAALNSLAKHVGVEEPDITTVAISPGRVDTDMQKELREKGAAMAKKDYEGFVADFEEGRLIKPEFAGAIIARLATDVKTELSGRYFKWDAPELEEYRKGL

SEQ ID NO: 615 - protein, 221 aa, Scytalidium thermophilum
MKTTTTVLAALAAPAAALNPWARHENHPTLTLTVPEPPEVTTSTWTWSPKWPHKSKTTKEPSLTTSTIYSTTTFTVTSCEPAVTECPEPSTVLTTVVIPVSTTVCPVEEEPEPTPEPEPTPEPEPEPTPEPTPEPPTSFETVTTPEVPPPVETGVEEPEQPEEPEEPEEPTPTGSFVEPPPTPTETKTVEPPVVTAGAVSGKVVQKAGAALAGIAIAAALL

SEQ ID NO: 616 - protein, 1000 aa, Scytalidium thermophilum
MFTKTLAVTALAVAPTLASTAVNVYWGQSGTEEQRLRTFCETGSFEYVTVGFINKSPEQDPSGLNYPGSDFSVHCGGDVYKNSNGDPSYLQNRCGRIAADVRYCQSLGKKVLLSIGGDWNPPQANYTISSPPEGEYFADFVWKAFGPYDPSSTTPRPFDDNYIADAGEDEHFVFDGFDFDIEHKFDDQTGYVAMVRRLRYLISQETSKSFLLTAAPECPLSDQWFKMKTIIQEGEFDALFVQFYNNPSCHGVDNNNFDAWVAHLQSTASKDAKVFIGIPGSKDAAGSGYLTPSEVTTLVNKHKNKVAFGGVSIWDVVSGSENCNGQPYYEFVHDLVVGTPALTTSSAAATPTSLPTGCVRYHTVVAGEYCYLIMNAYGLIEAELRELNPSLDGGCSLFPGQQLCVKWGVITTTSTTAVPTTSTTSTSSSSTTQITSSSTSSEEPITTSTVGSTTTSEAESTTTSEAESSTTSEIESTTTSEAESTTTSEVESTTTSEVESTATTEVESSTTSEAESSTTTTSSTSTTPESVPTETPADGEPETSSTSSSATTTSSTTTAAPVETDITEDPEESEEEDPLPSTTTSAVETTSSELPSSTQSVEEISSTTTIDVPSSTPSSEPEEDEECEEDEEEPLPSTTSTPAATTPSSTTAAPVETDITEDPEESDEEEPLPSTTLTSAVELTSSELPSSTQSVEEISSTATTDVPTSTPSSEPEEGEECEEDEDEEEEPTASNSVVETAAPSVTASFTITPSESTTAAVSPSTTESAAPIETVDDGSDDETDSEDLPTPTPNPSFIVSSFLPEDITTSTISWTTSTIYSTTTYTITSCPPTVTKSCSTGQVVTETIAVTTTVCPVTTTAAPTTPEPTSPGGSEEEEEEEKETVTDTEAPQPTATTTPVPGGSDDSNDDEEENGDDVEESTSTAASSWFVGIPSVSTSFTTFTVPAETAVPIVSTGSVKPSTTTTLPPPVVTAGAGRNVGVVGGVGVVVAAVVAAVMAA

SEQ ID NO: 617 - protein, 625 aa, Scytalidium thermophilum
MKTSVSFVALAASASATFLNAPAFPWPGNIDNVCTPQQLPGFNWADLDFGDFFNYKDFIFKGWKCEDATGKRSRITPRTFGKVIGGICHPDKFKSPSFGCGPNLDKFSLGKIVVQPEFDTDLEFHYDMPDGSVCKHRSKCSKKGTTIVNNQCGGAKNVTIIYPPQPNKPKPTCSIKVPTISFDCSTASSTKPPKTTKTSTSFTSTSTVLTTTSSDFTLSTTISSPDVATSTSTLPGDVDSTTPVPITETSTGIVPGTSTTDSETSPVETTDSVSPTDSTSVDVSSSTESTSETTGSVSTETPVTTEITETLTITTSFQSTSTIFTTSTQTITQCEPTKTDCPGNSVTTVIVTIPVSTTICPVTETLTTTTVLTTETSSNLPVDTATPSDGVDTGSSTSADVVVSTSSGVVSSVSPVPTLDVPELVPRCLNTFIFTTGCSDNTDAACYCPDAVFVKNVYDCMYAHGTTDAIIAEAIAFFQGICGKYLPQNPGIATDATVTSYITVTATPSVAPISTTVTLITTTVVPCTDEAGSEIPSSSTTVTISTSIEVPQVDFTSSSTDVVIVPITSSQSVVLPTDTGIITPIPTDTTSTVRPTQSIVTAGSGKAGVSLGFAAAVAAVAALAM

SEQ ID NO: 618 - protein, 535 aa, Scytalidium thermophilum
MRGLFALSLAACVAAAPRASVDTIHSDAAPILSSSNAEIVPNSYIIKFKKHVKDDKVQAHHAWIQEIHSNREAQRADLRKRGLVDDVFRGLKHTYKIGSDFIGYSGHFDDEVIEKVRRHPDVEYIERDSVVHTMRYVEEESKCDGDVEKAAPWGLARISHRERLGFSTFNKYLYASEGGEGVDVYVIDTGTNIEHVDFEGRAHWGKTIPAGDSDEDGNGHGTHCSGTIAGKKYGVAKKANVYAVKVLRSNGSGTMADVVAGVEWAAKSHLEQVKAAKDGKRKGFKGSVANMSLGGGKTRALDDTVNAAVSVGVHFAVAAGNDNADACNYSPAAAEKAITVGASAIDDSRAYFSNYGKCTDIFAPGLSILSTWIGSKYATNTISGTSMASPHIAGLLAYYLSLQPDADSEYGMATITPQKLKDNLIKIATQGALSDIPKDTPNLLAWNGGGCNNYTAIVEAGGYKVERKADDKSDKFDLDDAVSRLEEMIENDIDVASDKVAKGVANLRSKAKEFSKKIHELVDEELKDFLEQVTA

SEQ ID NO: 619 - protein, 507 aa, Scytalidium thermophilum
MLMKTALTALLGLSVITEAASPHHLRPLRSLNRRQDVNASNFNGGNRFGGNNNGGNRFGGNFGGNRNNNNGGNNNNGGNNNNGGNNNNNGGNNNNNGGNNGNNNNAASVTCLAPNAIQTGSQSTGQQGDVPIDGQVNSATDPANFINFCAGQVLTNGLQNRDGSCNGIPMGKIPAFDKMISTVILNPKNGDNLQPLTNFDITIQVNNMQLGFFTNATSTYYAAPQDLNGQGFVIGHSHVSVQDTGGTTNPTTPLDPTKFAFFKGLNDAGNGQGRLTTTVTGGLPVGCYRVCTITSASNHQPVVMPVAQRGVQEDCRYFAVGGGCQDLNNNGGNNNGNGGNGGNNNNNNNGGNNNNGGNGGNGGNNGGNNNNGGNGGNGGNGGNGGNGGFRNRFGNNGGNGGNNGGNNNGGNKNNGGNNNAGARTAGVASASGAIGGIAAPAIENTNDPVRPFRVDGNTFTSKADAAQRACAIQNNACASAVNSGQVQGKTVPDCNAQEAQCRAELSA

SEQ ID NO: 620 - protein, 234 aa, Scytalidium thermophilum
MKLLPTLAAIAATLATADAHYIFNILYVNGQRMGGEYTYVRRNSNSYFPVFPDILNSNDMRCNVGARPGNTQTATVRAGDRIGFKVFNNEVIEHPGPGFIYMSKAPGSVNNYDGSGDWFKVYETGLCRGGGNVDTNWCSYYKDRLEFTIPPKTPPGEYLVRIEHIGLHEGHVNRAQFYITCAQLKIEGPGGGNPNPLVKIPGIYRANDPGIAYNKWTNNPAPYIMPGPKVWDGN

SEQ ID NO: 621 - protein, 349 aa, Scytalidium thermophilum
MRALLSTLLLGLATAVDALQYKGVDWSSVIVEERAGVRYKNVNGQEKPLEYILAENGVNMVRQRVWVNPWDGNYNLDYNIQLARRAKAAGLGLYINFHYSDTWADPAHQTTPAGWPSDINNLAWKLYNYTLDSMNRFADSGIQVDIVSIGNEITQGLLWPLGKTNNWYNIARLLHSAAWGVKDSRLNPKPKIMVHLDNGWNWDTQNWWYTNVLSQGPFEMSDFDMMGVSFYPFYSASATLDSLRRSLNNMVSRWGKEVAVVETNWPTSCPYPRYQFPADVRNVPFSAAGQTQYIQSVANVVSSVNKGVGLFYWEPAWIHNANLGSSCADNTMFTPSGQALSSLSVFQRI

SEQ ID NO: 622 - protein, 459 aa, Scytalidium thermophilum
MAKIRLKSLPMSLVALLGLMACGSLASSSSSSDSSSSASPSNSPSAEVEMICHTDNPEECYPKVFQATDEFQVVRPDQDLPPGLHVRLNINTGLREAKINVPGEHRPDLEGLPVDSDVVVVEPNPPKPEIPKNAPAYDPDGKIKVPKGDGAGEVSAFYKTLTILKKGLDVDGALEMLEDISHDIYYGLKIAEDYDTVHELFCLSTTEATDETTLRRARLATLTLSSTVQNHPKALRQIENHWSQLSSSLCPSSSSTPKRTTPLGTAIFSLLPPTPEPTTEAETTTETITTTNHTTLLPDPSLTKIRVTLVTGLLKSPTLRAQFLAGEGPSHVLQILISPLPSHLGEDAAAAWAATQRRAAQLLTDTFLDADMGAALGEWPSKGLRQLSHKECAALFEVNGGDVAVAVARGREEECLDWHVERLRKQFKRDGDHWSHDLGKKLAEARKNKKTGKKEKEEL

SEQ ID NO: 623 - protein, 631 aa, Scytalidium thermophilum
MRNLRHILHHSLLLLPGATALSAEEWRKQSIYQVVTDRFARTDLSTTAACRTADQIYCGGTWRGLISKLDYIQGMGFTSVWISPVVKQIDGYSPSHGAGYHGYWAQDIWSLNPAFGTEQDLIDLSQALHSRGMFLMLDVVTNHMGYMGCSSCVDYSQFNPFSSSSYFHSPCTIDYNNQTSVEICWQGSTTIVSLPDLRTEDSFVRNTWNQWISHIVSKYSVDGLRVDSAKHVETSFWPGFSTAAGVFILGEIYHGDPAYLAPYQQHMDGVLDYATYYWAKRAFQSPNNTLGELVGGLNTMRNVARDLSLYGSFLENHDVERFASLTQDKALIKNAIAFTILKDGIPIVYQGQEQLYSGTGIPSNREALWLSGYQTDSELYTWISKLNKIRSRAISEDSRHVTYISQTIYSDDHTIAIRKGHSGYQLVSIFTNIGSSKSTTITLTSSATGFGHNEVLVDVIGCVLFTADSRGGLVVGLFNGLPRVLYPRSRLLRSGICPELTDTVTTKTEAPGTTISTATSSSTIATATCTMTSVAVTLNVLATTSWGETIKVVGNTPELGSWSPGSAVTLGASQYIPSNPLWSGTIKLPPGVVVQYKFIRVGSSGTVTWESDPNRTLNVPCAATTISHTWR

SEQ ID NO: 624 - protein, 1550 aa, Scytalidium thermophilum
MWSRAKTGTAALALCVNFVDSVLSLDNTIPNPALSRNDPELFDCPLPCVEYDNIHTWTRYFSVSRLERCNKPMLLQFSTTQLLDDPATTVLIRVCTLTSPSVSGDVPEAGLVEVENPKKSEALFDPKLDSAASCVLATAESDGDLHVAISTGDNSGVEVSVAAGLLEGIKAFFDDPNNCDENFVFAWHNGTVGAAYIGAALGKPSIVSALDILANHLQDNTAFLSNLTVAQLCSSERQRDRSIGIAIDTTADLAGLQRTALGWSQGDCVAVDGTELQATNAIDGLKIFEIDVLHSSSPLRKRDTCDYIQVQPGDGCWALADRCGISLNDFYTYNPDPDLCSTLAVDDYVCCSEGDPHTPSGPQPFPNGTCQYIQVQPGEGCWDLSVRCGISLNDFYDNNPDPNLCSNILPDDYVCCSSGTPYTPPPPEPQPDGTCATHLIQNGDTCAELARRYHVTVEDLEDWNAGKTWAWTNCSGMLLGYNMCISPGYAPLPPPQIDAQCGPLVPGTELPSNRSISLADLNPCPLNACCSNWGFCGPFPAHCEIHAPEGGGPGSKLPGYMSTCVSNCGTDIKVNGPAPASFQRVGYYQSYNFGRPCLWMSAKYANPGGAYTHLHWAFAEIDPNGWHVVINDPYGQWEDFKALTGVKKIIAFGGWAYSTEPATYNILRQAIIDHADDFTQNIAEFLEDEGLDGVDIDWEYPGIRFLTSRRMAASSRSPETDGANYKDFLTLLKSRVGSTKSVSICAPASYWYLKAYLIAEIADEIDYIVYMTYDLHGQWDYGNVNAFDSCPSGKCIRSHVNLTETRTALSIITKAGVPNRKVFVGEASYGRSFHMADPECWGPMCDFTGTRMESDATPGRCTNTAGYISMAEVYEILKYNGSFAELFYDDSSDSDIMLYNGDYISFMSPGIKETRREEWQDLHFAGTVDWAVDLQRFGEDDMNATATRPVDENGEGCIHGDDLTLNSDDLCVFSCRLGFCPELLCECTEVGELNPLPPEKSVNISDIIARDEDDITLTQLCRFACKYGYCPGSVCTTRPQIETVQDIPKERLPDFKEQFKNQCTISDDPKYREAWEIQCRNVCRDVLEQAEREGRTTNYGCVGIYPLDDPDPCCDNWLANEFANMILEALPAIGQIGCGILMSSFRSILKLGLNFFTGGAGRAIDAGSDMLLSAAQMASYLYDEEEDPAGAFEWWLLPCGGSTLVPQDVRDVFDILTSIGDFGGSSSFKPPKNLGKGSGRKGDDGNPTGSARSVSRPSPTRTSSACLPTTTRHSSQKNIVSVITCNSKSQTITTVYVATSVTPAATATTSYVRRVCLERWSQACYHYSSAISRHPDWAELPCPAVAMTTSKDRGSGGRATRVWFSQHSGKGWQSPEHRPYTKDCARDEYPPVYLLDKSHTAMIKGGIDWTGQAIRYLPGGENSGAGSMWKGMCFLPHFNNMPNHELISRVVNGVSTKIVPRGTVTTIEAMIIVDVHPVFTITSWEHTLIKSLTNDGLNDNGCWPSDYAPLDPGFALLTFDPYYGFPTPTPPPYNYRLPIPTATSTATTTP

SEQ ID NO: 625 - protein, 519 aa, Scytalidium thermophilum
MKAAILSAAAAMVAGVSARSHGHRHAHRMLEDRSLSDETCGCTTVYSTIYGTDFTIVPGPKPTSTVDAVVTPTPELPTPIAQTCPTPGTYTFPATTIVVTETTTVCAASTTEVPAGTHTLGGVTTVVTTATTVVCPVATTETQDGTVTSVIKTTTFVCPEPGTYTIGPITTEVPDVTTVVVPVVTTICPGTYTAPEITTTITATNTVIYCPFTSVGAPEPTSEPTSAPQEAPEAPEEPSAPAAPAPSSKTVPTGKGKHWAMTYTPYTEDGNCKAASEVDSDVAAIASAGFSTLRVYSTDCNTLENVGAACRKHGLRLIVGVFIGAHGCSNGSPSVDDQLSALKNWDGWDLVDLCVVGNEALFNGFCTVSQLTSLIERTKSELASVYTGPFTTTDVVSAWQNNDVTQLCAAIDVVACNAHAYFNPDTKPKHAGKFVKGQLAIVEGICNKSGLILETGWPNAGKCYGVACAGPQEQAEAIHSIEDEVGDKAVFFSFRNDRWKAPGDCNCERNWGCAEVFGL

SEQ ID NO: 626 - protein, 339 aa, Scytalidium thermophilum
MARPSIGLFALIPLIMGILAVFPVPSQASQYRLVDVYNWKNFFSAFDFFTDSDPTHGFVQYVDFPTANATGLARIDNRKIYLGVDYTTPTTAGRASVRVSSKKAYTHGLFVADIQHMPAGVGPAGSCALWPAFWSFGPDWPNSGEIDIIEGVHNQLFDMVTLHTGPGCLVRDTGGARPGTVLMRQDCEGFMGCSQWTETPNTYGAQFNANGGGVFAMEWTSRHIKVWFFPRNDAVAIQLADPEHSVSAITPPSRRHRHGHRSLNNLTIDLTDTFSPAGHNQTDNNDDAYSSAPAMMNPSLWGQPLASFLASDTCDFDQHFRQHNLIFDTTFCGDWAGAT

SEQ ID NO: 627 - protein, 223 aa, Scytalidium thermophilum
MQLPLTTLLTLLPALAAAQSGSGRTTRYWDCCKPSCAWPGKGPAPVRTCDRWDNPLFDGGNTRSGCDAGGGAYMCSDQSPWAVSDDLAYGWAAVNIAGSNEMQWCCACYELTFTSGPVAGKRMIVQASNTGGDLGNNHFDIAMPGGGVGIFNACTDQYGAPPNGWGQRYGGISQRHECDAFPEKLKPGCYWRFDWFLNADNPSVNWRQVSCPAEIVAKSGCSR

SEQ ID NO: 628 - protein, 663 aa, Scytalidium thermophilum
MQLRALLPLALLSSASAEPIRIPPRAPNHERSLSIRASPDAPSGSYAPAVVECPKEKPALRRANGLSKSEADWLSKRRPLTVEPMKEFLKRAAIDGFDAEAYINQVAPDLKNLPNIAIAVSGGGYRALMNGAGFIKAADSRTPGTTDKGGIGGLLQSATYLSGLSGGGWLVSSIYGNNFTTIGDLQKGDPETGLWRFDNDIFDGPDLPGIFDTGRYWRRIYNQVSSKKDAGFNTSITDFWGRALSYQLIDAPEGGPDYTFSSIADDDHFSKGEAPFPILVADARAPGVKEITLNASVFEFNPYEMGSWDPTFYGFAPLRYLASNFSNGVVPKDGHCVRGFDSLSYIFGTSSSLFNAFLLQNITSVDGVPDVVISAVTSILETLDEENNDVAQYAPNPFYQWLPATNPTADSLQLDLVDGGMDLQNIPLYPLLQAPRAVDVIFAVDSSADTNFNWPNGTAVRATWERTLLPIANGTLFPPVPDDVTFVAKGLNNRPTFFGCDIANFTLTEGQSPPPLIVYLPNAPYTTFSNVSTFDPSYPLAQRDSIILNGFHGATQGNGTLDEQWQTCVACAVLSRSLARTGTAVPAKCRECFDKYCWDGTVANAQEAGIVPTGGGGEYQPTPKMGWDGVDANTSGAAAAGLGKNKWWVVIVGLGVAGVVALL

SEQ ID NO: 629 - protein, 844 aa, Scytalidium thermophilum
MTTTTLLLLAIMAIFAQTAISLSVPRASDVLKVVGVSIQRQAPRNPVHRDRLRMRKRDSFTAGLDNAETLYYINATVGTPPVSVRLHIDTGSSDLWFNTPSSSFCSSSSNPCAATGMYDPNASTTSQYVNSKFNITYVDGTSASGDYVSDTVTVGPQTLSRLQFGIGYSSSNRQGILGIGYSANEAQVTRGGLPAYPNFPEQLVTDGVINSPAYSIWLNDLDASTGSILFGGVDSAYYTPPLMSLPVEKLKDGKYREFMITLTGLTLGNLALGKGESLALAFLVDTGSTLTYIPNRLAFELFSALGASYDEANGIGYVPCSLASNTSASLSFAFTTPTISVGFDELVLDAYTSSDGSRPRMPDGSPACLFGVAPAGTGTYVLGDTFLRSAYVVFDLANHEVAIAPTRFDLTKDPAALAAATAPGSSTTVKEIGKVGEDGIPGATRVENPVRATEGLKGGRTSGVPPSGMANPFHNSANSVIVNMAYGRNKTLLTPPSIDKGKQDKSVAFPPGPTDTVSALRWSPVSNHLAAASWDGNVYVYDATVATKTESIKPIASIRIGAPVLDCDISKDGTLAAGASADKKIHLLDMPTGQAMEIRGHSKPVRSVRFIDVPFANQPMVASGSWDKTIRYWDLRQPNPVTTIDLPERVYAMDASPKFLAAATADKNVHLIDLRRDNYKVWNTVEDPLGLQLTSLSMTADGSRWAVGCIGGRAVVQGSDDKIENFSKLTFRCHREPHPPQPKTPTDVYSVNAVAFSPADKDVLATAGGDGTFAVWNVQRKIRLRAPFKVENDHPITALAFRTDGKALAYAMGYDWARGYLGNKNAGKEGENKIVLHVFGEELK

SEQ ID NO: 630 - protein, 325 aa, Scytalidium thermophilum
MAIRRRHTIPATFLLLSVLLLLTFIHPTLAACECGYLATIRPDLSDPSTHTTALFTDILETDFSRLLPPANQDGDPSSSIVGTDLAKYTPDWAPQAFNLTAKRARGEYGEMFDVGNVRVVDPAAQGRGMAGDGRTLELVVRKGLVDGMVPVAEVDTRRLDVGYGTFRAVMKVPGVKGTCAAFFWYHNDTQEIDIEFLSKDFSPSRSHFPVNLVLQSRRSAEAGHDASGTENFVQTTLPFDPTADFHEYRIDYLPGMVVFYADGAPLATMTSASGVPTTAGHLILSHWSNGNPLWSGGPPREDAVLKVRSVKAYFNSSDPGCDAGE

SEQ ID NO: 631 - protein, 828 aa, Scytalidium thermophilum
MRTASRLVGALAATAAFLPSALAQNNAPNTFTDPDTGITFNTWGLSPDDPRTQGGFTFGMALPENALSTDSSEFIGYLECSSPDGHGWCGFSLNGGMPNSLLITAWPHENEVYTSLRHATGYAMPDVFKGDAEITQISSKINGSHFSLIFRCQNCLRSDTGGAPASTSSGFLVLGWVQAFPSPGNPTCPDQIELEQHNNGMGIWGAVLDGNAVSPSYPEWAALATHVPEAVCDGEGGGEVEGVPVPEDAEFDYIIVGGGAGGLPLADRLSEAGKKVLLIEKGFASTGEHGGSLGPEWLAGTGLTRFDVPGLCNQIWVDSKGIACEDTDQMAGCVLGGGTAVNAGLWFKPYSLDWDYLFPSGWKARDVQAAINRVFSRIPGTDTPSMDGKRYYQEGFEVLASGLAAGGWSRVTANQAPDQKNRTFSPAPFMFSNGERGGPLATYLRSAKSRPNFTLWLNTSVRRVIRQSGHVTGVEVEPFRNGGYQGVVPVTPVSGRVILSAGTFGSAKILLRSGIGPKDQLEVVKASEIDGPTMISEDSWIELPVGYNLDDHLNTDTVILHPNVSFYDFYEAWINPIEGDKNQYLSSRSGILAQAAPNIGPMFWEEIRGKDGIVRQLQWTARVEGSLGTPNGQAMTMSQYLGRGATSRGRMTITPSLTTIVSDVPYLKDPNDREAVIQGIINLQNALKNVPGLEWAHPDPAISPREYVESMVVSPGNRRSNHWMGTAKLGWDDGRTGGTAVVDLDTRVYGTDNLFVVDASIFPGVPTTNPSSYIVTAAEHAAQRILALRTPQAVPKWGQCGGRQWTGSFFCEKGLTCTPLNEWYSQCL

SEQ ID NO: 632 - protein, 330 aa, Scytalidium thermophilum
MKSLTYAALAALWAQQTAAHATFQQLWVDGVDYGSQCARLPPSNSPIASVTSTAMRCNNGPRAAAKCPVKAGGTVTIEMHQQPGDRSCNQDAIGGAHHGPVMVYMSKVSDAFTADGSSGWFKIFQDGWAKNPNGRVGDDDFWGTKDLNTCCGKMNVKIPADIAPGDYLLRAEAIALHAAGPSGGAQPYVTCYQLTVTGGGNANPPTVNFPGAYSERDPGIAVSIHGALSNYVVPGPPVYSGGSEKRAGSPCEGCEATCKVGSSPSQTLAPSNPAPTSPANGGGNNGGGNTGGGCTVPKWQQCGGQGYSGCTVCESGSTCRAQNQWYSQCV

SEQ ID NO: 633 - protein, 885 aa, Scytalidium thermophilum
MTPLGGLLCLLAGIPLSAVTAHPSRDEHVGRNLNHHHHRSQRELASSPPSYPSPWMDPKAAEWQDAYVKAKKFVSKLTLLEKVNLTTGVGWESEQCVGNTGSVPRLGLRSLCLHDSPLGIRGSDYNSAFPSGQTTAATFDRLLMYRRGYAMGKEAKGKGINVLLGPVAGPLGRMPAAGRNWEGFSPDPVLTGVGMAETIKGIQDAGVIACAKHLIGNEQEHFRQAGEGGFNTTEALSSNIDDKTMHELYLWPFVDAVRAGVGSVMCAYTQVNNSYSCQNSYVLNHLLKNELGFQGFVMSDWQAQHAGVSAAVAGLDMSMPGDTTFKTGVSFWGANLTLAVLNGTVPRYRIDDMAMRIMAAFFKVHKDIHLDPVNFSFWTRETYGPLHWGAQDGHQQINFHVDVREDHHLLIREIAAKGTVLLKNTGGLPLKKPKFIAVIGDDAGPNPYGPNGCADRGCNNGTLAMGWGSGTANFPYLITPDAALQARALQDGTRYESVLTNYAPNETKALVSQANATAIVFVNANSGEGYINFGGNIGDRNNLTLWGNGDDLVKNVSRWCSNTIVVIHSTGPVLLTDWYDSPNITAILWAGLPGQESGKAIVDVLYGDVNPAGRTPFTWGATRESYGVDVMYEPNNGDGAPQQNFDEGVFIDYRYFDKEDTHVIYEFGHGLSYTTFNYSNIKIEKHNAKPYKPTTGKTKPAPTFGQDDEYGYAGHEKYLFPPSPFRRITNYIYPYLNSTDPHEASLDPHYGQTAEQFLPPGALRADEQPLLRASGLHQPGGNPGLWDVLYTVTADITNTGSVTGDEVPQLYVSLGGPQDPKVVLRGFDRLMGIGPGETRQFMAHLTRRDLSNWDPALQDWVVSGHKKKVFVGKSSRKLELSVELP

SEQ ID NO: 634 - protein, 344 aa, Scytalidium thermophilum
MPPPLLATVLSLLAFTRGALSHSHLAHVIINGQLYHGFDPRPNQNNHPARVGWSTTATDDGFVTPGNYSHPDIICHRGGVSPRAHAPVTAGGKVQVQWNGWPIGHVGPILTYIAPCGGLPGAEEGCTGVDKTDLRWTKIDDSMPPFRFTDATKPVSGRAQFPIGQVWATDALVEANNSWSVVIPRNIPPGPYVLRQEIVALHYAAKLNGAQNYPLCLNLWVEKGQQDQGEPFKFDAYDAREFYSEDHPGVLIDVMTMVGPRAVYRIPGPTVASGATRIPHSLQTSAETWVEGTPVAVTRATETVQMEITTTPAGQGAGVRTATPAMPTPTVTKRWKGRFEMGRP

SEQ ID NO: 635 - protein, 1034 aa, Scytalidium thermophilum
MLIKRCLALPYALASLPALGLALLEERFIAFDVDVADKPTAISITNAQIVVAEDDFIGVHIAANSLARDLEAITGIPRAVSNATLTDISVVDDTDPVIIAGSLNSSLIRDLTSEGLIDSSEIEGKWEAFKTTVITVPSSGHKRALVIAGSDKRGTIFGIHTLAEQSGQSPWHWWADVPPQKHEQLFALNKTTVHGEPSVKYRGLFINDEEPGLNNWWARRNNATRYPLNSEFYSHVFDLLLRLKANFLWPAMWNSFTPPPGNIFFTDDPRNQQLADDYGIVISTAHHEPMHRATNEWNVTELGPWDWSKNRENITKFFDEGIARAGKNESLITIGMRGLGDEAAQTENAIKMLEEVFAVQRGIIKKYHGSEDAFPQVWALYKEVTTYYDSGLNPPDDVTILFPDDNQGQAYRLPTGNETTRPGGTGFYFHLQYLGLPRAYKWHNSNNLAKVLKELLHAHLRGANQIWIINVGDLKPMELPLTLSMDLAWNASSISFESLPEYVAQFVAREIGPDIAEEVAEVLMEHSRLVGMRRYEHVTHDTYSTLNFHEAERVLTRWEQLAARVRDLATRVEEARQPAFFQLVQQPVLAGAHFHAVAIKTAFNYRYALERRNSANLLASQVLEEFEAAYDLREEWDAMLDGKWADIMLQAVYDAVEEPKRWANPSRDIAVNLSYVQLRQNMQPSLGNLGIYAEGSTSPINQGRWAESVDASMPTTNYGAVLPQIDPYGPPVRHVDLFMRGDYRVPIEWALDPIPVPWLSITPTNGTLHKDHPDQRLNITISWPSVPTDFNDTVLVGIRAKPSRIPYFDLIRIPVLNRRTPPDFTGFPESAGYVSIEGAHFDRFLSTVAAPPSSLNNNTKADHPRVGFAHIPHLGTRSTSGSLALRPFHAAREDQESARAAVAVFPFYLFTPADNLVATVYINAGLDTDPALKMEFSLTVDAAPANFTRVLGDYIEVPAAGAMPPEWMPQVMDQVWTKRVELGRVEQGERWLVWRTNSPEVYLEKIVLDKTGENVGASYLGPPETKWVRGEFGE

SEQ ID NO: 636 - protein, 298 aa, Scytalidium thermophilum
MHVQSLLAGALALAPSASAHFLFPHLMLNGVRTGAFEYVREHDFGFMPHNNDWINSPDFRCNEGSWRHRREPKTAVVTAGVDVVGFNLHLDFDLYHPGPVTIYLSRAPGDVRDYDGSGDWFKVYQLGTRQPFNGTDEGWATWKMKNWQFRLPAEIPAGEYLMRIEQMSVHPPYRQKEWYVQCAHLKINSNYNGPAPGPTIKIPGGYKISDPAIQYDQWAQPPPTYAPMPGPALWPNNNPQQGNPNQGGNNGGGNQGGGNGGCTVPKWGQCGGQGYSGCRNCESGSTCRAQNDWYSQCL

SEQ ID NO: 637 - protein, 152 aa, Scytalidium thermophilum
MRLSSILTIITAAFTSSITAIPASPNTDNNPIKTLQVREGDHCYESTFHGETFNGSALITDCQQLADSLDGNLSKEVDKYERPYAIHGTCKFLVYNNIRPYHYIARVGDQDVKDIIRDSISKFGRDGRVGARGTMRCNPGNQYVSWSIRREN

SEQ ID NO: 638 - protein, 785 aa, Scytalidium thermophilum
MIFSKLTSLLLLAVGLSAPALAAPTPRQETGWWLASIPRQGRPAFNPDPNYKVFRNVRDYGARGDGVTDDTDAINAAISDGNRCGFGCSSQTTTPALVYFPPGTYLVSRPIIPFYYTQLVGDAISLPTLKAAPDFAGIAVIDSDPYDDTGRNWWTNQNNFFRQVRNFVIDVTAMPLESGTGIHWQVAQATSLQNIVFNMRTDGGEANQQQGIFMDNGSGGFMSDLTFNGGRFGAFFGNQQFTTRNLTFNNCQTAIFMNWNWAWTFHDIKINNCQVGIDMSNGGPGAQTVGSVLVLDSEFTNTPIAVKTAYDPSSPQTNGTLILDNVDLTGSAQGVVNVDGATIQAGNQKVAFFAQGRAYGGPEAAGAPTVGRAVQSALDQVQKPDALLDPATGKVFTRSKPQYENVPVSQFVSVKANGAKGDGQTDDTAAIQAIFDRATPDQVVYFDHGAYLITSTVRVPKNIRITGESLPLILAAGDSFFKNQDDPKPVFQVGQPGDKGAVEMSDLIFGTAGAQPGAILIEWNLAGDQPGAAAMWDVHVRIGGYAGTQLELEQCAKNPNVTNPIPEQCFGAFMMMHVPAGGSVYLENTWFWVADHSLEPEARDQQIDVFNGRGVLFEGDGPVWGWGTASEHSVLYNYQFNNARNIYLALIQTETPYYQGNPDATQPFRVQAKYADPDFAAYCTGERDTPGCKRAWGVRAINTKDSFIYGAGLYSFFDNYAQECLATESCQDHMVSLEQGSQVHFYGLSTKASVNMLTVDGAGVAFDRDNRNNFCATLAFFHPTA

SEQ ID NO: 639 - protein, 451 aa, Scytalidium thermophilum
MSSLMLPFMAGSGNPVHGPPDAPCPRIPPGPGRIDDTQPLRHATSRRPSILSSPGSCLSLLRHTLPTADLYLPVKMHLASSLFLLATLPFGFAAGKGKGKGKDNSDVGLDVLAKKAGLKYFGAATDTPGQRERAGLEDKYPEYDRIMWHSPEFGSTTPTNGQKWLFVEPERGVFNFTEGDVVASKARQHGKLLRCHALVWHSQLAPWVEETEWTPEELRKVIVDHITAVAGHYKGQCYAWDVVNEALNEDGTYRESVFYKVLGEEYIKLAFETAAKVDPKAKLYYNDYNLEWPSAKTEGAKRIVKLLKDAKIPIHGVGLQAHLIAEQHPTLDDHIAAIRGFTQLGVEVALTELDIRLKTPATEENLALQREAYKNVVGACVQVCGCVGVTIWDFYDPFSWVPYFFEGEGAPLLWFEDFSKHPAYYGVVEALTNKTRRSKRSISDRRAKLLA

SEQ ID NO: 640 - protein, 265 aa, Scytalidium thermophilum
MKSLLLALLSVSLALAKPAVILPRAPNPPKALPQKATANDLRWQPVLDFDKDGCYNVPAIDAEGNIAKGLPHNYTGLSSDCRDASDLDNNNVYSRQRCNNGWCAYLYDYYFEKDVAVAHVQNIGHRHDWEHVVVWVRNNKAEYVAASRHNGYTINKASDVRWLGTHPKIIYHKDGGLTHAFRFAKAADEKIEDHKGVWFRGALVSYNGFPSTAIRDKLCAYDFDEVTIAFKDAEFAGNLRKAKPKEIKNFNVGWDDPATGSPGFP

SEQ ID NO: 641 - protein, 352 aa, Scytalidium thermophilum
MRTATALAAAVWAGAVAALPTQTRSTTLPSSWKWVSTGPLVFPKNDERNIAGIKDPTAVLINGTYHVFASTAKSEGYNMVYFNFTDFAEANNAPFYYLDQAPLGYGYRAAPQVFYFEPHKLWYLVYQNGNAAYSTNPDINDPSKWTAPEVFYPNGMPKIIADNIGNGYWVDMWVVCDDEEDPNKALCHLFSSDDNGHLYRSQTTLAQFPRGMSEPEIVLQDTQNIYALWEAACIYRIKGAEGTQKYLLLVEAIGQEGHRYFRSWTSDRIDGQWIPLADTEANPWAGEANVVFEGQKWTKSISHGEVIRTLTDQTLTLDLSEPIQFLYQGVDPNAQTEYNALPWRLGLITQVL

SEQ ID NO: 642 - protein, 481 aa, Scytalidium thermophilum
MRFSVFTAAIAAAFSACCAAASPAVNYVNSLILQRADPHIVKHTDGWYYFTATVPEYDRIVLRRAQTIQGLQSAPETVIWRRKAFGVGSGQVWAPELHYIDGRWYIYVALGVSGQWRIRAFVLEGVGANPLTASWTEKGIIQTNWDTFSLDATTFVANGTRYLVWAQQDPSRNGENSSLFIAPLQNPWTIRGPAVAISHPDLSWERIGYKVNEGPAVIQRNGRIFLTYSASATDHNYCMGLLTARADANLMNPASWVKSQQPIFVSNAATNQWGPGHNQFTVSEDGLSDILVYHDRGYRDINGDPLNDPNRRTRVQKLYWRDDGTPDFGIPVPDGPTPVRLRVAANGASSNGAYVRFYTTTGSGNLTGTAALPDTQFKLVSPGLAGGDSVSLESTSNPGTYVRRVSGTTAVQFERGTALNTAALRASASFRRVPGLSDSGGAVSFESVESPGQYLRLDPNGRLSVASVAEGTQGRSTFYLE

SEQ ID NO: 643 - protein, 243 aa, Scytalidium thermophilum
MKTLASALIAAGLLAQHAAAHAIFQFASSGGTDFGTSCVRMPPNNSPVTSVTSSDMACNVGGSRGVSGICEVNAGSDFTVEMHAQPNDRSCASEAIGGNHFGPVMVYMAKVDDATQADGASASWFKVDEFGYDAGSKTWGTDMLNKNCGKRTFRIPSKIPSGDYLVRAEAIALHTAGQPSGAQFYMSCYQVRIKGSNNGQLPAGVRIPGAYSATDPGILVDIWGNGFSQYTIPGPRVIDGSFF

SEQ ID NO: 644 - protein, 490 aa, Scytalidium thermophilum
MRSVSLLAAAFAPLATAHTVFTALFINNVHQGDGTCVRMAKQGNLATHPVSLNSNEMACGRDGQQPVAFTCPAPAGAKLTLLFRMWADGSQPGSIDKSHVGPMSIYLKKVSDMNTDSAAGPGWFKIWSEGYDAATKKWATEKLIANNGLLSVNLPPGLPAGYYLARHEVVTLQNVTNNKADPQFYVGCAQLFVQGLGTAASVPADKTVSIPGHLNPNDPALVFNPYTQNAATYPSFGPPLFFPSAASAGSNKAQSTLKQTSGVIPSDCLIKNANWCGREVPDYTNEAGCWTAAGNCWEQADQCYKTAPPSGHKGCKIWEEQKCNVIQNSCEAKRFSGPPNRGVKFADMDVNQPVPWAIPEAVNAGQQGEAVVVDGTTSSADEKASENLTTSSLPTPTPAAEENEKEDERLTLDPTLTEDESFFSVEPTSEPTGVQVEVPLTTVVLLPTLTSSLNSLPTPTSISQPAHPGRPCTGRRRRPRPGFPKHPRDF

SEQ ID NO: 645 - protein, 312 aa, Scytalidium thermophilum
MKFLSYFSSALALLGSAVTAHPVFNELMTPVAPLKRATGAFQQVPNFGPNPSGAKFFLYTPNRIAENPAIVVAIHYCTGTARAYYSGSPYAQLADQKGFIVIFPESPYSGTCWDVSSRSTLTHNGGGNSNAIANMVTWTLERYNADPKKVFVVGESSGGMMTNVMAATYPEMFAAGIVYSGTPAGCFYSQSGAVNAWNNTCSNGQINSTPEVWAKMVFDMYPGYDGPRPKMQIYHGSNDNILHANNYRETIKQWCGVFGYDPNRPDTTQSNTPQWGYTTYTWGNGQLVGVYAQGVGHSVPLRGQDDMRFFGL

SEQ ID NO: 646 - protein, 451 aa, Scytalidium thermophilum
MRFLSLTVVATLSRLVSASLQIVPGGTWTTSDGEHLQAHGAGFVYENGTYYMIGEDKSGGHSFTNVNCYASTDLVQWTKVGALLSQQPSGDLGPNRVVERPKVIYNDRTRKYVLWMHMDSSNYGEARVAVATGDSVCGRYQYIRSFQPLGRQSRDMGLFKDDDGKGYLLTEDRQHGLRIVALSDDYLNPTQDVFSWRLEGGNRVEAPAMVKLGGTYYLFASMMTGWDSNDNQYTTATNLRGPWSPWRKFADSGSNTYNSQTTYILKTSENSAIYMGDRWVKDNLMASTYVWLPLQISGTTVTMKNRVNWVPTNQPAFWTAGPTETQYEGENAIYGGRARTVDCSQCSGKRAAGYIGGPDRGTVTFTGIRSDIDGMTTIRIKFLNGDSTPRYAWVRVNGDAGRKVAFLTARGDPASSTLHVSLRRGNSNTITFEGYNGGWGPDIDRLMVPVS

SEQ ID NO: 647 - protein, 445 aa, Scytalidium thermophilum
MRVSLAILAYLLSAAGASPVPELEPRQSGNPFSGRTLLVNSDYSSKLDQTRQAFLSRGDQTNAAKVKYIQEKVGTFYWISNIFLLRDIDVAIQNARAAKARGENPIVGLVLYNLPDRDCSAGESSGELKLSQNGLNRYKNEYVNPFAQKLKAASDVEFAVILEPDAIGNMVTGTSAFCRNARGPQQEAIGYAISQLQASHIHLYLDVANGGWLGWADKLEPTAQEVAAILQKAGNNAKIRGFSSNVSNYNPYSTSNPPPYTSGSPSPDESRYATNIANAMRQRGLPTQFIIDQSRVALNGARSEWGQWCNVNPAGFGQPFTTNTNNPNVDAIVWVKPGGESDGQCGMGGAPAAGMWFDAYAQMLTQNAHEEIARGAAGSGGGNNGGGNNNPSPTNPTNPGPTSNPGGGNCASKWGQCGGQGWAGPTCCEAGSTCTRQNEWYSQCL

SEQ ID NO: 648 - protein, 420 aa, Scytalidium thermophilum
MPLALFHLALLLFWAPYTAAAPSNNIQKRSFKLDRIRNPNFQRHGPRQLLNAYQKYRMPIPQDLLNALETGDEDATSDHRPASASSFRLTEASGSSTGRVPATPANGGIEYVSPIEIGGQTVHVAIDSGSADLWVFSTLLPPFARAGHQVYDPARSASSRVLPNANFSIYYGDGTSASGVVVLDTVNVGGAYVRNQAVQMANWVSATFVQDKSLSGLLGLAFSKLNTVKPVRQATFFENVMPFLAQPLFTADLPHDAVGAFEFGYIDTNKFVGPLTWVQADTAMGFWQVSTSFFRVGDVETQHAPGQAIIDTGTTLMLVSQELVDGYYQHVPDAHRSPVYGGIVFPCNTTLPDLWLDVGGVHMARVRGSDINFGPLKDGLCYGGLQRTTSPLQIWGDIFFRSQFVVFHGGNHSLGLAPRA

SEQ ID NO: 649 - protein, 733 aa, Scytalidium thermophilum
MGIFGLALLAAAAIARAAPNCPVVPRQASGTAAWDTAYASARAAVARLSQQDKINIVTGIGWERGPCVGNTAPVNSIGYPQLCLQDGPLGIRFATGTTAFTPGVQAASTWDVDLIRQRGEYLGAEARAVGVHVLLGPVAGALGKIPHGGRNWEGFGSDPYLAGICMAETIEAIQSQGVQACAKHYIVNEQEWMRETMSSNVDDRTMHEIYLWPFADAAHSNVASFMCSYNKINGTWACESDSVQNKLLKQELGFRGYIMSDWNAQHTTVGSANSGMDMTMPGTDFNGGNVLWGPQLNNAVNSGQVSRARLDDMATRILAAWYLVGQDKGYPQVNLRLNVQGNHKENVRAVARDGIVLLRNEGNILPLGRPSRIAVVGSGAVIGRHAQNGCQDKGCNDGALGMGWGSGSVNYPYFVAPYDAIRERASRDGTQVSLHSSDNTNGVQNVVQGADVAIVFITADSGEGYITVEGHPGDRNHLDPWHNGNQLVQAVAAANKNTIVVVHSTGPIILETILNTPGVRAVVWAGLPSQENGNAIVDILYGSTSPSGKLVYTIAKRPEDYGVSIVRGDDNFREGVFVDYRWFDQNNIEPRFEFGFGLSYTNFSYSGLSITSNARAGPATGQTIPGGPADLWETVATVTAQITNTGGVAGAEVAQLYLTLPPTAPPAGPRQLRGFTKLKLQPGQTGTATFKLRKRDLSYWDVGRQQWVVPSGRFTISVGASSRDIRLTGSIDV

SEQ ID NO: 650 - protein, 459 aa, Scytalidium thermophilum
MVDHSGTLSVSSSEARKVLRGGVKGEVKEGHKKAAVIASSLAWGFFLVTVVHGLGCRSSCSLETSHSFIMRSIALALAAAPAVLAQSQLWGQCGGIGWNGPTTCVSGATCTKINDWYHQCLPGGNNNNPPPATTSQWTPPPAQTSSNPPPNNGGGGGNTLHEKFKARGKQYFGTEIDHYHLNNNQLMEIARREFGQITHENSMKWDATEPSRGSFSFGNADRVVDWATSNGKLIRGHTLLWHSQLPQWVQNINDRNTLTQVIENHVKTVMTRYKGKIFHYDVVNEILDENGGLRNSVFSRVLGEDFVGIAFRAARATDPDAKLYINDYNLDSANYAKTRGMINLVNKWVSQGVPIDGIGTQAHLAGPGGWNPASGVPAALQALAGANVKEVAITELDIQGAGANDYVTVANACLNVQKCVGITVWGISDRDSWRSNENPLLYDGSYRPKAAYNALMNAL

SEQ ID NO: 651 - protein, 533 aa, Scytalidium thermophilum
MRTAKFATLAALVASAAAQQACSLTTERHPSLSWKKCTAGGQCQTVQASITLDSNWRWTHQVSGSTNCYTGNEWDSSICTDAKSCAQNCCVDGADYTSTYGITTNGDSLSLKFVTKGQYSTNVGSRTYLMDGEDKYQTFELLGNEFTFDVDVSNIGCGLNGALYFVSMDADGGLSRYPGNKAGAKYGTGYCDAQCPRDIKFINGEANIEGWTGSTNDPNAGAGRYGTCCSEMDIWEANNMATAFTPHPCTIIGQSRCEGDSCGGTYSNDRYAGVCDPDGCDFNAYRQGNKTFYGKGMTVDTTKKLTVVTQFLKDANGDLGEIKRFYVQDGKIIPNSESTIPGVEGNSITQDWCDRQKVAFGDIDDFNRKGGMKQMGKALAGPMVLVMSIWDDHASNMLWLDSTFPVDAAGKPGAERGACPTTSGVPAEVEAEAPNSNVVFSNIRFGPIGSTVAGLPSDGGNNGGNTTVQPPPSTTTTSASSSTTSAPATTTTASAGPKAGRWQQCGGIGFTGPTQCEEPYTCTKLNDWYSQCL

SEQ ID NO: 652 - protein, 413 aa, Scytalidium thermophilum
MVRSFAALLAVAAVRVAAQTETTTSELPWPTDNLPTYNGTGPTMLRFGCHQLVIDRIDPLVAPGQVPSHHQHQVVGGDAFNPTLPYTDLSALSSCTTCSYSEDRSMYWTANLYFRARNGSYKRVKQIPNYSDIFTHDTFINRTNGGMTVYYVSPGQNQVTAFPPGFRMFVGDAMLRSPPSSPYDLTTQNCYRCFTGPNFEGDIYRPCTDPAVDTMHLPNKMCWGIRSNIVFPTCWDGVNLDSPDHKSHVAYPVEGPHVFDGIGTAETCPPTHPVKIPQVMVEIIWDTTPFNDPDLWPEDGSQPFVLSTGDTTGYSQHADYVFGWEGNALQTAMEAGCFMGNCPGLAVQTVEEAAECVVGEVAGDDYDGWLDELPGNPVQPPVTTTTTAAPEPTGKGKGGKGKKGKKRSLMWSA

SEQ ID NO: 653 - protein, 406 aa, Scytalidium thermophilum
MHKSHTVAAALAAGFRLAAAAPCPSGNAGAPSASDYLWVASYPIIWNQQGKLITLQLDGSNLKTIDASDACGTHPAWVTQAGDTLYCVNEWWGGANGTLSTLSVGSDLSLTKLGEAKTLPGPVSTALYGKDGHGLAVANYAGSGINAYNVEDPSAIQLLQTEYYGSPGDNQPSPQDVAHPHQAVVDPTGEFLVFPDLGADRIRVFKVNQETLALETKEGFVYPPEERGTGPRHVVFYKAGDKTFLYVACELKNLVQGFAVEYSDGDLKLTRIFNTTTHGDDKPLPAGTTAAEILLSPDNKFITVSSRNEKSLEFTLADGTTVASDPLVTFKIDPASGALEFVQEAPAGGVNPRHFSFNKDGTLVASALQSDSRIVVFERDVATGKIGKAIAEGNVEGFPNFVIFKE

SEQ ID NO: 654 - protein, 223 aa, Scytalidium thermophilum
MKLLLPALLALAAESVSAHYIFQQLTVAGTKYPVWKYIRRNSNPAWLQNGPVTDLASTDLRCNVGGQVSNGTETLTVRAGDQFTFHLDMAVYHQGPTSLYMSRAPGKVEDYDGSGPWFKIYDWGPTGNNWVMRDSYTYNIPRCIPDGEYLLRIQQLGLHNPGAAPQFYISCAQIKVTGGGTTNPTPTALIPGAFRATDPGYTVNIYNTNLANYVVPGPRVFSC

SEQ ID NO: 655 - protein, 469 aa, Scytalidium thermophilum
MSRLLTAFRRCLSSVATTAPSPGPTTTTVLRSSVSASSIAAVTAASMVAYTSAVAVLDPAGDIPEDGRNKIHHVKDGSGKTVKFQNPYPSAARETSPWSIAPKILWLTITGKLKMPKPDPSKPETLGVSVVTPNLPSADATRTPPSKLRATWLGHACYFVEFPSGLRVLFDPVFESRCGPHGILGPPRYTPPACSLADLPPVDAVIISHSHYDHLSLGSVKTLAARNPQVQFFVGLGLAKWFRSSGIERVTEMDWWQDAELTLTKKEEGREAKAEEGNQGQQSTTSPDVSNPASTTPNSITARITCLPCQHASGRTGFDFDTTLWASWSVKSGDKSVWFAGDTGYRLHTADSAEEAHKDDNTPDVVITHCPQFKQIGELRGPFDLALIPIGAYRPRYLFSWMHADPYDAVDIFRDTRCRRALGMHWGTWVLTYEEVDEPPRLLKKALKERGLEEEGVFEVCGIGETREF

SEQ ID NO: 656 - protein, 608 aa, Scytalidium thermophilum
MRLLTFTSLLVLTAAHPARYSKWRPSCSEIETPSPSSEASITTDPPEPSTTTPVITHIFSYISTSSAEPTGSWIPPEETDSTASESTSSSAENEISTQSDATSVSTVSTEISTTEEPPTTTFTEPETSTLSEEPSTSEEPVTTTSASEEPTTTPVSEEPTTTPVSEEPTTMPVSEEPTTVPTSEEPTTAVPTSEEPTAVPTSEEPTTEPTSAPTASPTCPEPGTGPRRFKGSVSDVANIGFATLNGGTTGGAGGKVVVVSTLSEFSSAVSEKNTEPVIVVVNGTITGNTKIKVGSNKTIIGLPGSGFVGIGLTFKNQRNLILRNIVSSFVEAANGDGLTIDASTNVWVDHCEFFSTLAVDKDKHDGLVDASHGADFITISHTYFHDHWKGSLAGHNDNNHAEDVGKLHITYANNYWYNINSRGPLFRYGTGHVYNSYYTGMASAINSRMGAKMLVQNTVFRNVNVPITSRDSSELGYATVLDSDLGGRYNDAPEAAMGVCEIGYPYTLIPTEKVAEVVQKTAGAVLGLVEFEEDGEGECLVSEEEVEEVAGARRVCGEEEEESDGEEGEEGGEECDGEGGEDGEGGEEEGDGENGEEGGEEDGEDGDE

SEQ ID NO: 657 - protein, 302 aa, Scytalidium thermophilum
MVSLGFHQLFLYFVAASLPAASALPALAPKDTTSQEYIANGVPLRIMPLGASITYGMGSSDNNGYRAELRSMLLSPTTNLPHAVSVNMVGSRRNGAMIDNDVEGWSGYRIDQVHAVAKASVPAWKPNLVLVNAGTNDAAQNHDIPHAGERMEQMLADVWVLSPRATVLLSTLLLNTNEDTERNVVEINEQYAKLAEKLREEGRRIVLVDMHGPEGPLAEDLPDNTHPSDEGYRKMARLWYKGIEEASNMGFIQPPEAVDGLPDDGEVQYRRGADAKGGAVDAACHYLFGMGEWLGWVPVWVG

SEQ ID NO: 658 - protein, 235 aa, Scytalidium thermophilum
MKFIHILGAAGLAASLPSDPVVGRNDTRAFNEIHNVHIQQGIVRNDLVNGNPGSCPTAIFIFARGTSEFLNMGVVVGPLVAKTLENKIANMADDATLWVQGVGVPYTASIIDSVSPLRTSQDAIDKAIELFNRANELCADTPILAAGYNQGTAVIARAIEDLDQSVIDQIAGVALFGYTLNRQNSGLIPGFPEERTQVYCRWFDLTCRGVLVPYSSLYLHEAHHEGPDFLAGQLP

SEQ ID NO: 659 - protein, 228 aa, Scytalidium thermophilum
MKFFAILSTASLVAALPAAVDSNHTPAAPELVARQLGAIENGLERGNANACPDAILIFARGSTEPGNMGITVGPALANGLESSIRNLWIQGVGGPYDAALATNFLPRGTSQANINEGKRLFALANQKCPNTPVVAGGYSQGAALIAAAVSELSGAVKEQVKGVALFGYTQNLQNRGAIPNYPRERTKIFCNVGDAVCTGTLIITPAHLSYTVEARGEAARFLRDRIRA

SEQ ID NO: 660 - protein, 410 aa, Scytalidium thermophilum
MKASVLALLLPAVAARFVEPNEPNRVHLYPNGVPESSESVEKYHIELAPGETRWVTEEEKWELRRQGKRFFDITDHPDLGALRARSLAKKKAVFPPKPALQPEVEPLLANLSKSEMETHLTKFTSFHTRYYKSEWGRKSSEWLLQQVRSTIKDAGAEGLVKAEPFKHPWGQNSIIATIPGKTNQTIVIGAHQDSVNLWLPNILAAPGADDDGSGTVTILEAFRVLLQSDKVRNGESENTIEFHWYSAEEGGLLGSQAVFSAYERAGRDVKAMLQQDMTGFVKRTLEAGEPESVGVIVDFVDPSLTDFIKKVIEEYCSIPYVETKCGYACSDHASASKAGYPSAFVIESAFEYSDNYIHSTEDVIKHLSFDHMLQHARMTLAFAYELGFADFAALEAGEEGQTGPDHSDSL

SEQ ID NO: 661 - protein, 290 aa, Scytalidium thermophilum
MVASSPFKGALLLALGGLSQRAAAACTRTITAQPGDSCASLARAAGITMTDFLRSNPDVYDCNNLIPGYAYCVQGVADPGSGGSQPISKDGRCGGGVTCSNSGFGDCCSQAGYCGSTLDHCGTGCQPQWGVCLGPGGGSSSSARPSTTPGGGNPGGPSTVTVTVTRTTGASTVTTTRTVSASATSTVRLTSIITSVSTITSVSTSTRLVTATTCVGSPTTVRTTATPSPTGRPIIPGTPTNCWSYDQILTGDSCRSLAQRNGLTLLDFYAMNPQIDCDRLLVGWYVCVRR

SEQ ID NO: 662 - protein, 334 aa, Scytalidium thermophilum
MFSTFILLLSAAAAAVAGPIQPRAARTSPPPGCLVVGGSGQYRTVQSAVDALSKTSTSPQCIFIYRGTYREQVYIPQLKSPLSVYGETTDTSHYWANTVTITQGRSQDDSPNNDATATLRAHTPDLKVYNINFVNTRGKGSQALALSAQKDRQGYYACQFKGFQDTVYANDGTQVYARSYIEGATDFIFGQRGKAWFDGVDIAVVAASTGYITANGRDSSSNPSYFVINRSSITARQGDVVNRGAYYLGRPWRAFARVVFQDTFMTNVVNSAGWAIWNNGDPRTSNVEFDEYRNLGEGANGARANFARKLSSPVRIETVLGNDYRSWVDTSYLS

SEQ ID NO: 663 - protein, 286 aa, Scytalidium thermophilum
MRLPTSLTLIAALLVPAISAWDAPYYDGWHLAWSDPFWGPAGTFPDEASWNILDINLHVNNELQTYRRDSRNVQISGGGTLQLVPWRDPVFQWTSGRVESKYTFVPHAGKRTMAEAMIRFGGNPIHTKRGLWPAFWLLGDSIRQGTPWPACGEVDILETVNGLLTGYGTVHCHMYPGGICNEPHGRGGPVGIPSQDWHRWRVIWDRTSGDWRAETITWFMNDQQFFQVRGSDINDYEVWASLSARSLYFILNVAVGGDWPGYPDGNTQDGYGAMMEVGYVAQYYSY

SEQ ID NO: 664 - protein, 248 aa, Scytalidium thermophilum
MTLRSLFLLSAATILGPIRASAEEILFCGTAPYYPSEYTCYDGHFLCPRLYGQATLPCGGACYSPDMYWCDGAQQLQLLPRMAQGTPFKIVVQSDVPALNNRQLEVCGLQFRAGPDAQTCVYCFNAPPQYVCSEYQNKTVLLPSGSMSVSVPGGQYWFVDQTNGRLRTTAAGKAAGEGLNLAGFGVTIYHEGYFSYDGTSHWLACREPGNAEVYGIFAPIPGSPEGCHRIKLATELSTVPKEGAYSYT

SEQ ID NO: 665 - protein, 342 aa, Scytalidium thermophilum
MRFSWIIAGASLALAKPKKANFDTLVTFGDSWTDNGRLGYYINNGGKAPPPGQMHPESTETASGGLSWAQYAARDANAALRDYAVGGAVCSNSIVARHFAMINRTFPAIVDDQLPSFKTDIKFKSLYPHRTADNTVYAVWIGTNDLGFDAFLSDSQAPGKTISDFVSCVFGVLDEIYKTGGRRFVVLNAGPLELTPLYAHPDNGGTYDSMFWTTKTQYNITQYSQKIREFSTSVNTMYEYGLPVMVQLKKRWPKATVDLFDVHSLFLDIYQRPTKYLSKPYNVNSYYHQCEPAGSPCVDLPGSLDGYMWFDELHPSNKTSAIVAEHFLDVVAGRSKYGTRLQ

SEQ ID NO: 666 - protein, 396 aa, Scytalidium thermophilum
MLFKNTLAGLALLAGLAAAHPGHNVAQEAAERREYLQSVKRSSLAHCADKLRARGIEARNIARRNAVVEKARQKRGITKRGFEDVLNTDHDKTGQGFSRNTDPETLFAGYNSCLLTPETTEGPYYVAGELVRENIVEDQAGVPLLLDYQVVDINTCEPIPDVYVEIWHCNATGVYGGVVAQGNGDSSDQTNLDNTWLRGIQPTNEDGVAQFESIFPGHYVGRTTHIHIAVHANATLLANNTLGHETFASHVGQAFFDQALIDAVEKLAPYTDNRQPLTTNRADWIMAQEAGTDGVDPVMEYTLLGDKLEDGLFAWLAFGVNSTFVRKVQPAVLLGPDGGVPNPNGGFPGGGFPGGPGGPGFPGFPSGFPSGFPTGFPTGFPGFPQPTGAPAPAPTP

SEQ ID NO: 667 - protein, 775 aa, Scytalidium thermophilum
MLLHPRLVAGLAALWAAGGANAACSSNLLVDDFTRWTTGLNNLDWQNGDDGSMNAIAASAGRVVFIPKSANSYFYESFECILAATEGYASVQFTVEGPAGGSFVLEAQTTSSCAADRSTYKSSWYYVDGLTGQRQTITLPLSGFSDDPNTNALVGLVWGSFSQAGVQWSVGNITLVCSNPAPTTAAPTTSTVRQSTTAPITTGTGSPSSCPHRLIDDWESQSRLTFLGYNAMGQASGDDGTMTSVVVRDNRLNLTPRNANSHFWSQFGCLDARTYGGISFRVRAARGTTFSITLGYVNSCGASTVQTVTRTTTQLGWTFDGTERLYSFPLSAFAGLDTSKLAMIYFSGFNGGVAFGPMAFYCGSTASEYNLPQAPIPSPVTRSTSAVNVPAPTQALVIDTFSNQARNNLGAWHGSDDDAAMGITFGNNAMTIQTNDSDLSWYTQLQGGCADIRSYAGAYLHIAFTGSNKFSVALQQHNALCDETIKPFPETWDSLEAARYLATPNDIYMPLNHFHINFTRAIGFALKGFYTPNPTTITKIEIVPSPPAGYRPPTKLASGKLVFACTRPNSIAFAIDDGAPHFTRRVMDIINQANINVTFFTVGLPLLDSSNGLAAAYREMAARGHQIALHSYTHPKMEGLPDISDIDWEYSNSIGAVRQVFGASGVSSYFRPPFGTEGARMRQRLAANLGDPEPYIVNWSIDVEDWLWAMSDTPYKQLDAFKRDLEKGGNLVVMHYLYESTVELLPEFIRLAKATGKRLMRVDQCLEDPRAPPLT

SEQ ID NO: 668 - protein, 238 aa, Scytalidium thermophilum
MVRHAALAALALLPFSLAQVTVSEDFESGWNQAEWPTYAPDCSQGGRVSLDSSTAHSGRNSVRVDGAGGYCGHIFFGTDKIPSGDLYVRTWLKASRAFTDAHVTFITMPDPAQGTKKHLRIGGQNRILMWNREQDDATLPELSPQGVASSAQLPANQWVCFEYKVGADGSIETWLNDAPISGLTYGPGVSNPYANQWQRSSIRPRPSAVYFGWESYGGDSNTFWYDDIVISSSRIGCQ

SEQ ID NO: 669 - protein, 253 aa, Scytalidium thermophilum
MLAETVITGLLLASSAVAYPAPNPVQFLKRAPEAGVVIQRCANPGQLALAYDDGPYQYTSQLVDILDRGGAKATFFWTGTLYGCIYNQAAAVRKAFASGHQIASHSWSHGYMGNMNEQQIRSEMTRLEEALVNLIGKKPAYMRPPYLQTSGVFLPTMRAMGYKVITNDVDSGDWNNQSPQQSQQAFQRAGTSGPGHIPLMHETYASTVNTLTPWLINWANQNGLKLVTVAECLNDAEGMYQPGNFTGNGRNYC

SEQ ID NO: 670 - protein, 219 aa, Scytalidium thermophilum
MKFFATITTLFAGLAAAIPVTEVNSHELDERQLAPSGHEVEIRGVSYGGSGCPGGSVGYQISDDRTTITLLYDEFIAQAGKGIEPKDRRKNCNLNLKLHYPQGWQFSVFRADYRGHVTLPEGATGKATANYFFSGGTGQITTKGEWTGPIDEDYLKQDNFSLISYAPWSPCGFSGMLNINSAIQVNPLRLQEPALLTAESTDLTFKQIAYLQWRKCKKN

SEQ ID NO: 671 - protein, 398 aa, Scytalidium thermophilum
MGRLFTSTTLALLAAAPGFIPGVQAQAPLYGQCGGIGYTGPTNCVAGSVCTAWNDWYHQCVPGTSTSSSTSTSSSTSRTTVVTTTTTPVTTSTSTFSWVSTSSSTFTTATSTRTSSSALPTNTGDPCSLKFLITFGDSYSQTGFDITGTKPSTSNPLGNPPLPGWTASGGLNWVGFLASQYNTSTLLVYNFAYGGATTNASIVEPYREDVLSFIDQVSLFSGSIASKPSYAPWGDNALFGVWMGVNDVGNSWWKEDYEEILERVMDSYFGQLQILYNAGARNFVLLTVPPIHRTPIMMLESAEVRAAEAAAIDKYNEALATRLAAFKAKNNDISAKIVDTAVPFNKALDNPAAYGIPNATCWNNDGTSCFWFNDYHPGVTINRFVAQAVADAWKDSYF

SEQ ID NO: 672 - protein, 423 aa, Scytalidium thermophilum
MKLLLNLPSLLGVLCASTLAAAASLTQITTPFGPNPQNVSFYIYVPDTLPPNPAILVNPHWCHGTAQQAYAYSQYATLASRHGFIVIYPGSPNSADQCWDVSSRETLTHDAGGDSLGIVSMVRWTIDRYHADPRRVFVTGVSSGAMMTQVLLGAYPDVFAAGAAFAGVPFGCFAAPGNNSGQHGYWNADCAEGRVVRSAEEWGDLVRAAYLGYHGWRPKVQLFHGTNDEIVSYVNHVEGVKQWADVLGLDETAPAAVVKDTPLPGWTKTVYGEGGWLEAYSAEGVPHDIRVQETTVVEFFQLDCAGTGCFSWGQGSPNGGSSSGSVTPILSTSTAVTAPPPSTPTMLSTAKTQRPESITSTTNTGDQTPTPTTPTAGCTTRVGGVPLWAQCGGMGYIGPQQCANGVCKSYNPYFSQCEPTSCP

SEQ ID NO: 673 - protein, 382 aa, Scytalidium thermophilum
MKFSLLFAAAVADVALAGKKVPGPDKDGRYTISAKGIKAQFIPYGATLTNLYVKDKNGKPIDVVLGYDDVDYYPIDPGHPVYNAIPGRYANRIGNGQYTIDGVTYYTEKNDGPNTLHSGTNNWSYRFWNVTAFSHDSITFSLLDESESSKGFPGRVEANVTYSVSENTWNIKITARSLDQKTPILLNQHTYFNLDAYRNPATDKIWDHLLYLPYSKRYLAADQGSLPTGEILTAEPGSINDFASSPSLTVGHARDQPGFEGNCGANGACEGYNGYWLIEDAPKDAVVVTLASEFSGVKAELRTDQAGVVLYSCNWSDGSAKLKKTQGIKGKHETVTRSSCIAIEAQDWPDGINHPEWNRLEHQIFGPGQTYNWESSWTFGLL

SEQ ID NO: 674 - protein, 298 aa, Scytalidium thermophilum
MRLPQVASVLALAAQVHGHGYIYRVTADNIVYPGYDIYVDPLLQPPPYRIAYGGGQTGPVYDINSKDIACQRVHSPAPGLIAQARAGSNITFWWSRWLYSHKGPISAWMAPYEGDIADVDVNELEFFKIGEEFHDETGKWATEKLVDDPEGKWTVQIPADIKPGLYVVRNEIIALHFAVRMPPFFAAFTPLGPQFYMTCFAFNITGDGTATPQGYKFPGAYSKDDPALWWDLEENKDPYPGAGPKPHVSAYDVDLVPNELYIVSPTNNATADELYWEAQRQALAAQAATTEYFDSIGG

SEQ ID NO: 675 - protein, 135 aa, Scytalidium thermophilum
MKLTLLLATSAAFLGVASALPTDTEEVAPNGIGKVTWFYPGLGACGKRHTQNDMVAALNSQEFDRYGPRNDPSKNPRCGNILRVTYGGKSVDVTIVDRCEGCVRGGINLSPAAFGKLANLDVGVIYADWRWIKWD

SEQ ID NO: 676 - protein, 137 aa, Scytalidium thermophilum
MFANTITFLLATSAALLGAAAALPTAEADKALSPRADGKFTWYYPGLGACGQWNSENQLVAALNAADFDPYTPNGNPNRNSLCGRRIRANYNGKSVEVTVVDRCPGCPRGGLDLSPAAFQRLAHLNAGVIYGNWQWI

SEQ ID NO: 677 - protein, 861 aa, Scytalidium thermophilum
MKSLLLLAAIGLAAAEDGLAAWLRYARIDNPKTCLAKLPSTIITLNATKGLPVYTAGEELGKGIDGILGKRLEIDERDENGKPRGGKKPAKDSNNAITVGTVAAYAKANPKEAAKLPKLGDDGYYLSVSRGKALILGQNERGTLYGAFRWLQLLGQGNCSDFTLASTPDAPIRWVNQWDNLQDGGTHGSVERGYGGDSIFFWDGYVRPDLTRARLYARLLASIGLNAVVVNNVNADPRTLTPELMDGLARIADEFRPYGVQLALALNFASPQTLGGLDTFDPLEPSVQAWWDNITNELYRRIPDMAGYLVKANSEGQPGPMTYNRTLADGANMFARSLKPHGGIILFRAFVYDHRNLNQTLSWKADRARAAVDYFDGLDDKFDDNVVVQIKYGPIDFQVREPVSPLFAHLVKTPTAIELQITQEYLGQQAHLVYLAPMWKELLDFDLRVDGKPSRTRDIINGSRFNRKLGGYAGVVNVGTNTTWLGSHLAMSNLYAYGRLAWNPSETSEGILSEWISLTFSSDRKVHDVITRMSMLSWPAYENYTGNLGIQTLTDILLGHYGPNPASQDGNPWGQWTRADEDSIGMDRTVWNGTGFAGQYPPEVAELYEHPETTPDNLLLWFHHVPYTYVLKSGKTVIQHFYDAHYAGAETAQTFPQLWQTLKGRKGIDKERYEHVLFRLTYQAGHAIVWRDSICNFYFNKSGIPDELGRVGNYKYRIEAEAMQLDGYVPYDVSPFEAASGTKAVVTKTNSTVGTVSAVLKDLKTGLYDVAVNYYDQAIGNSTWDLYIDRTHVGRWKGDLEYILGRAPSPYIDGQTAARVTFPKVQIKKGSVLKIVGRPDGEEPAPLDYVSIFPHGKGIVD

SEQ ID NO: 678 - protein, 318 aa, Scytalidium thermophilum
MRPFSLVALATAVSGHAIFQRVSVNGVDQGQLKGVRAPSSNYPIENVNHPDFACNTNIQHRDGTVIKIPAGATVGAWWQHEIGGPSFPGDPDNPIAASHKGPIQVYLAKVDNAATASPNGLRWFKIAEKGLSGGVWAVDEMIRNNGWHYFTMPQCIAPGHYLMRVELLALHSASFPGGAQFYMECAQIEVTGSGNFSPSETVSFPGAYPANHPGIVVSIYDAQGNANNGGREYQIPGPRPITCSGGGSNNGGGNNNGGGNNNGGGNNNGGGNNNGGGNTGGGSAPLWGQCGGNGYTGPTTCAEGTCTKQNDWYSQCTP

SEQ ID NO: 679 - protein, 294 aa, Scytalidium thermophilum
MLPSLRLPLPRRLRRRRMAVLALAALVTLLLILPLYSIYKPPSLLIRYLSHRWTDVLFRVWLPSDQKLVALTIDDAPSQHTPSILAALAANGAHATFFVIGSQIKGREHMLREILRAGHELGNHGMRDEPATKLGTRELIRQIVEVQRAIEDAYRAEGLRPPAGPTADELEKEMDDAVRDVEEDMHTSWPGHGSRRLRRYYRPGSGFFSERIRGVARRLGYRVVLGSIYPHDAQIWWSWLNARHVLSMLSPGGIVVCHDRRSWTEPMLRRVLPAMAKKGYKAVTLSELLDQTTG

SEQ ID NO: 680 - protein, 385 aa, Scytalidium thermophilum
MGLSFKTLLSLAAAAGAALAAPPKPSPFFLNHTIYKPPSTADRIMYPRIAELRDGTLLVTANVFGSSFFGPGADGSLASFPVFESRDEGRTWKWISNITDQVNGWGMNAQPAILELRRPIGGYRPGTVLAAGNSWSGSGTRIELYASKDKGRTWEYVSRVAEGGRPNTTNGADPVWEPFLLHYEDELIVYYSDQRDPKHGQKLAHQRSKDLKNWGPVVNDVAYYDEYLARPGMTVVAEIPPLKKWIVVFERPIGNSSSHGVNYPVHYRIADKPTEFDKAESIPIVIDGTFAPNASPYVVWTPYGGKNGTIIVSDADNSDVFYNRRGGDPAAWKRVKTGQREAYSRALHIFEKHPERLAIIGGDTFDGSEYELTLGVLDLKKLLKE

SEQ ID NO: 681 - protein, 783 aa, Scytalidium thermophilum
MAPFKAYLISLLAAAGTVLAHPREYIPRFSQKQIDSGEALSVLNKIATANAYKNFGGHCNKSNVKIRREWRTIPKPQRRQFIAAVKCIMAKPSNLPPGEVPGAKSLYDALVWAHADRTGYSHMSGTFLLFHRYYLHTYERELERCGWDGGLPYWEWGLDADDPRKSPVFDGSDTSLGSDGEFIPGREPQVLDFPGFDEPLILPPGTGGGCVMKGPFSDMVVRLGPYNIDPRDPLPVHPIEGREDNPRCLDRDLNSWALRRWSTFHNTTTMILRHDRIREFHGELEGDPRVQREPSGPHGGGHSGIGGLANNPVISPYDPAFWLTHNQLERLYWIWQMLDLKNRQEVHGTGTYMNMPPSPNVTPVDGELVLDANWRWLHEVSGTRSCYEGNSWNSDVCRTSQACTANCALEGAQYREYGIIAPATASDNTSVIQRLRTNLDSRYNKGSRMFLLESRNRYQTFTLLDHELAFDVDLSTVECGINAALKFVPMDADGGQARDKGNEAGAAYGTGYCDASCPRDLHFVPERGANVEQWTPSNTDPNGGQGYWGSCCPQMSVWNSNVHSFSVSTHTCAYPGREEQGPWICEGQAGCDPFYIDPEERGRLSCDYFGCSFNPYRMGNPWFYGKGKQLDTTRKFTVVTRFSETNVTQFFVQDGRRINVPTPFGLPGLPPEAGLSDDMCFTQPAVFEERGRFTEIGGWLKHIKQILTQPMVLTFSIGVDHLTWNTWLDSIYPPYDPATTPGRERGPCPVEENDPRSVEQKNQNAQVIWSNIRFGPIGSTVKL

SEQ ID NO: 682 - protein, 602 aa, Scytalidium thermophilum
MILFPVALLLSLILSPCAAAPEAYKVLKAPLDTPWTDQGRQTPWAATYPRPQLRRDAWLSLDGIWTYQPASSDGDPQPPRLPLQKEVLVPSCIESALSGIQEMGVTNMLFGTQFTVPPRWANNHRVLLHFEAADYEATVFVNGAVAGTNRGGYTRFSMDITDKLTNGPNEIHVFVFDPTDDASIPQGKQTKRLSHIFYTPCSGIWQSVWIETVPVNYISGLDVSADMTGNVTVTVRTNKQQEIPVEIHLIDLKTGEDVAAEQRMSDRTFWFKVDSPRLWTPDSPTLYNITVKMGDDFVTSYTAFRTISAGRVNGVLRPLLNGRYWPDGIYTPPTPTAMIRDLQLIKQLGMNMVRKHIKVEPEVFYEVCDRMGLLVMQDMPSMRVFDHHRPTDDEQAEFGRQLEVIIHQLRNHPSIVAWVIYNEGWGQITDYFPEFELTERVRKLDPTRLIDATTGWHDHGAGDFHDNHHYAEPQCGTPWFSLPNVGHDPGRIAIQGEFGGIGLRPNAENVWPLRPAINTINETYEIHSNIESYHYRARVLLRLLREQVQKYACSGAVYTQTTDVEGEVNGLMTYDRRVVRIDEKAWKEDIAALFEAANGRAM

SEQ ID NO: 683 - protein, 296 aa, Scytalidium thermophilum
MKGLLSIAALSLAVGEASAHYIFQQLSTGGTKHPMWKYIRQHTNYNSPVIDLASNDLRCNVGARGAGTETVTVAAGSSLTFHLDTPVYHQGPVSVYMSKAPGSVSDYDGSGGWFKIQDWGPTFTGGGATWKLDDSYTFNIPSCIPDGEYLVRIQSLGIHNPWPAGIPQFYISCAQVRVTGGGNANPSPQVSIPGAFKETDPGYTANIYNNFRSYTVPGPSVFTCSGNSGGGSNPSNPNPPTPTTFTTQVTTPTPVSPPSCTVAKWGQCGGQGYSGCTNCEAGSTCRQQNAYYSQCI

SEQ ID NO: 684 - protein, 383 aa, Scytalidium thermophilum
MKLWSFAAAAAAVGSVSAFNLPQFAQDAIDSGLALAALNGIALVNSATRFGGSCNIANVKVRQEWRHLSATARKKYIAAVQCLMTKPSLLPEGVAPGSKSLFDDFVFVHLNQTFFIHQTGNFLIWHRYFLHIYEKKLKEECGFTGTLPYWEWGYDVNDLRASPVFDGSDTSMGSDGEFVPGGPMSIEIPFNPGPIVLAKGTGGGCLFKGPFKGMQIRLGPATQPDPTQDNPRCLSRDLNVDAGRRFATFRNTTETIIHSPTIEIFRTTLEGDPNYVPMSLGIHGGGHFMISGDPGADAFISPGDPAFYLHHGQVDRVYWIWQMLDYENRRGVFGTNTFLNLLPSPNTTVEDYVDLGHLAPPIKIKNLMSTIGGEGSPLCYLYL

SEQ ID NO: 685 - protein, 546 aa, Scytalidium thermophilum
MRISTATAVPAVLALALSLLPTASCAGVPHPEPRLPHDTAAAAAPPVERSGPVFPFLRWLRDSAVEAVFGKPSSYKPKTRQPPAATIRSRYRNDVVIRFNVTTSEEEGALARATEQMLLDVWAFTPDFVDIRMAKDDVPSLLSLLPKSLEPSVLIPDVADAVWATFPSAEEDGLSVLLESSFAASRKARRPVDGVGDIFFQNYQPLSVIESWMRLLEVMFPSIANLTSIGKSYERRHIYALRVGAGSKASDSSNPRKAILVTGGVHGREWISTSTVSYLLWSAITLYDNEPFITKLLQEFDIIFIPVLNPDGYEYTWQTDRLWRKSRQQTKVRYCRGMDLDHSFGYGWDAVERDTDPCSESYGGEKPFQATEASRLAHWAKNQTQSGTQIVALLDLHSYSQQILYPYAYTCAVDPPNFENLVELAVGLAKAVRLSSGESYTVSSACQGAVQLEKGTSNSLTRLETSGGAAIDWFFHKLKTRYSYQIRLRDTGSYGFLLPPDQIVPTGEEMLSMLKYLGDFLLGNNGIEGPFQQRPLGSGHDLRRRR

SEQ ID NO: 686 - protein, 332 aa, Scytalidium thermophilum
MKCFLVTCLSLAGLAFAAPKPKAATVAGGDITPALLQTFHKYLQWSEAAGCNNQKPAGATVTCEPGQCYLFEPHNATVVASFSGALLDTRGFVGVDHVDKIIVVSYRGTTSVRNWIANILFAQSSCDLVKGCLVHSGFYGSWNEVKSATLNAVAQAKKANPTYKVIVTGYSLGAAVATLAAGYIRKAGHDADLYTYASPRVGNLAFVEFITNQPGGEYRITHKDDPVPRLPPMIFNYRHTSPEYWLRENDDGVVTPDEVTYCPGYSNTDCNGSTSGLDDTNHGGYFQIITGCGVPVMPWKRDLTDKELQEKLDFWAQLDREYAKTLHENGQQ

SEQ ID NO: 687 - protein, 887 aa, Scytalidium thermophilum
MGHHTATVCLWLALGSLTPVSFARVVEPRDPVPQGYHAASYYPAPHGGWVSSWREAYEKAYALVSQMTLAEKVNITSGVGIYMGNTGSVDRLGFPQLCLQDSALGVASADNVTAFPAGITTGATWDKQLMYARGVAIGKEFRGKGANIHLGPSVGPLGRKPLGGRNWEGFGSDPVLQGKAAALHIRGVQEQGIIATIKHLVGNEQEMYRMYHIFQEGYSANIDDRTLHELYLWPFAEAVRAGVGAAMTAYNAVNGSACSQNSYLINGILKDELGFQGLVMSDWLSHISGVSSALAGLDLNMPGDTNIPLFGNSLWQYELTRAVLNGSVPVDRLNDMATRVVATWYKFGQDKNHPRPNFSSNTRSRDGPLYPGALFSPSGQVNWFVNVQEDHYLVARQVAQDAITLLKNNDSLLPLDAGDLTGGKLSVFGTDAQVNPDGPNSCLARACNKGTLGMGWGSGIADYPYMDDPIGAIRKRVPDVKFYNTDSFPWFFGTPEDDEVAMVFISSDSGENTLTVEGNHGDRDSAKLRAWHDGDKLVQKVAEKFKNVIVVVHTVGPLDLEPWIELPSVKAVLFAHLPGQEAGESLTNVLFGGVSPSGHLPYSITRKASDLPDSIANLKGFTWGQVQDTYSEGLYIDYRYLQKHSIQPRFAFGHGLSYTSFSFTNATIRAITTPLSVTPPAPPATRPASVVAKYSTDIPPASEAYEPAGFSRIWRYLYPWLSKSDADAAHAIGTSKSKTYPYPPGYSTVQRASFPPAGGGEGGNPALWDVAYEVTVRVTNTGKRPGKASAQLYLQFPEGIEYDTPVLQLRDFEKTKELQPGESQELKLTLTRKDVSVWDVRRQNWVVPTAIDDKKGFTAWVGEASDKLKVACYTGEGRCVEGAKQPV

SEQ ID NO: 688 - protein, 989 aa, Scytalidium thermophilum
MLVSGSLSSWTACLGLLSALSATFAPAVAVKEHDWKKCHQSGFCARNRAFADHALTATSWESPYNILADAGSFKDGQYQGVILKTINDAGETVRLPITISFLKSGTARVTVDEEKRQKGEIELRHDSKARKERYNEAEKWVIVGGLALDKNAKVAHQDKNQLTVKFGPFSTFEAVINFSPFSIDFKRDGETHIKLNDQGLLNIEHWRPKVDKPAEPEKEDDGNDTPDEEGKEEQTEKKEEPKKEDESTWWEESFGGNTDTKPRGPESVALDISFIGYEHVFGIPSHAGPMALKQTRGGEGNYEEPYRMYNADVFEYILDSPMTLYGSIPFMQAHRKESSVGVFWLNAAETWVDITKGKDSKNPKALGVESKTSTRTHWMSESGLLDVFVFLGPTPGDLLSKYTELTGTTAMPQEFAIAYHQCRWNYISEDDVKEVDAKMDKFKMPYDVIWLDIEFSDDKKYFAWDKHSFPTPLEMGKHLASRGRKLVTINDPHIKNVADYPVVQELKDKDLGVHNKDGKLFEGWCWPGSSHWIDGFNPAAREWWVSLFKYDKWKGSMENTFLWNDMNEPSVFNGPETTMPKDNLHFGNWEHRDVHNLYGLTFHSATFEALKSRKPGELRRPFVLTRAFFSGSQRAAAMWTGDNQADWGHLASSIPMVLNQGISGFPFAGADVGGFFGNPDKDLLTRWYQAGAFSPFFRAHAHIDSRRREPYLHGEPYTTIISAALRLRYSLLPAWYTAFRHAHLNGAPILKPMFYTHWSEEAGLTIDDQFFLGTTGLLVKPVTQKDQTTQTIWIPDDEAYYDYFTYERIPTVKGKNVTVDAPLEKIPVLMRGSHIFPRRDIPRRSSALMKWDDYTLVVATSAKADEPADGDLYVDDGDSYDYQQGQYIHRRFTFDPAEGTLTSADFEGRNVASIKEGEWLKKMHQVGVDKVIIVGAPASWAGKTTAKVQSEGREWEVKVEFTPAEKGKAAFAVVRKLGVKIGADWKVVF

SEQ ID NO: 689 - protein, 381 aa, Scytalidium thermophilum
MLFNFLKASVLAATLVSAQTFTDCDPTKRDDCPNPKAVGAKVVDIDFRKGASDFFKPAIGTTLKYDGNLGAVFSITNEKQAPTLSSEKYIFFGQVDVTMRASQGVGIVSSFVLQSDDLDEIDWEWLGGDNFHVQHNYFSKGCTENYNRGGMTDVHDPIGTFHTYTIRWTPEKLEWIIDGNVVRTLVNDGLTGCDGYPQTPMQIKLGNWVAGRSDAPEGTVQWAGGRTDFKQAPFEGYYQSIRIQDFMGGQGATDATEYHYTDRSGTWQSIKVVYNGQETGNSTTTTSSTSKSSTATSTTAASSSTAGTTLTTVTKASTTTDASTSASTAGQFDATLAPSATQSEEETATTSEPALVTGAAPRSGANFAAVVAAALLGYLAL

SEQ ID NO: 690 - protein, 352 aa, Scytalidium thermophilum
MLWTRLERFVAVAGFVLLWAGLTSGLAIDIPGVAKRADPHLAGYLGVFFLGADPYVYFYLSNGNNPLSFRALNRGQPIIRPTKGTGGVRDPTIVPGGGAEAGKKWYIIGTDLHIGKTNWDAAQRTGSRGIFVWESTDLVNWGNERLVVVEDASAGMVWAPEAIWDPARGEYLVHWASKFYPPSDPWHTGPPSNIRIRYAYTKDFRTFSAPQTLIDKNPTNIIDLTYLPLNGDVNNSTAFLRFMKDETRKTVFAEVSYNGLFGTWTRPGGEGAIIQSGVEGPAAYWDNTVPGRVHLLLDHYGADGYRPYVSDNPASNSGWSQSSMASWPRNLRHGSVLPVDARLYQALSSRWG

SEQ ID NO: 691 - protein, 363 aa, Scytalidium thermophilum
MPRFTKSIVSALAGASLVAAHGHVTHIVINGVLYPNFDPTSHPYMQNPPTVVGWTAANTDNGFVAPDQFASGDIICHNQATNAGGHAVVAAGDKIWIQWDQWPESHHGPVLDYLASCGSSGCESVNKLDLEFFKIGEKGLIDGSSAPGRWASDELIANNAGWLVQIPADIAPGHYVLRHEIIALHAAGQPNGAQNYPQCFNLLVTGSGTARPQGVKGTALYTPNDKGILAGIYNAPVSYEIPGPALYSGAARNLQQSSSQATSTATALTGDAVPVPTQAPVTTTSSSSADAATTTSTTVQPPQQTTLTTAIATSTAAAAPTTTTGNGNGGNRPFPTRCPGLAGLGFDKRRRQLRAEEGVQVVA

SEQ ID NO: 692 - protein, 850 aa, Scytalidium thermophilum
MKGFSALQLLAAVAGATAATWKNVKTDGGGGFVPGIIFHPKAKGVAYARTDIGGLYRLNEDDSWTPVTDNLSTNERWGHWGIDAVALDPQDPDKVYAAVGMYTNSWDPNPGAIIRSSDRGETWTSVDLPFKVGGNMPGRGMGERLAVDPANSNVLYFGARSGNGLWRSTDGGATWSKVTSFTNAGTYIPDPSDVGGYNGDIIGLAFVTFDSTSPVINGTTSRIFVGTADTITASIYVSNDAGATWEPLAGQPGKYLPHKCKLQPDEKALYITYSDGAGPYDGTDGAVYRYDLVTETWKDITPVSGSDLYFGFGGLALDLQNPGTLVVAALNSWWPDTQLFRSTDSGETWSRLWEWAGYPDMNLYYSINANNAPWIEAGFLSQDSKKLGWMIEALEIDPHDSDHFLYGTGLTLFGGHDLTNWDTIHNITISSLAVGIEEMAVLGLASAPGGSELLAAVGDNCGFTYPTANDLDTAPSEPWMNPQWATSTDVDYAGNDPSHAVRVGSGTGDQQVAISTDSGKRWTRHPGADTATSGGAVAYSADGDTILWSSSNGGVLRSENQGPFSPVASLPSGAVIAADRRNNSVFYAASSSSSGAKFYRSTDAAATFSSISIPAFTAAGAKSVRDIAPHPVIAGEVWVSTDKGLFRSVDFGETFTPLGQGVLTLTEQVSLGKGKGDSWNVYAFGVGPSGAKLYASADAGQTWVDIQGERQGFGAMGANRVVGSGNLEGVVYVGTNGRGVFYATIELPGTGGPTTTTSSASVVPTTLVTSTVGGSSTAVTTTTTTTTSEVSSTTESVASSTSTTTSSAPTPTAVAKQWAQCGGIGYTGPTQCEEPYRCHEWNPWYFQCIS

SEQ ID NO: 693 - protein, 501 aa, Scytalidium thermophilum
MMIAPASKRSPSTLAAVLATACLLSSPSPANAQAACPNNLTPAYNPPVVAEGWKAQLVATGLSRPRGIKFDSAGNLLVVEPGVGLTRLTFEDYGGTCLVVKEKKTIIPEPGLNHGLDLSDDGTTLYVSTVEYADRYTYDAATATVSNRTRLVTGMSHATGGHSTRTLLLSRKYPDLLLVSRGSGPNIDPLAQDVSTGVSQIRAFNVSEAALAANGGQPYRYATSGTLVGWGLRNSVGVGEHPLTGEIWSVENSADNIFRAGVDVHEDNPGEELNFHGVPVPDEDNPNPFLGANYGYPLCLALWNTTDFPNIDSLTVGKQFALNDTTASDEWCDANTTPPRITFRAHTAPLDIKFSPAGDRAFVTFHGSWNRDQPAGYSLSYLDFDTTTAQPTAPANSLDAVRNILSAPDVSICARWGGGPACLRPVGLAWDASGERLFVSSDATGEVWVVTQAAGGDGGEVTSVTSRAAGVRRATPVPAKFGRGWMVVGAGAGAGMAGWMR

SEQ ID NO: 694 - protein, 773 aa, Scytalidium thermophilum
MRILTVVLAAASLLTTVTGYWLNEIPHRGYAPFAEPNYPVFRNVKDYGAKGDGSTDDTAAINAAILAGNPCNEGCASTTKTPAIVYFPPGVYLISSSIKPAYFTQLIGDPNERPVLKATSNFQGFGLIDGNPYTNMGHQTWTSVNLFFRQIRNFVIDTRAIPANLPATGIHWPTGQATSLQNIVFEMPTDPNVVHVGLFIENGSGGFMTDLTFNGGNRGAELGNQQYTMRNLRFNNCKTAIYQIWNWGWTYSGLEISNCGIGIDMSDINSEINRLNVGSVTLIDSTFRNTDVAIKTGWGPNTLPSTANSLILENILFESCPVTIQGAGNSILFPGAGGSSQWISAWGIGHGYTTTGGPTYLEGDSIPAAPRPPVLTAPDGRFYTHSKPQYQTLTKDNFLSVRAFGAVGNAQADDTDALQRAIDAAVTQGKVLFLDYGLYRVTWTIQIPPGARIVGESYPVILSSGPFFADMNNPRPVVQVGRYSGQPGRAELVDFIVSTQGRQPGAIGIEWNLASPTNEPSGMWDAHVRIGGFEGTQQQVAECLKQPGSPEVKPQCVVAFMAMHVTEKARGLYMENVWLWTADHDIDDPQNTQITIFTGRGLYIESETGPFWLWGTSSEHHVLYQYQVANTRNIFMGQIQTETPYFMPIPNALVPFPSDACFNDPDFETSCDNVEGNCAASWGLRVVDSRDVLVYGAGLYSFFDNYSTNCSRWETGETCQQRIVSVEGEAENVVVYNLNTIGTREMITRDGQRVAWFADNENTFAQNVAAYWA

SEQ ID NO: 695 - protein, 539 aa, Scytalidium thermophilum
MELRAAIRLLGVAASVFAPGVLGAFGYSSSGGNYVIDAGSANPLIFTVSQSNCDIRSIKYRGAELQYSSQGSHINSGLGSATVSISQINGSSRYIKVTCTTSTLTHYYVVREGESIIYMATYITAEPSIGELRYIARLRPDQLPGEHPYGEVSNTAGSSATVEGSDVFIVNGQTRSKFYSSTRFIDEDGHCVYGGSDLKHVCMLTPQLESSSGGPFFRDINSNNAGASTNLYFYMNSGHVQTEAYRMGLHGPYAMQFSRSGIPRAKTLDMSWFGELGITGYVPASARGRVTGRATGVQSGLEGVVHWFNNNAQYWARTNADGTFTSPLMKPGTYTMVLYQTEFKIATTTVSVSAGGTATKDIAGNYFTNRRTLWQIGQYDGQPTGFRNADKFLRMHPSDSRMSHWGPLTYTVGSSPLTDFPMAVFQGVNNPVTIRFNLNSAPGAATLRIATTLSFMGSRPRATVNNWTGPAPPAPTKIDSRGVTRGAYRGYGEVYTVDIPAGVLVAGSNTITISSISGSSGDRFLSPNFIFDAVELYTN

SEQ ID NO: 696 - protein, 216 aa, Scytalidium thermophilum
MVKFLETLAQAAAFLGLARRQWGAESEVYEDPETGLTFASFTTNRDVTVRIAIPDQIPDDNVFDTVIQILAPKSVGWFGWAWGGHMTYNPLAIAWLNGTSNVVLSPRIAYGYFSPPEHLESSYTVLKAGTFINETHWQVTAKASGVSRWGDEWIGYTDLVTDSETTFAYAWSDWPVDVPEDAASTFMIHQGLGHPVFDLRTAKNEDFDAKVEALLE

SEQ ID NO: 697 - protein, 298 aa, Scytalidium thermophilum
MRNFILPVLAGLAATASAQKVKVMLLGDSLTEISCWRPMVWNQLISAGLADKVDFVGSMNGIGASCPRPAGFDTNHEGHSGWQVYDIARQYITNWMRTYQPDIVQFMLGTNDVNIGKRNTQTIIDSYTMLLNNMRAVNPNVKVIIDKIIPTSWSDATIEAVNSAIPGWVQQHSTAQSPILIADCSRANGYTNAMLAGDGVHTNQQGDDFIARQIGPKLIQHINDHLGGGSPSSTSGPVVTPTTLATITTPAPPAQPTPPPQQNCSPRWGQCGGQGWSGPTCCSEGTCRAQNQWYSQCI

SEQ ID NO: 698 - protein, 282 aa, Scytalidium thermophilum
MRWSHLTFLGAALLCLSQAALGELIFSVTATHKGKPIPKEKIQLKPFEFGISRNGESKQVWTSKSRKVRRANPTATSANWCGAVKSTSSSSQITKIHALYQHPGCSIRSGVNSYPQAVAPWVGIDGNTHTGALFQSGTLCKINNSTGIAEHEAWWQWVPAAAYTISSLTVSAGDWIEVTIEATSTTSGKVTIANWNTATAYVVSVSSGPTLGRVDADWVVERPYYGASLAPFAAFEDVWFIEAYAERTSGGNLGILGATQYQIPGLCASEEYDNESQVSWSL

SEQ ID NO: 699 - protein, 476 aa, Scytalidium thermophilum
MAKFFLTAAFAAAALAAPVVEERQNCASTWGQCGGIGFNGPTCCQSGSTCVKQNDWYSQCLPGSQVTTTSTTSTSSSSTTSRATSTTSAGGVTSITTAPTRTISIPGGATTTASYNGNPFEGVQLWANNYYRSEVHTLAIPQITDPALRAAASAVAEVPSFQWLDRNVTVDTLLVETLSEIRAANQAGANPPYAAQIVVYDLPDRDCAAAASNGEWAIANNGANNYKGYINRIREILISFSDVRTILVIEPDSLANMVTNMNVAKCSGAASTYRELTVYALKQLDLPHVAMYMDAGHAGWLGWPANIQPAAELFAKIYEDAGKPRAVRGLATNVANYNAWSVSSPPPYTSPNPNYDEKHYIEAFRPLLEARGFPAQFIVDQGRSGKQPTGQKEWGHWCNAIGTGFGMRPTANTGHQYVDAFVWVKPGGECDGTSDTTAARYDYHCGLEDALKPAPEAGQWFQAYFIQLLQNANPPF

SEQ ID NO: 700 - protein, 478 aa, Scytalidium thermophilum
MLSPVFTSSLLVALGAAGVSAQQRQSLWGQCGGIGWNGPTLCVDGATCTYINDWYSQCLPGSSPTTSSTRITTTQQQTTFTTRVSTTTTAAPPASTTPSQPGGGTCPSIPSGLGSPVANQLNDPFTFHGGAKVTSKADWTCRQAEIKQLFERYELGTLPPKPSSVTASFSGGTLSITASENGRSISFSVSIRNIPAGNGPHPAIITYGSFGSIPIPAGVATISFNNDEIAQQQGGSSRGRGKFYDLYGSTHSAGALTAWAWGVSRIIDALELTQAQTKIDPTRIGVTGCSRNGKGAIVAGALEPRIALTLPQESGAGGAGCWRIAAWQKSQGQNVQDSTQIVQENVWFSPNFNNYVNNVNQLPFDHHMLAGLIAPRALYVMENVDMEWLGKVSTYGCMGIARKQWEALGALDNFGYSQVGGNQHCSFPSSQQGNELSAFIGKFLLNNPNAGNTNIFRSTGNHNFNINSWSPWTVPKLN

SEQ ID NO: 701 - protein, 396 aa, Scytalidium thermophilum
MKGALLTAAALLGVAQGAFTKMKLQKIPLSEQLESIPIDTQLKALGQKYMGARPKTHTSAMFDGSVVDTNSNHLVPISNFLNAQYFSEITIGTPPQSFKVVLDTGSSNLWVPSVECGSIACYLHSKYDSSASSTYKANGTKFEIRYGSGSLSGFVSQDTVSIGDITIQGQDFAEATNEPGLAFAFGRFDGILGLGYDTISVNKIVPPFYKMIEQKLVDEPVFAFYLTDTSGQSEVVFGGVDSSKYKGKITTIPVRRKAYWEVDFDAISYGDDTAELENTGVILDTGTSLIALPSQLAEMLNAQLGAKKNYAGQYTVDCSKRDSLKDVTFNLAGHNFTLGPYDYILEVSSSSCISTFMGMDFPEPVGPLAILGDAFLRRYYSIYDLGANTVGLAEAV

SEQ ID NO: 702 - protein, 309 aa, Scytalidium thermophilum
MKALTLLAAATAASAHTIFVQLEADGTRYPVSHGVRTPQYDGPITDVSSNDLACNGGPNPTMKTDKIITVTAGSTVKAIWRHTLQSGPNDVMDPSHKGPTLAYLKKVDNALTDSGVGGGWFKIQEDGHSNGDWGTLKVINNQGIHYIDIPDCIESGQYLLRAEMIALHAAGSPGGAQLYMECAQIEIVGGKGTVKPQTYSIPGIYKSNDPGILINIYSMSPSSQYIIPGPPLFTCNGGGSNNGGGNNGGSNPPVQQPPATTLTTAIAQPTPICSVQQWGQCGGQGYSGCTTCASPYRCNEINAWYSQCL

SEQ ID NO: 703 - protein, 425 aa, Scytalidium thermophilum
MGVLSTLAGVVALTSVVFVPEVAAQSCPGVNGRFQPRMGSGYRYSVLATGLSQPRHLVVDSAGNLLVAEAGRQAVRRFVLQDQGNIVCSSSNSQIVSGTTNHGIALSADGRTLFTSNLASVTAYSYDPFTGQVGQGRQIITGMTIQGTHPTRALATSKFSPDTLIVARGSANNIDTATTSQSSGRSMIKTFSISRIMQSPVDYTQGGEVLAWGLRNIVGMTEDPVHGGFWSVENQMDDLRLNGRDIHNDNPAERLSYHGRLNETNNRYKGLNYGYPSCVPAWDTASVGINGLLVGALFKPDNVPNVSQDECSNNRMTGRLHFHAHTAPLDIKFNKNATSAYIAFHGSWNRNPADGYRVMRVDFGPDGQPVHPVTSKTAQIPVMENSNIGACPFNCFRPVGLAFDDKGRLYVSSDQSGEIYVIYGA

SEQ ID NO: 704 - protein, 227 aa, Scytalidium thermophilum
MKLSVVLTGLAAALAEAHYTFPSVGNTADWQVVRQTTNFQSNGPVTDVNSDQIRCYERFPGQGAPGIYNVTAGQTISYNAKASISHPGPMAFYIAKVPAGYTAANWDGRGAVWSKIYQDMPRIAGSLTWPTNGARSVSVTIPRCLQDGHYLLRAEHIGLHSASGVGGAQFYISCAQLYVSGGTGTWNPRNKVAFPGAYSPTHPGIMINIYWPVPTSYTPPGPPVETC

SEQ ID NO: 705 - protein, 368 aa, Scytalidium thermophilum
MLPAVLLLLASGLSAAAALQVSVDGQCGGEFTCVGSTFGDCCSPHGWCGSSPDHCGAGCNPDYGNCWGSSSPVATSTKPSITASPSSDSCPNTGTVLVTETVRQTLTQILTSLVRSTTTVTSVVRSTSMVLASSATTATATVTATATRQTTATVTTTATSLASSTTVVTSTSTVTWNTAVNQTVTVTSTSLLFETYTTTRTVDATRTPPPLHVTSWLTLTQIVTTTSTATVTTSIPVTTTLQPTCRDVTLTATRVTTTVTTATATAAPSTVTLISVSRVTVPATTVTLTQTATATLTRTATATATVTRTATTTATTTRSITTTQTATVTRLPWETGTGGGNTFTIFPTGGGPIVTIIPGPIRPGEAGA

SEQ ID NO: 706 - protein, 398 aa, Scytalidium thermophilum
MVHLASALLVTASAAFVAAAPASEIFERQTCPVQNSYPTVNVAKLPDPFTTASGSRVTTKEEFECRRAEISKIMQQYELGEFPGPADRVEANMSGNSISVRVTVNGRTVSFSSTIRKPAGAGPFPAIIGIGGVSIPVPSNVATITFNNDEWGAQAGSGSRGRGKFYDLFGNNHSAGSLTAWAWGVDRLIDALELVGPQASGIDTKRLGVTGCSRNGKGAFVTGAFVKRIALTIPQESGAGGAACWRISDEQKSRGANIQTASQIITENPWFSRNFDPYVRSITTMPQDHHFLAAMIVPRGLAVFENNIDWLGPVSTTGCMKAGRAIYKAYGVPGNMGFSLIGGHNHCMFPSGQNQELNSFINYFLLNQGSAPAGFERSTANVDVNSWAPWAASAPTLA

SEQ ID NO: 707 - protein, 325 aa, Scytalidium thermophilum
MKPSVSNLASLGLALASTASAQATCDLPSTYRWTSTGPLAEPRNGWVSLKDFTTAPYEGKHLVYATTHDRGTTWGSMAFSLVNNFTELSTANQMPMNQATVAPSLFYFPPKNIWVLAYQWGPHAFSYKTSNDPTNPNGWGPAQPLFTGSISGSSTGPIDQAVIGDDTTMYLFFAGDNGRIYRASMPIDRFPGNFGNSAQIIMQDSTNNLFEAVQVYKLQGQQKYLMIVEAIGGQGRYFRSFTATSLSGSWTPQAASESRPFAGKANSGATWTNDISHGELIRVNADHTMTIDPCNLQLLYQGRSPWSGGDYGQLPYRPGLLTLQR

SEQ ID NO: 708 - protein, 270 aa, Scytalidium thermophilum
MRFSLLVTACLSLLPGGALSLPAASTPTTSSSGTSAPTTTAFSSLSTTSGYNLSAPAVPRFPIHPSCNVTLRRQIDRALGEMVELAAHARDHILRWGDDSPFVQKYFGNTTAAGGTATALGWFARVAEGDRRDMLFRCDDPDRNCATQEGWAGHWRGSNATQETVLCPLSFAPGRRLHLDSICGLGHTVKGSPLNTFWAVDLLHRVLHVPRISEGVVDHFADGYDEVVELAKRDPQLAARDSEALQLFALEVYAYEVAAPGVGCTGDEEK

SEQ ID NO: 709 - protein, 1086 aa, Scytalidium thermophilum
MLITKALCWLGLSAVASALGQERIISTDGRKAELQIAGDKIGRGQILVSSNDYWGVIRAAGDLAVDFGRVTGVNYTLSNGEKGAKPAEYVYHPVNNKNNTHFSTTGTERFYGPAYSDPEPGKIVIIAGTIGHSTVIDKLISSRALDVSAVKGKWEAFTSQVVKNPVPGCAKALVIAGADPRGTIYGIYDVSEQIGVSPWYFWADSPPKKAKNLYVTKAKKVQNSPSVRYRGFFLNDEQPALTNWVAAHWEDTPYGAGYGAGFYSLIFEVLLRLRANYLWPTLWASMFMVDDPANQPLADAYEIVIGTSHTEPLMRAQNEFGTFYEGPWAYNLNNKTIDEYFRYGVQRAKPYARNSLWTVGMRGTGDTAIEGLGVEHIVEMLTILVGNQRRIMAEGLGVDDVTTIPQTWCLYKEVMTYLFAGLQVPDDVTLLWADDNWGNVRRLPLLNETDRAGGAGVYYHFDYVGDPRNYKWINTIQLTKTAEQMHHAYARGVDRIWVVNVGDMKALEIPISHFFDMAYDAERWHVDSTAEWAEAWAAREFGEKYAKDAADVMMRYGMYAARRKYELLEPHVYSVINYNEADAVLAQWADLVARAQAVYNRLPAETKPAFFETVLHPALAGEIVHKIQIGAARNAFYAGQRRNAANTVINEVLAHSAADANLTRTWDALLDGKWKHFMDQTHLGYDGYWQQPMRNALPPLVYVQTDFAAVSGEVGFGVEGSNATVKGDDRWHPNTSNDLAVPPLEPYGPSMRYFDVFSRGVRECAWSAAPEKPWIKLSQSSGVVGGSKPDQRVLVSVDWAKAPQGTWEETVKINLTVPCDGSDSYGFADPHILVPVRRRAVPASFKKGFVEADGHVSIAGEHYSAIIPAAKPLPEVWRVGKRESLQKITKPTYHKFSSYGRTGSGVGLIPLDAEKLTVDTAPALEYDVYLFTNHSAANVTLLISPALNYLGEYDPLEYAVSLFPAADSSPAPEQIKRVAPVGRTVGTSMPAGWQGAVADGVWGRTGGYTTTSFAVPREGAYKLRVWALMPGVIVQKVVIDLGGVKQSYLGPPESFLVGRDKVGARNVTSFLNEPGVVGGWGRGRLE

SEQ ID NO: 710 - protein, 352 aa, Scytalidium thermophilum
MLVPLLAFVPLASAQGFFGGLNHLRFGCSQLTIERLDPLVEPGKFPTSHMHQIIGGNAFNVSMPVTDIASLATCTTCGPSEDRSNYWTANLYFKAPNGSYKRVPQVPNRFLFNDRFTTQTDGGVTVYYISPGRGQVTAFKPGFRMFVGDPARRTPLYKSQSCFRCFSAPNFGGDDLAPCSDSRRDFEGFPPQPCPGGIRSNVLYPTCWDGKNLDSPNHKDHVAYPVNGPSNFLSTGNCPPSHPVKIPQLMLEIVWDTTKFNDRSLWPANGQPFVLSTGDPTGYGQHGDYIFGWEGDSLQRAMDANGCFAADCGGLKSQSIEQAKRCTIPKRVREDVDGWFDHLPGREGMHDM

SEQ ID NO: 711 - protein, 364 aa, Scytalidium thermophilum
MRLSSKSAVLALSATLAEAAPQFGGIFQQTMLRFGCANIVIDRVDPLVNPGQIPSPHVHQIVGGNAFNVTMPTDDVAEHATCTTCSFADDFSNYWTANLYFRARNGSYKRVPQGSHAFQFNDRYSTQTQGGILVYYVSDQPGRVTAFKPGFRMLVGDPNMRSRPDNRLKRQNCYRCYTGPNFGGDTGAPCMDDSVDSERLPNKVCPGGIRSNILFPTCWDGKNLDTPNHQDHVAYPTNGPTNFLGTSGPCPASHPVKIPQLMYEVVWDTTQFNNRNEWPADGSQPFVLSTGDPTGLGQHGDYVFGWKGDSLQRAMDTAGCFGAQCANLRTQSIEVGRRCTVRRAAHEDIDGWLDKLPGVEGMPM

SEQ ID NO: 712 - protein, 777 aa, Scytalidium thermophilum
MTRLTNIGVLTAYAAGALAGVLPDCGKPPLSLNKICDQNASPRERAEALVAAMTVEEKLANLVSKAAGVPRLGFPAYNWWSEALHGVAGAPGISFAPPFDYATSFPMPLMMAAAFDDDLIEKIAVVIGNESRAFGNNDRSGIDYWTPDVNPYRDPRWGRGSETPGEDVLVIKRYTKHLLRGLEGTSKTRRIIATCKHYAGYDLESWQGTTRHDFDARITPQELAEYYMQPFQQCARDSKVGSIMCSYNRVNGVPACASDYLLNKVLREHWNWTESNNYITSDCEAVADVSLNHKYAPTLAAGTAMCFNNGMDLSCEYEGSSDIPGAWNSGALNETIVDRALVRLFQGLVHGGYFDGPTNEWASLGRADVDTPYARQLALQSAIDGLVLLKNDRNTLPLPLRKGSKVAMIGFWADDGPKLKGIYSGPSPFIHTPVWAAREAGYEVAVAPGPILQTNAAQDNWTEAALAAAKKSDYILYFGGIDTNAVNEGVDRLTIAWPEAQLTLINKLAALRKPLVIIQLGDQLDNTPLLKLQGAPSILWANWPGQDGGPAIISVINGTHAPAGRLPVTQYPANYTEIVPMTDMNLRPNPSTGNPGRTYKWYPHAVQPFGTGLHYTTFDARFDRPLPAPGKPGTPGMKPVVLKLNIQSLLADCKNTYKDTCALPPLEVQVTNRGPRHTSDYVALVFITETPGPKPHPLKSLATYGRLRNIKPGRTERAKLEWTVASLARHDKDGNSILYPGRYTLVLDVPQKDEVVVELSGKEEVLDVWPVDPNLKN

SEQ ID NO: 713 - protein, 289 aa, Scytalidium thermophilum
MFSRRPSLLSTLLLALTWLSTFVLAAPSAGCGKNPTLRSQAYTINVQGRNRYYTLRVPNNYNKDTPYKIIFLWHPRGGSMQKIVNGEDPNRGGILPYHGLLPFANETAIFVVPEGQNQGWANMNNEDTAFFDRLVETIENDLCVETSLRFSTGFSWGGGMSFALACARPQQIRAIAVISGGLLSGCQGGTQPVAYYGQHGTSDSVLNVQMGRQLRDQFVRNNGCQRLAYEPQPNGGRSVKTEYQGCLPDYPVQWVIHNGDHNPSQVDQGSSTPFAPGNTWEFFSRFSPK

SEQ ID NO: 714 - protein, 433 aa, Scytalidium thermophilum
MPSLLRLAVFGLAFISQASAVILQNGQVREVHFPDTKIDPKHYTFRTYPANAPEISYKGRWDSKHVSWWSAPGIKFGYTGQTVAITFGNLTSNGVLVGYRIGGLDWMFTNITAGATHLLVSPETPGSDFVGPIRPWIFELRVTNWAYGVQINKVHVAAGERLVKIPDHFRRIEVIGDSLAAGMYASYEGLSSWAYGLGEGLGNTEYSVIAYPGICVADQECWGNPRGQVHQWFYTSDTSYRASVIHGDNPEPWDFEKHPPADLVIINLGTNDNNEHNGVSTEAHIDAYTKLIQGVHGKWPNAQVIVMSLWLGFYQSGNTYLSYAPRGWVKEIYDMVQWFNSDDYLYNPVVYDGVTKKTTRLKRRDKPFVHYFNTTGILQHNDIAPQWHPTDVGAIKVASHLQQFIRMKFGWELEATGPEVYHETLYWNDESGY

SEQ ID NO: 715 - protein, 353 aa, Scytalidium thermophilum
MAPKTSTFLASLTGAALVAAHGHVSHIIVNGVQYRNYDPTTDFYSGNPPTVIGWSALNQDNGFIEPNNFGSPDIICHKSAKPGGGHVTVRAGDKISIVWTPEWPESHVGPVIDYLAACNGNCETVDKTSLRFFKIDGAGYDAAAGRWAADALRANGNSWLVQIPADLKAGNYVLRHEIIALHGAANPNGAQAYPQCINIRVTGGGNNQPSGVPGTQLYKASDPGILFNPWVANPQYPVPGPALIPGAVSSIPQSRSTATATGTATRPGADTDPTGVPPVVTTTSAPAQVTTTSSRTTSLPQITTTFATSTTPPPPAATQSKWGQCGGNGWTGPTLCAPGSSCNKLNDWYSQCI

SEQ ID NO: 716 - protein, 287 aa, Scytalidium thermophilum
MYLLPIAATALAFTTTAYAHAQVYGLRVNDQHQGDGRNKYIRSPSSNSPILWDHVTHPSLICNIRDDNQPPGPAPDFVRAFAGDRVAFQWYHARPNDPTDYVLDSSHLGVLVTWIAPYTDGSGTGPIWTKIHQDGWNGTHWATSRLISNGGFVEFRLPGSLKPGKYLVRQEIIALHQADMPGPNRGPEFYPSCAHLEVFGSGEAAPPQGYDINKGYAESGDKLWFNIYINKNDEFKMPGPEVWDGGVDLESDGQLRNQASQGEPTQMSSRKEWYYFCEKQFIVTLYY

SEQ ID NO: 717 - protein, 1067 aa, Scytalidium thermophilum
MDFIFRQDGKPVGISSLIFICLCASQAFSANVTSPWPLLGNGLQEVVQWDHYSIIINGERLLLLGGEIHPFRLPVPELWWDTLQKIKAMGLRMVSIYTHWGFHSPTPDTVDFAAGAHNISRFLEMARDVGLYVLIRPGPYINGELNAGGMPLWVTTGSHGTPRSNDSAFTDAWTPYLDGIGRLTRPYQITEQGTVIMYQIENEYGYQWRDERNKVPNLEAVSYMEKLQESARRNGIVVPLVHNGPNINTGVWSRDYDTVGAGGNVDIYGVDSYPQCWSCILEECGNITPWAVSDYHSHFQHISPRQPSFMPEFQAGAMNPWAGPAGGCKERTGVDFVNFYYRDALAQRVTILNLYMISGGTNWGWLSAPFIGSSYDYGAAISEDRSIGDKFYEITNLALFARVAHDLAAADVVGAGTEYTNNPAVFVTELRNPVTGAGFYVLRHAKTASDSEERFRIRLKTSVAEIPVPRLSVAAATLSGREGEILVTDFRFGRNHILYYSLAEVLTYTVLDGGETTVLVLWTPAGRIGEFYLAGAGSAIFVGSKQVTIAPGDDGILVGYVQTEGMIPVKFDNGVTVLLIDRKKAYEVWVPVLTSDPRVPEDQTAIIITPSLVRSASLSSTTLSLTGDTNTTAPDDRSIEIFTSSRVTEVLWNNRPLNSIFTTPWSSIRGLIPPPSGHLALPTPSISGWKSRDALPERHPDYSPTSAAWVLANDTSSSNPAVDRTTTTTPYLFADQYGFHTGVKLWRGVFRRPVTNSTPSSTGDMPAAPTGAYLRIQGGTAHAWAVYLNGEFIGSWVVDSSVSVSEKELPFPARLLGNEENVLLVVQEDTGHDQLAAAVNPRGILNVTLLASPTNDAGAGWQFSEWKIAGTAGDGRKSGQPYGRPLDTVRTRYNEGGLAPERRGWHLPGYDLSSDEDSTSSWTESSPEDDFTGAGVRFYRGILHLDVPRGLDVSLAFRIKGLNGNGTVFGEEPGGFRVLLFVNGWQYGRYYPDIASEDTFPVPPGVLDYGSGGGENVIGLIVWALQEGGASVKVDVVVRYTLDSSLDVNFDGRYLRPEWSRERLQYV

SEQ ID NO: 718 - protein, 237 aa, Scytalidium thermophilum
MKLLAPLMLAGAASAHTIFTSLEVDGRNYGTGNGVRVPSYNGPVEDVTSNSIACNGPPNPTSPTDTVITVQAGQNVTAIWRYMLNTQGTSPNDIMDSSHKGPTLAYLKKVNDARTDSGVGDGWFKIQHDGFDGTTWGTERVIFGQGRHTIKIPECIEPGQYLLRAEMIALHGAQNYPGAQFYMECAQLNIVGGTGTKKPSTVSFPGAYKGTDPGVKISIWWPPVTNYVIPGPDVFKC

SEQ ID NO: 719 - protein, 409 aa, Scytalidium thermophilum
MARLSRALLAAAAVAANVSAQQQQQAQEQLPEGLHGLMVAAGKEYFGTATDVNNIEDEDYQSILQYQGEFGMVTPENSQKWEFTQPRRDEFVYTNADKVVGRAEEIGQLVRCHALTWHSQLPMFVSTTQWNASTLASFLTTHIDNVVTHFAGQCYAWDVVNEALNEDGSYRNSTFYQYLGEEYITLSFEAAAKADPAAKLYYNDFNLETSPKKAAGAERIVRLVQEAGARIDGVGFQAHLVVGQTPPRKNLTALLSRFASLGVEVAYTELDIAHEFPKNSSNRIPDAAALEQQAEDYVAVVGSCLDEPKCVGVTVWQFTDEYSWVPDAFEGRDQACLWTRDYKKKPAYDAVSKLLREAAANNTGVNTNSTEDILEPIPSNGAAAAAAAAGGWVGRVALGAALVVGMALL

SEQ ID NO: 720 - protein, 367 aa, Scytalidium thermophilum
MRAPSSVAAATALLLLATPATAQLHKLAVQAGLRYFGAATDTPHQRERAPYPESYPQYDAILADNDEFGQTTPTNGQKWLFTEPAPRLFNFTEGDYVADLAASQGKLLRCHALVWHSQLAPWVEETNWTAPALADAIERHIRAVAGYYRGRCHAWDVVNEALDEDGSYRQSIFYRVLGEEYLRLAFRAAAAADPDAKLYYNDYGIERPTSPKTAGALRLVKMLKDAGLRVDGVGMQAHLHADNHPSAEDLIATSEAYAELVDEVAFTELDVRIKLPVDEQKLQWQKECYQKVVTACVKVKACVGITLWDFYDPFSWVPHVFPNNGASLLWFEDFSKHPAYDGIIETFKSLIAEAEEQPKRRSLGWRA

SEQ ID NO: 721 - protein, 580 aa, Scytalidium thermophilum
MRVFNVVATLLLAGLVESAGRGLGHAGKRHVQHAAKRAMAAQQQQGPENLHLPVVSSRKAGNRFLTNKTEPFTVDGTAIPDVDFDVGESYAGLLPISSDPNDENKLFFWFFPSTNEAANKEILIWLNGGPGCSAFEGLLQENGPFLWQYGTYKPVQNPWSWHTLTNVIYVEQPVGTGFSTGTPSITNEEELAAQFMGFWKNFIDTFDMHGYKVYISGESYAGYYCPYIAKAFLDANDKTYFDMSGMTIYNPLITSFEIQQHLPIVQFVDYWTGLFPFNDSFRADIHQRDKQCGFSDFIAQHLVYPPKGPLPSKLPGTRPDGTLKPECDNLYWDIFDAIMLINPCFDIYQITTTCPLLWDVLGFPGSMPYLPEGAQIYFDRDDVKQAIHAPTGFTWEECSSDDVFVNGTDLSPPPVLDVLPSVIDRTQNVIIAHSALDMILLANGTLLALQNMTWGGRQGFTRRPDEPFYVPLNNMTDLSTLAAAGVMGSLVSERGLTYVGIALAGHMVPQYAPSAAYRNVEYMLGRVGCMNCTVPFTTDPFTPQSQGPLGKGTAPQGWSDITGFGKGKGKPHRVVKGKRL

SEQ ID NO: 722 - protein, 177 aa, Scytalidium thermophilum
MRTILTFLWAFAALASATITYQLQRANNPTSDQNDAYWRIDQAMARAVARYNRLAPRANKHITVQYVPSVQTADGNFNGNIRFGSNRSYMTERTALHEIAHTLGVGTTQQFNTRCANNNWPTATALLRSWDGPNAKINCGGGHFWPYGLNYENEMSETNAERHCLLVNAMLADGMAW

SEQ ID NO: 723 - protein, 384 aa, Scytalidium thermophilum
MTLKNLFASALLAAAPAFAHPGHKDVVPQGPLYRRNLDHCAWKFEEPEFVKRTVEVHGAEIARLRQRLGIREKPKISPRDYLSVSRIDHKSNKTVTKGMDLSTLFSDSGACVLTPTVDLGPLYVQGEEIRKDITNGEAGVPVTLAIQVVDYRTCQTVPNAYVDIWSSNATGIYVGVQGYPGMGDPNDASILNGTTLRGVQPTDSHGIASFDTLFPGHYDGRTTHIHAVVYLGATKQPNNTITGGRAAQIGQIYFDQNLIYAVEQLPPYNTNRMAIIENVNDFLFRAGANGDDPIVRYALVGNTLQEGIFAWIRFGVDVNANKPLNPAAFWTEKGGVMNPTGPVQPGGGGLFPGFPGGGWPGFPGGGGWPWPGGWRRRRAAQNAN

SEQ ID NO: 724 - protein, 481 aa, Scytalidium thermophilum
MHFTMRAHVGIGYLAALSSAAATNCRCSQVINRDVAIIGGGASGSHAAVWLRDNGQSVVVVEKASQLGGHTAAFKDPATGLDINVGVQAWMDYKDSYDFPARMNVSTSGSMQFTPNTNNFVDTLTGRRVEGWEAPVDETKYPAIQRFLDAILPYEDIMLPGFFDFPDEVPEDLLMPFGQFVEKYDLYGAVPQVWDATGQGVGDMMNVPTLFVIQASAVPMTKALLGQAAAATPASGRLYDLYESVANFLGDDVLYNSEVIKSTRTESGVSLVVSGPKGKRTCIQAKRLLISIQPTRSNMAPFSLDEEEAEVLGKFFFPTVFTGILRHPALPKLNAFLNRSPAPGSLNYSVMPVASQVGSIEYIGGTEDLFRFTAVGTEDETEEGMKKRIADAIDALIAEGTIESAAPEGPVPEVTYAVFSNHGHMHAQVTADDLRDGFFKKLYALQGKRNTWYTGAAFSSGFSTILWEYNKVLLPKVVEGL

SEQ ID NO: 725 - protein, 294 aa, Scytalidium thermophilum
MVAFSSLFLGASIAATALAAPGELPGMHLNKRQTYTQSATGTHDGYYFSFWTDGGPNVRYTNEAGGQYSVTWSGNGNWVGGKGWNPGAARTINYTGTYQPNGNSYLAVYGWTRNPLVEYYVVENFGTYDPSTGAQRLGSINVDGSTYNVYRTRRTNAPSIEGTRSFDQYWSVRVNKRVGGSVDMNAHFNAWRQAGLTLGTHDYQIVATEGYFSSGSARINVGGGSTGGGNNGGGNNGNPGGNPGGNPGGNPGGNPGGNCSPRWGQCGGQGWNGPTCCEAGTTCRQQNQWYSQCL

SEQ ID NO: 726 - protein, 398 aa, Scytalidium thermophilum
MKFSTALFALIAPAMAAPAPSGPIDKRAPLIQARAGEVVPGKYIVKLKEGASSEALDAALSRITRKGKKADLVYRNKGFKGFAGKLDMDLLEELRYLPEVEYVEEEAIFTINRYVSQSNAPWGLARLSSKTKGATTYTYDDSAGAGTCSYIIDTGIYTAHSDFEGRAIWAANYADSSNSDGNGHGTHVAGTVGSKTYGVAKKTTLYAVKVLNAQGSGSTSGVVAGINFVASDFPKRNCPNGTVANMSLGGSYSASINNAAKALVNAGVFLAVAAGNDNKNAANYSPASEASACTVGATDSSDKKSSFSNYGAAVDVWAPGTSILSTWIGGTTRTNTISGTSMASPHIAGLGAYLLALQGKKTPAQLCSYIASTAHNGVLSGIPSGTVNKLAFNGNPSA

SEQ ID NO: 727 - protein, 267 aa, Scytalidium thermophilum
MGPTWAVILGLIAPSVLSHNIHGILLVNGTETPEWKYVLDVAPVIPISNPDSLPPGYQGYKVDPIIGSGNPNITCGRLAFDSAPKTQIADVLAGSEVGFRVSADGLGNRDLEKGYIPTFWHPGPAQAYLSRAPNDDLYSYKGDGDWFKIAYAGPVDDLTWSLWPGVSDFNFTIPSTTPPGKYLLRIENFMPTASTGYLQFYVNCAFVNIIGPGGGTPTEFIRIPGDYTDEDPGFLVPPEQSSLDGRVPRDQLKLMSYTPPGPAVWTG

SEQ ID NO: 728 - protein, 150 aa, Scytalidium thermophilum
MVRPVLLSCVFLGTVSAQVWPPPPPWWSPAQPQPTTTSTTRTTTTSTRLPPGATQSLWGQCGGMNWDGPTRCPIGAYCKNDGNIWYEQCVPIETGTPATTRTSTTTITSGPVVITTYITYVTPTTTPPPRTSIVTVTLRPDEPCDHPFLC

SEQ ID NO: 729 - protein, 382 aa, Scytalidium thermophilum
MRVSSLLAALATGSLVAAAPSPKSPKPSTPTGDVNPFEGKTFFVNPKWSAKLDQTAKAFLKKGDLINWAKTLRVQQISTFVWVSRRSELSNIDDAIAAARKAQKLTGRKQIVGLVLYNLPDRDCSAGESAGELDSTKDGLQLYKDTFVKPYAEKLAAAKDLTFAVVLEPDSLANLVTNLGVPLCERAADVYREGIAYAISSLQFDHVHLYIDAAHGGWLGWDPNLPLAAKEFATVLKLAGEGKKIRGFATNVSNYNPFNALVRENYTEWSNSWDESHYASSLAPHLEAEGLPAHFIVDQGRVHLPGAREEWGEWCNVEPAGFGPKPTTNTNNTYVDALVWIKPGGESDGQCGMAGAPRAGEWFDEYAQMLVKNADKSIFKFW

SEQ ID NO: 730 - protein, 451 aa, Scytalidium thermophilum
MQIKSYIQYLAAALPLLSSVAAQQAGTITAENHPRMTWKRCSGPGNCQTVQGEVVIDANWRWLHNNGQNCYEGNKWTGQCSSATDCAQKCALDGANYQSTYGASTSGDSLTLKFVTKHEYGTNIGSRFYLMASQNKYQMFTLMNNEFAFDVDLSTVECGINSALYFVAMEEDGGMASYPSNRAGAKYGTGYCDAQCARDLKFIGGKANIEGWRPSTNDPNAGVGPMGACCAEIDVWESNAYAYAFTPHACGSQNRYHVCETNNCGGTYSDDRFAGYCDANGCDYNPYRMGNKDFYGKGKTVDTSRKFTVVSRFERNKLSQFFVQDGRKIEVPPPTWPGLPNSADITPELCDAQFRVFDDRNRFAETGGFDALNEALTIPMVLVMSIWDDHHSNMLWLDSSYPPEKAGLPGGDRGPCPTTSGVPAEVEAQYPNAQVVWSNIRFGPIGSTVNV

SEQ ID NO: 731 - protein, 350 aa, Scytalidium thermophilum
MHQWASLAAAAALLVNGAVAQFNMLRFACSQLVVDRVDPLVNPGMRYTPHLHQIVGGNSFNLTMEPVTYDLAKRSTCTSCSFVQDKSNYWTAVMFFKHKNGSYHRIPQVGNGGPQGRLINKGGLDVYYIPSGRTTAFKPGFRMLAGNAAETDDNKVSRGNICHRCWTSTNEDQFIGGAPCTGSDTVAIPQNPSCKMIRQTIIFPHCWDGRNLDTPDHKSHVAYGQGSGANGGGACPSSHPVRLPQVMYELMWNVTDFTDRSWWPDSGPAFVYSMNLGGSAAHGDYVFGWEGDVLQRAMDMGCNLNRDCPQAGLTSQPPEKYNACTIKQQAPEPVDGWLKEMPMGQMAIRA

SEQ ID NO: 732 - protein, 213 aa, Scytalidium thermophilum
MGLLQLVTGVLALGSVGFGNPVPQWGPAPPSKFCDAATEICYAEYKSPENIAFRFAIPDTATPGNFSVLLQISAPRSVGWAGIAWGGVMVNNPLTVGWANGNTAVVSSRRASARSYPNPWTGATYQVLPGSHANNTHWTLSVLARGVSSWDNTRLDPSSVVTLAYAQAPTPPTEPANNASRFSIHTSRNRFTLDLKSAQISNFTELLAKALAG

SEQ ID NO: 733 - protein, 430 aa, Scytalidium thermophilum
MVALTSLTLTAALAAVGLASVLPTKIGTTGLDNGYSESSGSGRATLKQVRRPGYRFNGARAIYKTYLKYGVPAPDYLLQAVANTDALAAAAAAKRDSGSAAAIPINPRYDIAYVTPVTIGTPPQTLYLDLDTGSSDLWVFSSHTLASQVRGQRIYSPEKSSTSKLLHGHTWSIRYGDGSGSLGNVYTDNFTVGGVTVPNQAVQCAEQVSTSFTRESEIHGLVGLGFSSLNTVSPNGQLTFFDNVKPNLDSPVFTADLKWKKEGTYDFGFIDKAKYTGEITYLPVESNPGYWTFTSSGYAVGDDNFIPASIVGIADTGTSLTYLPGSVVAAYYRQVEGAVDSWYYGGYVFPCSSKLPSFTFGVGGANITIPSSYINYAAITEGSPVCFGGLQSSDWLGVNIWGDVALKAAFVVFDGSNPPKIGWARKPLEQ

SEQ ID NO: 734 - protein, 226 aa, Scytalidium thermophilum
MLGSALLLLGTALGATAHYTFPRINSGGDWQYVRRADNWQDNGFVGNVNSPQIRCFQSRHQAAPATLNVTAGSTVTYYANPNVYHPGPMAFYMARVPDGQDINSWTGEGAVWFKIYHEQPTGLGQQLRWSSDGKNSFQVQIPRCIRSGYYLLRAEHIGLHSAGSPGGAQFYISCAQLAVNGGGSTEPPNKVSFPGAYSPSDPGIQINIYWPVPTSYRNPGPPVFQC

SEQ ID NO: 735 - protein, 231 aa, Scytalidium thermophilum
MKLLPGLLLAATAAQAHYTFPRLVVNGQPEERDWSVTRMTKNHQSKSGIENPTSPDIRCYSSQTAPNVAIVPAGSTIHYISTQQINHPGPTQYYLAKVPAGQSAKTWDGSGNVWFKIATSMPEYDQNRQLVWPGHNTYQTINATIPANTPSGEYLLRVEQIALHMASQPNKAQFYISCSQIQITNGGNGTPGPLVAFPGAYRSNDPGILVNLYSGMQPSQYQPPGPAVWRG

SEQ ID NO: 736 - protein, 346 aa, Scytalidium thermophilum
MTKILLTGGSGFIAAHILDQLLAQGHTVVTTVRSEAKAAKIRAAYPSQAESGALTVAIVPDIAREDAFEEVVKNTPGLEVVLHTASPFHFKFTDPKTELVDPAIVGTTSILKSVAQYAPTVRRVVVTSSFAAILDEARAGDPATVFSEASWNPVTIDDIHRNPPTAYRASKKLAEKAAWEFVKDNNKFELVTINPPMVFGPLAPGQAVESLDGINTSNQRIVDLLQGKWKNAVPEVGVAWIWVDVRDVAAAHVKAGLDVKEAAGKRLFVTAGEYSNAELGKIVRKNFPEYAEQVPEDSALAVGEKPPADKRYRFDNSETNKLLGISYRTFEESIVDTVKSLKKLGA

SEQ ID NO: 737 - protein, 662 aa, Scytalidium thermophilum
MFGLVVQQLQAQLLSLSAVTASDLVLSAMHTFSKLLVLGSAVQSAFGRPHGSSRLQERAAVDTFINTEKSIAWNKLLANIGPNGKAAPGAAAGVVIASPSRTDPPYFFTWTRDAALVLTGIIESLGHNYNTTLQTVIQNYVASQAKLQQVSNPSGTFADGSGLGEAKFNVDLTAFTGEWGRPQRDGPPLRAIALIQYAKWLIANGYKSTAKSVVWPVVKNDLAYTAQYWNETGFDLWEEVPGSSFFTIASSHRALTEGAYLAAQLDTECRACMTVAPQVLCFQQAFWNSKGNYVVSNINGGEYRSGKDANSILASIHNFDPEAGCDNLTFQPCSERALANHKAYVDSFRNLYAINKGIAQGKAVAVGRYSEDVYYNGNPWYLANFAAAEQLYDAIYVWNKQGSITVTSVSLPFFRDLVSSVSTGTYSKSSSTFTNIVNAVKAYADGFIEVAAKYTPSNGALAEQYDRNTGKPDSAADLTWSYSAFLSAIDRRAGLVPQSWRASVAKSQLPSTCSRIEVAGTYVAATSTSFPSKQTPNPSAAPSPSPYPTACADTSEVYVTFNERVSTAWGETIKVVGNVPALGNWDTSKAVTLSASGYKSNDPLWSITVPIKATGSAVQYKYIKVGTNGKITWESDPNRSITLQTASSKGKCAAQTLNDSWR

SEQ ID NO: 738 - protein, 595 aa, Scytalidium thermophilum
MISSPLSLGAALVAAASLVEASFDRNIAYRSPSRRHPSLAVPLSHVSKRQTGDVFSPDEVNFTHGVASGDPYADSVILWTRLAPTADSVASDLVPDGVVPIYDDPEGAKPSAKAACVEFKIATDSNLKNVADQGRAYTTSDVDYTVKFEAGNLQPFTTYFYQFNVCGSNKTSPIGRTKTIPAETQKVNSDIKFAVYSCANYPEGYFNAYGNVARKDSVDYVIHLGDYIYEYKGDSSLRNPKPDRETYTLYDYRARLGSYRTDPDLLSSHSSFAWIPVWDDHEVADNAWKNGTGNSSGDVFRKRKQAAVRAYFEWMPIRQVDMDDSLRIWRRFSFGTLLDLMMLDTRQYDRDLTVLNGFAGIGGNSKEVEKLVDHQNRTIMGFKQEAWFYDELTRSSNRGAAWRVVGNQVIFSRMALDILGNRPFNRDQWDGYIANRDRVYQHLESGSINNTVFLSGDSHAAWVSDLAWLGKRDYDPVTGKGAFGVELAGSAVSSHTPVGSWMPNLITKALSAWLVKDNPELQWQDLYYRGYFEMSVGYEAVKARFYGIPKPKVRSSDEIMIAEFLVNSGENRLARNPTVGGGKAKAGALKNGKVE

SEQ ID NO: 739 - protein, 261 aa, Scytalidium thermophilum
MRPLLAALAAATTVHAHGWVDNATIDGIFYQLYHPYMDPYMGELAPPRISRKLVWNGYVNDVTSIDLQCGGHTAEGQIGTEPAPLHAPATAGSTVNLRWTLWPDSHMGPIMTYMARCPDEGCDKWLPGEEPVWFKIHEAGRYTTDKSYPDDIWEVTRLMYLANEGYNYTIPACLASGHYLVRHEIIALHSAWAKGEAQFYPSCHQLTVTSIGGNVREAPAEYRVSFPGAYKDDDPGILINVWNPGPYTIPGPPVWTCPESE

SEQ ID NO: 740 - protein, 570 aa, Scytalidium thermophilum
MKPPLILSCYLSLIPVVSSHPINHQDVLSDTPYSTGKRGAVASESSICSKIGINTLAIGGSAADAMVATTLCVGVVGMYHSGIGGGGFMLVRDKHGRYEAIDYRETAPAAASRDMYEHDRNASVYGGLAVAVPGELRGLEYLHQKYGTLPWKTLVMPAVRVAREGFRVTEDLVRYMAAASANNNTFLVDDPIWAEDFAPNGTLLQLGDTITRKRYADTLEKIANLGAGEFYKGEIARSMVDYVQKMNGTMTIDDLAEYEADIKPALNITYGNYRLFTTPAPSSGAVMLNIFKIMEQFSPKDLDDTNLTTHRFVEAMKFAYGGRLQLGDPGFVKNASDFEQQLLLDETARYIRDRILDGQTQPVEAYDPLRLYLPDSHGTSHVVTADASGLTVTSTTTINLLFGAQIMTPDTGIILNNEMDDFSQPNRRNAFGFAPSPANYIAPRKRPLSSITPLIAEDAADGRLVLATGAAGGSRIISATTQASFRVLYQGETLHDAITHPRVHHQLLPNVLLVEDGTDPVLVDDLRAKGHQVQWMKPGLSAVQAVRRGEDGRFEAVGETRQRNSGGYTL

SEQ ID NO: 741 - protein, 404 aa, Scytalidium thermophilum
MRFTSVAALGACFVGTVAGTDSSSSSSSSVTGPDSNGKYWIYGEGIKAAFIPYGASISDLIIKDKNGIDRDIVMGFDKASSYETDKSHPHLGSVPGRYANRIKNSTFEIDGVTYKVAANENPTAENPDGVNTLHGGPDGWDWRNFTVVSHTENSITFSIVDPDGKEGFPGEVISFVTYSLGNLTWDATIVAVATTKKTPIMLTSHTYWNLDGFANDETDTALNHTFYMPFSGQRVGVDNILIPTGEILANEKGSVNDFWSAPKQIGASFNDPELVGNCGYNCTGYDNCYIVNRPTTVNWRNPDQAVASIWSSWSGIRLDIYSDQEAFQMYSCNFQDGTFPLKSSQGREGGPRTVPKYGCVVLEVQDWIDGINHPEWGRLHKQVFGPGDDPHIVQVRHKFSIIDE

SEQ ID NO: 742 - protein, 528 aa, Scytalidium thermophilum
MLGAPASLLLQLTLWAASVNAFFPFIPEGHCAPDEDCAGPGHGTKRSNVLDLPAEGGRGGVITVPVYHHHATITRDPTKTDPVTLAGSRIARKYARPETSRGLEKRENAYPVSEPLEPTEPNSAGIYQYGPDYSYFIQVQVGTPAQEMFMLLDTGAANTWMMGSKCESDACKLHDTFDASASKTWKNTTDYFGIQYGSGNVMGTVGTDTAKFAGLTIPELSFGLANMVNDSFKHFAFDGILGLGMGDSVTGGNFLSHLKNHKIVDSLVLGISLNRGSDGVNDGQVTFGGVDPAKFTGDITYSPIPQAQQAKGEWAIILESAAYDGKTAGSSNVLAYIDTGTSFIFAPPADLDELFKLVPGSSSYDNSKYREYEVPCDTKTPITLSFGGAQFDISPADWILPKGDKCVANLYGWEVRKGTGSWLLGDTFLKNVYSVFDADKHRIGFAHKPAPPERNGTTTSADSAHTTTMPGDESLHPVMPGSSTTGDEGTGSAAAQATGPTGHQVNGGVRMTAGVVGAGLVAALVALV

SEQ ID NO: 743 - protein, 689 aa, Scytalidium thermophilum
MKFVSSLLVAAVAFTAEVAAQAKNPEGPPNLPKNYKSIDLKIDLKNGVRNKTSPLLHGLFFEDINHSGDGGIYAELIRNRAFQGSDDVTGGTRDLVGYRPIGKGVKLELDITEPLSDALRYSLKVTIPANATGEVGFLNEGWWGINVQPYTYNASVYFKPHMPTFKRDSSITGLTFSLRSNLTDDIWVSKFVPFPENISAYRYTHLTTTLTPPKAAPNSNNTFAVTWNGTEAAGQTFFFNLISLFPPTYKNRPNGLRKDLAEALEGIKPKFLRFPGGNNLEGLSPATRWDWKKTIGPLTERPGRPGNWGYYNTDGLGYLEYLLWCEDMGIEPLLTVYAGYSLDASGVHPAHTVPPEELDYFIQDAIDQLEYAMGDVTTKWGALRAQHGHPEPFSIKYVEIGNEDWFSDSYAWRFPRFLEALKKAYPDITYISSQAVEENPTKQNITIPPGNMWDLHHYQTPQFYKDNFNYFDNWQEINGYPNVTIFVGEYSVLSRDRPGGVDWVNGEGRFAYPPVLAAIGEAIFALAMERNPHVVKLSSYAPLFQNWNAYQWTPNFIAFSANPKDLVLSTSYYQQKLFSEYYGAETLTVVNKNGDFNPLWWGATISEDQSRIFLKIVNSEKDKKTVKLELDKPIKSANATVLRHDDPYAFNFIGNSTIVPKPQKVDKPKGKKVEFVVQGWSVNVLELRV

SEQ ID NO: 744 - protein, 291 aa, Scytalidium thermophilum
MRFSTIFSVAATASTALGASLQQVFNWGANPTNIQFHIYVPDRRATNPAIIVALHPCGGNAQQWFSGTRLPQYADQHGFILIYPSTPNQSNCWDVHNTASLTHNGGGDALGIVSMVNYTIDRYSADRSRVYVMGFSSGGMMTNVLAGSYPEVFEAGAAYSGTAHACFFGAPGATPFSPNQTCAQGLSHTPEQWGNFVRNSYPGYNGRRPRMQIVHGLQDFLVRPQCGYEALKQWSNVLGIPFTRQVQNSPSWGWTTELYGDGTQLQGLFSQSLGHAPAVDEQQLLRFFRLI

SEQ ID NO: 745 - protein, 276 aa, Scytalidium thermophilum
MASAPWFPPHSMAAHAGMRHIDHGSMDAIDDLRHLQSSHDTGDRPAFDTMKVPTLISSLLALVSFSEATPLIKRATLTRVNNFGNNPSGARMYIYVPDRLQPRPAVLTAVHYCTGTANAFYTGTPYARLADQYGFIVVYPESPNDGGCWDVSSRAAYTRDSGSNSHAISLMTKWALQQYNGDPEKVFVAGTSSGAMMTNVLSAVYPDLYKAAAAYAGVPAGCFYTGTVAGWNSTCANGQLQAKPDVSLDAQLPREKRGNPMPSSQREAAWNLVAMQ

SEQ ID NO: 746 - protein, 431 aa, Scytalidium thermophilum
MGTTRFTLALGALVFVSLFGSLLDAASIPSSVKGLDYRSLIIYLKRNPDYSPNGPAEYARALRKWGAKVPEQLIKSLAAMAGAHGHPSKGEEGELGDVPAVSIRNDREYLSPVGFGTPVQWLNLDLDTGSADVWIYTTDTHPYVAQSRDHVFRINESSTAEKVHNTTWWITYGDGSSAYGGVYRDVVTLANITVHNATVESAISVSNSLIQDPYMDGIFGLAYRLPVQTSPKQPTVLSSLLPLLNEPLFTVDLRWRSPDGVYTFGYIDHERHSGHIKYTSLLPGAQFWELEYTGIHVEGQDRWYKSTQIPWRAIVDTGTTLILMPQDVSDLYFSDVPNAMFNESIGGVWTYPCNNPVLPDFEISFDSGFIARIPGKYMNYTNMPDNPKVCMGGLQGWDDSGRAIFGDVFLKAVYTVFDVGQGRVGFAPKKF

SEQ ID NO: 747 - protein, 233 aa, Scytalidium thermophilum
MKVPTLISSLLALVSFSEATPLIKRATLTRVNNFGNNPSGARMYIYVPDRLQPRPAVLTAVHYCTGTANAFYTGTPYARLADQYGFIVVYPESPNDGGCWDVSSRAAYTRDSGSNSHAISLMTKWALQQYNSNPEKVFVAGTSSGAMMTNVLSAVYPDLYKAAAAYAGVPAGCFYTGTVAGWNSTCANGQKLKYPRFQAKPDVPLDAQLPREKRGNPMPSSQREAVWNLVAMH

SEQ ID NO: 748 - protein, 347 aa, Scytalidium thermophilum
MKVSVISALLANALSASAGTILWDGRFNDLTSSADLNKWSWSNQVGPYQWYIHGNGPVTNYVNLSPDYKNPADTGSKQGAKITLDSTAYWNGQNMRRTELIPQTNQPINRGKVWYHFSIMRKDVNPPSIYREHQIAFFESHFTELKSGWLSGAPGVSDTLLRWCVNGQTRWSTEWEADVWHNVAYEIDFSANTVGFWHSTGSDPLTLKVAPVSVSTSSNGADWHVGVLELPRSGYPDSNEDFYFSGVYIESGSITTSVAGPGAPVVDPPASSSTAVPPTTTLVTSTRVSTTTTSTTTTSSAAPTPTTPSCTPQQQWAQCDGLNFNGCKACVAPYTCHYVNDWYSQCY

SEQ ID NO: 749 - protein, 514 aa, Scytalidium thermophilum
MRITATFLALLPGMALAGGKNGGKCKKPLVSSQKLQSLVTIDDLLDGSKKLQEFAYANGGNRAFGGGGHNATVDWVYKTLKSLNYYNVVKQPFESIYSEASGTLTIGGEDIQMQPMTYTPAGDVSAPLVPVANLGCEVEDYPAEVAGKIALISRGSCTFSQKSQNAKAAGAVGALVYNNEEGLVQGTLGEALLDYAPIAGITQADGLALLEKLAEGEVVADLKIDATVENRITYNVIAETKGGDHENVLVVGAHSDSVPAGPGINDDGSGTVGILTVAKALAKFRVKNAVRFCWWSAEEFGLLGSEFYVNSINGSQAELAKIRAYLNFDMIASPNYIYGIYDGDGNAFNLTGPVGSDLIEKNFENFFKAKNTPSVPTEFSGRSDYAAFIENGIPSGGLFTGAEVLKTEEEAALFGGEAGVAYDKNYHQPGDTVDNLALDAFLLNTQSIADAVATYALSWEGFPEVNLNQRRWDAERSKNIRRSGGSHGHGPRSGGHSHAHGVAHSGPCGGGDRA

SEQ ID NO: 750 - protein, 554 aa, Scytalidium thermophilum
MWFRLALLAAVASALVMESLSAVPKDWSELRPALPDEPIRLRIALKQQLDRAVMLDRAALDIATPGHPNYGKHFTRDQLRSLTAPSDASISAVTAWLQKHAIQPVLDHDWFTFTTNVSTANRLLDSRFAWYAHNQAPSRPALRVLSYSVPDDIASHIDLIQPTTRFGNLAARKSTIFDVHRLHTGKDIVPGKGRVVLSGVDTDDSKDCVGFVTPECLRRLYNVRYKPVNPQGNKVAIVSFLEEYARYDDMEEFAAELLPEATNANFSVELVNGGLNDQASTSDSTEANLDAQYVLALSYPIPLTEYSTISVSYGEEEQSVPKSYAIKVCNMFKELGARGVSVLFASGDSGPGYECIRNTGNNATFFEPTFPGTCPWVTSVGATMDMANERAVAFSSGGFSMYYGRPVWQKEAVDAYLDRIGDTYAPYFNRTGRAFPEVSAQGTSFAVFNQGDWLSIGGTSASSPVVAGVVALLNAARKAQGKAPLGFLNPWLYNNSAAFKDIMEGAGIGCRERDEFGWDGARWNATEGWDPVTGLGTPLLDKLLEAAAPGTKNE

SEQ ID NO: 751 - protein, 410 aa, Scytalidium thermophilum
MHISTARLLITSLLASVVAAAPHVPKTSKFLTVEGGKFKLGGKDFHFAGSNAYYFPFNGNQQDIEKGLTAAKNAGLSVFRTWGFNDKNSTYIPGGLPNYGGEGAGPSEVVFQWWHPNGTTTIDVSGFDKVVRAAEKVGIKLIVALTNNWADYGGMDVYTVNLGGRYHDDFYTMPEIRNAFKRYIKEFVTRYKDSPVIAAWELANEPRCGADGVRNLPRSPNCTPAVLSAWIAEMSAYIKSLDRNHLVTWGGEGGFNRQSDDWAYNGSDGGDFDHELSLDTIDFGVFHSYPDWWGKTVEWTHQWIRDHAAAGRRARKPVVHEEYGWLTPDKRLEYTGRVDNRTRVEVLGGWQRLTVEEKLAGSMYWQYGYSSYSYGRNHNDGFTIYLDDEEAKVLVYQHAREMNALNRHAH

SEQ ID NO: 752 - protein, 382 aa, Scytalidium thermophilum
MKFTATGLLMSLPRIVLGHGYLTVPFSRTRLGAEAGIDSCPECSILEPVVAWPNLDATPVGRSGPCGYNARVSVDYNQPSSHWGTTPVATYSPGQIVEVEWCVDHNGDHGGMFSYRICQNQTLVDKFLTPGYLPTEAEKQEAEDCFEAGLLPCTDVSGQSCEYSPDCTPGQACWRKDWFTCNAFQADSRRACQGIDNAPRGSCYTSIAGGYPVTKKIRIPNYLSKHTLLSFKWNSYQTGQIYLSCADIAIIPGSDPTTPTSTTSEASATATPTASCTPVSTVTLTFSERVVTTWGQSIKLVGSIPELGNWNLSAAPTLSSSEYTSTNPVWTHTIMLPVGTSFQYKFVRVEANGAVTWESDPNRLYTVPSGCATSIRVISEWR

SEQ ID NO: 753 - protein, 217 aa, Scytalidium thermophilum
MKPAAIFPVLLVASSSANAKKIFCNEGTTESWDLAQVEHNGYLHETTDVYFDRPPALVAGYNIAQFIAPFDSSCDSYMPTTMMWMVGSQLFTRTKHGSVCNQTIVEYPLDVDVTAGDWHRVIIGASWQASTTGFLKVWYDGKKVLDEQDIPTTVTETEQFQFRIGLYANGWYDDRTRQPPEGIYEVFYDKIAIATTKDEASPDTWKRKPISCRRLTR

SEQ ID NO: 754 - protein, 386 aa, Scytalidium thermophilum
MRSLSLLVAGVLLAGHAAAAPQIPNFTQEEIDSGYALRELSRIAYENAMARVEKSTSGCTKENVQIRREWRNMTLADRKAYQEAIQCLMQKPSRNKGIDGARTAWDDYGVLHYFQTPYVHNSATFLYWHRHLNWVLEQDMRELCGYTGTVSYWEWGLDCGGLGTVETSPLFDGSEYSIGSNGAKVNSPGGGMPFFGAGPGTGGGCLLSGPFSNFTVNLGPNTARDPLKYNPRCIKRDLNTNICSRYSSLRNTTDVILNSPNLEIFQAIVQGDTRWPEGTRVGMAVHGGGHFSINGDPGGDFYFSSLEPGFYFHHGNIDRLHFIWQNLDWENRQTISGTNTMFNRPPTPEAVPEDIMGFEPINRNVTIGQTIDTVGGTPLCYVYAPW

SEQ ID NO: 755 - protein, 387 aa, Scytalidium thermophilum
MQLITLAALLPFALAAPVIQQPGAQLIPDSYIVKLKDGASERALQDAIRHVKAGNVKHSFRSSRFKGFAAKLNREALEIVKNLPEVEYIEQDAIVRAYDLVTQENVPWGLARISHREKGATTYVYDESAGEDTCTYIVDTGIYVDHNEFEGRAEWLANTIDTDNTDGNGHGTHVAGTVGGVSFGVAKKTRLFAVKVLDSWGSGTWSSVIAGIDFVAADAANRTAAGECKKGTVANMSLGGGRNTAVNAAVAAAVQAGTVFVVAAGNSGDDAYWYSPASEPTAITVGASNINDGVPYFTNYGPGVDVYAPGVNVLSAWIGNPTATRAIDGTSMASPHVAGLAAYFLGLYGPKTPAEIDTLIKELSTQGVITGLPADTVNAVAFNGATE

SEQ ID NO: 756 - protein, 239 aa, Scytalidium thermophilum
MHFTKIFSTLGLASLALAGPVQVAERQTQKLRIMPLGDSITEITCWRAFVWDQLAEAGLADKVQYVGSQNSNPQGCRPNTPNWDQHHEGHSGWLAIDIANNYLEGWLRSTPADIVMFMLGTNDVFRGRSTNDIINAYTKMVEIMRRSNPRMKIIVDLVIPLSFNNAPIQQLNARIPQWAASLNTTESPIVIADCYTGFNSFSDLRDGVHPSLSGDRLIASRVGPLLLNYVRQALEERGQ

SEQ ID NO: 757 - protein, 435 aa, Scytalidium thermophilum
MARGTALLGLTSLLLGLVNGQKPGETKEVHPQLTTFRCTKKGGCKPATNYIVLDSLSHPIHRAEGLGFGGCGDWGNPPPKDVCPDVESCAKNCIMEGIPDYSQYGVTTNGTSLRLQHILPDGRVPSPRVYLLDKTERRYEMLHLTGFEFTFDVDATKLPCGMNSALYLSEMHPTGAKSKHNPGGAYYGTGYCDAQCFVTPFINGLGNIEGKGSCCNEMDIWEANSRASHVAPHVCNKKGLYLCEGEECAFEGVCDKNGCGWNPYRVNVTDYYGRGEEFKVNTLKPFTVVTQFLANRKGKLEKIHRFYVQDGKVIESFYTNKEGVPYTNMIEDEFCEATGSRKYMELGATQGMGEALTRGMVLAMSIWWDQGGNMEWLDHGEAGPCAKGEGAPSNVVQVEPFPEVTYTNLRWGEIGSTYQEVQKPKPKPGPGPRSD

SEQ ID NO: 758 - protein, 553 aa, Scytalidium thermophilum
MRLTSTAFAAGFFLARCAAANLLRGTGLDIGPDDDSVPASELQKRAETFHGWGEFDQLIDHSDPSRGTFKQRYWYSHEFWRGPGSPVYLATPGEQSAEGFNRTWLSSSRLPGWMANQTGGAVVLLEHRYWGESSPFEELTVENLQYLTLQDSMKDFIYFAKNWVPPFDPSGNSSADNAPWVFAGGSYVGALAGWLATLYPGTFWAYYGSSGVVEAIGDFWQYFVPVQEATPRNCSADVDAVINYVDTVLTYGTPKQKRALKEKFLLQDLEDEDFAAALEWGPWQWQSTQFYSAKNTSYGYTPYYRFCDYVENVWPNSTNKVPGARGVGLTKALDGYAKWMKEELIPGFCEEAGYPEWNGTYNTLCFQNLNASNVAYKDLSPGNWINRQWMWMLCNEPFEWWQDGAPRGHATLVSRLVNPSYWRKQCPLFFPVDKKTTNATYGIREGKRARDVNRWTGGWFATNTTRLMHTNGQYDPWRDSTLASMFRPGGPVRSTEQLPLKLVKGGVHCSDLYSPNWEANEGVRKIAEEAVEQMKKWVGEWYEERGVGKPWEV

SEQ ID NO: 759 - protein, 287 aa, Scytalidium thermophilum
MRASFAVLSFLTSLASAGPAPAYPGMKLLWSDAFDGPAGATPDTSKWNIITDVRTNNEIQQYSPSNTNLQLSGGSTVQLVPWRDQKTGEWTSARIETKFVFTPAAGKLTTVEALIRLGENPLDRRQGLWPAFWMLGDSIHHGTEWPICGEIDILESVSGHPLGHGTLHCGRNQGHGGPCNEPIGRGGAVSLPDYAGWHTWTVQIDRRDTSRGFRSESIRWLRDGAEWFVVRGEDIGDEGVWATLAHSPLFIILNVAVGGDWPGHPNGATLDGYGSMMEVDYVAVYQG

SEQ ID NO: 760 - protein, 305 aa, Scytalidium thermophilum
MRSSPLLRSAVVAALPVLALAADGKSTRYWDCCKPSCGWAKKAPVNQPVFSCNANFQRLTDFDAKSGCEPGGVAYSCADQTPWAVNDDFAFGFAATSIAGSNEAGWCCACYELTFTSGPVAGKKMVVQSTSTGGDLGSNHFDLNIPGGGVGIFDGCTPQFGGLPGQRYGGISSRNECDRFPDALKPGCYWRFDWFKNADNPSFSFRQVQCPAELVARTGCRRNDDGNFPAVQIPSSSTSSPVDQPTSTSTTSTSTTSSPPVQPTTPSGCTAERWAQCGGNGWSGCTTCVAGSTCTKINDWYHQCL

SEQ ID NO: 761 - protein, 391 aa, Scytalidium thermophilum
MRSVAAFLAAVLPAVDAACSLPSSLSWTSSGALAQPKNGWRNLKDFTYVPYNGKHLVYGSYYDGNRYGSMNFGLFSNWNEMASASQNAMSNAAVAPTLFYFQPKNIWVLAYQWGRTAFSYRTSSDPTNPNGWSAEQPLFSGSISDSSTGPIDQTLIADDTHIYLFFAGDNGRIYRSRMPIGNFPSSFGSSYETIMTGNRNDLFEAVQVYTIDGSNPKQYLMLVESIGSRGRYFRSYVSNNLNGAWTPHLTSENNPFAGRSNAPNATWTSDISHGDLVRLRPDQTFPVDACNLQLLYQGLQGSSSDYNSLPYRPGLLTMVGARPGNGGGNNQPQPTTTSSPPANTPPPNNGGGGGATVPRWGQCGGQGYTGPTRCEPPYTCQYSNPWYSQCL

SEQ ID NO: 762 - protein, 348 aa, Scytalidium thermophilum
MFWLGLLSLPTAVQAQFGFSTNMLRFGCSQLSIDRIDPLVEPGNIPSAHVHQIVGGNAFNASMPVTDISKLSTCTTCSFDQDHSNYWTANIYFRARNGSFKRVPQMVNDVIGPANGGITVYYTAPGPNTVVAFKPGFRMFTGDVMRRTPTNLGRQVQSCYRCYDGPNFQGNTQAPCFDPQRDTEAFPNRPCPGGIRSSVIFPICWDGKNLDSPDHKSHVAHPVDGPAPFAMVSGRCPSSHPVKIPQVHYEIVWDTSKFNNRAEWPADGKQPFVLSTGDPTGYAQHGDYVFGWQDDTLQRAMDAGCFGATCRALTTQSFDKANRCSVKPQVREDNDGWLNELPGGHHVM

SEQ ID NO: 763 - protein, 468 aa, Scytalidium thermophilum
MRRSAVTVGGALAALLGVQPHGASASVTVRKTGRGPTGYEVDFRYVNATAKSVKIGGGFQPFTDQFHTTGTIHRVNGRFDPWSYQPGDFWVSNPYPQLPEDYPWPYEMQRSNESGHEGEWILTVPLPSGTYTYAFLPDCAYAPNCTIDSGQLVVDPDVPPLQNVPGDALSSNFHVPFDPEFQFTPELNLNFDYALPAPKPCHNRGTVMYVNYTSPGSIHPAPDVHDFVIYLPPGYARNKTKTRKEYPLLYLSHGANGNGGDWENLGRMSHIMDNLIRLGHIPPTVVVAPTFYNLNATYQNNTKYLYGNRTHTVPVPPALLVRENYEKYLFPFVESHFDVCRNASCRAFAGLSMGGVLAYEMLVNATDTFDYFGLFSPATLPPYIGEKDLKKNPALKEKGIFIAYGLYDFVFQWARDLQTALDALEIRYLNRVTPFGSHAWNTWQDELWWFGQKVLWKELPLWKLVGRR

SEQ ID NO: 764 - protein, 327 aa, Scytalidium thermophilum
MKASLLFLLAPFAAAAPTVEPRQAAQSIDALIKAKGKEYFGTCTDQRLLQTGRNAAIIEANFGSVTPENSMKWESLNPQRGVYTWGQADYLVNWATQRNKTIRGHTLVWHSQLAGWVRNINNRNELIGVIENHIKTVMDRYKGKIYHWDVINEMFNEDGSLRPSVFSNVLRDEFVGIAFRAARAADPSAKLYINDYNLDQPGYAKVTRGMVDNVRRWLSQGIPIDGIGTQGHLQAGQGAGLAQTIRVLAGSGVKEVAVTELDIQQGTNTQDYANVVRGCLDEPKCVGITVWGVRDQDSWRPQGNPLLFDGNYNPKANYNSIVQLLSR

SEQ ID NO: 765 - protein, 391 aa, Scytalidium thermophilum
MKFSKSALLALATAASASPTKRQSAAPGACPSPVRLDASTNVFRQYTLHANSFYRAEVEAAVRQISDPTLAAKAAKVADVGSFLWLDTIKNIERLEPALQDVPCDHILGVVVYDLPGRDCAAKASNGELKVGELQRYKTEFIDKIAEIIKRYPNTAFALVIEPDSLPNLVTNIDLTSCQQSASGYREGVAYALQQLNLPNVVMYLDAGHGGWLGWDSNLRPGAEELASVYKRAGSPSQLRGFATNVAGWNSWDQTPGEFASRSDAQWNSCQNEKLYVEKFGAALRTAGMPNHAIVDTGRNGVTGLRQEWGHWCNVDGAGFGQRFTTNTGSELCDAFVWVKPGGESDGTSDPSAVRYDEFCGKPDAFKPSPEAGEWNQAYFEMLLKNANPPF

SEQ ID NO: 766 - protein, 785 aa, Scytalidium thermophilum
MKFLGRIGATALAASLYLTAGAAQATGDAYTDAETGIKFQTWSPDPQFTFGLALPPDALEKDATEYIGLLRCTRADPSDPGYCGLSHGQVGQMTQSLLLVAWAYENQVYTSFRYATGYTLPGLYTGNAKLTQLSVNITDTSFELIYRCENCFSWEHEGSTGSSSTSQGYLVLGRASARRGVVGPTCPDTATFGFHDNGFGQWGVGLENAVSEQYSEWASLPGLTVETTCEGSGPGEAQCVPAPEETYDYIVVGAGAGGIPVADKLSEAGHKVLLIEKGPPSTGRWKGTMKPEWLEGTDLTRFDVPGLCNQIWVDSAGIACTDTDQMAGCVLGGGTAVNAGLWWKPIDLDWDENFPEGWHSQDLAAATERVFERIPGTWHPSMDGKLYRDEGYKVLSSGLAESGWKEVVANEVPNEKNRTFAHTHFMFAGGERNGPLATYLVSADARENFSLWTNTAVRRAVRTGGKVTGVELECLTDGGYSGIVKLNEGGGVIFSAGAFGSAKLLFRSGIGPEDQLRVVASSKDGADFIDEKDWIKLPVGYNLIDHLNTDLILTHPDVVFYDFYEAWTTPIEADKQLYLEQRSGILAQAAPNIGPMMWEQVTPSDGITRQFQWTARVEGDSRFTNSSHAMTLSQYLGRGVVSRGRATITQGLVTTVAEHPYLHNAGDKEAVIQGIKNLIESLNVIPNITWVLPPPGSTVEEYVDSLLVSPSARRSNHWMGTAKLGTDDGRSGGTSVVDLDTKVYGTDNLFVVDASIFPGMSTGNPSAMIVIAAEQAAERILKLRK

SEQ ID NO: 767 - protein, 690 aa, Scytalidium thermophilum
MSLRFRNGFIVGLALAASKLAAAGSEPSMTVLPGTAANCAWWYDHNGFLSCTQVLQQNWISLDEFRQWNPSIGPGCSNLQVGHSYCVEIDPSIPTDGVSTTSAVSTTVASTLTTPSTFTTFSTLVTSSETSSTTTNSTTTSTPSSSSTSSSSSTSTAPSSTAPTTAPPTTTATAPTSTAAPTSPKPTGPVTTPSPIQPGMVSSCDAFYFVAKGTTCSEVLSHNGITLAQLYAWNSGVEPDCSGLWANVWVCVSTFDHEPTPTQPDSGVTTPSPLQEQVVSNCDEFYLVQPGETCSIVAGKNGITVEELKAWNPSVGADCSGLWADAYACVSVSGHQPTPVEPGNGVETPSPIQGGMTTSCNRFHFVDGELCSSILKKYQISLEDFVRWNPGVGEVYASSGESQSQAADAVLFSKLLDGQNNLPLDFLASLLPNLQTLCAALNGGLGFRFLTPGSLPRLWRVCITERNNWLTMDPSMARRVLAAGQHSLESVDLHMCDPWQMYPDDRPRHALNYVEVYWEMASEPDDSEHDSEHCGGRGEAEEGEEGTQPQEEQEQNQGQGQEQPQPTAAAPPNLALLPYGIVVPHVKNLTVVHTTLDAIVLTRLFLTFPGVTRLHFTMGGPCQWDEQPPVQEFPLKPVIYEIHRPGVCLTLQVAALYTSPTTTKAIISHRRPASSCPSPAGQPAHHLASH

SEQ ID NO: 768 - protein, 357 aa, Scytalidium thermophilum
MTNLFHTLLAGAALLTATANAQCGAGSPHATVTGGGNWFQAQRGSQQLYAGSDYRLAIQTALDAISPGQRVAVMASGSIGASTITITSGKIFEGCGTINVGNRAGRGAIESTDTNDVQIPYLSMTGNPYFGLRFSGTRNLYLGKINMNLSGGLGIRFDRDRAPNYNVRMDTITVTGAGSHAVETWNIDGLQINSVIARNVGECGLLLQKTTNARVGLVDGENVATGNGYATLRFANNNGQLPNGQYTTNVYVDRVVSRGGGRGFFCVSQSGGASIGYLDLANNGNNAILIENCYNVQIQGGRVNGGGEVRLSARSEFPNNRDVSITLQVDNTSVREQPCGQNIRWNISGNARRQTCS

SEQ ID NO: 769 - protein, 798 aa, Scytalidium thermophilum
MRTFTFKWPHPGDEVYVTGDFDDWSKSHRLEKVGESLQVTVTFPDDMGKLLYKFVVDGIWTTDPTVTQEKDAEGNDNNVLLPEQMDKVEESAATAAITTVTPESTTAQLAAAVPLEPKEEAAPAAPAAATTEETKEEPPKAEEKKEEEVVILSSAAPESITAQLAAEVPLEKKEEKVEETPAPEAEAKPEEKVEETPAPEAEAKPEEKVEAPAPVAEEKAEEKAEATLAPETEAKPEEKIEETPAPAAEEKVEPTPAPQTEAKPEEKVEETPAPVAEENAESTPASAPEAEAKPEEKPEVKEEEKKEETAEPVPEAKPEEKVEEKAEEKTEPAPEPAPEAQPEKSEEKKEEATEAAPEPVPEPAAAVEEPKAPEAAAASLETTEVKINPLPAADGAVNPIQLAPGEEVPKDITTAAIDTHVTLDKESYEQSDRIPGLETALPAVSSTMIPESSLPVLSASEAEAATAAISTVTPAATTVALAAEVPKEAEATVPEVVKESQEKAHADPEASAIPEEVKEKAEVEKELLEKVPEVPPAAEGVAIEDPAKAVSAAVVDETTVTEAVAKAVEEAKEQAEVEKAIENISEEVPAVVRKSISEAHVSPEAAVNAEAVEEKKEVEAELVDKVAHKAEEAAAAAEAGPKEFVAGAKEEVKEVVAPVSVVPAPAEEAKPAEEVKPVEEAKPAEEPKPAKEAKPTEEAKPAEETKPAEETKVAEESKPTEESKPAEESKPAEESKPAEEAKPAEETKPAEETKPAEETQAAEETKPAEETNGATAADKKKHRLSGFWSKLRAKFVGA

SEQ ID NO: 770 - protein, 930 aa, Scytalidium thermophilum
MFSQLLTSLGLLAGLSSAGQTIQQYATERPLGECPGYRALNVKTTATGLTADLRLAGPPCNTYGTDLEKLRLVVTYETENRLHVKIEDADELVYQVPESVFPRPASRGVSSTKSALVFKYKSNPFSFSVSRAKTGEVIFDSSAAQLVFQSQYLRLRTKLPENPNLYGLGEHSDPFRLKTTGYIRTLWSQDSFGTPENSNLYGNHPVYFEHRKSGTHGVFLLNSNGMDIKIDKDPKTGQYLEYNTLGGVADLYFMAGPGPIDVSRQYAEIAGPPAMMPYWGLGFHQCRYGYRDIFEVAEVVYNYSAAGIPLETQWIDIDYMDRRRVFTNDPERFPMPLLRSYVSHLHSKNQHAIVMVDPAVAYATDNNPAYIRGVEDNIFLKRENGSEWLGVVWPGVSVFPDWFAANITKYWNNEFHQFFSPETGLDISGLWIDMNEPSNFPCYFPCDDPWTAAQGFPPTPPEVRTHAPRPLPGWPCEFQPEGSSCKRDMEPRSIAAAEPQARGEVAIAQTHALPAALRARVGGKWQGLPGRNLLFPKYAIHNKAAYMDSWNAEQGGISNKTVNTNLIHQNGLAEYDVHNLYGSMMSIQSRHAMLSRRPTERPFIITRSTFAGAGRSVGKWLGDNFSSWEHYRGSIRAMMAFAAIYQVPMVGADVCGFASSTNEALCARWAMLGAFAPFYRNHNEYPPAISQEFYRWPIVAEAARRAIDIRYRLLDYIYTALHRQSVDGTPLINPMFYLYPNDPKTFGLELQYFYGPGLLVAPVTEEGATSVDVYLPNGIFYDWYTHKRIQGRGATIQISNQTLTDIPLFLRGGVIIPVRTKSGMTTTEVREQNFELLVPLDSEGSATGELYLDDGISLQQKVTTLVTFKYKHGVLSARGEFGFKTNVKITKVTVIGAGRKRDGGAEGESTIITVDQALTGDFDILVNELE

SEQ ID NO: 771 - protein, 262 aa, Scytalidium thermophilum
MKPIVLATSLLASLAAAQPHGHGHHHFHKRLADRHNKRGIVTEWVTEIVTETVTALVDETTTELIPPSTSASSAAEAAETTPATSSAPEAQPHVFIETPEPSPAPTSTTTSEAAPPPPPPPPPPPQPTTTSVEPPVQPPVETPSAPGGGNSGGGSSSDEIFSGDMTYYALGLGACGFDDSGKDNTENIVAMSAEQMGSQSNGNPNCGRSITIRANGKTTTAVVRDKCPGCRFGSIDASEKLFLELFDDLGVGRGHVEWWFNN

SEQ ID NO: 772 - protein, 1392 aa, Scytalidium thermophilum
MKCLPLVLLSGVSAIAALGAAENPVAPLEQRDTVAVTYGAEHPSTWHQEAKRQEPPAPVTVFANATFGNATAVNATATVSEAKLRELASKLRLLYAYYATYKESRQTGLLNNILGLVGNILPPLEDVTDALRRVLIGENISIKEQLAIANALGVGVVTKYVTVTGGATGVPAAANFTVTAISTLTTTIEPAIEQPTVTITVSPDPETITEIETVVVVSAADPTTVTIDQVLETTVTEKVIVETPVLIVESSTETRTITIFNEVVPSTTAVGSLETELASCLGELSSCLATSTPSTSDGSEPSTPAPSDPESTADPEPSQTSAVDPVDSTAAETTSTPEPAQTTTAEDPLSTTTLGNDEDDSPTAVDTTPGSSPTDDVEEPSTTSSGNDEDDSSTAVDTTPGPLPTDGLEEPSTTSAGNDDEDSTAVDITPGPSTTEGPEEPSTTSTGNGDEDSTAVDTTAAPSTTEADEPSPTTSAGNGEDSSSTAVDTEPSTTEGPEEPSTTTSAGNDEDESSTAAPSTTDADEPSPTTSTGNDDEDSSSTAIDTDGPSPTEGPEEPSTTTSAENDEDESSTTIDTTPGPSTTEGLEEPSTTTSAGNGDEDDDTTSTAVDTTPGLLTTEGPEEPSTTTPAGNGDENPTSVDTTPGPSTTEGPAETDASSDVTAAPTTSSAEEPQPTTSDVETPDFDDPTTSSAVDEPETSGASTTDDTADSTSSVHIPTSAPDSSESPVITTPPRDSTSSATPAETTTEPDSETTATSDASPTDEEPTSAASESPTITEPSATDDGEEPTTAPPTDGPETSSAAQTTGSEEDPTTTSDVEPTAPAESTLTDTPETSTAAESTGGENPSTISDSEPTAPSESTPSEAETSTAQTTASEADSSTASESETPITTEAPSSPATSSAASTEDSTPATESQESTDTSLVDVTGSAPSTTDSENDTTTTVTSTVTSTTIVNEPPADTTLDSDPTTADSSASTPSTEDPSSTGSDATSDATTGPTPAASTPPATSGADTTAQETESDATSAPTSTTLVTSVVSDSSAETSTTSSAPATTSAAPVTEQFDDKIAVYFGMPPHDRKKVRRSFNLFGARHDDKPSLAELCDDPNVDIVILGYLTDVRFGWEVKVYPRLEMDHRFTATQTSAMKKLAPGLHYYPALETDIQHCQEIGKQVLISIGGPHADMPLDSDEQAIDFADKLWELFGPVTDAIDPSLRPFGSAVVDGFDLNKHDECASNYDTLATTLRSHFAADPSKTYLLTAAPGCLYPDMSIHPGYLAQADYVWPRYFDNPKCDVGSPRFLDSVKTWSTVLRTNSIPANHTQAQLLIGLEVRADLFTSSGSPVTSALLAEAREAAGRDVFGGVAVTPDRSGVALSEIKFGGEGLLSWLRKVLGGGL

SEQ ID NO: 773 - protein, 246 aa, Scytalidium thermophilum
MKLSLTTLLASALSVQGHAIFQRVTVNGQDQGSLTGLRAPNNNNPVQNVNSQDIICGAPGSRSQSVINVNAGDRIGAWYQHVIGGAQFPGDPDNPIARSHKGPISVYLAKVDNAATANHQGLQWFKIWHDGFNPSTRQWAVDTMINNNGWVYFNLPQCIAPGHYLMRVELLALHSATYQGQAQFYISCAQVNVQSGGNFTPWQTVSFPGAYQANHPGIQVNIYGAMGQPDNGGRPYQIPGPEPIQC

SEQ ID NO: 774 - protein, 445 aa, Scytalidium thermophilum
MSISPFFENCNASPCLSQVAGLVNGDAPIQYEACTSLFGVPTVTTYIPPVSTDYTTIVDTSTYIDVIVEVSTTYTTEQLLSTLYQSTKVTTTQFTSTKTVTSTVTTTNYTTSGKGKRRKRSACKPKSSSTLASSEAETTPAEETTPAETTPAEETTAAEETTPAEETTPAEETTPAEETTPAETTPAEETTPAETTPAEETTAAEETTAVETTPLFPTATDCPSLEEYSSACSCIGAVETTITETAEAETTVLTEYTTTTVTSESVSLETATITVTTSIPITVTVTGTATTKTKTTTTITSTKTVNTALPTSWWVRSLRVDQPPALAGKNVQFTGNGNSPKDGEITTGAGTSLNVKSTGGQPYLTSNSSFKLRLEPGQGLQRRKLQLRSTTGGAADVTCSFGVNLILSCTGNGWTRIIECDGDLYMASNSYQNAQCQDVVLRLAA

SEQ ID NO: 775 - protein, 277 aa, Scytalidium thermophilum
MKTTTLTTALAYVAAAVAKPLEPRQGTPGSGPFAPAGWYTVGQLPRHTIYAPRNTPQDAKLPVLLWGNGACSADGLSAVNFLSQIASHGVLVISQGTPWGQGSTTGQQMRDALNFITSPQARNVNADFAKVDSSRILAAGFSCGGIEAYEQIWDDRVFGVGIWNSGLLNNYEQARNFRKPVFFFLGGPSDIAYQNGERDYNYMQPGVPKWKGNLNVGHGGTYGDYNGGKFGTAASYWVEWLLRGNETAKSFFTQGGAQRDGWQVVFADLDRIQVNPI

SEQ ID NO: 776 - protein, 408 aa, Scytalidium thermophilum
MLLLLLLALPSLPGLGAAQQAGTVTTERHPKLAWKHCISPGTCLTLEGELTIDSNWRWTYDRETYDDCYSPSSGWNSAVCTDGRGCADRCALDGVDNYAERFGVFTCRDSVMLEFTNAGDEAVNIGSRMYLMATPTKYQTFSLLGNELTFDVDTSRLGCEMNGALYFVAMDEDGGMAKYPGNKAGAKYGTGYCDARCPRGARFVNGEANLGSQGVRTGRDGSCCAEIDVWHGNVVSTTFSAQSCRTSGQGTCEGNDGCNTAIKGCDENAITFRSSLYGPSRGHIIDSTRRLTVVTRFVPGPNNTLAEIQRVYVQDGLGVSEIVAEQSNPKQLGNTLSQPMVLAMAVWDDYHANVLWRDSAATGLVDGECEMTAGAPSEIELEDHIGGGNYVVFSNIRFGPIGSTLRLT

SEQ ID NO: 777 - protein, 348 aa, Scytalidium thermophilum
MPSLQTIGLAVLAAAQAVSAATAGCGKAPPSSGQKTITVNGRQRQYILQLPNNYDRNKPHRVVFGYHWLDGSMNDVANGGFYELRQRQGGSDSTIFVAPNGLNRGWANQGGEDIAFTDALVNMVKNDLCADETQFFATGWSYGGAMSHSVACSRPDVFRSVAVIAGALLSGCSGGNTPVPYLGMHGAADNVLPIAMGRQLRDHWIRTNGCANKNAPEPSAGQQAHMKTVYDCTRAPVIWIANGGGHVPDPTGNGGQKFAPPETWDFWNSIAGLPGTGTGGTPTNPGTPTTIVTSVINTPTQPAYTPPPPQQNCSPRWGQCGGQGWQGPTCCEAGSTCRQQNQWYSQCL

SEQ ID NO: 778 - protein, 1718 aa, Scytalidium thermophilum
MLYLIVFLLSLTTALAQQSFPGGGGLCSDAIPCKIGCCSKNNQCGFTPEHCGEGCKHDCDSKAECGQYAERGNKDCPLNVCCSKWGFCGITEDFCGDGCQRNSDGKGCGAAPRPAECLVETNALKYKRRVAYYMLPDYMERVRGCHMFMPEDLLVTGLTDINVAFINFGEDFKLVDAGGDIVHRLAKLRLDHPGLHVSIAIGGWTFNEGETADYWSKMASTFTNRHTFITSVVQYLIKYGLNGVDLDWEYPVAVDRAGHPDDFQNFVLLVAEMRRAFDREDPGWTITLTLPTSYWYLRGFDLQGLQKHVSWFNLMSYDLHGMWDYGNKWTGPYLRGHTDLDEIDLGLDLLWRNNIKPENVVLGFGFYGRSFTMADPNCHQPNGICQFTTGGNPGICSKTRGVLTYQEVWGRNDSSDAQTYYDPKTTVKYTVFDGNQWISYDDAQSFHDKKVFLSKRCLSGLMVWALNQDNGHFDAYHALMGDVSHLEFDGAENSEEEKERLAKELAAYTGQNCFVTTRCTDGSSREQGIDQVCPGGTQSVATAHAPFQLRYSMGGGEKCKKGWFKHICCPKDAAPKNCEWVGVPERNVLGCSGVCGRTQFKLATDTARDAKGEAMCYTGTRALCCDSTAILHDCYWTSCQDLRSGMPTCSKSYKFLHYRLNTPDGTGYCSRTFGSSDHERYGSGLCCPDTSAFSNCRWSNDPGRKSPAPAVPVSVDSACQPRPCKSNEIKVADALDPPRSSFLASGQSCAGVKYPPGVELSHHLCCDPPTRFNKNAPVAPEKLFPTHYGHHDEYDLQWHYNDDYRHNFRDDFDDPTEDGKDAFGFITLHGPEGSLDNSFSTTYTFVSEKREVPKTKRSLITLDQSVLDSVFDNATQVLHVYCNYPAGSPECDKIWIDGAEDTIIRLPNHVGEGPFARVVSMKPVSSGMKLPRHHVEHRSADGLHENPVYEVVIDYNFAAIAPKREDEPIFMRVDYSNMLTYWEEVVEAEPDRAKRGEGNVLKRHTTDEWHSRVQRAAQKHKALRKRSGAVNISVPMDPVMDEVGTENSSRNQKRWFGSFGKWLEKVTTVEKAELGHLPLGWADSINLFRAQYGCPGQTFSANLRMDLEAQLSMDVTYAYYFVGSFIPPSKPDVYAYLSISPKGYVGLRMEGNAVMQMTSGKKKLVDTLAYPGLAIKGIAAVGPTMDVFGEIRGKITLHGEARAGANLWFGYAQVYWPQNDEASQRYEKLLGLDRSLHAPDPEFITPTFEAGVRLDAQLDVIVQPQANIGIKIGGGSLLKTTIMDAQLSGYLTGDLSFQASSDVNTGTNSFRYSYGVYFFYNIGYTATAKILGLIDWALGPRKAWPQDQRINVYGPINGSIPLTKRSLDAGLEYAVNRSMLLPRAGDNGNGNQGALTPNQPVFSQNIQCPPGGSAPVRLPELRFGMCDGWKRMRNRPTTLTYSGAKHLVEERRKVQCKSGFCKGASEQFEKATGLGIKSPMSCDEAPWASTEEGGDFLDKADRTATCVPSYMNSGFGGNCQKLVSNLVSNWGKLDPTIPNDKKKDNWVEWKTPRPWTSQTRLGDNENRPVTYPNRMPPPEGMVGRTDEYVSWMFRRNYTWSIIDNSAQSSQWWGVTGREFNNKKYKPRPGHDAILCALNTFGQDDLFRMPKYNGYCLQAGTHVSYHWPAIPQIGRCLITFAPPTTTTTTKRSDGSEYYDGWEVLSYIRQLRTWLDESRG

SEQ ID NO: 779 - protein, 530 aa, Scytalidium thermophilum
MMLFRTQTSVVAASMVAAWAYQVAAIQLWTAPAAIPTSVPARCRAALVQNITCANYLVTAGLVSSGAALEDDEAAEYCTNTCYDSLTTFQRQVTAGCGTEMYVLHMNSTYMQSPAELANSLVWAYDVSCIKDSAGFCLRSLYAGLKELCSDCTLKYAAAMLNSEYGRQQISPEAFSELLSSCSANPTSYTYTYTSTSVTTTSTSSADEPLPTCLGETYTVKAEDTCLSISRDKGVGTDLMINRNYLDYNCTTLSPGMSLCLQDKCTIKTLDENSTCSELIRDQPFGLVQLLSWNPSIHRNCDNLDSMIGRSICLSPPGGGTYDVNVTDTYYEYYPTLTSSLISNWVTAVDDVGTISFTTSWYTPTLNLSATPTPWLTITYNETLASELAQQTQYCWLNDDDFANGFNEEDYPEGCQSLLSVYCFPTPGAPVPTSPARIPAMCTPDRSEYIIIDDDEPPASTTSAPATTPTPYQPNMIHGCKRFYKVVSGDTCQKILDTFGLSLQQFVQWNPDVGEDCRTMFLDYYVCVEA

SEQ ID NO: 780 - protein, 431 aa, Scytalidium thermophilum
MIVTNLVGVLLLASTGASRSITRRACGFSVPAEAGDTCASIAEFWGITEAEFIAWNPSVGAGCSAGVVPGLEYCIEWIGPITTTTSSSSSTSTTTTTARTTSTTSTSAGPSPTQDGLISTCTKFHKVVSGDTCQKIVDKYGTFSLRDFYTWNPAVGTECSYLMLDYYVCVGIPGTPTTRPTTSTSSTITTTSVPTQSGITRDCTTFYQVVSGDTCQKIVDKYGTFTLSNFYSWNPAVGSDCSGLQPGVYVCVGVRGTPTTRPTSTLPSPTQTGLVSNCRDFYKVVQGDTCQKIVDKYKTFTLNDFYKWNPAVGTSCTNLQVGVYVCVGIPSTPTKPITTSTARTTSTSTRKTSTSTRTTTTTSSAPSPTQPGIISTCNKYYKVKSGDTCDKIRAAHNNSFTLQQFYSWNSGVGNGCTTLWVGYYVCVGVRK

SEQ ID NO: 781 - protein, 485 aa, Scytalidium thermophilum
MLPVLAGITLLSFGLIPGASGLERRGDGIVRAPVRAIPGDPLPNLRGRQNAIDVINQLNGTRYAVEVQLGTPPQTQYLILDTGSPDTWFNPTCATSRSAAECRRYPRFDLDSSSTLVDLRQSSLLRYGSGQAMVEWYRDTLTIGSAEIKNQIVGINVDSEKIPLGILGVSPSVHGTNDYDYVLDSMVKQGLIKSRAFSLDLRSVENPNGAIIFGGIDTGKYIGSLAKLPILPQKQSPRGGNRYYVSMTGVGLTLPDGTILKSEAIETPVFLDSGATLSHLPTRIVQALANSFNDSAYDPEMGYYYLPCSATQLNASIDFYFGDKGISVPFKEFIWQVGPYCLLGAIAEDTEPILGDTFLRAAYVVFDQDQRNLHIAQAANCGENLVPIGTGKNAVPSLTGDCTELPTPTHTGSKSGSDKLDVTGTHAPTATITGVVPDLDDGPGPAADGTESTGPSETNAAPAVGKSGMGLAAAVAVANVVAFAL

SEQ ID NO: 782 - protein, 194 aa, Scytalidium thermophilum
MKLLCVLAGALGLAAALPSSGHPPTTEHLEFHNNKRITTRQVETVRNDLEEGNPAACPRVILIYARATGEPGNMGISAGPNLATSLTTTYQSNGGIWVQGVGDPYLAQGAHNFLPLGTTREAIDEGKRLFQLAHTKCPTSVVVAGGYSQGTAVIVNAIRELWDEEAAGVGEQVQGVVLFGYTRNEQNGGKIPGG

SEQ ID NO: 783 - protein, 645 aa, Scytalidium thermophilum
MGLLRVAFLSLVALTTAASVPKQRVRRQVTELRSSYDFVIVGGGTAGLTVANRISAALPSKNVLVIEYGDIAEHTPGGFDPPVNWGEGHPDQAPRWSFNSLPNPAMGNTTAFVMAGQTLGGSSAVNGMFFDRPAKEDINAWHELQGLAALGPIKWNWNGLYPYFKKSVTFTEPSPAVASQYGYTWDVSAYGGSGPIYSTYATFQWADERILAEAWRDLGIQDQQECADGSKEGICWVPASQHPITGARSHAGIGHYQDVQPRSNYDLLVKHQVIRVVYGPGGPLSGSAPKVEVRSLDDDSRFNVTVTGEVIISAGAIHTPTVLQRSGIGQASFLSSRGIPVVVDLPGVGANFQDHSGPSVRWNYTEEYAPGLWPLSSEMAKNATFKAEAIAAYSETPAAGPYTLAGGNSAIYVSLPHLAGQTVTKQIARKIRQQVLTGAAASFLPADLRTSPTIVAGYAAQLLVLAKLLEDPNSPSLETPWAMSEGPVTAWNFLLHPLSRGTVRLNPTDPLEPPILDYRAATNPVDMDLHRAHVRFLRQVIYTPTLQQFGAIELGPGASVAADDDDLAEYIQQNSLLSFMHPCCTAAMMPRLLGGVVGTDLKVHGTKRLRVVDASIIPLNPAAHLSATVYAIAEKAADIIIDDWS

SEQ ID NO: 784 - protein, 471 aa, Scytalidium thermophilum
MKYTLAGSVLLYAATAAAQSCSQVLVPSKAKPVVAEGWQAQLVAGGLTKPRSLVFDSTGALLIVESGKGISRHRFTDNGGTCLHSNHSHMLVEMTGLNHGIALSDDGETLYASTAEAVFAWTYDARGGAVRGEPRRVIANMSNSDLVTRTLVMSRSKPGTLIVSRGSADEHALHAETISSGLSQVRAFDLTNLTSTSAPYDFSSQGIVLGWGLRNSVGVGEHPGTGAVYAVENSVDGVKRNGVDVHENNPGEELNFLGYANGTDTGKNFGYPHCFAVWQVDEIPDNEGLSVGKQFAIQENSTHRDETCEEKYTPPRLTFPAHYAPMDIKFTPDGKTAYVSFRGSFDRSSPVGYRVASLAWNSATGEPEAAADSTDALSDVIFNADLSVCPDGCFRPVGLALDGEGRLWMASDATGEIYVLQKTGGSEGVFVQPAGDNGASSGENVAASVSGKQTAVLGSIVAAVVVAWLMA

SEQ ID NO: 785 - protein, 1008 aa, Scytalidium thermophilum
MMPRLSFQSLITLSALASGVTAIAVDSSDVHSLTSPPEAIVTVIISKTITTCPSPPPPPPCSATNVVPSDTEPSVSSSVSSIVSESTWGTISSTSLSSIVLSSTIESSTTSAAESSGPVESSTSQVSLSETSFNSASSSVSSTSEFSSTSAVSSSSSSATEVSSSASEVVSSSTSEAVSSTSEAVSSTSEVSSTSEVISSSTSETVSSTSEVVSSTSKVSSSSTSEVASSTSTASSTSAVSSSSTTSAASSSTSAAAPACTDFWLEKITHQGVAPFGGNGYKVFRNVKAYGAVGDGVTDDTDAIQLAISDGGRCGPGCTGSTKTPALVYFPPGTYKVSKPIIDYYYTQIIGNPGCLPVLKASADFEGRWLLDTNPYGANGPAWGATNVFWRQVTNLVLDITDIPPEKEVSGIHWPSSQATSLSNLVFRSSQAPGTLHQGLFIEEGSGGYMGDLVFYGGNPALIIGNQQFTMRNITVFNAKVAIKKLWDWGWTYKGVSINNCEVGFDFTATSDAGNLEVGSVTILDSEIRNTPIGISFGSPNGITPPVANNFIFENVRLDNVPVAIKGPSGTVLAGTTGSTVIARWGRGHKYTPTSGPTFFEGTLPPYARPSSLVAGNAYYERSRPQYHEFPLSEFVSARDAGAVGDGVTDDTDALNDLFASAAAAGKIVFLDAGMYLVTKTVHIPPGSRIIGEALPVILSSGAFFANPSAPKPVVQVGTPGSTGRVEWSSTIVSTRGAQPGAILIEYNLASPAGHPSGLWDVHVRVGGFAGSDLQLAECAKTPNTTITEDNLQQECIAAFLSVHITSTAAGLYMENCWIWVADHDIEEGANNQQITIYAGRGLLIDGSQGPIWLVASSVEHHQLYEYQLVNAKDVFIGQLQTETAYYQPNPDATLPFESLAEWHDPVFTEAGDSGWGLRIVSSKGVILPGVGLYSFFDNYDVSCSQIGEGARCQKRTFSIEGKSSVTVYNLNTVGTKHMITVNGSDVANYEDNLDGFVHTIALFTTDE

SEQ ID NO: 786 - protein, 632 aa, Scytalidium thermophilum
MARLTSTVVALLGIAGTVCLAYPREVPASKVFLNGRQVEKEYDYIIVGGGTAGLTVANRLTEDGTTTVLVIEYGQLSNSASVTTVTGGFAGMGDASLMFNIQSVPQRNLRNRTIAVQIGKVVGGSSAVNAMMTVRPAAEDFDRWGYFFSKASHWSWTGLLPYFKKALNFVPPDEEVTKAANITYDTSYWGTTSGVYAGWPSFQYPSTTAQMEAFRGIPGVPFVQDSGAGLPGVYWYPTFMDPKKVERSYARTGHHDQAVTRPNYHLATGSKVRRIVLEGTKAVGVAFVPATGSSAAETLVRARKEVILAAGAIHSPHILQLSGIGPKNLLTAAKIDTVVDLPGVGQNFQDHPMIQASFSYQRFNIRPNPNDMFSNATFRAWAQQVWAANRTGPNSIATGNSAAWLSFPVISSRADEIATALEAQNHAAYLPSDADETVAAGYRAQMLAYAAALRSNGSAFYNLVITGGPSNGILVDLHPLSRGTVNIDTSDPWNRPPRVDYRALSNPLDAVVMAELVRFTRRYYLENPLTSAWGPTEISPGRNVQTDAQFAEWLERTLSPTEYHPSGTCAMMPRELGGVVDEELKVYGVEGLRVVDASIMSTLVGGNTCQTVYAVAEKAADLIRFGAPKALE

SEQ ID NO: 787 - protein, 393 aa, Scytalidium thermophilum
MARILALIGGAALVPSALGATLIASHFSGNLYTLQYTGTNSSGTLTVTSQTQGCGTTPGWIQYYDDTRQLYCFDESWWGGGSITEYSVGNDGRLSITGQGRSQGNSVHGALYGGPNGRSFVATAEYSPSTITTYRLPLSSSATYLSLTRFTMPQRGPNPRQDAPHPHEVHPDPTGQFLLVPDLGADLIRIFRIESSTGRLIACPDARTDPGDGPRHVKFWKSADGQKQKLFSVNELGNSVSAWDVWYPSDLNNGCLSLTKTQTLSTFAPGRTGGPQTKAAELRVVDNFLYATNRADQAFGYEQDSIATYTIDPSTGAISWFEAANSYSYYPRTFSFNKDGTLAAIGGQTSSNVAIVARDPVTGRLGNLIANIQVGQRGRAGQEDGLSAVVWAD

SEQ ID NO: 788 - protein, 227 aa, Scytalidium thermophilum
MVSIKSVLAAATAVSSALAAPFDFVPRDNSTALQARQVTPNAEGWHNGYFYSWWSDGGGQVQYTNLEGSRYQVRWRNTGNFVGGKGWNPGTGRTINYGGYFNPQGNGYLAVYGWTRNPLVEYYVIESYGTYNPGSQAQYKGTFYTDGDQYDIFVSTRYNQPSIDGTRTFQQYWSIRKNKRVGGSVNMQNHFNAWQQHGMPLGQHYYQIVATEGYQSSGESDIYVQTH

SEQ ID NO: 789 - protein, 337 aa, Scytalidium thermophilum
MVSFTTLLTAVATAVSAVTASPLEALKRGIQPGTGVHDGYFYSFWTDGRGYVDFNNGPRGSYRVSWSNVNNWVGGKGWNPGPPRRIAYNGTWNNWNVNSYLALYGWTTNPLVEYYIVEAYGSYNPSSGASRLGTIEDDGGVYDIYRTRRINQPSIIGTASFDQYWSVRRQKRVGGTIDTGKHFEEWRRQGNLQLGAWNYMIMATEGYQSSGSAEIESIEPASIAAISSSLSWNSKQSPSETDGCAPETFTTGHIQRCSSEQGDSITSPPSPVEGRGSEPLSASKKTLFLPLFSGKSSSSKDWFWPSVLRHHVFHAGQLRSPNERPNVGFLKRIVFFC

SEQ ID NO: 790 - protein, 619 aa, Scytalidium thermophilum
MRYRLLSALAASSALRVTAAPSTSSSTETYDYIVVGSGPGGGPLAVELARAGFSTLLIEAGGDEGDNPTYAEIPWFNEAANDEATRWDFWVKHSDDPEQDLKFAHTTWDTGDGTFYVGLDPPEDAKLLGIHYPRAAVLGGCAMHNAGVCSMPADDDWNIIVNKTGDTSWEAKNMRKYLKKMERNEYLAPGDETHGYNGWLATSIMDSSWARNDSLPGSRILRRLTELIGQDPDKAADLINSDLLEYFDGVDEKSSVYSMVTHSDSKGMRYSPNNYIRATLADPAGYPLTVKLRTLATKVLFDPATVGVDGVIPRAIGVEVMEGESLYKADPKHVPGTKGPVKQYSARREVIVSGGAFNSPQLLKLSGIGPKDELAKFNITLVKHLPGVGENLGDNYEGSILALGAAPVETGLITVIFRTPNAPNKKRNIYAWCGAFSFEGFWPGFPTYHGPTQYSCAMVHMAPKSQAGSVKLVSADPQDKPEINFRFFEKGGDEDLAELVSGANILREAMQAAGAPVAPLVEKHPCPGGKDEKCTDAAQAEFFKLQAYSHHATSTCAIGGDDDEMAVLDSKFRVRGVAGLRVVDASAFPVVPGAFPSCPTMMLSMKAAEDILAEAKKQE

SEQ ID NO: 791 - protein, 449 aa, Scytalidium thermophilum
MRANAQLLFLLGVQSGLSSGQQQPLAHNYYLDQHLNELYQQRYQFDNDPTIPSYRTDLLSLHRYLIDIPSISGSEHDVAILLRDLLLSKNYTVTLQPIPSPSTSHHNDTDDARTRYNVLAWSGSPHSQTIDTPAFLKNRVLLTSHIDVVPPFLPYTLNRTTIPPYKPIPYPILSRSTLIGGRGSVDAKASVAAQVVALTDLLRKGEINPEHVALLFVVGEETDGIGMKTFSRWLGDHDVQLKAAIFGEPTTNLLACGHKGILLATLRAKGRAGHSGYPGLSGAKSATASLIRGLAALLDAEATLGSSERFGNTTVNVGTLDGGVAANVIAQEAEAQVAVRIAVGRKETGLGIVAKKMEEVVGKVDKEGLRLEGVMGYGPVECECDVDGFDTMVASYGTDVPNLDGDHVSYLYGPGSILVAHGEDEALTVGELEDSVEGFKRLVKHALGN

SEQ ID NO: 792 - protein, 632 aa, Scytalidium thermophilum
MRQPQSLLLLGALLPFLPTSSAASSQNIRIPGHATVVNKRALFGNYTFIIAGGGIAGLTLADRLTEDPKVTVLVIEAGPVDWNQDGILTPGNFQPWWYFYPGLETVPHAGLNNRTPDAIAAQVVGGGSVINAMVYLRGDANDYDAWGALGNPGWSWKNMLPYFKKAENFTPPDPALAAAGNITWDSSVRGSGGPVQYSYPNFFFPSSANWWNAAREIGLPAIRDPQAGQKEGVFWIPSTLDAKTMTRNHARLNHFDRVAESRPNFHLLHSNIVTNVLFNGNKAIGVSYLPTGATDASCPNTVYAAREVILAAGGFGTPKILQLSGIGSKKLLNKFNISVVADLPGVGQNLQDQPTLSIPYTFTNNISPNYDTFLTNATYNAEMRALYDTSRQGPYTLISGVSSNIALLSLPQTSPSSYLQIIASALARNPADSLPAGTDPAVVRGYAAQRLALLQQFARTDVGVGTLHWDTGSTALVYHLKPLSRGSVSIKSSNPLDGPVIDFGTGTDPADVAVYTALFRKNRQLFAAGPMQALGPVEQAPFGEGVQTDEEIYNVMKQLINPTNAHQCCTAAMMPKELGGVVNPELKVHGVKGLRVADASIWPFQIAGSPMATVYAVAEKLADAIKREYGMQ

SEQ ID NO: 793 - protein, 484 aa, Scytalidium thermophilum
MRLSSVLVFTLGLAGPALGDVVKYFSDETVCNSIHRDPLWLTHLPNKSTGDTTLDGAYAMSSTHEKKGVWFGGTIPSTMILWSLFLCFLVSVTTAATATRDLRCLVYYTKSHQDTPPVDELQRVTHVAIAFLSPEFFNEPKSGLEPLFTTVDDVRAKFAPDTKVLISLGGWEEMAGFETAAWNDFTRSRFAKNLADAIKKTGADGVDFYWQYPGGNGEDYKLIPNEERVWEIDAYPLLLEEVRKHLEEGKIISVTVPGLKRDMIAYTSKTVPKIAQHADFLNVMTYDLMNRRDPFTKHHSGLNQSLEAIDTYLSLGAGPEKLNLGLAFYARWFKTDHDNCMWDHIGCPTIGLEDPETGADLNNSGVVYWSDPAPANVNGAKVAESLQRALKYGKYEYKGGGYYYWDGSDDLQNIWWTFDTPDAIKRKFPLVVEERGLGGVFAMGIGEDAPKYDHFNAFIRGVEDYVQGGEETSYGREGKKGGRF

SEQ ID NO: 794 - protein, 233 aa, Scytalidium thermophilum
MKLTTSIALLAAAGAQAHYTFPRTKVDGVTSGEWETIRITENHWSHGPVTDVTSQAMTCYEKTPGQGAPKTVNVRAGGTVTFTVDTDVGHPGPLHFYLAKVPAGKTAATFDGKGAVWFKIYQDGPGGLGTSSLTWPSFGKKEVSVQIPPCVQDGEYLLRVEHIALHSAASVGGAQLYISCAQINVTGGTGTLNPGQLVSFPGAYKPTDPGILFQLYWPPPTQYINPGPAPVKC

SEQ ID NO: 795 - protein, 281 aa, Scytalidium thermophilum
MLNTLLLAALAAAPAVMAGPVTPRALPVPIIGGGLGAESDVHPPKALPATVRFNEGKFQPAMDFDTDSCYNVPAIDADGNIVKGLSHTSGLTAGCRDASDLDNNNVYVRRRCNNGWCAYLYDYYFEKDVAVPFGGLSTGHRHDWEHIVVWVRGDHTPEYVAISQHGNYEIKKWSDIRNDGGTHPKIVYHKDGASTHCFRFANKADDKLENHKGVWFYGALVDYYDGWSVELRNKLVNHDFGSATIAFKDSQFMPQLDKAKPKDERLKAFKTGRDGDVDDKL

SEQ ID NO: 796 - protein, 1787 aa, Scytalidium thermophilum
MKPPSWSSLSSLLLLTLPTGSIAGIIINRGTEDTQDQPQTCRPEISPFDYSAKLRSVYELPVCSAGDETGGIHGRNDGGSNDVSFLAAESLSFLTGRQVVGLNDDYTCAPDRPCKNKACCPKATLQCNYGPEACGTSGITPNEVCWHNCDAKAECGQFADPPGKKCPLNVCCGKWGFCGMTKDFCDVEDHGATGGCQSNCAQPGPKKKDSEQLDRVIGYYEAWRYKSQCQGMGLDDIPVNSLTHLFFSFGFITPGDFNIVPMDNLPFELFRNFTNLKKKNPGLKVMIAVGGWTHNDEGPLQKVFTNLASTQQNRQKFITNLLSLMRRYGFDGVDFDWEYPGADDRGGEPEDGVNFTLLLKELQEAIKKQPMKYIVSFTAPTSYWYLRHFDLKAVDYVDFVNVMSYDLHGVWDAKNPIGSHVYGHTNLTEMKMAFDLFWRNDVPASKLNMGFGFYGRAYTLADPACNKPGCVFKGGATAGACSGESGILTYREIMEVIRNKKIKPIHDKAAGVKYITWNVDQWVSYDDKETFKQKKDFAKELGLGGFLIWAIDQDDDQLAALQAVLDPQPLKAFAMTKGDENWTGSNEMCYVTECDGKCKSGYIKITDQKCAKNKKSQLCCPLSGAPDPKECHWRGDPLMCNGRCHDDEVMTHMSKFGSGGTACTDGQKAHCCKSPLAEENTCFWKGVGQQCPAGYEMMTFSGTAFDLLDDIAAVIIQVVGSFHPLTRLTGRLLAQVIERIDIRTKKLFCCKTNDIEKWDNCDWYGKPGNCFDGHCPDMRFVQLTDSYFGGDSTCGRFLNRRRVFCCQPKNGQPLFLPVPLENLFPNPPQGDSVDTEFELKTDKESAGGNTDPNDAAFQFYILASPEAIQQSLDKRDGSHWEVFDCKDAVTEGEHKVKMVCTDTSENSNCYKIGLGHGVPGTILQMPRGCGPGKYAVAKSLEPLPVEDHRKILPRHLAHLADSKPVVYELTFDYDFSRVPRDLGDTKLRVDFSNQDDYWNTIVAGAASKKKRGLSKRTLADVGGNHVRWLEEEFRDDYHFGGLDKRELHERWFGSSVIEWLVQLLKPEIKREFHYKYEDSITAKILDESWQCKNGDVGYEGHLLAQALLNVNVETSFGFTLIVESLRAPLDISQSYLTFYNKGEITGILTLEAVAKILYEKKGVIANIPFPGATFRIPGIATIGPQITVEGGIDALFAVGGIVETKLEIAKWEVRHVVPDNNDETYKPKEIAPGDPKLDRTGSFEGLKRPSFFAGVAVHGDVTAKLSAAAEFGIRFDDKWKIKPAAAAVVGETSVMLKMAAGASTEGVCPFTYGVDVGARLYARVTAPQAFHWSGIEYDLTPKWNKAIIQGGTCPELAGIPMKRDLDFVDGSANHSVTALAQRSPNSLAKRSLVFGPAFRLPVGSFFCPIDDGEELSCSDHDKIWADEPDPEAVWKRSLNTALFDKGHGDVANVTADVPDHLDKRTNAKSVKICDNDETTFQYPTGGELGANVDSFGWVEPDNCTDYKWGGPLAARVAGIQYDSEHVLEAQLVNDFFKKHMAGVHPQVPHPNPAMIDSAGNRRRIDWCDYVRLMIRIPAFVIPNLDTSEGTNVALTPLRHIAAQFPTNNWKEDEYIALQSYINSVIKNHAWAGGRIVNTDKWATDYTQPAVARKMIVKMRGIIGLRLYHNNPTVMSILRAQKNRIGTILNLLDTQYLPNNRPAPGWDAWPGLNLQSEWNRFMSGRFRHLRAKCDSIVEDHLDLLLDYWATPAMKQASQNNAGNKAIIRDIEEMDIYWMNEIPDWEVPF

SEQ ID NO: 797 - protein, 870 aa, Scytalidium thermophilum
MNQLGRLLGLGALLGFRPAAAARLVYEDSLPDDLPSACSEALLADVACSLLVRDLHPDFLLPPEDLEDICTPGCATALASWKATVQSACPSDLTIPWEFDLPASPVVIPDSLQWLFEFTCLRVNSNFCGPVAALAIVFADPGESPFNYLSEVPSGATEPSSCDECLVARLRMRAGSPYFEGPVLAEESVYESMTSSCSVTDKPLITTTLDFFTSEPEPTEEPCPGTLYTIQSGDDCYSISQAQSVGTAWLLADNNLAAACHNFPTSGTLCITNTCDTVVVQVNQTCADIADAAGISEIQLMAWNPVINPVCSNLHLMNGTTLCISPPGPQLSEPVTTDLPPLTPTAPAPVPTNANPGSTKPCGRWYHVELGDYCNLLVLRFGISLEDFMFLNPDVNSNCTNLFAGESYCVQPVGDINTYSGRPGYATFTFDPTAPFTGVPFTMLPDATESPYSRVRTPRVLADGVRDDCTFYFLGDRYQDPVESLGYWKSNCELAASIYNVDNDNFVAWNSLEHNITDPACSFETGKWYCGSWNLPSYPTLTFTETETTTTTTGTAGPTPPAPTHSGQPENCNTWHVVESGDSCQSVADAAGITLSQFLAWNPAVSSDCVDNFWLGQAYCVGVSGEGATTTTAATTASPTPPAPTHSGQPSNCNKWDVVESGDSCASLAADNGISLAQFFEWNPAVSEDCTTNFWLGQAYCVGVSGQSSSTTTTSAASPTPPAPTHTGQPSDCNKWDVVESGDTCGSIASDNGISLAQFFAWNPAVSEDCTTNFWLGQAYCVGVSGSASSTTSTPTSTTTAPQPQASTHTGQPSNCNKWDIVKSGDSCASLASDNGITLAQFFAWNPAVSQDCVNNFWLGYAYCVGVSSP

SEQ ID NO: 798 - protein, 910 aa, Scytalidium thermophilum
MLTRRLTVALSLFSTLCQATLPLVSRPGDTAAIPSWDLTSSAHVASNLSALSQVGIDTTAWTHVPTSRCTLVGCLIEAGKLSEGHLFYSDNLRQVDAKQFSVPWIYRHEFTLEPSPGKNFFLQTHGISSRADIFLNGHQIVTKEHQAGSYHGRTYWITDYVRERNSLVVQVHPTDYYRDLAVGWIDWNPWPADNGTGIWRDIEIRQTGDVRLDPLRVITDVGKTLEAEPATVTLRTKIHNMARRSLRVTATATVVLESGAGEPIVCTKELTVPPGPDSTTDLTIDAIIPKPRIWWPRQWGKQPLYNATLTVTTNADSDTASDRAFTTFGLRSVHRTLNPFNDTTFWINYRPFQVLAAGYTPNMFLRTSPRDWSRTLAYSAALGLNTIRLEGKLEHPGLYDLADRAGIMLLPGWECCDKWEAWPYNDHQPSDVLRIGKWLDADYWDAKGSMLHEASMMQSHPSVLAFLIGSDFAPDEHATRGYVEAFKAVDWQVPVIAAAATGRGYISNELTGPSGMKMDGPYDWVPPTYWWDGRPGADGRQGRLGAAFGFGSELGAGVGTPELSSLQTFLTDREIQELWRNPNKTLYHMSREGSEFTARTIYNAALWRRWGAPKSLDDYLIKAQLMDYEATRAQFEAYGAMWNGPRPATGLVYWMLNAAWPSLHWQLYDYYMRPAGAFFGAQMATRIEHVVFDSTTRNVWIINRSLDRSGRRRVEVDVLSKHGEILHTGILRAEAEPNKSIHVGSLDQPVARALEKQDVVFLRLALRDDESRRLLSRNVYWVSKTTDVLNWNRSEWFYTPVSRYADFTALNALSPARVVVTAARDVDADGEFVEVRLEAKTKVPAFFINVRVLDRDGNEVLPVTWSENYVTLWPEEVIVLKARRAADEPWDPKEVTVMGKNVEFQRVKLA

SEQ ID NO: 799 - protein, 267 aa, Scytalidium thermophilum
MHSILTLIVTAGLVTAQTNTNLQTKFPTATSTTGISAARTIAAGASFDGQMLQWDRSPSTCKEQTEGGEKDALFVLENGATLSNVIVGPGAGEGIYCKGSCTLNNVWWTDVCEDAATFLQSSGTSYVNGGGARNAADKVFQHNGGGTVSVKNFLSSKNGKIYRSCGNCKTQVARKSIFENIRAIDSLSVVAGVNANFGDSTTIKNSCLLKGRTCDIFEGNNSGKEPTKIGTGPSGTANTATTKAKHPAGVKRMFLRQGMSDFGNSDA

SEQ ID NO: 800 - protein, 766 aa, Scytalidium thermophilum
MASNMLLKAVLLASTLLTAVAFPSPAHLDTRQTASNFWYANIDHRTPGIRGYAPDLDGDEAYEVFRAVSAGDGAAIQAAILNGTNGARRHGMWFASQPRVVYLPPGEYTITETIHMNTDTVLMGDATNPPVLKAAPGMPRNGVLFSGGDPTTNNRGELSFTVAIKNVIFDTTNIPGDAPFVALGWSVAQGSHLQNVVIRMPPAGSSGTGHSGIRMNRGSTLAVSDVRIEGGQNGIWFNGHQQAVFKSVHFYNNKVGFLIDGGSTVNLVNPTFENVGTCVLNTGGYPFIGVVDASSKNSGVFLRTTTWPNYHIENLRRENSTGDIAQGPGNFVFPAQPHIPQLTYGNTVGANPIYGPVLSSLARPSALVSTAHKYLTIPAPNYANNPISDFLNVKDPAQNGGRSVRGDGTGDEAEVINAILQLAAQLNKIAYFPFGKYRVGSTIHVPPGSRIVGEAWSTIVAQGDFFKDPRNPRPVVQVGSPGDVGVAHISDMRITVGDVLPGAILMQFHMAGNQAGDVAVWNTLTTVGGTRGAKALTDTCRDPTNQCRAVFLGLHFARTSSVYLENVWNWVADHITEDFDGGSNIAAGRGALVEATKGTWLHGLGSEHWWLYQLNFRKAENVVVTMLQSETNYDQGDNNPMLLPAPWAADEDGWGDPTFDHCAATDKRCRMGYANYFNGGRNIRSYASASWAFFSGPGYQPCAGEYQCQRHMHFVKETPLSLEAFGLCSKDAHAVLRLADGTEIVTSEGFTGSWPGGGGDIGRYTT

SEQ ID NO: 801 - protein, 462 aa, Scytalidium thermophilum
MHFLARTGLSSALLTWLATSAHLSAAWPNTPFRASGRWIVDSSGDMVTYVGVNWPGHGEVMIPEGLQHVSIASVVAKIKSLGLNAVRLTYAIEMVDQIFDNGGEDVTIETALVNALGKENGTTVLGKILGNNPQFTAQTTRLQVFDAVATELARQEIYILLDNHGSKGQWCCSPFDGNAWWGDTYFSISNWTRGLTFMAEHAKSWPALAAMSLRNELRQPLSNLTLAQEYNWANWYSYSQLGANTIHSANPDPLILLSGMDSSMQFDVIVDGKPLTPSTTVFDRSAFAPDFADRLVLEMHAYSITEKVDSCPEYEKKLTSRGFSTLTKDPEHQYPLLMTEFGFAQDADTWKNDVYATCITQFLPKQKVGWFIWVIAGSYYVREGIQEYDETWGLLDAKWENWRSPDFVENGLKKMVNEMLEAVKGETGDGGQAPTDSGSAKSYDVWWGMLASIVAVLSAAIC

SEQ ID NO: 802 - protein, 227 aa, Scytalidium thermophilum
MVKPTVLLTAALAPAAALAGPIQGPQTKTESTLGARQWWGGGYYFQNWSEGGSNIRCVNGQGGHYTAQWNSRGGFVCGKGWSYGGNRVIQYSGTYNATGPGYLAVYGWTRNPLIEYYVIEAHADLAPNEPWQRMGEFTIDGEGTYEVFQSTRVNKPSIEGTRTFQQYWSVRKEQRVGGTVTMQRHFDAWARFGMRLGNHDYVVVATEGYTSEPNGWGSAGQSSITVV

SEQ ID NO: 803 - protein, 301 aa, Scytalidium thermophilum
MFFRNAATLALAYATTGVSAHALMYGVWVNGVDQGDGRNVYIRTPPNNSPVKDLASPDIVCNVNGGRAVPDFVQASAGDTLTFEWLHNTRGDDIIDRSHLGPIITYIAPFTTGNPTGPVWTKIAEQGFNPSTRRWAVDDLIDNGGKTDFVLPASLAPGKYIIRQEIIAHHESETTFESNPARGAQFYPSCVQIEVSGSGTAVPDQNFDFNTGYTYADPGIHFNIYTSFNSYSIPGPEVWTGASTGGGNGNGNATPTQPTPTPTVTPTPIETAQPVTTTTTSTRPFPTRCPGRRLKREEPKA

SEQ ID NO: 804 - protein, 629 aa, Scytalidium thermophilum
MSDMLSSPASLGAGITPPPLTLPAAAPPMISANTSAPPHQPPPAVPPAKPILRRPPGYVPLRRRTHKKSRTGCANCKARKIKCDERHPACINCLSHGVQCPYLLNGGGPGTGPGTGTGTGSGSGSAPTATPLNATTVSTGGSPGNSSFISTTTNSLDSPVPSVLTPSSFPTPSSPNHTTTTNNHGGLLTPSRASPSPSSSGGLPMLELELLHNWTTQTYRTLMAEPIWDFWRDDVVRLGLRCEYVMQTILAVSALHLAFHRPDRRDEYTTEGILLHQRASRSAMQVMAAMDKEDADQAASLMVFSVLTVFFALACPRRPNPDGTFFIGESGFPDWALLLPGTKSLVMPLSGDRGLQTIVAPFLRYSVTRWYAQRAMLEKKGIPLPSKSTAAFRSPDGAVPPPPPPLSSSEHDLHLHHQQHYQQQIKQEPPSPHDQQHQQQQQQPDDVPKPQPLLAPLHARITSTISDPSLLAAYFFALDELEIAWALALPDSSSSSSEDPSSPSPSTSNPPTETPSPSTPTPRDDVLDAMVWLWRVGDTLIPLLRRPEGEGGPAQEAVVIFAHFAVLLKHHERRTWWLRGWGEAMLSRAREVLDGEHREWLEEGLEGLNRLGGGLGAVGGGCSVEGMLN

SEQ ID NO: 805 - protein, 338 aa, Scytalidium thermophilum
MNLLLLLFLPLAHAGLRFGCSTLTIQRLDPLVEPGNIPSAHLHQIVGGNAFNATMPTDDVAAHATCTTCTFSDNFSNYWTAVLFFRAENGSYKRVPIMQNTGLPNGINGGMTVYYTQHSLSSNGGVKVTAFKPGFRMTVGNPAFASQPSIRGNPGLRFVCLDNPGTRFPELPTFPDRPCKAGIMTIHHFPACWDGKNLDTPSHQSHMYSTTRESFSPAGPCPPSHPVRTPQITLETLWDTSSFNHLWPADGSNPFVLSYGGRGDGVGYGTHADYVFGWKGDALQKAMDSDCMASGCENGRPLRSQSVQVMNKCAVERVVEEDIDGWLPHLPGQGPEDV

SEQ ID NO: 806 - protein, 326 aa, Scytalidium thermophilum
MWPTPKAAYLILLAHSLLVSGSPVDAEIQARQSCPEIHIFGARETTVPSGYGSAGAVVDMIKREFPGATSEAINYPACGGQAQCGGIQYGDSARQGTQAVANAVNSFHQRCPNTKLVLVGYSQGGQIMDNAVCGGPDSGSGITSTTSPINASAHEQIKAVILMGSPRYVAGLSYNVGTCTAQGFAARPRGYVCGTNSASKIQNYCDSPDPYCCTGNDANLHQQYGSRYGQQALAFVRARLTESGGGNNNPTNPTNPTNPTNPTNPTNPTDPWNPGNPTNPGNPGGGNGGNCSPLWGQCGGQGWQGPTCCSQGTCRAQNQWYSQCLN

SEQ ID NO: 807 - protein, 428 aa, Scytalidium thermophilum
MQTKSILTAALLAAAPASAQLHELAVKAGLKYFGTALREGAINSDQQYNRILSDTREFGQLVPENGQKWDATEPNRGQFNFQQGDITANKARQNGQGLRCHTLIWYSQLPGWVSSGNWNRQTLEAVMKTHIDNVMGHYKGQCYAWDVVNEAVDDNGQWRNNVFLRVFGTDYLPLSFNLAKAADPDTKLYYNDYNLEYNQAKTDRAVELVKIVQNAGAPIDGVGFQGHLIVGSTPTRQQLATVLRRFTSLGVEVAYTELDIRHSRLPASQQALVTQGNDFANVVGSCLDVAGCVGVTVWSFTDKYSWIPETFSGEGDALIYDHNFNKKPAWTSISSVLAAAATNPPASSSTSVVVPTTTFVTTTTTPPPISSPIVPSTTTSAVPTTTVSPPEPEQTRWGQCGGIGWNGPTKCQSPWTCTRLNDWYFQCL

SEQ ID NO: 808 - protein, 493 aa, Scytalidium thermophilum
MKTPRTSAAVAALLLSPAVSATGNLLTPDKLEADITTRELQNVLWNFNHIADRNGGNRAFGEPGYKASLDFVLERAKTRFGDYYDTYVQPFNHTYDKTRFISVTGPEGEDVKVVSPQYNPATPLPDGVTALLIDTPVDDENGSGCYEEQWEGIDATGKLALVKRGACAVADKLRLAKAHGALGVILWNQDPGDIVMPTLGADSIGQTVPVGIIPYEVGLAWKARLAAGEDVKVKLVVDAIIETRETWNIISETKQGDPNKVIMIGAHLDGVQAGPGINDDGSGSAALLEIMTALRMYDGYPHKIRFAWWGAEESGLVGSLYYTSKLSEEELDKIKFYFNYDMIGSPFPMFGIGQDELSGTGAKVLEEYLRSKGKDVQLGSFGGGSDHVGFVELGIPTATLFTGAGAPWDPCYHQACDTLDNIDWDALTVNAKAAARALATLANSLDGVGTRRKTSPNPRSRRAALRNFQKWAAVTEEAERGQKCSHSKHKTVV

SEQ ID NO: 809 - protein, 425 aa, Scytalidium thermophilum
MFTRGWRRAAAAAAGAVTLFSNTAIGQTWSACNPLLTSGCPANTALGMTINVDFTQGEVNSFVPSGGNPTYGPDGVSFTVAGSGDSPQLTSIFYIMFGRVEVTMKAAPGAGIVSSLVLLSDALDEIDIEWLGADANTMQTNFFSRGRPIYTNAQFNPAPNNQAEFLTYIIDWTKDRIVWYVGGTVVRTVTFADAGDQYPQTPMQVKFGAWSGGDPGNPQGTIEWARGPTDYSQGPFSMVVRSARITDYSTGKAYYYSDQSGTWQSIRSEGGEINGNANGAAPVETTASAAPETTYTASPTIPPGGIIGHTSAGSTVIRTVGPIPSGWVMTSDGKVVPVGSSTTPPTSSPSSDSDSDSSSSGSGNNNGQTTFDTSVLPTGSAGGSDFFPTAAPPMDSGVKMVPSALVPLMTALFSSVFFHFLRLLV

SEQ ID NO: 810 - protein, 334 aa, Scytalidium thermophilum
MRFSRSLLLLLGTNPLPSLAVTLTTIFTLPGPTLPGSWFENLAVRPNGKILATRGDAPEIWQIDPATNTGSLLVSVTGAYNLTGIAEVRPRHHGKGKTRHVHETYIFASSYIPAPFTVAPGSAKVWKLTFGHSGTPTVSLLAAMPSAGFLNGVASWDTGRVLISDTELECVYLMDVDTASYTTPLTGLAGINGIQTRGSATGAGHLGHMYVYRADHLLSQLSRIPVDSNAVATGSAELLSNGTSIDDFAINVDSTGAGKAYIGAMYDNLVQEVDVAAAPSSGLGTSSLLANDLTGTGYGLVTVVAFGRTSADSNVLYATAGQGGGNAAIVKIEP

SEQ ID NO: 811 - protein, 191 aa, Scytalidium thermophilum
MKLQSLLTSLLASAALATPVRRDVDFDLYTLKISTNHPALDGLYLGPIPAPGGGAKNATAGLALGVVPGTQAQSGIIVYPVASEDPGLTALHTIDGGAVLVAGRHGVLDLAAFYGDPASAPVPEGVTIDWDSFQLVEEGAEVLFANAKGRWVAFPSYDGTSGWRVTFKETTAFSTTDYVPVSVVYESIRWD

SEQ ID NO: 812 - protein, 691 aa, Scytalidium thermophilum
MMRRGLVTTALGSLAQLASALYINSSVTAPCDSPLYCQGEILKAIELARPFSDSKTFVDMPTIKPLDEVIAAFSKLSLPISNNSELNAFLAENFAPAGGELEEVPEDELSTDPKFLSKLEDTTIKEFVEKVIDIWPDLTRRYAGAGNCSECANSFIPVNRTFVVAGGRFREPYYWDSYWILEGLLRTGGSFIEISKNIIENFLDFVETIGFVPNGARIYYLNRSQPPLLTLMVKTYIDYTNDTSILDRALPLLIKEHEFWTTNRSVSITAPNGKQYTLNQYAVNNNQPRPESYREDYITATNQSYYAESGIIYPVKNPLNESEIASVYANLASGAESGWDYSSRWLRTPNDAANDVYFPLRSIAVNSLVPVDLNSILYQNEVIISEFLEQTGNSSAAEKFASAAKQRSEAMFDLMWNATHWSYFDYNLTSNSQHIYVPVDPDVTEAERGDAPEGYQVFFHVAQLYPFWTGAAPASLKSNPLAVKLAYARVEHMLAIRPGAIPATNFRTGQQWDQPNVWPPLQHILMQGLLNTPPTFGESDPAYRDVQNLALKLAQRYLDSTFCTWYATGGSTSDMPQLEGVTPGSTGTMFEKYSDVAINVAGGGGEYEVVEGFGWTNGVLIWAADVFGNQLKRPDCGNITAVVTHPGNDKREVDFDLGRRAVELHPRDAAWTKMFGRSRVRAEMRKRAERN

SEQ ID NO: 813 - protein, 533 aa, Scytalidium thermophilum
MLATISKIAVGVLALTGRTSAADAQEWRTRSIYQVMIDRFALTDGSTDKECDVSRFCGGTWKGLKNKLDYIQGMGFTAIQISPIVKNTDDHTAVGDAYHGYWVTDNYALNNRFGTEQDFKDLVAEVHKRDMLIMVDVVVNNMAQGFDNTIPPKIDYSKFHPFNDDKYFHPYCNVTRWEDPEDYQNCWLYPYGVALADLATDTKEVSDELNRWVKQLVSNYSIDGLRIDAAKHVNDEFLAPFVASSGVFAFGEVLSGVPQDMCRYQMLGLLPGMPNYLEYYALVRAFNGESLEKLADMRNQAASACNETTLLGTFAENHDMARFAARNDDMALAKNAMTYVILNDGIPTVYQGQEQHFNGGDTPANREALWTSKYDTEAPLYVLTSKLNKVRNNAIKLSESYVTEPAETLLADVNRLCLKQGGDNATVVFCITNESSQGSSYSTSVGGFKPNQKVVEVVRCRHTKADGVGNVVVYMDQGEPRVYVAEEVLEGIDVCEETTKDGPAENGVGRVMVQGMSGTVMLVGVLSAIFVAM

SEQ ID NO: 814 - protein, 111 aa, Scytalidium thermophilum
MKPTVLLTLLTTAAASPLTAWRLDLTTTDSRTLSLRGTTSDVGKCLTVPLASSLTKFRRAFFDPQASLSSVARFELFSDSSCGRTGLVYTGRRGVHTFNPSTVRSYRVRNL

SEQ ID NO: 815 - protein, 504 aa, Scytalidium thermophilum
MKVEQRALLAAALALAGTPGAEAILRFSCSELVTERLDPLVFPGVAQSPHLHQVVGGNMFNITMDPNRHNIGEEATCTTCTFSEDFSNYWTATLFFRARNGSFIRVPQRGNIDFESARGGGMTVYYTASYQNQKVTAFRPGFRMIVGNPFYRTQAEASRFRQLTFTCLDTLYTRTGETTSMPTRPCKEGIMANIRFPTCWDGVNLDSEDHMSHVAYPASGTFESGGPCPASHPVRIPQLFYEVIWDTRQFNDRSLWPEDGSQPFVWSYGDFTGYGTHGDYVFGWKGDSLQRAMDANCDGYCPQLKTQSIAQANQCRQQQKVKENIDGWLDRLPGNVEITGPQPGSGSGNPGGNPGGNPGGNPGGNPGGNPGGGNPGGGNPGCTVAKWGQCGGQGYTGCTTCAAGSTCRRSRLLLDQIFLFFLIALNKLWRISRDVSPAHGSRVGQNGPFPKRLPLIVLILDTAIVFSFVTNPLISFRLFYRFLSAGLLRCFLHISGRFRDLHSS

SEQ ID NO: 816 - protein, 408 aa, Scytalidium thermophilum
MRFSLLALVALKAASVMALDPPSEVPTDPTEALQELESLTESAYLEITSALQEAENKRRIKRSSSCTLSKLRIRREWGTLSTSQKKAYINAVKCLQSKTANTPSSLAPGAKTRFDDFVATHINQTLTIHYTGNFHAWHRYYVWIYETALRTECGYTGAQPYWDWAKSAITGLHNSPVFDGSDTSFSGDGEFIPDKPNLELGGGLGLPPLILPAGTGGGCVTSGPFKDMVVNLGPVSLDLPGGLVGANPDGPLAWNPRCLKRDLTDWINQRFANATSVLRNILLPTTTAQFNDMMEGVPGSGEMGLHGGGHYSMGGDPGRDVFVSPGDPAFYLHHAAVDRVWYLWQLLNPLTRMQGSSAIAGTRTMMNMPPSDPATIEDYVDLGFAGGVPTKIKDLLVTTGGPLCYVYL

SEQ ID NO: 817 - protein, 594 aa, Scytalidium thermophilum
MKATLFLPLLLFGFAAASKCRPRTSKTVSPSVSSTVSSVSSTASATPSPTCAPLFSLEGVSEDSFNPALTPFSLTLACGILDTANYTVFSNDESTNSPFGKLVEGTTANENSITIPGFNPGKVSITVAAFDTAGTPILQSFSLLFGSISMPVRVLDENGVPVSGVVVRADATVYPGIAQNGTTDSNGLVTFTSLAATTIGLFTQTSDNKIGVSGVAATSQTVTIRLIPFLPASNTTDFNVDNGITGWTGGRIQDLKLKKRAPGLVVSTDSTYSLQMAHAEPRIYPFTKSVYIKYKFLTYEVPGGYFGTQYNDYFIVSIRSNTGASTAVSRSMNELGRGAFDANGATDWYTLILPTDEVTEWVNFNVGVSNVADNKYGSAVIVDKIGDLKCDECGSCETCPGDPMCQPMCQEPPQRSCAFYSECAEARLRCGADGYPIRYGQKNCLAFQADLAKYSAAGQAFIWKTMHCLQVALRDAINCDSTCAQANDAAFDSHPKCYVESGFCDLSLGDWFQVIKTVNRDLLGLQSFKQIAQTTRACAGQMLMKIDDAITGYLQQAADDLLNAAVHTAKALAMKVFRELVEQLLEDVYPIPIL

SEQ ID NO: 818 - protein, 358 aa, Scytalidium thermophilum
MLNRKTLSALIAGAAVTSACTIPEETLSDTITYPFSIQVQNASRPEVHNEFFKMYPWGGGDAHLFIGPVGLDTYDLTLVDGVITHDGMGVQAVINGEWSEIDDTTKLFMTGRSDPRAFFQPTYACNPDTDELQIELTLVGRQYDPPGGVICVRESFDNSHEFRYSPPGNTLIDPNRECITVTLVVIPTTELPPTSTVATTITTSTVSSTVATTSSTSTSSTSTAPTATPSTDPSDLFTDLTALGWRFLGCSPEERWTTDGAFRTLPDVVHSSDTMTNQWCVAWCEGQGFKYAGTEWNRECWCGNAYASTRAPGTTIASLATCDYPCTGDSTQICGGDAWLSLYEKCEEEEPCENQVFT

SEQ ID NO: 819 - protein, 388 aa, Scytalidium thermophilum
MTRFSLAGLATVLLAGAVSAQDPVLALQNQGRPQIDAAIAKSATCTKDKLQVRREWGDLSKAERRAYIDAMLCIMSKPSRLDPQQYPGAKSRYDDFVVVHMNQTMTIHGTGNFLSWHRWYTWAFERALQTECGYNGTQPYWDWSRWYEDPESSPIFDGSDTSLSGNGEKIDHTMSPGIPVGNGGGCVKTGPFKDMVITLGPMAPVINPAPPRNPRADGYGYNPRCLRRDISNILSRQNLRPQDVASLITGSNNIGSFQDTMQAVGGFGGGFPGFPGGGQQQFIMGVHGAGHYTISGDPGGDFYTSPNDPAFYVHHAMIDRTWYIWQSLNFESRKFVIAGGTSMMGWGSPLATLDDPIHLGPPGLIADTTYHIRDLVSTVDGPFCYIYE

SEQ ID NO: 820 - protein, 192 aa, Scytalidium thermophilum
MHLLALLGALTSLATALPTPSTTSSSLNQPTQHQKRTCTAIHPPTSQTPRVYLANRPDISTVVTQTVTWTLPPDALLPASGPCTLRARFPSLWEIVDTSVAKGGAPLPVNVFSETEDQQGLLIGVTTFASPNKEDNAPSPDGPERVVVVNSFACKETMTFRFELAGEGEVGFVNGLDEGLGLTGGLEIVYGC

SEQ ID NO: 821 - protein, 618 aa, Scytalidium thermophilum
MASSLRTLLLAASLVPATLAQIIARNDPDPSAENVVLDSLDFSDVGELQPLSLGGGAQYACKCYHGESCWPSQHEWNVLNNTVNGKLQVHIPPGASCYNTFNGPLGTVNTYNAAKCAEATQNWANEQWHVEQPGAGLWTYFTNDTCRPTTNPSDSCTLGYYGVYVIMAQKKQHVKAGIDFARRHNLRLIVRNTGHDFLGRSTGYGSLIINTHAFQDIQWINSYQGPGGPGTYRGPAVKIGAGVQANTLLAAGHSLNPPRVVVTGECPTVGISGGFIQGGGHGPWSTLKGFSADNVLEFEAITASGHYVTANEYKNADLFWALKGGGPATYAVILSTTMKTFVDLPSAGATLYLNTTHTLNPDVIWNGTSIFHKYSNHYVDNGLYAYYEILPFTFRVRPFVAINKTTTQLQSILQPMLDELDAAGIPYDFETKAYPTFYDLYIDLFEPENAGDSALTGGWMFNHHDVATNNDAIIDAFKTVAAPRSDLFGILIGHIFNPGYGMPQANSATHPAWRNASDFVITVLPVPVGSSLAQKADLQNVLTNVMDAALRDASTSGCTYVNEADPYQPNWQSHFWGSNYPLLRQLREKWDPEGVFYAVSTPGTEDWEIVNDKLCKRL

SEQ ID NO: 822 - protein, 229 aa, Scytalidium thermophilum
MRFFNPLVVLALSGFAFGAEGGLLGARAKDGTVDAPAAIRARTEVTTNHNHGINSEVKRRYAPQHQRRGDWNGKGKGKGPYETPCLLPHDVEELVDAYDRIISAWNDADAVYLADEFRDTSDSINILAGIPLGSATFPTRDAFLYHMQTQPDNLPLDITHASPYSCTEIAVIWETKFGVAEIPVRGITILGATKTKGFWQISSMDVEFNSLAYLLNIGGTYSKPGAPPS

SEQ ID NO: 823 - protein, 436 aa, Scytalidium thermophilum
MRFHSLLSLAATAAASVVIIPGDGDPKPYTGPPAITSEDDFFRQSAPNEFYNNTAQLIMTSLSGTTLSADSGLRPSGDSFIRGAIQAWGEHLHLVIRPDEVWFTILVQMNFYMLSHAEEIRSLFVDHEGQEEIYIEDFTLYDVIIRFKDEIQRRVKTDWLLDWIVPNFSTTTQSDIMTANILMMGLTKAYFRYVGRVVCGLPSVTLLGEREDWQRLLDKLAYLPQFGKEPAEYANRLRPILTRFVASFDRPDDPAIRKFWNQIVTAYGPRICGDPSVFLSGWITGFYYWNDQGGPFARGSAVTAPKGGVVLDGVEYPVLDLEMAPVGYAKAPLLLLDFNGTAEFEAFVAAGTLGKQITQGPPEGYVEAVQRVGEEVDKAVLKDVSRHATLKPMSAWMVYGQAPHNRTQSIWGFEADMQETLASARRWMTGDFCGVE

SEQ ID NO: 824 - protein, 164 aa, Scytalidium thermophilum
MKFPGVLAFLGAVATAAAQSPVRGPNTLVFKEIGGVPNNECLTFTNEGIIVNAACAWTHSDRQVTPGRILGTDVLIIQRPWQQPFRPDLVGKTACIAYNQGTFRAEDCNRKDLLFVRFDIGTGQIVANGHTACLSGHDSRAIVTVDPNGQRCAKFTITAVTPTN

SEQ ID NO: 825 - protein, 161 aa, Scytalidium thermophilum
MRFHFFALVHAALLALTALAQSTPKAPGLTYLYSLNCTLGVPYSVGNGPHGNRVVIPITGGTFSGPRLKGRIANLGADWGLVDKDGLFSADTRYHLQTDDGAHIFIRTSGPTQADGTIHLRIIFETGHQKYYWLNNIIAVGVLRAGGGGVSIDAWQLDSPK

SEQ ID NO: 826 - protein, 889 aa, Scytalidium thermophilum
MLAVSAVSAASTSGSSSDQFSLSPSDQLSIRLSFALAMARTVVDINSNWEFRQADKEDSKFLPVSQFPANVHLDLLHHGLIPDPFIGKNELAVQWVGEATWAYRTTFVSPPVPAGARAVLAFDGLDTFAVVKLNGTTILESDNMFLPYRVDVSAHLAPEGNSNELSITFDSAYLRGCELVEKYPDHKWGCWNGDTSRLAVRKAQYHWGWDWGPTLLTCGPWRPIRLEVYEARVADLAADVDVDKSLERAVVTLTAEVEGPADQVRFELSLNGKQVAAGTAEANAPTISFTLDKPALWYPARYGAQPLYEVRATVLRNDIELDTITKHIGLRRAELVQRPLDGQPGTSFFFEVNNIPIFCGGSNWIPADSFIPRIGRKRYHDWVKLVLDGNQGMLRVWGGGIYEEEDFYNACDELGILVWQDFMFGCGNYPAWPALRDSIDAEARANLRRLRHHPCIVIWAGNNEDYQYQESAGLTYDYANKDAESWLATDFPARYIYEKILADACAALVPRTAYHPGSPWGAGRNTHDATVGDIHQWNVWHGTQEKWQDFDKLVGRFVSEFGMQAFPSVRTIEAYLPQGRDDPDRYAQSSTVDFHNKADGHERRIALYLAENLRYAPDPLEQYVYSTQLMQAECLASAYRLWRREWRGPSREYCAGALVWQINDCWPVTSWSIVDYYLRPKHAYFTVKREMAPITVGIARRTHKHPIPGAHRHSRIGTESRTRIEVWGSNLTLQDANVDCVLRAWDVVTGEETFSQTVASGLVLGANRSTEIVERDVPVRTPGDEGRTVVAAYLVQDGRHVARYVNWPEPLKHVHLQKPKALEARLSPDFASVHISAEVPVKGVALETSDDRVAFDDNLIDVVPGEVVTVAVRGAGADTKIGTRYLGMC

SEQ ID NO: 827 - protein, 590 aa, Scytalidium thermophilum
MVAAMASLLPLRSCLSFFLFFLVAIQPVTAVWPAPKNFTKGNTVLYLHQAVKITYNGDPLSYTYGYVPRDITSKEVVQAGVSRTLDGIFGSKFVPWKLHKPGSQFEPDLHKGQKWISTFEIVQTAKDKPSTFKPLAGEVDESYKLSVSAEGAAKLTAASSIGILRGLETFSQLFYQHSAGTFWYTPYAPVEVEDSPQFPHRGILMDTARHFFPVEDILRTIDAMSWNKLNRLHIHVTDSQSWPLVLPSMPEVSEKGAYHPSQTYSPTDIENIQRYGAIRGVEVYFEIDMPGHIGVVALSHPELIVAYNELPYHWWCAQPPCGAFKLNSTEVDKFLEKLFDDFLPRVAPYAAYFHTGGDELNKNDSMLDDGVRSNSSDVLQPLLQKFIDAQHGRVRKAGLTPVVWEEIPLEWNITIADDTVVQAWLGEQSVKKLTEKGLKVIDSNYNFWYLDCGRGQWLNWDNGAAFQLGYPFNDWCNPTKSWRLVYSHDPVAGLTPEQAKLVLGGEVAVWSETIDSTNFDTLVWPRASAAGEVLWSGRIDFATGQNRSQLDAAPRLNEFRERMVLRGVRSSPVQMTFCTQGKPEECEYAP

SEQ ID NO: 828 - protein, 891 aa, Scytalidium thermophilum
MGHHTATVCLWLALGSLTPVSFARVVEPRDPVPQGYHAASYYPAPHGGWVSSWREAYEKAYALVSQMTLAEKVNITSGVGIYMGPCVGNTGSVDRLGFPQLCLQDSALGVASADNVTAFPAGITTGATWDKQLMYARGVAIGKEFRGKGANIHLGPSVGPLGRKPLGGRNWEGFGSDPVLQGKAAALHIRGVQEQGIIATIKHLVGNEQEMYRMYHIFQEGYSANIDDRTLHELYLWPFAEAVRAGVGAAMTAYNAVNGSACSQNSYLINGILKDELGFQGLVMSDWLSHISGVSSALAGLDLNMPGDTNIPLFGNSLWQYELTRAVLNGSVPVDRLNDMATRVVATWYKFGQDKNHPRPNFSSNTRSRDGPLYPGALFSPSGQVNWFVNVQEDHYLVARQVAQDAITLLKNNDSLLPLDAGDLTGGKLSVFGTDAQVNPDGPNSCLARACNKGTLGMGWGSGIADYPYMDDPIGAIRKRVPDVKFYNTDSFPWFFGTPEDDEVAMVFISSDSGENTLTVEGNHGDRDSAKLRAWHDGDKLVQKVAEKFKNVIVVVHTVGPLDLEPWIELPSVKAVLFAHLPGQEAGESLTNVLFGGVSPSGHLPYSITRKASDLPDSIANLKGFTWGQVQDTYSEGLYIDYRYLQKHSIQPRFAFGHGLSYTSFSFTNATIRAITTPLSVTPPAPPATRPASVVAKYSTDIPPASEAYEPAGFSRIWRYLYPWLSKSDADAAHAIGTSKSKTYPYPPGYSTVQRASFPPAGGGEGGNPALWDVAYEVTVRVTNTGKRPGKASAQLYLQFPEGIEYDTPVLQLRDFEKTKELQPGESQELKLTLTRKDVSVWDVRRQNWVVPTAIDDKKGFTAWVGEASDKLKVACYTGEGRCVEGAKQPV

SEQ ID NO: 829 - protein, 352 aa, Scytalidium thermophilum
MRTATALAAAVWAGAVAALPTQTRSTTLPSSWKWVSTGPLVFPKNDERNIAGIKDPTAVLINGTYHVFASTAKSEGYNMVYFNFTDFAEANNAPFYYLDQAPLGYGYRAAPQVFYFEPHKLWYLVYQNGNAAYSTNPDINDPSKWTAPEVFYPNGMPKIIADKIGNGYWVDMWVVCDDEEDPNKALCHLFSSDDNGHLYRSQTTLAQFPRGMSEPEIVLQDTQNIYALWEAACIYRIKGAEGTQKYLLLVEAIGQEGHRYFRSWTSDRIDGQWIPLADTEANPWAGEANVVFEGQKWTKSISHGEVIRTLTDQTLTLDLSEPIQFLYQGVDPNAQTEYNALPWRLGLITQVL

SEQ ID NO: 830 - protein, 376 aa, Scytalidium thermophilum
MHLASSLFLLATLPFGFAAGKGKGKGKDNSDVGLDVLAKKAGLKYFGAATDTPGQRERAGLEDKYPEYDRIMWHSPEFGSTTPTNGQKWLFVEPERGVFNFTEGDVVASKARQHGKLLRCHALVWHSQLAPWVEETEWTPEELRKVIVDHITAVAGHYKGQCYAWDVVNEALNEDGTYRESVFYKVLGEEYIKLAFETAAKVDPKAKLYYNDYNLEWPSAKTEGAKRIVKLLKDAKIPIHGVGLQAHLIAEQHPTLDDHIAAIRGFTQLGVEVALTELDIRLKTPATEENLALQREAYKNVVGACVQVCGCVGVTIWDFYDPFSWVPYFFEGEGAPLLWFEDFSKHPAYYGVVEALTNKTRRSKRSISDRRAKLLA

SEQ ID NO: 831 - protein, 505 aa, Scytalidium thermophilum
MKTALTALLGLSVITEAASPHHLRPLRSLNRRQDVNASNFNGGNRFGGNNNGGNRFGGNFGGNRNNNNGGNNNNGGNNNNGGNNNNNGGNNNNNGGNNGNNNNAASVTCLAPNAIQTGSQSTGQQGDVPIDGQVNSATDPANFINFCAGQVLTNGLQNRDGSCNGIPMGKIPAFDKMISTVILNPKNGDNLQPLTNFDITIQVNNMQLGFFTNATSTYYAAPQDLNGQGFVIGHSHVSVQDTGGTTNPTTPLDPTKFAFFKGLNDAGNGQGRLTTTVTGGLPVGCYRVCTITSASNHQPVVMPVAQRGVQEDCRYFAVGGGCQDLNNNGGNNNGNGGNGGNNNNNNNGGNNNNGGNGGNGGNNGGNNNNGGNGGNGGNGGNGGNGGFRNRFGNNGGNGGNNGGNNNGGNKNNGGNNNAGARTAGVASASGAIGGIAAPAIENTNDPVRPFRVDGNTFTSKADAAQRACAIQNNACASAVNSGQVQGKTVPDCNAQEAQCRAELSA

SEQ ID NO: 832 - protein, 377 aa, Scytalidium thermophilum
MKVPTLISSLLALVSFSEATPLIKRATLTRVNNFGNNPSGARMYIYVPDRLQPRPAVLTAVHYCTGTANAFYTGTPYARLADQYGFIVVYPESPNDGGCWDVSSRAAYTRDSGSNSHAISLMTKWALQQYNGDPEKVFVAGTSSGAMMTNVLSAVYPDLYKAAAAYAGVPAGCFYTGTVAGWNSTCANGQSITTQEHWARTALDMYPGYTGPRPRMLIYHGSADTTIYPRNFNETLKQWAGVFGYTYGQPQQTLPNTPSAPYTKYVFGPNLVGIYGSGVTHNIPVNGANDMEWFGITGNPTTTSTSATVPTTTSSPGTTSTSAPVTTTTSRAPPPPTQTCIPVPRWGQCGGITWGGCTVCEAPYTCQKLNDWYSQCL

SEQ ID NO: 833 - protein, 664 aa, Scytalidium thermophilum
MGQVMAGIALLLVAGTGTSAGPVRLLHPDGWPDPIPASSVGPLNWSTIHPPIYASQWSLSSSSLRPSNKDPNAPPLKSSISVTDTSLPNIVDWRNRDGVNYITTPQDQGVCNSCWAFATTALIEAMVRIEHGAWTKRSEADVHSGVGALCADYGSADEALAWMAGMPQPWDQQNRLQNPPGVADWACGPYEDRDPTIRTRCADRDGRATHVPPFQALGTMEDQKRWLDRYGPLVATFVLYSDFGTWRPTEKGTVYQWDGMKDSVGNHLALVVGYDDNKQAWIIKNSWGRQWGEDGFAYIAYGTGNIDNWVKHGVMNVNPDPWTRRRHQNGCMLQSSNGNTHRNFELVLPAPKSKDIYHVYRDGDSGRWTKATKIHNADLVGPLTMIGTSFNRDLYALGLEKGAVLHQWKFNQAQGTWSHTRYHPDIQDIDGVPGLTQTDDSRLVMVVKLSNGTLIELLQEPNSQGWIKIKQPIATNISQSGPSLVQSNVGLNIYDPNGNSRGNIYIVAVRDDGRLQLFWRPGDGDRWQAGEIFGQGVPSNSPPVMIQDFFDTVDETSVGGFQLVVAVSGQVQHWVRDNRNLSQQKPVEGAQGPWRLVESVGNGVLRVWALVQGSFGQKMHMITEGADGRFSYWEWDGRWERLGTLPTLDEEWSHVTIESSAVVV

SEQ ID NO: 834 - protein, 415 aa, Scytalidium thermophilum
MKKTLLLCFIHGFKGDETTFGKNFTFVEYLRKHVSQVLPKVDVQAIVYPTYETRGDLGECVTRFNEWLLNKVIDLEVAAGTPSPTVNPSVRVILVGHSMGGIVAAETAIRIAWERPIHESDSEAEDSSQATTTTTTTAAAAGKAPPPPNSLMFPYIQGVLAFDTPFLGISPGVVAHNAEQHYTTAASAIAQITSLTGGLWGGAKLAQAAEQSHSSQKPKIAGALPPAQGKDSAAGKDAGKKDSGGGGGWGKWGTIALAAGAAGAVVAGGAAAYLRREQISQGLGWVTSHLEFVGCLARKEELRRRVVRMVQLNEELGVGFGNFYTRLGQSAASKQVSMVGTVLGKDRTFCVVPSKKDKAGDWRPAVNDKATDEIGAHVSMFEPKNNPNYEKLGNEARDMIATWLHNEWYEGSSID

SEQ ID NO: 835 - protein, 436 aa, Scytalidium thermophilum
MSRSGFGLRRLLSLALSATFVSIATCREHWVPIWASMPQQVEPYNLPEAPYNGTSAVFEDTTIRQTVYLTQDATTIRVQFSNAFGGSDLPITAATIALPANGTAGSSSIRQDTVRHLTFSGSPSFRVPNGALVVSDPIRFPVKAQTSVTITVYLASGQQGHAITGHPGSRTSSWLARGNLVAASDLSKSDSVQRIDKWFLISAIQAWLPSHHNALAIIGDSITDGRGSTTNGNDRWPDQLLARLRKATGRDASLLKSLAVMNMAAGGNRVLADGLGPNALGRIERDVLAHPNVRYAFVFEGVNDLGTADPTDEAQTAVGDRLILAYEQIITRLHAAGIAVFGATITPMSGPGQVYGEPARETQRQRVNKWIRTSGRFDAVIDFDKAVRDPKNGTMLRPEYDTGDYLHLNPTGYKAMADAVDLSLFKKFEDGVSAMV

SEQ ID NO: 836 - protein, 255 aa, Scytalidium thermophilum
MKSILILLSPLITPAYAGFHDWEPPGPNDVRAPCPMLNTLANHGFLPHHGRDLTRKQVVDGLYNGLNINKTAASTLFDFALMTSPKPNATTFSLDDLGRHNILEHDASLSRTDAYFGDVLAFNKTIFEETKRHWGKSPILDVTAAARARLGRIQTSKATDPEYFMSELGNIFTYGESVAYIMLIGDAKTGRANRRWVEYWFENERLPTHLGWRRPSKELTSDVLDTYISLIQNITLTLPGGTDPVKRRAASHFGW

SEQ ID NO: 837 - protein, 551 aa, Scytalidium thermophilum
MKIPAGALTGATLSFGPWISPRAVSSGLTQDDLSRPSARAVIQAAGASATCERFRQPIDHKNPSFGGWNQVYCVNPQYWEGPGSPVILTTPGENPISSYVYTYNGFSFLSNTTITGAYAEAVGAAVVVVEHRYFGGSSPYDGLNSNTLQYLTMEQAASDMVNFAQNVVFPWDPQAGSVASKTPWIYFGTGYAGTLGSWIEHFHPGVFYGYHLSGASVEVNTENWYYYDTIRKGIDAFRGDTECTRALSEVVDFVDQYLLAEERDEEKIDAVKKFFGASFPIEDDDFAYAIATPFRYWQETGGYRRVLDMCDGIVGSRDTVDDPDLGTIPPSVVAFAGYFRMHFRDNTCTYLDTWGQDDPLWCVNTHDIYNPFFISRTLGNPWRTWYWFLCNEPLASWATGAPPGQPSIVSRKIVASYWQRQCEMHFPPVGDKTYGSSGGRRTPASLNQETGGWLRRWQGEEARIIWTNGEFDPWRETSMASENRPGGPLQSSGNVYSFVIKNASHADDAFTARGMQSMGLPVNPEVVKVQEQAIEIVKKWVAQGLAEKGGV

SEQ ID NO: 838 - protein, 477 aa, Scytalidium thermophilum
MMLGSGLLWTSLLVAAVSPTTARPGVAPGRSVRRNEDAAAAVNSLHEAGSRRGPGPWRIPSYVRMPVAREHFNVTGRGALHARPPGPSRPPLAVLGNTSTENPAALAARQAGNPRKWGWAGLEELGGIAYIIELQIGTPPQKVKVFIDTGSYELWVNPKCSTSASESICQSHGMYYPSRSRSSMFVGGGFAVTYGTGAVRGKYWADDINVAMFHVPRVQFAVADDSNYTFSGVLGLGYAYPHTINYPSVLNLMVSNDMIMAPIFSVGLGGDQDNFSEIIFGGVNRWKFAGKLEPVAIWPPIKQQDPRWLQYWVNVTSVGMTKPGERPVIYTQRDTFTMPVLLDTGSTLSYIREDLVAQIGQQFQAKIDHMGYYTVDCSWRNRPGTVDFGFNRGRMVINVRYKDFIWQQYPGHCLLGVQPADVGSTAYVLGDTFIRGAYLVFDQQSDIVWMNQYYNCGDGVVTVGAEKGDPGNIVGAC

SEQ ID NO: 839 - protein, 577 aa, Scytalidium thermophilum
MKGLATLVTAAALLGRAVAAPPEPPTRVIEKRANPTVTAPAGKIIGVERVGTEAFNGIPFALPPTGSLRLKPPVRLNTSLSNFDATGIAPACPQFFADSDDKGLLSMVLDNITGLPFFQKALKVSEDCLTVNVIRPKGTKAGDKLPVLFWIYGGGFELGWSSMYDGGPIVTSAASLGKPFVFVAVNYRVGGFGFMPGKEILADGSANLGLLDQRMGLEWVADNIEAFGGDPTKVTIWGESAGAISVWNQMALYDGNNKYKGKPLFRGAIMNSGSLVPTNPVDSPKAQGIYDAVVKKAGCSSAKDTLNCLRQLSYSKFLDAANSVPHVLSYNSVALSYLPRPDGKTLTKSPELLAKEGKYAAVPMIIGDQEDEGTLFALFQPNLTSTSRLVDYFKNIYFHDAPKSKIEGLVDQYSSWVWDGSPFGSGLLYDIYPGFKRLAAILGDIVFTLTRRTFLEYATAANPNVPAWSYIASYYRGTPILGTFHASDILQVFYGVLPNYASRSIHSFYANFVYNLDPNNASGGTSSKSKVSESWPRWTAKDRKLINFFWDKSEFIKDDFREGAGKYISSNIQYLRV

SEQ ID NO: 840 - protein, 673 aa, Scytalidium thermophilum
MVPRLGYCLTAALSLLASVDAIPQGGKGKGKGKGKDDGPSEEVYDYIVVGSGPGGAPIATNLAKAGYSVLVLEAGDDQSADPTTSIISLAGPRDTNSWGFYVRQYTDENLHLQNNHLTWRKPDGTLWVGSNASAPAGSTLLGVYYPRGASLGGSSVVNAGVAVLPPASDWDYIADVTGDSSWSASAIRTIFEQVEKNHYLPPGTPGHGFNGYLDINNNDGDVFARSPATVEVLEAMVAAVGDDPADVIDLVQRDINNNSPTRDTTQGLFGLPFHGNQTWGRASARDLILKTLAAKKPNGEPLYKLTVKTNSLATKVLFDQQGQKPRATGVEYVQGASIYRADPRHNPSAPLPTAQVARARKEVILSGGVFNSPQLLLLSGIGPADHLQSLNIPVLVDLPGVGSQLQDNPEMPVVGFAQSGPFVTEPLEGDPECTFGWGPPGVPDPCVEAWFQGYGPYTRAASNANAFMLKTNHSTNGETDILIFVLTNFAFRGHWPLTAENGMPADPPGLVGFSLVKANVQSNAGTVRLASTDPRDPPEIVFKTFEGTQGEIDIDAMADAVAWARSVFANVDSPVGPVDPAEPPCPGGDNAACRAGDKDFIKKQVFGHHATSTCAIGADNDPLAVLDSKFRVRGVDGLRVVDGSAFPRTPGTFPIVATFLLSEKASLDVLADA

SEQ ID NO: 841 - protein, 431 aa, Scytalidium thermophilum
MKGILKTAVAAALVAGVAAQPHGHSHNHFHFHAKKHAAKSQVEKRSTVVVTEVVEGPTEIVYVTPDGKKIDGKDAEKGIKDGLFVVVGSTSPTFTAPPPSVSTVIDNAEHGGQFFEVESSTSAEEKPKPKPSPTPEPKKEEPPKPPAPEEGPKGLDADFPSGKVKCDKLPTEYGPVEIPWLGIGGWTTIQQMGGWRKGHSFDHFSQAVSGGCRPGDFCSYACPPGYQKTQWPEEQGATGQSVGGLYCNENGFLELTRPSHKKLCEPGVGGVFVRNELSTNAAVCRTDYPGDERMSIPVDTQPGGTYPLTNPDSNTYYRWKGMPTTAQYYVNPMGVPVEEACIWESSKHGHKVGNWAPVNIGVGRSESGITYISIFPNKPTTTALLDFDIEIEGNVSGECYLRNNVYAVGPDGCTVGLQPGNTATIVFKNRS

SEQ ID NO: 842 - protein, 493 aa, Scytalidium thermophilum
MRFFSPLALALSLASWPAAVIADECQPVTWDPTKKARRADEPTGAFVVARPVPTMLNKREGPIQPGEINCRQWARTYDDVNYYTCYQLAKKYDITTDQFFFLNPDLQKDCSNVQPNAMYCVFGFVEPLRAYDGLCGPPNKNATCLGTDFQCCNAETFTCGNSDDDCAPGTCYEGACVGDKVWSTDGTCGFQHGNRMCTGKWGDCCNMEGKCGTGDDYCGSGRCQSGNCMDFIPGEPVDTTPPWLEGNTTDGTCGGPQRYTCSVVYGNCCNRNGICDPPESMDPGLGEKSKLARAKRAIAGTQVTHFGTRRSHKQPTMRFVTLNLAWAIPALAISGPLASRADCGETAARVCFGIDGGTAQDIDPEDIEYAGAFLRYIAETHENPLWTMPPEFTCSEWTIPVDGAGTILVLAKHINPRTNSSVTYSDLARTIDGGANATPEQKAASLLGACGGNGGMMGVTVDTSDPAYNTPEYIASKAKPQDIIVKLVRAPSL

SEQ ID NO: 843 - protein, 778 aa, Scytalidium thermophilum
MARRLLTLCLAATLVAAINPPRKPQQPTGGGSKLVTYNNTVLSPQFGASTTYVTWVASNTDGDFITWASDGSLVFENVVSGNRTVFLSADKIPANSYDYQISPDRTKVLWAVDYTKQYRYSYFANYLVQDVATGKTEQLVADPKGDIQYATWSSASSSQIAFVRGNDLFLWDKGTVTQITNDGSPDQFNAVPDWVYEEEIFGSDHALWFSPDGEKIAFLSFNEKGVETFTVPYYMDGEKYPPSYPYELKLRYPKVGTTNPTVALNILDVKTKKVTPISIDAWPADDLIIGEVAWVTDKHDKLIYRAFNRVQNKEKLVVVDTDTGKSTLSRQRDGSDGWLENNVAITYIGEVKRAGSKNDKTKWYLDLSDASGWNHLYLFSLDGRNITLTSGKWEVGGIVKVDTERGLVYYLSTENHPTERHLYSVSYITGKKTALVDPKTPAYWTASFSYRGGYYILRYAGPDVPYQELYSVDSPKKPIRVVNDNAKLVNTIKEYKLPKIEYIDLPHPSGYKLSAMLRLPAKFNPAKKYPVLLTPYGGPNSQQVTKAFKAINWHAYIASDPELEYITFTVDGRGTGYRGRAFRSTVTDNLGHLEAQDQIWAAKWLAKTYSFVDKERIGIWGWSYGGYLAAKVVEVGDPIISFAISTAPVTDWRLYDTMYTERYMKTPALNEAGYNKSAVRNVEGFKKLRGQFLIQHGTGDDNVHAQQSFALEDLLMGAGVSPEKFDVTYFTDSDHSIVYNKQGVYLYKQLTTKLFEEKQRKGSGGGHQWSKKAVAWRG

SEQ ID NO: 844 - protein, 636 aa, Scytalidium thermophilum
MTLKRLVVLALASKLVSCVPAPTDEPNEPVPTDLPSDEPTEDIASSFVSDLIANLTQAEEPETTNEKRGLFSCKQDSLTVNLGYAKYRGYYNASTGLNYWKGIRYAAPPTGNLRWQPPQSLPLKFNPPVTDAYEFGPICPQAMPSLPVAPHIPGNEDCLFLNVYAPAGAKNLPVLVYIHEGGYGYGDGRRDMTDIINANDKGFVAVTIQYRLGAFGWLSSNEVKQKGVVNAGMLDQALALAWVKLHICQFGGDPSRVTISGESAGAGSVMYHGIALGGNLGTLLYKQGIAASPYLPYQYKYNDPDPTSKYYAFSQAAGCPSSGNVFNCLKSKDTDTLQLANYQVTQSVPFGYWAFGPVTDNVYILNRPVQQMATKKMNGNKLLVGHTANEGSLFVPPGIVTEADLLGWLQSAQLKNLSPAQINTVLAANPNSADTDLSAPKWDTLGNSGPTAVEMSQDANGQQQRAFNIYAEATFACPAFWLASSYSKPGKAAYVYQYSVPFASHTSDLGAYFGPQEPNHSDDFALAFRRIWGNFIRTGNPSIAAPIANGAAAPNPSAPHPASNWPAWSDAQPKFVNLNITGGTPYQAPTLYGTFVTQYAQPGLQNAISVVSASNWEGGRLSRCDVYKSLAPSIPI

SEQ ID NO: 845 - protein, 924 aa, Scytalidium thermophilum
MLWISAALALLAGKAIANSAPEAVTEPPAIVPGAYIVEYEGDQDTNSFVKELGGEASLRRDLRFKLFKGASIQFKDTENAEALVAKVAEMPKVKAIFPVRKYAVPHHVVHSTGSAAIETTLARRAEGNETDTFSTHIMTQVNKFRDAGIKGKGIKIAVIDTGIDYLHPSLGGCFGPGCLVSYGTDLVGDDFNGSNTPKPDPDPMDCQGHGTHVAGTIAAQPNNPYGIIGAATDVELGAYRVFGCDGDVGNDILIAAYNMAYEAGSDIITASIGGPSGWAEDPWAAVVTRIVENGVPCVVSAGNDGSAGVFYASTAANGRKVTAIASIDNAMTPTLLSNASYSVDGTRGGDFGFTAGDPDNWTEISLPLWAVNFDTTDEANGCDPYPEDTPDLSGHIVLIRRGTCTFVQKAENAVAKGAKYVIYYNHSPGTVIVSASGVEGLEAVAMVTAEQGEAWIRELAAGRKVVVSMPNPATAGKFLIYTPNNNSGGFMSDFTSWGPTWEVEVKPQLATPGGLILSTYPRALGSYGVLSGTSMACPLAAGVYALIMNVRGTKDPKTIENLLSSTSKPNLFHTGGETAPFLAPVVQQGAGIIQAWDAAHATTLLSISSISFNDTEHFAPVQNFTVHNTGKTEVTYSLGHRGAATVYTFRDASQTTPNAFPGVLTEEYATLTFNDDKFTLPPGHRKIVSVRVQPPALDAKLLPVYNGYITINGTDGSNLSLPYLGVIGSMREHSVLDASRTYVRSNRVEGRVPANTTFVLPPAGFANDTSYRNRTEMPRIVLQLTMGSAHVRAYVVPVGGRTAVGVPRVENPFGIDAIGLAEGFPSMWNPRGTSQFTWDGKLEHGAFAPAGRYKLALRALRIFGNPERKEDYDAAESVEFNIRYLGGGSAKLRRWKERCRSEEAATAAGAEKMKRSARLALEER

SEQ ID NO: 846 - protein, 464 aa, Scytalidium thermophilum
MKLSTLQAALGLLAAQPVVASIGHRHAHQHARRHGHGHGHAHPSPKQARKAGCQLPDHPDLVRVPGAMNNGFAMSPDEPCVDGTWCPIACKSGKVMAQWKPGTTYSYPESMYGGLYCNGGTAEKPFPNRPYCVDGTGTVKAVNRAGSIVSFCQTVLPGNEAMIIPTDVDDVATLAVPGPDYWAGTAAHYYVNAPGISASRGCIWGTPDEPIGNWAAYVAGANTVSDGTTFVKIAWNPVYLDEPRYANVKPTYGLKIECPGGGCNGLPCGIDPSKHDVNQVQSPVAANGVSNAAFCVVTVPKGQTANIVVFNTDGSKGPGGGGGDKKKDPPKPPKPSPKEQEPSKPEEQPPKTTKAVEIVTTAANNDTTTSSSKNNSTPSSSSSASSTTTADDWMGGVFQEVDAQGDTTVAAGLSRATPNAVTEHHADEVHSAVSPTSSSEGAAAEGGSAIAGLVVAIVAAAALI

SEQ ID NO: 847 - protein, 365 aa, Scytalidium thermophilum
MTLLRTLLTPLPLLPAALAAPPTSLPFVINTWGGPFTAATDAAYLALTSSPSTSALDAVEIGCSTCERNQCDGTVGFGGSPDEACETTLDALIMDGSSMRTGAVAGLRRIKNAIAVARAVMTYTRHSLLVGDLATKFAVEMGLGPEEDLATEESRRRCQEWRERGCQGNYRVGVQPDPSTSCGPYTPLPAKGSYAEFAAAEDVTGQLSHDTISMVVIDKDGKMAAGTSTNGASFKVPGRVGDGPIVGSGSYVDGEVGGCGATGDGDIMLRFLPCYQAVENLRQGMTPTEAAQDAVRRMLRKFPDISSGIVVVNSKGEHGAAGSGWTFTYAFRGGNMNATEVVAVPPLSVVSVRTSEDDYGEPGEI

SEQ ID NO: 848 - protein, 277 aa, Scytalidium thermophilum
MKRFAILLTVLAALAACIGAITLNFPSDSYPHTSLSHHPPVPNANSNDPPATLQDDPNRPREVRENPFRAGAVLLGAGFDVVRAAVQIPILHFAPGANQTKQHALSAWIGLDGESTCPHTFLRVGVDMFLSKTGPAYLPWFGWYPNNVHHITFLDPQPGDWLDLSIHATNLTFAWLSITNRRTNVTGQATAENHPTLMCGFNALWMVQDLWSSQGVPLPNFGTMLFSEVQAQTVMRVARGVEDAYLEAVRERDGQLAVTCEKLGEEMLWFKYQGGHP

SEQ ID NO: 849 - protein, 619 aa, Scytalidium thermophilum
MIKMLRAIVSSVALLAAVVLANDTGHERPPRTREYDYIIVGGGTAGLALATRLSHGLRTSQILVVEAGPAALDHDGINVPGLKGTVLGGPLDWAFTTQPQRGLNNRSLFIPRGRVLGGSSAVNLLAWNRASAAEYDAWESLGNPGWNWKALSAAMEKAETYVNGPPGSGTHGPIKAVISRFMTEHQKAFVPAVARHFSYLPNNHDSLQGNPIGVMVQPSNIDPVPYNRSYSANAYLPLAGRNLEVLTDTPVAKVNLAKPQDGDRNAPYTATGITLRNGTILTAHKGVVLSAGAIGSPVLLELSGIGKREVLRSAGITTLVDLPGVGENYQEHPRVHIAFALKEGQVSGDLLQVNETFRAEEWAKRLRGEPGFFDDVGANYIFTDWSGAVESRTVYGELTRLAKEVVDSAPEINKYELKKQLELLDDRRVPQVEVIYSGRYVGPKGYPAPTSRLYGRGFFSLLAGIQHPLSRGSVHVDPTDPVGKPPVLDPGLVSNKYDAAGLVALLKFCRRLAHAPGFREYWEVEYEPGEAVQTDEDWQAYIRNVTETIYHPTGTAAMRPRRDGGVVDAKLTVYGTTNLKVVDASIIPVQLSAHPQTAVYGIAERAAEIMIAEHRLRGW

SEQ ID NO: 850 - protein, 491 aa, Scytalidium thermophilum
MRHIAPLLALLGATAASPLSADRTAALLDCLTAAGVPVDEVGSAEYKLDATGFNLALNYTPAAVAAVTTAEHIRDAVTCARELGFKATPKCGGHSYANFGLGGEDGHLVIEMSRFNKVVLDPETGIATAQGGTRLGHFAWEVYNQGKRAISHGTCPGVGAGGHVLHGGFGMSSHTRGLASDWLVGATVLLANSTFVNCSETENPDLFWALRGAGGSMGVVTEFRFKTFEVPETVTFFVASVQWPTEERAFAGLKAAQEFADTMAPELNMRLFIAKRFVNFEGLYHGNRAGLQEALAPLLKATGAVLAMAREGNWVDQARHFGGMTNIDQQHGHEDHDTFFSTSLYTKALSDDKLQTFVSYWFRQAKASPRDWYVQIDFHGGKTSAVSKPDRDYTAYAYRDALFLFLLYDRVDDGHAFPADGHELMSDLVNNITHGLSRDDWGMYINYPNHRLSQDEAQVNYWGRHLPKLQAIKKAVDPEDLFHFPQGVLPA

SEQ ID NO: 851 - protein, 288 aa, Scytalidium thermophilum
MRFTALAFAAAAARGVFAAPRPDDSRSTFGCAAPEPDAEHRRISQMFAAQEAEVVASGNFTMMATVTIDTYFHVVASSTSLSGGYVTDKMLYDQLDVLNAAYAPHGFQFNLKEITRTVNAQWAVDGNGYEMTMKRQLRKGSYAALNIYFLKDLGSNMGYCYFPTSGAGAGTTTRIRDGCTVLYSTVPGGSKTNYNLGHTVTHEVGHWMGLYHTFQGGCNGVGDSVADTPAQASASSGCPIGRDSCPNQPGLDPIHNYMDYSYDSCYEEFTPGQRARMESFWKAYRQGK

SEQ ID NO: 852 - protein, 511 aa, Scytalidium thermophilum
MRFSVQHLLVAALGLSVFDAAEASCACWNKGLEACLRTKKIPYKVKCDSDWENYSKTPNLRLPFKPAAIALPETAAQVSEAVRCAAKNNVKVQAKSGGNSYGAFSFGGKDGQLTIDLAKFNKTVLAKDGVTAIVGGGVRLGSMAKDLYDQNKRAVSHGICPPVGIGGHSTHGGWGFTSRAWGLTLDHILELEVVLANGTIVRATPKKNSDIFWAMRGAADSIGIALSFHLRTQPAPEEVINFMYEFQSAAESVDVAVDTFSKLQAFISNETLVDRRFSFALQTIANFHPESHELLRTFFVEGTFLGSFAEYNTTVEPALLAGLPEPTNRHVSSNGWLDSLALLSPTETLDTAPLFLDFFANSVTIDDPGMSEDAIRKYFTYLLQGPPAPTSYLSSMELWGGADSQINQPDSKGINFAAFPHRNVFWTAHNLARVGPGQAFPAEGITWLNDLRKVILDSVDVHTAAYPNLLDPTLTREEAHEVYYGQEVLKRLRQIKKKVDPGDLFWNPHSI

SEQ ID NO: 853 - protein, 726 aa, Scytalidium thermophilum
MATPHKPIRVGLIGLSSAAKTAWASRAHLPYLLSPRGKSKYQITALLNSSIQAAESAIETYGLPKETKAYGDPASLAADPNIDLVVCSTRVDKHYETVLDSIKAGKDVFVEWPLAHNAQAARELADTANRTGVSTIVGLQGVVAPVALKIRELLETDRIGKVLSSELRVFGGLNDRKVLPEGLAYFTDRSVGGNIYTIGFSHQNTVRGATGETWTVTSNVPDLIQLSGKWEESSLTQKNATLHYRYRRGQPFPGEPALAWTINGEKGELRVISQQHTSIQVGDATESRVIEIHNFETNSVEKVEWDWEDWQQELPFPARSIGKLYENFAAGKKIVQPSTVHPALRRRTAALAPLRNIYDVYYSIDLVVGNQTVPVSVDTGSSDTWMVQQPYECVSFWFDPRNPDGTRDCGLGAGFKGNLSGGVLPGLPPFYRAYVDGTFVYGFYGVEDVTIGGVTAHNQRIAIVNYTYWHGDGQTSGLLGLAYPYLTSLDGPDQNQPPYDPVFTTMWKSGAIDPIFSIALSRNEDQGNGPSGTQEESYLALGGLPPVEVDESTWASTPIHGMNSVPQWGFETDERGMYIIKPDAFVLEKGGAGPDAGQEILRNTTQIPILIDVGATLSYLPKGLVNQLYAAFDPPAQYLSSRGLFYALCNATVPRFGVQIGDSTFFMAPEDLLRQTARDPTGEWCRVGVTDTDSPPHVLGVSFLTNVVAVFDVGKHEMRFAARKDY

SEQ ID NO: 854 - protein, 425 aa, Scytalidium thermophilum
MAGRLLLCFTAALAAFGVSALPADAKAKADGFYLGVPVVNPGIKNAIPHRYIVVYNNTFDDEAVEAHEAAVIKTIAKRNINKRSPLTGKTLSTRVQTFKIGGWRAMSLEADDLLVNEIYAAKEVAYIEQDQVYTIAARRSQARAPSGLARLSSSQAGSSALYTFDDSAGEGITVFVVDTGIRVTHQQFEGRASWGGNFIDNVNQDEQGHGTHVAGTVGGRDVGVAKKVKLVAVKVLGADGGGSTTSVIAGMDFVARNVTASGLRGKAVMNMSLGGGFSNAINSAVNRVEQAGVVPVVAAGNEATDASLTSPGSAERAITVGAIDQRTDRIASFSNFGPIVDIFAPGVRVQSAIIDSNTALGPLSGTSMASPHVAGLAAYLMALEGLDNAQAVSNRIKQLARQAGGRVRGGPRNTTTLIANNGFLN

SEQ ID NO: 855 - protein, 512 aa, Scytalidium thermophilum
MRLPSLSPTAAAATAAVLLTQLTTASPTTHITKRQAALDDCLAAAGVPTAAHNSSDWDYGAHAFNQRLKYTPAAIAIPTTTEHVRLAVECAARTGVKVSAKCGGHSYASFGIGGEDGHLVVHLDSMDEVVLDKETGVATVQAGARLGHVATVLAAEGRDFSHGTCPGVGVSGHTLHGGFGFSSHTHGLALDAAVGATVVLANGTVVETSKTVNPSLFWALRGAGSNFGVVVSWSFQTFSVPPVVTAFEINLPQWRSNATNLAAGFSNLQDWLLAGGMPRELNMRILANGFTFRLEGLYHGDKTGFWSAITPLLPLLGTNVNATNVRELDWMSGFRAFANAFVIDTKRPHREQETFYTKSLVTGALPADVLQNVATYWVNAARTASGRSWYVIIDMYGGPNSAITAVGKDETSYAFRDPKKHLFLYQFNDSIFFGSYPANGFSFLDNWIKAFTDGLSEDEWGMYINYADPRLDRDTAQEVYYRDSLPRLRQLKKELDPNEVFYYPQAIKPAEF

SEQ ID NO: 856 - DNA, 1707 bp, Myriococcum thermophilum
atgctcaagtcggccctcctccccggggcgctggccctcctctcaggggtagcggtggacggccaggcagcgaacgggacgttccggaacccgatcctgtacgaggactttccggacaacgacgtgtcgatggggccggacggggcgtactacctgtcggcgtccaacttccactacagccccggggcgcccatcctgcggtcgtacgacctggtcgactgggagttcgtgggccactcgctcccgcggctcgactttggcggcggctacgacctgccgccgacgggcgagcgggcgtatcgcgggggcacgtgggcgtcgacgctgcggtacagcgccagccgggagctgtggtactggatcgggtgcaccaacttctggaagacgtgggtgtacacggcgccggcgcccgaggggccctggacgcgggcgggcgactttggcgacggcgtgtgcttctacgacgacggcctgctgatcgacgacgacgaggacgagaccatgtacgtcgtctacacgcacgacggcggcaaggccgtcaacgtgacgcggctgagcgccgacggcctgagcgccgtccgcaccgagacggtgctgaccccggaccgggccggcgtcgacgccctcgagggcaaccgcatgtacaagatcgacggccgctactacatcctcaacgaccacccgggcaccaccgcctacgtctggaagtccgactcgccctggggcccctacgagggcaaagcgctggccgacaacgtccccggacccctccccggcggcggggccccgcaccagggcagcctggtgtcgaccccgtcgggcgagtggtacttcatgtccttcacgtgggccttcccgtccgggcgcctgcccgtgctggcgccgatcgagttccagccggacgggttcccgaccctggtgacgggcgtcaacggcaacggcgaggagaacgcttgggggctcagctacccgctgccgtcgctgccccgccggccgctgaactactcgtgggcgcgggccgagtacgacttttacgggctttccgagctgcccccggccttcgagtggaaccacaacccggacgaggacagctacgagctccacggcggcgagcggagcgagatgctcctgcgcaccgcgtccgtcgtgcccgacgacgacctgtactcggcccgcaacacgctgacgcaccgcgtccacgggcccttcccgtctgccaccctcttcctcgacgtgatcgacatggcggacggcgaccgggccggcctggccgtcttccgcgaccgcagcgcctacgtgggcatccactgctccgccgccgccaacgacaccggcgggcatcgcttgaagtacgagatcgtggcccggttcaacatgacgctggacgagtggggcagcagcgagacgctcgacctgggcgaggtggtggagcgggtgcccctgcccgagaccatcccgcccgtgcggctgcgggcgagcatggacgtgcggccggacggcgagaagacggcccggttcgagtacagcgtcgacgcgggcgagaccttctcccccatcgggggcgcctaccagctctacgacggctggcctttcttcctcggctaccgcttcgccatcttcaactatgccaccaaggccctcggcggtagcgtcgctgtctcgaggttcgaagtcgactcgggcgagggtgatgcaggacaagcgtga

SEQ ID NO: 857 - DNA, 745 bp, Myriococcum thermophilum
atgttgacgaccaccctcgccctcctgacggccgcccttggcgccagcgcccattatacccttcccagggtcgggtctggttctgactggcagcacgtgcgccaggccgacaactggcaaaacaacggcttcgtcggcgacgtcaactcgcaacagatcaggtgcttccagagcagcccttccggcgccccggaagtctactccgttcaggcgggctcgaccgtgacttaccatgccaatcccaacatctaccaccccggtcccatgcagttctacctcgcccgcgtcccggacggacaagacgtcaagtcgtggaccggtgatggcgctgtgtggttcaaggtgtacgaggagcagcccaacttcggcgcccaactgacctggccgagcaacggtgcgttgattacgtatttttcatgtgttttctcgttgccatatgctaacagttctcctgcttgcaggcaagagctcgttcgaggttcccatccccagctgcatcccggcgggcaactaccttctccgcgctgagcacattgccctgcacgtcgcccaaagcgagggcggtgcccagttctacatctcgtgcgcccagctcgaggttaccggcggcggcagcaccgagccgtctcagaaggttgctttcccgggtgcttacagttccaccgaccccggtattctcatcaacatcaactaccccgtcccgacctcttaccagaacccgggcccggctgtcttcagctgctaa

SEQ ID NO: 858 - DNA, 2483 bp, Myriococcum thermophilum
atgcaaactgcttcgaaattagcagccgccgctggtggtgctctggcgctctgtaagtagacgaatagaacccttggcgtggagctgctgtcgccgctcaactagcccgggagtcgctgggggtttgtccgtgtccatgtgctcgtcgctgactttggttacctctcctcttaacctctcgtatccagggctacaaccagcggcagcacaggcaggatgtgtcaacatctcgtccactgagacatatgattacattgtcgtgggctccggcgctggcggtatccccgtggcggaccgcctgagcgaagctggccacaaggttctcctgatagagaagggcccgccgtcgacggggagatggggtggtgtaatgaaaccggagtggttgtttggtacggacctgacccgcttcgacgtcccaggcctctgcaaccagatctgggcggacccaaccggggccatttgcaccgacgtcgaccagatggccgggtgcatgctaggtggagggacagctgtcaacgccggactgtggtggaagccgcaccctgccgactgggacgttaacttccctgacggctggcacagcgaggacttggtggaggccacagaacgcgtattcgagcggattcccggcactatcaccccctcgatggacggcaagcggtacctctctgagggcttcgacatgctgggcggcagtctcgaggctgccgggtgggagtatctcgtccccaacgagcacccggataagaagaatcgcacttacgggcacagcacctttatgtactcgggcggagagaggggcggaccgttagccacatatctcgtctcggcggttgagcgcgagggctttacgctgtggatgaacacgactgtgaaacgcattatccgggaaggcggccatgctacgggcgtcgaggtggagtgcagcaacgacaagggaggtcacgccggcatcgtcccgctcactcccaagaccggccgtgttattctctccgcgggcgcgtttggctctgcgaagctgctcttccgaagtaggtacttgaagtcctcccgtccttctccgggaggggtgacagctagcttccggggcgagtggggtgtggtatcataggcaatgaaggctgacagtattcttcccaggcggtattggaccgaaggaccagctcaatattgtcaagaactctgccgatggcccgaccatgatttcggaggacgagtggattgaattgccggtcggctataacctcaatgatcacgttggcgtaagtaacttccctctctatcgtcctggcgtgcaagcgaggaaactcgtcgccgggtacaggacatggtactcttgtgtgaatgtcattcccgaccaacttgtactgctgctaacatgaaatacaagacggacattgaaatctcgcacccggacgttgtcttctacgactactatgctgcctgggatgagcccattgttgaggacaccgaaagatatttgggtgggttgttctgaacgaccgtctgcttgcggcaggacataggtcgaagttggtgaacgtgtgaaggctgacttcacgtagacaacaggaccggtccgctggcacaagctgcaccaaatattggcccgattgtaagctaaagcctgcctctccttctgtatgtttgacggcattatgcttatcgacttggcttagttctgggaaatcattgagggaagcgacggtgtctctcgtcacctgcaatggcaagccagagtcgaggggaaaaccaacagtgagtcccatttcttggtggtgagttgggaaaatggaagtgctaactggaatcaccgtagcatccatgacgattacccagtatcttggcacaggctccaaatctcgaggcagaatgaccattacgaggcagctgaatacgctggtttctaccccgccgtatctccgagatgagtatgacagggaggccgtcatcaagggcatcgccaacctgcgagagtcattgaaaggggtggccaacctgacatggatcaccccaccgttaaacgtgacggtggaggatttcgtagactcggtaagggagctagttacgatagacatgattaaacccaagcagagcttgtacttacaaaggaaacttggtgtagattccggctactccggcgcgccgttgctccaaccactggatcggtgagtgatacttaataacctctcttttttcttggcgatgagccatgcatcttctgcatcgcagacacggattgctgactactccgggtcacaggcacggccaagatcgggcctgacgacgggcgggatgggggcacgtcggtggtggacctcaacacaaaggtgtacgggaccgacaatatcttcgtcgtcgacgcatctatcttccccggccatatcacgggcaatccttcggcagccattgtgatcgcggcagagcatgcggcgaccaagatccttgcgctgccggccccagaggatgcggaatcgtga

SEQ ID NO: 859 - DNA, 1856 bp, Myriococcum thermophilum
  misc_feature (955)..(1420): n is a, c, g, or t
atggtgacggtgacgcagcttctggtggcgtccttcctggctggactgagcgttggctcggctctgccgcctagaatcggtacaaccagtgttgataaagacaacagcgccaacgcccgtagcgggagggtgacgctccatcaagtcccacgacgcaactaccgcttcaacggcgctcggtcagtgtacagaacgtacctcaagtacggcgtcccagtgcccgagtacatcgtgaaggcagtgacctacacggacgcgctcaatgccgccgcaggaaagcgtgacacgggcagtgcacccgcggtcccgatcgacccgagatacgacgtcgcgtacgtcacgccagtcagcataggcacgcctcctcagaccctcaaccttgacttcgatacgggctcgtccgatctttgggttttctcgaccaatacgccgcccgaacagatgaacggccaagacatatacgatccggacaagtcgaccacggccgagctgctcgagggtcacacgtggagcatcaggtacggtgacgggtcggcctcccgtggcaacgtctacacggacaacgtgaccataggcggtctcacggtggaacgccaagcagtccaatgcgccgagcaggtatcgacaagcttcaccgtcaagagcgagatggacgggcttgccggcctgggtttcagtagcttgaacacagtcagccccaagggccaattgaccttcttcgacaacgccaagccgcacctggatagtccggtattcacggccgatctgaaggcacacaaaggtacgtctacccattccgggtccctacatccgggagaggactacccgaacggcgatgaccgaagaggctgacctagctttccgcaacgcgcgggcgcgcgcagccggctcctatgactttggcttcatcgacgaggccaagtacaccggtaacatcacctacgtgcccgtcaannnnnnnnnnnnnnnnnnnnnnnnnnnnnnnnnnnnnnnnnnnnnnnnnnnnnnnnnnnnnnnnnnnnnnnnnnnnnnnnnnnnnnnnnnnnnnnnnnnnnnnnnnnnnnnnnnnnnnnnnnnnnnnnnnnnnnnnnnnnnnnnnnnnnnnnnnnnnnnnnnnnnnnnnnnnnnnnnnnnnnnnnnnnnnnnnnnnnnnnnnnnnnnnnnnnnnnnnnnnnnnnnnnnnnnnnnnnnnnnnnnnnnnnnnnnnnnnnnnnnnnnnnnnnnnnnnnnnnnnnnnnnnnnnnnnnnnnnnnnnnnnnnnnnnnnnnnnnnnnnnnnnnnnnnnnnnnnnnnnnnnnnnnnnnnnnnnnnnnnnnnnnnnnnnnnnnnnnnnnnnnnnnnnnnnnnnnnnnnnnnnnnnnnnnnnnnnnnnnnnnnnnnnnnnnnnnnnnnnnnnnnnnnnnnnnnnnnnnnnnnnnnngtatcccggctactggaccttctcggcctccgggtacggcatcgggacggacgacttcgtcgactccccgatcgagggcatcgcggatacgggtacctcccttttgtatctgcctacggccattgtcacggcctactacagccaggtgcagggcgccaccaacagcttcatatatggcggatacgttgtcccctgcagcgcgacgctgccgtccttcacgttcggcatcggtgaggtcaggctgaccatccccccttcgtacatgagctacgggccggtggcggaaggctcgtccacgtgcttcggcgggttgcagagcagcagcgggctcggcgtgaacatctggggagacgtggccctcaaagcggccttcgtagtattcaacggcgaggacccgccgagcattgggtgggctaccaagcctttggacgagtga

SEQ ID NO: 860 - DNA, 1528 bp, Myriococcum thermophilum
atgcatcactggacttctctcgccgcggcggctgcgctgctggccaacggcgccgttgcgcagttcaacatgctgcgcttcgcctgctctcagctggttgttgaccgtgtgaccccctggtcaacccgggcatgcgctacaccccccatcttcaccagatcgtcggcggcaactcgttcaaccttaccatgacgcctgtcgagtacgacctggctgagcggtcgacctgcacgtcctgcagcttcaagcaggacaagtccaactactggaccgccgtcatgttcttcaagcacaagaacggctcctaccaccgtgttcctcagatcggcaacggcggtcctcagggccagctgatcaacaacggtggcctcgacgtctactacatccccagtggcaaggtcactgccttcgctcctgtaagtaaacgaaactgagtccaaccaaccattcctcccgccccccgcccccccccccccccaaacactcctccggtcatgtgtaccgatagaactataggagaaaaccagagatggaattggatgagatgaaagaagagaggcaaaaggctattcgaaaaccaaaaacgggtgggggaggggttggcggaaagtgagagaggaggctaacattcgccctagggtttccgtatgcttgcgggcgaggcgaccaacaccgatgacagcaaggtttcctccggcaacatctgccaccgctgctggaaccagccggatgagaaccagttcgtgggcggcgctccctgcactggcaccgacaccgttgctattccccaggatccatcctgctacatgatccgccagaccatcatcttccctgcgtacgcacaaagccctttcttttgacctcttgtcttcgtggtgctcctgcccgagatagagcgagtgctaacagttatacgtggcgggcaacagatgctgggacggccaaaaccttgacacccctgaccacaagtcgcacgtcgcctacagcggcaccggcgccaccggcggcggcccctgccctgctagccaccccgttaagctgcctcaggtcatgtacgagatcatgtgggacgtcagccaattcagggaccagagcatgtggcccgaggacggccctgccttcatctacagcatgaaccttgggtaagctttttttttcctccctcttcttccaaactcctcgccccaggcacatatgtaatgcgaacagctctctgacatcgacttcacagtggctctgctgcccacggtgactacctcttcggttgggagggcgacactctgcagagggccatggacaacggctgcaacctcaacctcgactgcccgtctgctggcctcactgctcagccgcccgaggagtacaacgcctgcaccatcccgcagcaggctcccgagcccgtcgatggctgtaagttatcccgaacaggcaagagacgaggagaacagaacgagttactgacacgcgctctctcttctttacagggcttgcctccatgcccatgggcgagatggccgtgcgcgcctaa

SEQ ID NO: 861 - DNA, 2404 bp, Myriococcum thermophilum
  misc_feature (575)..(1260): n is a, c, g, or t
atgaagcagtacctccagttcctcgcggcgacccttgtcggcttcgccgccgcccagcaggccggtgacttgcagaccgagactcaccccaagttcacctggaccaagtgcaccgcccccgggtcctgccaacaggtcaacgccgaggttgtcattgacgccaactggcgctgggtgcacgactcctccggcacgaactgctacgatggcaaccagtggaccagtgcttgcagcagcgccgacgactgcgccgagaactgctacctcgagggtgctgactactcgggcacctatggcgcctcgaccagcggcgatgccctgacgctcaccttcgtcaccgagcacgagtacggcaccaacgtcggctctcgtctctacctcatggacggctcggacaagtaccagatgttcacccttgccggtaacgagctggccttcgacgtcgatctctcgactatcgagtgcggtctcaacagcgccctctacttcgtcgccatggatgaggatggtggtattgcgaactaccctcccaacactgccggtgctaagtacggcactggggtaagtccaacgannnnnnnnnnnnnnnnnnnnnnnnnnnnnnnnnnnnnnnnnnnnnnnnnnnnnnnnnnnnnnnnnnnnnnnnnnnnnnnnnnnnnnnnnnnnnnnnnnnnnnnnnnnnnnnnnnnnnnnnnnnnnnnnnnnnnnnnnnnnnnnnnnnnnnnnnnnnnnnnnnnnnnnnnnnnnnnnnnnnnnnnnnnnnnnnnnnnnnnnnnnnnnnnnnnnnnnnnnnnnnnnnnnnnnnnnnnnnnnnnnnnnnnnnnnnnnnnnnnnnnnnnnnnnnnnnnnnnnnnnnnnnnnnnnnnnnnnnnnnnnnnnnnnnnnnnnnnnnnnnnnnnnnnnnnnnnnnnnnnnnnnnnnnnnnnnnnnnnnnnnnnnnnnnnnnnnnnnnnnnnnnnnnnnnnnnnnnnnnnnnnnnnnnnnnnnnnnnnnnnnnnnnnnnnnnnnnnnnnnnnnnnnnnnnnnnnnnnnnnnnnnnnnnnnnnnnnnnnnnnnnnnnnnnnnnnnnnnnnnnnnnnnnnnnnnnnnnnnnnnnnnnnnnnnnnnnnnnnnnnnnnnnnnnnnnnnnnnnnnnnnnnnnnnnnnnnnnnnnnnnnnnnnnnnnnnnnnnnnnnnnnnnnnnnnnnnnnnnnnnnnnnnnnnnnnnnnnnnnnnnnnnnnnnnnnnnnnnnnnnnnnnnnnnnnnnnnnnnnnnnnnnnctctctcctcccaacagtactgcgatgcccaatgcgcccgtgacctgaagttcgtcggtggcaagggcaacatcgacggctgggagccgtccaccaacgaccccaacgctggtgtcggtccccttggcggctgctgcgccgagatcgacgtctggtaagttttatgtcatctgagaagcaatttggggcggtggggggtttgttttcggctttcgaggatcctgtctttcgctaaccttctcattccagggagtcgaacaagtgggctttcgctttcaccccccacggctgcgaggaccccggctaccacgtctgcgagaccaccaactgcggtggcacctactctgaggatcgcttcgctggtgactgcgatgccaacggctgcgactacaacccctaccgcatgggcaaccaggacttctacggtcccggcctgacggtcgacaccgagcgggtgttcacgtgagtatctctgcacctcgagttttgaaaaaaaaaaaaaacaatcaacaatgaccgatactaatggaaatcaaaaacaacagtgtcgtcagccagttccaggagaacaagctcacccagttcttcgtccaggatggcaagaagattgagatccctggccccaaggttgagggtatcacccaggagactgccgacatcactcctgaactctgcaccgccctgttccaggccttcgatgaccgtgaccgcttcgcggaggttggtggcttcgatgccgtcaacaccgccctcaacactcccatggtccttgtcatgtctatctgggatgacgtatgttacccttctcctccctcacctagctcctcgttcttgcgcagcaactgccagttataattacgtcccgcgttcgtatgctgacctcttctccttccagcactacgccaacatgctctggctcgacgggagctacccgcctgagaaggctggccagcccggcggtgaccgtggcccgtgcgctccggactctggtgtcccggctgatgttgagtctcagtaccctaacgcgtaagtctaaccaagaaaacttcgcacgaatggtcactcaaactaacaaactatgattagcaaggtcacctggtccaacatccgcttcggccccatcggctcgaccgtcgatgtctaa

SEQ ID NO: 862 - DNA, 1017 bp, Myriococcum thermophilum
atgcgtctcagtgctcttgttgtcctcctgccggcactctgcgtccaaggcatccgcattatccagtccaacgatgatggctgggccgagcagtatgcacgatcttttcacaatgccttgatagccgccggccacgacgcggttctatccgcccctgccgagaacaagtcaggatctggtaagtattaaggctggattgttcttactttgtgctcttgtgtttcccctctcttccctctgattttttttggtacggagtattattggccggattgttaacgagcttgactcatcatcataggctcaagtgatgctgagccttctcccaggaaggatccctgccagtatgacagctgcccggccgacagtggtcccatagggcgcaacgagacctcgccgcggctcaactgggttaactcgtaccccgccacatcgatgcggtacggcattgacaccatcgcccccccactatgggatggtgaggcgcccgagctggccgtcacgggacccaacgtcggtagcaacttgtatctagccgtccacatctccggcaccgttggtgccgctgtctacgcggctaaggaggcaaagatccccgctatcgccttctcgggtgcatctgacggtactctcgcctgggacagcccggaggagccacgtagccgtgtgtacgctgagctggccgccacactcaccaacgccatcatcgagagcggcaagccatacctccccgaggacgtcttcctcaacgtgaacttccccaaggtcgaagacgagtgcaccgacccgagccagttcaagtgggtgctgtcccgcatcaatgttggcctcgtctccgacccggatgcggagcactgcggttctacccgtttgccgcacgaactttctgttctcaacaccgacggctgctacatctcggtcagcccgggcgatgccaacgacaagacgaccgccccggcagaaaagcaggccgtggtgcgggataaattgaagagcttgtggacctgcttaccttga

SEQ ID NO: 863 - DNA, 732 bp, Myriococcum thermophilum
atgaagaacgcaatcctgatcgtggtcgccgctggcctcgccgctgctgtgccacagggtgtggctcgtcgtagcgccgggcggccacagcaccactcgggcaccaatgtccgtaacacttcgtaccccgagtactcggccaactgggcgggagcggtacagatcgggaccgggttcacgtccgtgtacgggacgatcacggtgccgtcggtgtacgacagcaacccgaacgcggcggcgtcggcctgggtgggcatcgacggcgacacgtgtcagagagcgatcctgcagacgggcgtctcgttctacggcgacggctcgtacgacgcctggtacgagtggatccccgactacgcctactccttcgccaacttcggcctgagcgcgggcgaccagatccgcatgagcgtcgaggcgacgtctgcgacgacgggcgtggccacgctcgagaacctcagcaccggccagaaggtctcgcacaccttcaccaacacgccgtccaccctgtgcgagaccaacgccgagtggatcgtcgaggacttccaggagggcagcagcctggtcccctttgccgactttggcaccgtcaccttcaccgacgcctatgccgtcggctccagcggcgaggtcacccctgcgggagccaccatcatcgacatccagcagggcggcgaggtactcaccagctgcgccacccaaggctcggacctgacttgcacgtacatcggctga

SEQ ID NO: 864 - DNA, 2067 bp, Myriococcum thermophilum
  misc_feature (277)..(710): n is a, c, g, or t
atgaggcatctgaacgatttcgccctcctcttcacgctgttgagcggcagtgccacctcggccgccgtgagaggcagcacatatcatcaagctcgagcggatgaattcaacaatccggtgctgtgggaggactatccggacctggacgtgttccggatcgggtcgacctactactactcttcctcgacgttcgcctactccccgggagcgccggtgctcaagtcgtacgacctggtcaactggacgcccgtcacgcactcggtcccgacgctcaacnnnnnnnnnnnnnnnnnnnnnnnnnnnnnnnnnnnnnnnnnnnnnnnnnnnnnnnnnnnnnnnnnnnnnnnnnnnnnnnnnnnnnnnnnnnnnnnnnnnnnnnnnnnnnnnnnnnnnnnnnnnnnnnnnnnnnnnnnnnnnnnnnnnnnnnnnnnnnnnnnnnnnnnnnnnnnnnnnnnnnnnnnnnnnnnnnnnnnnnnnnnnnnnnnnnnnnnnnnnnnnnnnnnnnnnnnnnnnnnnnnnnnnnnnnnnnnnnnnnnnnnnnnnnnnnnnnnnnnnnnnnnnnnnnnnnnnnnnnnnnnnnnnnnnnnnnnnnnnnnnnnnnnnnnnnnnnnnnnnnnnnnnnnnnnnnnnnnnnnnnnnnnnnnnnnnnnnnnnnnnnnnnnnnnnnnnnnnnnnnnnnnnnnnnnnnnnnnnnnnnnnnnnnnnnnnnncgtcaagggcatctgggcgtcgacgctgcggtaccggccgtccaacgacaagttctactggtacggctgcatcgagttcggccagacgtacatctggaccagctcgggcacgcgggcgggcgacaaggacggcgaggtcgacccggccgactgggcctgggagccgcacccgcccatcaacaagtgctactacgacagcggcctgctgatcgacgacgacgacaagatgtacatcgcctacggcaaccccaacatcgaggtcgccgagctgtccgacgacgggctcagcgaggtctcgtcgcgcgtcgtctactccccgccgtccggcaccaccatcgagggcgcccgcatgtacaaggtcggcggcgcctactacatcctggtgacgcgcccggccgacgccgagtgggtgctcaagtcgacgtccgggccgttcgggccgtacgagatgcgcgagctcgtgacgcgcatcagcgggccgctctccaacgccggcttcgcccaccagggcggcatggtcgacacgcccgacgggaacaactggtactacgtcgccttcatggacgcgtacccgggcgggcgcatccccgtggtcgccccgctgcgctggaccgacgacggctggcccgagctggtgacggacgaccgcggcggctgggccaccagctacccggtgcccgtgcaggcggccaagacggtgccggacgacggcctggacctggacgagttcacgggcggccagctgagccaccactgggagtggaaccacaacccggacacggcccgcttctcgctcggaggcgaaggcgagggcggactgactctgcagacggcgacggtgacggaggacctgttcgcggcgaggaacacgctcacgcgcagggtcaggggccccaagtcgagcggcacgttccggctggacgtcagcaagatgcgcgacggcgaccgggccggagccgtgctgttccgcgatacggcggcgtacatcggcgtgtggaagcaaggggatcaggcttctatcgtcgtggtcgatggtctcgagctgtctcagggctcctggaacaccgtctcgaccgggaggttggccgagacgggcccgaccctgagcaacacggaggatgtctggctccggatcgaggccgatatcacgcccgcgtttgggaccaacacggccaggaccacgaccttctcgtacagcgttgacggcgggcagacgtttgtccctcttggcccggcgttctcgatgagtaacacttggcagtactttacgggctacaggttcggagtctttaactttgctaccagggagcttggaggagaagtgaaggtcaagagcttccagatgcagcctctgtga

SEQ ID NO: 865 - DNA, 898 bp, Myriococcum thermophilum
atgcgtccatcaacggcaacatcactgctcctctcctgccttgtcggggcagcatgcgggctcaccattgatgccaaatggtggtggggccatcatcatcatcatcatcatcatcatccgaagtcaacctgtctacaccctgatgcgttgcaaaccgctagctcttacacgggactggaagagggtacaccgggcatcaggccgggcctgagcgagtcggcaacgtgagtgagcactcccgcttcatcttctcagcccatcatctatcatcccttaaagtgctctggggagaaggatggcttctggagggcaaaggctaacgcaatatttattgcacgccccgcgctgcagagacaatgccaacttcatcaacttctgcgcaggccaaacgctcaccaacggccagcagaacacggccggctcgtgcaacggcatccccatgggtcgcatccccgccaccagcaacatgatctcttccatcatcacgtacccgcagcccggcgaccgcatcaagcccaacacgactttcaacgtgaccgtccagacccgccatctccgcgccggctacctcgtgaacccctccgtcagctactacacggcgccccaggacctggacgagaacggcgacatcatcggccactgccacatctcgatccagaacatcggcagcttgaggacggttgaggtgcccgaccccaccacctttgccttcttcaagggtgtggacgacgaaggcgatggcaagggacgcctgaccaccgaagtcaccggcggtctgcccgagggagtgtaccgggtctgcaccatgatcgctgcaaggaaccatcagccggtggccatgcccgttgcccagcggggcgcccaagatgactgcaccaagttcgaggtcggggagtga

SEQ ID NO: 866 - DNA, 832 bp, Myriococcum thermophilum
atgcatcgtttctcattgtttgctgccttccttgggttgaccaagggggtcttgggtgaaaccgagacctgtggtgaggtaccatatgacccctcgaaggtacgttttctacatgaccaacctcctcctctccgacgacgaagcggccacatcagacgaaatactaatcatgccatatcatccgtagcatgtctgctgggacaatgagttcctatgccctatcaccgcaggcgagccgctgtcctactgcgcgggtgcatgctacagcaagttcatgtacacgtgcgaaaataacatcctgacgctcctcccgcctgccgaaaccccgtttacactcacggccgacaacccggatgttcctgcgatccacggcaagcctgtcaccgccgccagccagcactgggtggtcaacggcgaaaccaagagctactgccccgaccaggtcggcgagaactgcccgcccggcaacgagaccgtcattgtttccaggggtggaactgtctccatgagcgtcatggtccccggcgggcagcaggcctacctcgaccagtactggaacatgggctacacccaggcccactcggcctacatccccccgggaagcatcacgaccgggtttggcgcgtacgagggcggaggcttcgtgaacctcaatggaaacggctggggctgggctgcttgcccgcccagggcttccggcggtggcggtcccgcctggaacctggccgcaaggaacgattcgaacgcagaccggtacaaggattgcacgcccatcaacctcaggattcactcgcttccaagaggcacctatggcgcttggcagtacacgtga

SEQ ID NO: 867 - DNA, 780 bp, Myriococcum thermophilum
atgattgtccccaaggtgtccgcgctgatcacaattggcgttttcctctcacgagggcgcagcgcgcctacgtcttctgccaaccataccgcccgtgccgatacttctgtccctttcggtgtcatcattgaacactgcaccgttcctggtgtcgtggcactcacctttgacgacggcccgttcatctacaccagccatgttctcgacctcctagacgagtatggcgccaaagctacgtttttcatcaacggcgagaactggtctcgtggcattgatgacttctcgacgccatggccccagattctgaggcggatggacagctcgggccatcagatcggctctcacacgtggtcgcatgccgatctgtcgtctgtcgaccaggccactcgggaattccagattgttgagctcgagaaggcgctctttcacgttctcggcaaagcccctacctatcttcggcctccctatggttcttgttcgcaagattgcctctccggaacagggcggttggggctacacgtggtcaactttgatgtcgaccccaaggactaccttcacaaccaggagggcgacaccggagcggcggaaaccttctcgcgagccttggatgagcgcccctggggggattcattcttggttctcagtcacgacacgctacaatacacggcagagtacttagtcccacacatgctcaaggaaattcaacgacgcgggtatagggccgtcactgttggtgagtgtctgggtgatccagtcgagaattggtactggtctgcatga

SEQ ID NO: 868 - DNA, 1606 bp, Myriococcum thermophilum
atggcaatcccctctctattcttagcatcggcgttgctcgtagccttgcttttctgccatgccaccgccgcttctcaacagctcgcccacgacgtgggttgcgttcaccttcctatcattcactctactaaagtcgaccacttctcagataagcgaggcatccaggtacagctagcgaaccgatccgatgttgcctactatgctcagcgtaccattcccctctccattcctcccctcctggcttcctgtttcgtcagctgctgaccatctcgcagtcagcatcggcacgccgccgcagcccgtgtatgtacaggtggataccgggtccttcgagctgtgggtgaatccggactgcaccacggtgtcaggctcggacgccgtcttctgcgaacgggccgggagatatgacgccagcgaatcctcgacggcaacctcgctcggaacaagcaggacactccgctatggaatcggggctgccaacatctcctacttcaccgacaacatatcgcttgccggaagcgccatggccctgcaggatgtccagtttggcgtcgccacctcgtcggaggacgccttttcgggcatcctgggcatagggtatgggaagggcatcggcactgggtaccccaactttgtagaccagctgtgggagcagaatgtgacccgggtcaaagcgtatacccttgcgctggggaacaaggactcggaagaaggggtcatcgtgttcggcggcgtcgacacgtccaagttcgcgggcaggttagccaggctacccgttattccccgggcgcagtctccagacggcgtcccgaggttctgggtcgagatgaagtccctgtccctcacgcgcccgaacggcctcaacacggcttacgatggcgcctctatccccgttttcctcgacagcggttcgaccatgactctgctgcccgccaatctgactacggctattgctagagactttggtgcgcaggcccccgacgcgagcggcttctacaggatcgactgcgccctggcggcgctgaacggtaccctcgactttgttttcgacggggttacagtcaaggtcccctacaaggagctcacgcgcgaggtagccagcgacccaccttcttgttttctcggcatcgtggccagcgaccggtttaccctactcggggacaccttcttgcggtcggcttacagtatgtcttacgcgcgcacatccccggagaaggttgtcgtcctgggcgaatgttaacaagttctcatagcggtgtttgacctcgaaaccgattctatttggatggcacaggcggccaactgcggctcgtcacccgcggccctcagtaacgtgcgggacctgtcagccgtaatcggcgagtgtggaataagcgagacagcagagagcacgagctcaacgcaggttcctagcactggagctgatgataccgaagccgggcctcctcacaccagtactactacagttgcatcccagccgtcggagacaaccacgcagatcgggggaagctcttctcgtggtagtgcggggaaccgtctaggagctcaccggctggccagcttcttggcgataatggccgcattgcatttgttcactggaatataa

SEQ ID NO: 869 - DNA, 1589 bp, Myriococcum thermophilum
atggtcctcgctctcttttccctgcttgcctgcacagcccttgttggtgccactccctcccgacacaggatagtcgactcgttggatggacaggccacaggagcggctcaacggcgtgacaacaaccttgctcgggtgttctctcatgtccagatcaaggtgagtctcttccggacagaatggccgcgctgaagcagactaaataaaacctctagacatcagatgggaaatgcctctttgttggtgaacatccggacaacgtccgagccacttcggctccagttcaagtcgccgattgcgggtcgactggcggacaatactgggatatcatcactgctggaaggcatgtcaagggcgacaacgtcttgctcgttgttaacacccttacccagacctgcttggagtttgacccccgtcaacagccagggagtcaggttcggctgtctccatgtggtggtaagaaacctcgttgggggggggggggggaggggatatgtcctgcttcgacttgctaatgttgttctagagggagaggtgactgattctcagctattcgcttccagcagcggtgctggcccccttccccttcaaccacggaaccaagtggaatcctgtgtcatcgccaagaacggagttatcggaatttcgaggtgcgatagcagtgatgctggtcaagtctttactttcggcgaagcaacaggaataagcgaggacagcaacaacaatatcaagatcaacagcaggggccgccgtaacaagaaggttcactcaacttcgacctgcgcaaggcctacacggactgtgactgtgcttccgacgcagagcgggggaagcacggcaactccgacgacaacgcccgccccgacagcaggcagcggcggtggcgaagggagttccggggccgggactattctgacagtgaaccccacagaaccggtaccggtgtcgcgggctggcggcgtcctgcaaccaacggcggcggcagaagcgcaccaacgagacgagacggcggaacgagccttcagcggcgtgtcgatccgcgcgccgaacggtcagtgtctcttcgtcgaccccacggcgggcgacttccgccagaacttgatccctgtttcgctggtggactgcactggggcccctaacgagaaatgggatgtcatcactgagggcaagcacaacaagccgaatccggaccggccggccgccttgatcgtgagcgcattggtacgtcgttgggatgatgacagcgggtgtgaggcactgcgatctgactcgctctcgtacagacgcaaggctgcattagcttcgatggaaggcgacaaccgggcgataccgtaaccatattttcgtgcggcggtcgcgctgatggtggtgcgtatcaactgcatactgtgaaccgacttcatggcactaacggtacttaaggcggcgaaacggatggcaaccaattgttcccatttatcggccagacgagtttcgcgtttgcgccagtgaacgaggacggaaagacctgtatcctgcccggcgatggtaggctcgattcggggccctgccctacagacggttcccagcttttttccatatttgagtga

SEQ ID NO: 870 - DNA, 1212 bp, Myriococcum thermophilum
atgagaagcccctgggttctctcgttattttttctctctggcgtagctgccaaccaggccgccgtcgaatcatgtcctccggtccctgccaactttactctctcgccccctcagccccggggctcgcgtgagctcccagaccccttccgtaccgtccgaggggagcgtatcaccaagaaatccgaatgggagtgccgccggagcgagattgcagaactcgctcagcgacatgagctcggccccatccccggcccgcccacggtcctgtccgccacggtcgtcaacgacacgcagctcgtcgtggagatcaccgaggacaacaacaccatctctttcacggccaatatcaccttccccaccgtcggctaccccccttacccggtcctcatcggcatcaacggcatcaattttcccaccccgccgacggtggccaaggtcattttcccgatggaccagctcgcccagccagccgagaccttcgtccgcccccgggagggcttattctacactctctacggccgcgaccacccggccggcctcacagcggccggggcctgggccacgtcgcgggtgatcgacgccatcgagctcatggccgaggcgacggggctggacccggggcgggtgggcgtgacggggtgtctgcgcaacgggcgcacggcgctggcggcgggcggcttcgacgagcgcgtggccctgaccgtcgcccgcgaggccggcgcgggagggtcgtcgtgctaccgcctgcgcgtcgacgaccggccggcccccggtggcatcgacgtctgcaacaccctccagtgccccccgtacccggacggcgggcagacggccgcctttgctcacttctacgacaacccgcacgagctgcccttcgaccgccacggcgttgccgccctggtggcgccccggccattgctggtgctgcagagcgatgtgaactggttggagcccaagtccagcttccagtgcatgggcgcggccaagaaggtgtatgacgccctgggcgtgcccgatcgcatggccgtgtccgtcatgggcgggctcagcgtgtgccagctgtcccacaggcaggaggcgttgttggatgcgtacctgcggaagttcctgctgcgggaggaggacgtcgactttgacaccgatgtgattgagaaagacgtcgactgggagcccctgccggcgtataactggacagtgccgattttggagtaa

SEQ ID NO: 871 - DNA, 2139 bp, Myriococcum thermophilum
atgttctcgaagaggcggaaggcgggagcagagaacacttcggccggtctggtcaccgcccggctgctggtgtccttcctcgctctctcaacgtgtccggttgcggctgcgggacatgccacatcagacacgcagctccccattgaagccggtcctgtagcgccgctaataccggaagcaccagcacctgctgaacacaccttcgtgggttgccccatctcatgtcacattcgctcgcctcggcttggtgagagaggctgctgaccttcgtctcacaccgtatatcagacgctccgacacattttccaccacggaacgtacaaacacccgcatctccatcgcagaaaggatgtcacgcagccaaaggcggaggtgtggctgccggccgaggacgggttcgaagcccagcgattcggtcctctgagagcccggagcagcccccttcggatcgagcggctggtggatcggaggcccagtgtggtagatccaattgtggcccagtcaaggaagcaagggtttgtctcggtgctctcgccatccgcgtggacgatcgacgatgttcccgggccgaacgtgaccgacaaggataccatcttgacgctcgccctgatggcggcggacgcttacgtggagacgccgggcgaagcggattgggaagacgtcggtgcgccgttcaacaggagtctagatttcggctgggagggtgatgggctgcggggccacgtatttgccgacgagacaaactcgactatcgtcatcgggctgaaggggacctcggttgccgtatttgacggagatggcacgaccaccaacgataagataaacgataacctattcttcagttgctgctgcgcccagcaaggaccttggacctggcatcaggtgtgcgactgcgcaaccggcacctacacgtgtaataatacttgcgtcgtccaagccctccgcgacgagaacaggtattattatgcggcacgcgagctgtacgccaacgtcaccgagatctaccccaattctaacgtctggattaccggccattcactgggtggggctgtcagctcttttctcggcctcacgtacggtgtgccggtggtgacattccaagcggtgcccgaggcgctaccggcgaagcggcttggtctgcccgtccccccaggagccgacccggacacgcctcaggagagggagtacaccggcgcattccactttggacatacggccgaccccgtctacatcggggcatgcaacggagcgacggcgtcgtgctcattagccggttacgcatttgaggcggcgtgccacacgggccatgaatgtgtctatgacacagtgggcgacctgggctggcgtgtcggtatcggaacacacaggatcaagtcggtgattcgggacgttatcctcaaatacgacacggtcccggaatgtaaattaaccccagagtgccgggagtgcggtaactggaagatgtatgagagtaacggcacggagccgaccactacctcgagcgtcccgacggccaccaccaccaagacccggacccggactgaaacatgcaagacaccgtatgttctgctgtcgtttttgtgtggctgggaatgtcttgctgacaagtatccaggggctggtggggttgcttggacgaaaccactacaactactggtacggaaacgtctgaggtcacgacaacgacctcgaccacgacatgtcatactccgtaggtggccccaatgcgtggcagtcgcatattatgagatactgacctcagccaggggctggtttggctgcaaggacaagaccacgactaccgaaacgaccaccgacgacagcacttcgacaacatcaaccacaactagtacaacgtgcaagactcctggcaggttctggggctgctatgacaaaacgacaacaacgtcgacgacggtgacgacgactacgacgacgacgaccagcagcagcagcactgcatccgaggaccaaagcactatcacgcctcccccaagcatgcccagccccacatcggcgccaacatcgactcccgcggaggagggttcgcctcggaagaggcgttgcgtcgaccgggcctggtacggtctttgcaggaagtgggagggcgacgaccatgaaaccatcgatgacatctag

SEQ ID NO: 872 - DNA, 1534 bp, Myriococcum thermophilum
atgtacttcaccggaaccttcctcacggtggcggtggccatgagcggcgccgccgcagcgccaagtgagaggtctatcgaagcacgccaagcaaacactatcacggtcgacctctcccagacgtaccagcgtatggatggcttcggattcagcttggccttccagagggcgaacttgatcacgaatatgtctgacaagaccaagcagaaggagctgctcgacctgctctttaaccggacgacgggggcgggcttcagcatcctgcgcaacggcatcgggtcgtcgcctaacagcaactccgatttcatgaacactatcgcgcccaacaaccctggaagccccgatgcggagcccgagtacatttgggacggcaaggacagcgggcagctatgggtgtcgcagcaagcggtgaacttgtacggggtgaagactatctatgctggtaagtactccatcaggagggagagaaggttggctggggtctgtccgtggcttctgattaacaacggctgctttccaagacgcctggagcgccccggggtacatgaagaccaacgggcgcgacaccaacggtggtacactctgtggtgtgccgggagcgcagtgtgcgtccggcgactggcggcaggcgtacgccaactatctggcggcttacattggcttctacgcgcaggagggtgttaacatcacccacctggggttcctcaacgaaccggactacagcgccagctacgcgtcgatgcagtccaacggaaaccaggcggccgacttcatcaagatcctgcatccgactctcgaggaggccgggctggcggaccgggttaagatcacatgctgtgactcgatgggctggaacaaccaggtgggcatggtatcgcagatcaggtcggccggtgccgaggacatgctggggacagtgacctcgcacacatatgccgggggtccgggcgggcccatgaattcgcgggcgcccgtctggctgtcggagcagtgcgacctcaacggggcctggaccacggcctggtacgcctttggcggcgccggcgaggggctaacgtgggccaacaacatctacaacgccgtcgtcaacgccaacatctcgggctacctgtactgggagggcgtccagtggcccaacccgaacaccaacgagaaaatcatccgcgtggacaacacgaccaacacgtacgaggtatcgagcaggctgtgggccttcgccaactggtcccgctacgtgcggcccggggccgtgcgggttggcaccagcggcggctccggtgggctgcgcacggcggccttcagatatgaagacggaacaattgcggtcatcgccatcagttccggggggtcggatgtgaatttgaacattaacttcactggagggccagggccggcagcagtgcaagcgttcgtgtctgataacacgagaaaatgcgagtcaacaccggcaacagtggaggatgatggaaccatttcaggatcggtcgcagccaggtcaatcacgactttctttatcttgccggagacctcctga

SEQ ID NO: 873 - DNA, 966 bp, Myriococcum thermophilum
atgaagacggttgcgcttcttgcagcccttgcggcctcggttgagggcgccatcctctgggatggccggttcaacgacctgaccagcgccgaggacctcaacaagtggtcgtggagtaaccaggtcgggccataccaatactacatccacgggccgggcacggtgacgcagtacatcaacctctcgcccgactacaaaaacccggccgactctgggtcccggcagggcgcccggttcacgctcgacagcacggccttctggaacgggcagaacatgcggcggaccgagctcatcccgcagacgaacgcgcccatcaaccagggcaaggtgtactaccacttcagcatgatgcgcaaggacaccaacccgcccagccccaaccgcgagcaccagatctgcttcttcgagagccacttcaccgagatgaagtacggctggatcagcggcgagcagggcgagagcaacgtcaacctgcaatggatgaccaaccagcagagccactggaagaccgagtggaagcctgacgtgtggcacaatattgcctacgagattgtgtgttcttatcccccttttcttttttcttgcctttttttgggtgttggggagggaagaagggcgtttcttcttctccgctcacctcaaatactccccccatataagtataagcgagtgactaacctccgaggaaaatgccacggtggtggtggcggcggtgggcaaataaaataacaggacttcagcgcaaacactgtcggtttctggcattcagagggtgacgcaccactcgagcaggtcgtcgcccccgtctccgtctcgacctcgtccaacggggcggactggcacttgggcgtgctggagctgccgcgtaacggctacgccgacaccgacgaggacatttacttctcgggcgtctacatcgagagcggcaccatcaccaccgacgtcagcggccctggtaagttctga

SEQ ID NO: 874 - DNA, 1722 bp, Myriococcum thermophilum
atgaggatcgcagcctccacagtgctgctcggcgcggcctctgccgcctcgttccagcagcaagcccagcatgtgctctccgacggccttgggaaggcccaggaggccgtgaagcccttttcggatgctctcgctgatgctgctggtcgccctatcgagagcttcgaggaggccttctcgggcatgaccgacgaggcaaaggctctctgggaggaaatcaagctgctcgttcccgatagcgccttcaagactccttcgtggttcagcaagcctaagcctcaccgccgccgcgacgactgggaccacgtcgtcaagggtgccgatgtccagaagatctgggtgcaggacgccaacggcgagagccaccgccaagttggcggccgcattgaggactacaaccttcgtgtcaaggcggtcgacccgtccaagcttggggtcgattcggtcaagcaattcagcggctaccttgatgatgaggccaacgacaagcacctcttctactgtaagtcccagcgctttgtgcgcagcggaacgtcccttgtactaatccgactgatagggttcttcgagtcgcgcaatgaccccgagaacgacccggtcatcctctggctcaatggcggcccgggctgctcgtcccttaccggcctctttctggagctcggtccttcctcaatcgacaagaacctgaaggtcgtcaacaatgagttcagctggaacaacaatgccagcgttatcttcctcgaccagcccgtcaatgtcggctattcctattccggctcctcggtgagcaatactattgccgccggcaaggatgtttacgctctcttgactctcttcttccatcaattcccggagtacgcgaagcaagacttccacatcgccggcgagtcgtacgctggccactacattcccgttttcgcctctgagatcctgtcccacaagaatcgcaacatcaacctcaagtcgatcctgatcggcaacggcctgaccgacggcctcactcagtacgagtacttccgccctatggcttgcggagagggtggttatcccgcggtcctcagcgagtctgagtgccggagcatggacaacgccctgccgcggtgccagtccctcatccggagctgctacgagagcggcagcgtctggagctgcgtccctgcctccatctactgcaataacgccctaattggtccctaccagcgcaccggccagaatgtctatgatatccgcggcaagtgcgaggacagcggcaatctctgctacagcgcactcggttacatcagcgactatctcaaccagcagtcggtcatggatgcccttggggtcgaggtctctagctatgagagctgcaactttgacattaaccgcaacttcttgttccagggcgattggatgcaaccgttccatcgccttgtgccgaacattctcaaggagatccccgtcctcatctatgctggtgatgccgacttcatttgcaactggcttggcaaccgagcttggacggagaggctcgagtggcccggccgtcaggccttcaacgaagccaaggttcatgatctgaagttgccgggtgccgaggaggagtacggcaaggtcaaggcctcgggcaacttcaccttcatgcaaatctaccaggccggccacatggtgcctatggatcagcccgagaattcgcttgatttcctgaacaggtggctgagcggcgaatggtttgccgagtaa

SEQ ID NO: 875 - DNA, 1570 bp, Myriococcum thermophilum
atgagaacaagttcggcattggtcgccgtggcgactcttaaccagatcacgcatgggctggcattgccagaaagacgccatgggccgaaggtgctgggtctggagatgcagcggcgagctccacggaacttgatccatagggacaggaagctgaggaagagaggaactttggagatcggcttggataatgaggtgtgcttgactgcccgacaaccatcccttttacttttaacaaaaaaaaaaaaaaaaaaaaaaacaaaaccaaccgggctaacacgattcgcaggaaacattgtacttcatcaacgggacagtgggcacgcctccaaatcccgtgaggctgcacctcgacacgggcagcagcgacctatgggtcaacacgccgagctccgagctctgctcgtcgagtgacaacccgtgtgcctttgccggcacatattcggccaactcgtcctcgacctacgagtacatctcgagcaacttcaacatctcgtacgtcgacggcagcggggcgagcggagactacgtctcggacacggtcaccatcggcagccagaagatcgaccggctccagttcggcatcggctactcgagtaccaacagccagggcatcctcggcatcggctacccgctcaacgaagtccaggtgggccgcgccggcctgccgccttacaacaacctccccgcccagctggttgccgacggcgtcatccggtccatggcctactccatctggctcaacgacctcgacgccaacacgggcaacatcctctttggcggcgtcgacaccgagaaatacacgccgccgctcctctccgtccccgtcgagtccgcctcagacgccgtctccgaattcatgatcaccctcaccggcctgaagctgggctcccagaccatcgggcccccggagctcgccatcgccgtcctcctcgacacgggttcctccctcacctacctgcccgacgctctcgtgtccgagatctacgcggccgtcggggccgtcttcgacggcggcgccaacgccgcctacgtgccctgctccctcgcccgcaacgagtcggccccgccgctcgtcttcaccttcagcgagccggccatcgccgtcggcatggacgagctcgtcctcgacctggccgtcaccggctccggaggaggaggagacggcggcagcagcagcaatggccggccgaccttcgacaacggcgcgcccgcctgcctgttcggcatcggccccgccggcgccggcaccttcgtcctcggcgacaccttcctccgctccgcctacgtcgtctacgacatggagaacgaccaggtcgccctggccccggcccgcttcaacgcgtctgcctcttcgcgtgtcgtcgagatcggctccggcccggacgccatcccgggcgccacccgcgtcagtaaccctgtcaagcccaccgacggcctgcgaggtgtgaacgtaaggacggaaactgccgccgccgcccgtgctggtctcggtggcggcggcggtggcacaatgcggctcatggcggcgtgtgcgactcttgtgcttgtcgtgttgggtggcttgatttag

SEQ ID NO: 876 - DNA, 2903 bp, Myriococcum thermophilum
atgaggacctcctctcgtttaatcggagcccttgcggcggcacgtaagtcaggcccaggcgtggctcagttcttcttgtcgctaaccagctagcttcgtagttttgccgtctgcccttgcccagaacaatgtcccgaatacttttaccgaccctgactcgggcatcaccttcaacacgtggggtctcgacgaggattctccccagactcagggcggtttcaccttcggcgttgccctgccctctgatgccctcacaaccgacgcctcggaatttatcggttacttggtaagccatgcccgcttacgcgtgtgaccctcgcaggtgctaactgccctagaaatgcgcaaggaatgatgagagcggttggtgtggcatttcccttggcgggcctatgaccaactcgctcctcatcacagcctggccgcacgaggacacggtctacaccagtcttcggttcgcgaccggttacgccatgccggatgtctacgagggggacgccgagattacccaggtctcttcctctgttaattcgacgcacttcagtctcatcttcaggtgcaagaactgcctgcaatggagccacggcggctcctccggcggcgcctctacctcgggcggcgtgttggtactcggctgggttcaggcattcgacgatcccggcaatccaacctgccccgagcagatcacactccagcagcacgacaacggcatgggtatctggggtgcccagctcaacacggatgctgccagcccgtcctacactgactgggccgcccaggctaccaagaccgtcaccggtgactgcgagggccccaccgagacttctgtcgtcggcgtccccgttccgacgggtgtctcgttcgattatattgttgtcggcggcggcgccgggggcatccccgcagctgacaagctcagcgaggccggcaagagtgtgttgctcatcgagaagggctttgcttcgaccgcaaacaccggaggtactctcggccctgaatggcttgagggccatgatctgacccgcttcgacgtgccgggtctgtgcaaccagatctgggtcgattccaaggggatcgcttgcgaggataccgaccagatggctggctgtgttctcggcggcggcaccgccgtgaatgctggcctgtggttcaagccctactcgctcgactgggactacctcttccccgatggttggaagtacaatgacgtccagcctgccatcaaccgcgccctctcgcgcatcccaggcaccgacgccccttctaccgacggaaagcgctactaccaggagggttttgaggtcctctccaagggcctggccgccggcggctggacctcagtcacggccaataatgcgcccgacaagaagaaccgcaccttcgcccatgctcccttcatgtttgccggcggcgagcgcaatggccctctgggtacctacttccagactgccaagaagcgcaacaatttcgatgtctggctcaacacgtcggtcaagcgcgtcatccgtgagggtggccacatcaccggcgtcgaggtcgagccgttccgtgacggtggttacgagggcattgtccccgtcaccaaggttaccggccgcgttatcctgtctgccggcaccttcggcagtgcaaagattctgttaaggagcggtattggcccggaagatcagctagaagttgtcgcggcctccgagaaggacggccctaccatgatcggcaactcgtcctggatcaacctgcctgtcgggtacaacctcgatgaccatctcaacgtaagttcagagcgcaaagttgatcaagggcaaagaaattcgtgcagaaccccgctgactctttggtagaccgacacagtcatctcccaccccgatgtcgtgttctacgacttttacgaggcgtgggatgatcccatcgagtctgacaagaatagctatctcgaatcgcgtacgggcatcctcgcccaagccgctcccaacattggccctatgtgagtcaccggactccaaacttgtttttgtcccttatctaaccgaagcaaacaaaggttctgggaagagatcgtgggcgcggacggcatcgttcgccagctccagtggactgcccgtgtcgagggtagcctgggcgctcccaacggccgtacgtatacttttgtttaactcatcagttaatattcgcgctaacctcacatctcatctgctctccagacactatgaccatgtcgcagtaccttggccgtggtgccacctcacgcggccgcatgaccatcaccccgtctctgacgactatcgtctcagacgtgccttacctcaaagaccccaacgacaaggaggctgtcatccaaggcatcatcaacctgcagaacgcccttcagaacgtcgccaacctgacttggctcttccccaactctaccattacgccgcgcgaatacgttgagagcgtaagtcttgcctactcatacaactcttttctttctctccaaatatagagaggaatagagacattgcaaagacaattccatactaacgcgcttttcttccccgtttctccagatggtcgtctccccgagcaaccggcggtccaaccactggatgggcaccaacaagctcggtaccgacgacgggcggaagggtggctccgctgtcgtcgacctcgacaccagggtctacggtactgacaacctcttcgtcatcgacgcctccatcttccccggcgtgcccaccacgaatcctacttcgtacatcgtggtagcggcagagcacgcttcgtcccgcatcctcgccctgcccgacctcgagcccgtccccaagtacggccagtgtggcggtcgcgaatggaccggtagcttcgtctgcgccgatggttccacgtgcgagtaccagaatgagtggtactcgcagtgcttgtga

SEQ ID NO: 877 - DNA, 908 bp, Myriococcum thermophilum
atgaagctcatagaagtcttgttactcacctcctccatctcgatggcctcggccaagcacatcatgatcccctccacctcgtttaattcgcagtccgatttcgacaccgactggaactacctctacccatggggcagcgaccacaacggtgccgcccgcatgagggagtcccaggtcagcctctcgaacggggtgctcacgctaacggcgacgcgagtggacggcgagccgcccgcccaccacggcggccaggatatcgccatccgctacctctcgggcgccatacacgccaaggagcacttcagcgtggctcctggcggcggttacgactttgcgggagagttccgcgccccagtgggacgcggcacgtggccggccttttggttgacgggggtcgacagctggccgcccgagatcgatatggccgagtggaagggcagcggcaagatctcgttcaacaccttcaacacatcgtccgaggtccgcgctttggacgtggactacccggacccggatgctttccacaagatcctgtgcgaggtgagggatgtgaacgggcaggatgtgagcgtgcgcttcgtcatggacggccaggaagtcgagacgcagtatgggaggggtttcgtggagaagccgttgtacttgtgagttgtcccgacttgccgagcggttacttcttcagttgagggcgggagaggcacccgaacaaactaacgcagtaattgcaggatcatcaacttgcagatggagggctcctcgggttctcccggcccggaatcaggtgcgtgaagaaacaaacagcctcatcgagatctgcgtctgaaaagtgtatactgacatcatatccctgccaaaaagacacgttattccaggccagaaacgttgaaatctggagttacaacgagtaa

SEQ ID NO: 878 - DNA, 1329 bp, Myriococcum thermophilum
atgaaaacgctctcagctgccctggcgctggtggcgcctgtccacgccggcctgcgcttcccatgctcgactctgaccgtccagcggctcgatcccgtcgtcgagccgggcaagatcccatctgcccatgtccaccacatcgttggcggcaacgccttcaacgccaccatggaaggcgacattggcgagcaggctacgtgcacgacgtgccagatgtctgaggacttctcgaactactggaccgcccagctgtacttcaagcatcccaatggctcttaccatcgcgtgcccgtcgtccccgtccagccccttctgggtggctcggagggtgccaggggcggcctgaccgtctactacacccagcacgacttgatgagggacaacctcggacagcaaaagatcacagccttcaagccggtaatgttgcccttttctgctgccaccttgacattgccagcatctgattattatattacacctggtcaagttttctaacacaaggatcaccgagggtcaaatgataatagggtttccgaatgaccgtcggcgacccgactgttgagggcaagcctcaagtcggcctccgttatcagtgcctgcagggccagttcagaggccccgagctggaccacttcccggaggagaagtgctccggcggcatcttcaccacccaccacttcccagcgtcagtttcacccccttcccccctcttttcttcctccagacgtacgcactgagagagctgctttcttttagtttactgacttagtctcttcctgctcccctttatctcgccttacagctgctgggacggcaagaacctggacagcccagaccaccagtcgcacatgtacaacacgatccagtacgacggcttcatgccggcggggccgtgcccggcctcgcaccctgtgcgcatgccacaggtgacgtacgagaccgtgtgggacacgaccaagttcaacgacatgtggcccgacggcacgcccaaccccttcgtctggagctttgagggcaccgccggcggcacccacgccgactacatgttcggctggaagggcgactcgctccagcgcgctatggacacgcccgagtgcttctacgacggctgcggttccatcaccaagcagtctatggaagtggccaaccagtgcaccatccaggagaccgtccaggaagacgtcgagggctgtaagttctttcctctacttggaacgttcttcgaattgcctaatcaacccaaccaaatccccatccccttccccttcgtttgttaggcggaacccaagctaaccctaagcagggatggataagctcccgggtcgttaa

SEQ ID NO: 879 - DNA, 862 bp, Myriococcum thermophilum
atgaagtccttcaccctcaccactttggctgctctggccggcaatgccgccgcccacgccaccttccaggccctctgggttgatggcgtcgactacggctcggagtgtgctcgtctccctgcgtccaactccccgatcacggacgtgagctccacggcgatccgctgcaatgccaacccctctcccgctcagagcaagtgccctgtcgaggccggctcgactgtcaccatcgagatgcaccaggtacgttggatgtccgagaaaaggagatcaaagcagaagagtgaaaccggcaggctaacccggggttctctgatatcagcaacccggtgaccgctcatgcagcagtgaggccatcggcggtgcccaccacggccccgtcattgtgtacatgtcgaaggtgtcggatgcggcgtcggcggacggctcgtccggctggttcaaggtgttcgaggacggctgggccaagaacccgtcgggcgggtcgggcgacgacgacttctgggggaccaaggacctcaacgagtgctgcggcaagatgaacgtcaagatccccgacgacctgccctcgggcgactacctgctccgtgccgaggccatcgccctgcacacggccggcagctccggcggcgcccagttttacgtgacgtgctaccagctctccgtcacgggctccggcagcgccaacccggagaccgtctccttcccgggtgcctacagcgcgtccgaccccggcatcctcgtcaatatccacgccactatggacggctacaccgtccccggcccggccgtctactcgggcggcaccaccaagcaggccggcagtggctgctctggctgcgaggccacctgctccctctaa

SEQ ID NO: 880 - DNA, 2984 bp, Myriococcum thermophilum
atgaaggctgctgcgctttcctgcctcttcggcagtacgcttgccgttgcaggcaccgttcaatcgagagaggtatggacaaggctcatcaatgatatactccccgatcaacctcctctttactcatgccccaacactccccgtctcggtgcgagcgcgatctctacggggaccacacctccacacattcactcaaactaagtgtgaagtggcgccggtgatccgttgtgatccgcaatcgatatgcaactccaaactgcagcccattggctgctcacgtttcccgcgagagcctcgcttgctgacaataatcaacagacttacgacaagcccctcgcgagatctgaaccttcttacccatcgccatggatgaaccctgatgccgagggctgggcggaggcctacgcccaagccaaggcctttgtctctcaattgactctgctagagaaggtcaacttgaccacgggcgttgggtagggttttgtcacttgtccagacgatgtgtgaatggcccctgctaactagtgctgaagatgggaggctgagcagtgtgtcggccaagtgggcgcgatccctcgcctgggacttcgcagcctgtgcatgcatgacgcccctctcggcatccgagggactgactacaactcggcctttccctctggccagaccgtcgctgccacctgggatcggggtctgatgtaccgtcgcggctacgcgatgggcgtggaggccaagggcaagggcgtcaatgtccttctcgggcccgtcgccgggccccttggccgcatgcccgcagccggtcgtaactgggaaggtttcgctccggatcccgtccttacgggcatcggcatgtccgagaccatcaagggcatccaggatgcgggcgtcattgcctgtgcgaagcacctgatcggtaacgagcagggtaagtagtgaccaaagatgccgctccgagtccgtgttcaaagcctgctaacaacgctgcagagcacttcaggcaggtgggagaagcccagggttatggctacaacatcagtgaaacgctctcttccaacatcgacgacaagaccatgcatgagctctacctctggccgtttgccgatgctgtccgggccggggtcggctctgtcatgtgctcgtaccagcaggtcaacaactcgtacggctgccaaaactcgaagttgatgaacggcctcctcaagaacgagctcgggttccagggtttcgtcatgagtgattggcaggcacagcacaccggcgcagcaagcgccgtggctggtctcgatatgtccatgcccggtgacactgtgtttaactctggtctcagtttctggggcgccaatcttactctcgccgttctcaacggtacggtccctgcttaccgcgttgacgacatggctatgcggatcatggcagccctcttcaaggtgaccaagaccatcgacctggaaccgattaacttctccttctggaccgacgatacttatggtccgatccactgggccgccaaggaaggctaccaggagattaattctcatgttgatgtccgtgccccccaccacggaaacctcatccgggagattgccgccaagggtactgtactgctgaagaacaccggctctctacccctgaacaagccgaagttcctggccgtcatcggagaggatgccggcccgagtcccgacgggcctaacggctgcagcgaccgcggctgtaacaagggcacgctcgccatgggctgggggtccggctcagccaactatccgtacctcgtcacccccgatgccgctcttcaggcccaggcgatccaggatggcacgagatacgagagcgtcctgtccaactatgctgaggaaaggacaaaggctctggtctcgcaagcccatgctaccgccatcgtcttcgtcaatgccgactcgggcgagggctacatctctgtggacggtaatgagggcgaccggaagaacctgactctctggaacaacggtgatactctggtcaagaacgtctcgagctggtgtaacaacaccattgtcgtcatccactcggtcggccctgtcctcctgaccgagtggtacgacaaccccaacatcacggccattctctgggctggtcttccgggccaggagtcgggcaacgccatcaccgatgtgctttacggcaaagtcaaccccgccggccgctcaccattcacctggggcaagacccgggaaagctacggcgccgatgtcctttacgagccgaataacggcaacggtgcgccccagcaggacttcaccgagggcgtcttcatcgactaccgctacttcgacaaggttgacgatgactctgtcatctacgagttcggtcacggcctgagctataccacgttcgaatacagcaacattcgcgtcgaaaagtctaacgccggggagtacaagccgacgacgggcaccacagccaaggctcccacttttggcaacttctccaccgacctcgaggattacctcttccccaaggacgagttcccgtacatctaccagtatatctacccgtacctcaacacgaccgatcccaaggaggcttcggccgatccctactacggtcagacagccgaggagttcctcccgccgcacgctaccgatgacgacccgcaacctctcctccggtcctcgggcggcaactcccccggcggcaaccgccagctgtacgacatcctctacacgatcacggtcgacatcaccaacacgggctccgtcgtgggcgaggaggtgccgcagctgtacgtctcgctgggcggcccggacgaccccaaggtgcagctgcgcgactttgaccggatccggatcgagcccggcgagacgcgccagttcaccggccgcctcacgcgcagggacctgagcaactgggacgtcgtgctgcaggactgggtcatcagcgagtaccccaagacggcgtatgtcgggaggagcagcaggaagttggatctcaagattgagcttccttga

SEQ ID NO: 881 - DNA, 1147 bp, Myriococcum thermophilum
atgcgattcgccattccagtcctcaccgtcgctctcttgcggattcgacgagcctttgcggactccggaggaaggctctgtaacgatgggacctacgatagttataacaacggattaacttgcaagatcccgatacacacccagatgtcgtggaagataccgcagctaacatgttgatagatgtcccaaatgcatggaacgcagatggtaaagggttttcgtgcattgcggttagttttcgccaccccccttcccatcccgcgctcagcgggctggctaacatcaccagatccgagactcgccgccgtcctttgatgcgacttggaagtggtcttcggaccccgagtctgtccactcatacccccacgtcaagttttcagatcccgctctccccgtgcccttgtccaacctctccgccctgaccctctcagctcagtgggccatggggccggggtcgaagccacgacctgtaccgagtctcgacttgcctggtttggcatatctgaacgtgtcagcgaatgtagcttttgatattttcgccgatcgcaacccggacaacgcccagcaggagaccgaagctgagacagagatcatgatctggctcgccaagattggcaagtcccagccgttgggatatcgcgagaccgagtctgatcatcgtacgacgcttagagttggccacgtcgacttgtaagtcgggattgtgcaattccgggcgcaggttgcgggaacttggtgacccttactgacggtgtatgacagcgatctgtatcggggcaggaaccaaagagggacatcggttttcacatgggtggcccgatcgcgggagacgagcttttcagctgacatatcgcttctccttcaatatctctggcgtaacggcttcatgtctcctggatcgcatgtgggcttggtttcgttcggaaccgaggggaatcatgccgacgggaatgtcactttctcatccttgaggtacgatctccatatgctgatcggtcccgctccaactctcgatgtctcgccgattccgacggcttgttctccttctgcctccccgtcatcagctgcgggacatcccgagatgccatggttgttcggcatgatatcgatcagtggcgtttttggcactgtgctagccctcctctga

SEQ ID NO: 882 - DNA, 975 bp, Myriococcum thermophilum
atgccctcgccacgtctacgcgccctcctttccctcctaaccctggcggcacccgccgtcctagggcactcccacctcgcatacatcatcgttaacggcgaggtgtaccatggattcgacccgcggccggagcaagagaactcgccgttgcgtgtgggctggtcgacgggggcggtcgacgacgggttcgtcgggacggctgattactcctctcccgacatcatctgccacatcgacgggaccagcccaccggcacacgcgcccgtccgagcgggcgaccgggtgcacgtgcaatggaacggctggccgctcgggcacgtggggccggtgctgtcgtacctggccccctgcggcgggctggaagggtccgagagcgggtgctccggggtggacaagcggcagctgcggtggaccaaggtggacgactcccagccggtgatggaggtggttggggatacgggcggcggcgacggcgggctcagcggcgtgcccgggcagcgctgggccaccgacgtgctgatcgcggccaacaacagctggcaggtcgaaatcccgcgcgggttacaggacggaccgtacgtgctgcgccacgagatcgttgccctgcactacgccgcaaactccagcggtgctcagaactacccgctctgcatcaacctgtgggtcgagggtggtgacggcagcatgaaactggacgacttcgacgccactcagttctaccggcctgacgacccgggcatcctgctcaacgtgacggccggcctgagctcgtacgtcgtgccgggtccgacactggccgcgggagcgacaccggtgccgtacgcacagcagaacagcagctcaccgaaaatggatggaactcccgtcatcgtcaccaggagcacagagacggtgcccctcaccgccgcgcccacgccaacagagacggaccaagctaaagggaggattcaatacgggaggaactttcacgggtag

SEQ ID NO: 883 - DNA, 1144 bp, Myriococcum thermophilum
atgaagcttcagcaacggagcgttctcgctgccgccctggcgttggctggggcgccgagcgccaacgccatccttcgtttctcatgctctgagctcgttaccgagcgcctcgacccgttagttgcccacgttacactatctgctcttcccccgtgtcgcacatatccagaatgacgggctaactggtgtcctttcgcctgacgacagtctcgttttccccgggtctcccgagtcccctcacctgcaccaggtggtgggtggcaacatgttcaacatcaccatggaccctaatcagcacaacatcggcgaggaggcgacgtgcacaacctgcaccttctcggaggacttctccaactactggacggcggtgctgtacttccgggcgcgcaacggcagctacatgcgggtgccccagcggcccaatgtcggttttgagggggcgcgcggcggcggcatgacggtctactacacggcttcgttccagccgggaggcggcaaggtgacggccttccagccgggcttccgcatgatcgtgggcgacccgtcgatccggacggagcaggaggcggccaagtaccggcagctgaccttcacctgcctcgagaacatgtacacgcgcgacggcgagaccaagtcgctgccgaaccggccctgcccggagggcatcatggccaacatccgcttcccgacctgctgggacggcaagaacctcgactcgcccaaccacgccgagcacgtggcctacccggccagcggcaccttcgagagcggcggcccctgcccggagagccacccagtcaagctcccgcagctcttctacgaggtcatctgggacacgcgccagttcaacgacccgagcctgtggcccgaggacggcagccagccgttcgtctggtcctacggcgacttcaccggctacggcacccacggcgactacgtcttcggctggaagggcgacgccctccagcgcgccatggacgccaactgcgacgtcttctgccccaccctccagacccagagcatctcgcagggcaaccagtgctccgtccagcccgtcgtcaacgagcagatcgacggctggctcgacagcctgcccggcaacgtccagatcaccgggccccagccgcgcactagctctgcttag

SEQ ID NO: 884 - DNA, 2334 bp, Myriococcum thermophilum
atgctcaaacgactatcgacagcagttctgctggccctcgggctagcctcctctgccctcgccgcaccggcaccggcgccgcggcaagagtcggggtggtgggtggccagcatcgaacggcaaggcgctcccgctttcaaccaggacaagtcctacaaagtgttccgcaacgtgcgggactacggcgcaaagggtgacggctcgactgacgataccgacgctatcaaccaagccatcagcgatggcaaccggtgtggtgagggctgctcttcgcagacgacaaccccggcgcttgtgtacttccctcccggcacctacgtggtcagcaagcccatcattccctactattacacccagctcgtcggcgatgccgtctctctgccgactctgaaggcctcggccgacttcacgggcatggccgtcatcgacgcggacccgtacgactcggagggcaacaactggtggacgaaccagaacaacttcttccggcaggttcgcaacttcgtcatcgacctgacggccatgccggtcgaggttggcgccggcatccactggcaggtggcgcaggcgacgagcctgcagaacatcgtgttcaacatgcgcaccgacggcggagaggccaacaggcagcagggcatcttcatggacaacggctcgggcggcttcatgtcggacctgacgttcaacggcggcaactacggcgccttcttcggcaaccagcagttcacgactcgcaacctcaccttcaacgactgcaagacggccatcttcatgaactggaactgggcttggaccttccacgacatcaagatcaacaactgcggcatcggcatcgacatggccaacggcgggccgggcgcccagacggtcgggtccatcctcgtgctcgacagccagttcaccaacacgcagatcggcatcaagacggcctacgacccggcgtcgccgcagaccaacggcacgctgatcctggacaacgtcgacatgacgggcaccgagcgggccgtcttcaacgaggccacgggcgccgagatcctgccgggcgggcagaaggtcgacttcttcgcgcagggccggggttacacgggccagtcgggcgaggcggtgcaggccccgcaggagccggtgcgcaagcccgaggcgctgctcgacccggccacgggcaaggtggtgacgcggagcaagccgcagtacgaggacgtgccggccagcagcttcgtcagcgtcaaggccaacggggccaagggcgacggccagacggacgacacggacgccatccaggccatcttcgacaaggcgacccccgaccagatcgtctacttcgaccacggcgcctacatcatcacccgcaccgtcaaggtgcccaagcagatccgcatcacgggcgaggcgctgccgctgatcctggccggtggcgactcgaccttcaaggaccaggcgaaccctcagccggtgttccaggtgggcgagccgggcgacgtgggtgaggtggagatgtcggacctcatcttcggcacggcgggcccccagccgggcgccatcatgatggagtggaacctccggggcagcaacccgggagcggcggccctgtgggacgtgcacactcgcatcggcggctacgccggcacgcagctggagagggagcagtgcgccaagaacccggacgtcgagaaccccatcaagcccgagtgcttcggcgccttcctgatgctgcgcgtgcgcgagggcggcagcgtctacctggagaacacgtggtactgggtggccgaccacgcgctggagccggaggcgaaggacggccagatcgacgtcttcaacggccgtggcgtcctgatcgagggcgagggtcccgtctggggctggggcaccgcgtcggagcactcggtcctgtacaactaccagttcaacaacgcgtccaacgtcttcctggccctgatccagaccgagactccctactaccagggcaacccggacgcgacgaagccgttcgagccgcacgccgaccttcaggacccggactttgccgccacgtgcgccgccgacgacgccggctgcaagcgggcctggggcgtgcgggccatcgggtccaaggacatcttcatctacggcgccgggctgtactccttcttcgacaactacgcccaggaatgcctccagaccgagtcgtgccagtcgcacatggtctcgatcgagtccggcagcgaggtgcacatgtacggcctcagcaccaaggccagcgtcaacatggtcaccatcgacggccagggcgccgtcctcgacagcgacaaccgcaacaacttctgcgccactctcgccttcttccactcgccatag

SEQ ID NO: 885 - DNA, 832 bp, Myriococcum thermophilum
atgaagtctgctgttgttgtaatagcaatcgccgcttcggcttgggcacacagcatcttccaggtaagttctccctaacgagaggatctaacaatatgaacatggatcaaagtcgggacctgaccagctccgaattcgtctgacctctctcccagaaagtctcggtgaacggggccgaccaaggcctcctcgtcggcctccgcgccccccaatccgactacccggtctacgatgtgaacgaccaacagctcacttgcggccttcccgggacccggtcggacaaggtgatcgatgtcaaggcgggcgaccgcatcggggcgtggtggggacacgtcatcggcggcgagcagtaccccagcgatcccgaccatccgatcgcggcttcgcacaagggacccatctcgacttacatggcccgagtggacaacgcggcaacggcgtcggacgcagggctgcagtggttcaaaatccacgaggacacgttcgaccctgccactggcctctggggcgtcgacaacatgatcgccaatagcggctggtccttcgtcaacattcccacctgcctcgcgccgggccagtgcctgcttcgccaagagctgttggccctgcattcgacctatagccgcatggcgcccagttttatcagtcgtgcgcccagctcaacgtctccggctccggcacctacctgccctccgagatggtcagcatccccggtgcctacaaccaagacgatcccggcatcctgatccagatctgggtcaacggtatacccgataatggggggaagccctacactgcccccggaccgaggcccatgatgtgtctcgcctga

SEQ ID NO: 886 - DNA, 1418 bp, Myriococcum thermophilum
atgcggttttctgcttctgttgccttggccctcagcggcctggtggctgctaagccacttcatatggacaaagtcacgaagttagtgtgctatcgacctattctgtgctttacccagggtgaactccccggcctaacgatcacccaggttcatcgagcgacagactcagacgctcaatgaggccatggtagcctcgggtcgcgagtacatcggcacgtccctcactctccgtggtgactataccgaggagcagatcatccggaccgagttcggctccatcactcccgagaatgccatgaagtgggatgccaccgagcccaaccgcggccagttcacctttagtgcggcggaccagcacgccaactgggccaggcagaacgggaagcaggtccgctgccacaccctggtctggtactcgcagctccccggctgggtatcaaacagcggctttgacaacgccaccttgatcgacgtcatggccaaccacatcaacacggtcatggggcgttacaagggcgtctgcacccactgggacgtcgtcaacgaaggtaagacactatcttaacggtgtcgcgatatgtttgttgccacaaacatacattttcgcatgcccctcctctcctcccattattaatataacacccctgaattcgcgagtggggtcagaaaaggagattgacaataatacctgaaagccctgaatgaggacggcacgtaccgtgacaacgtcttcctccgcgtcatcggcgaggcctacatccccatcgccttccggatcgcctccgaggcggaccctgatgcgaagctgtactacaacgactacaacctcgagtacctcggccccaagctggagggcgccgcccgcatcgtcaagctggtccagcagtacggcgtccgcatcgacggcgtcggctaccagggccacctggtgaccgagtcgacgccgacccaggggacgcccacgccgtccgaggaggacctcaccgccgccctccgcaccaccgccgacctgggcgtcgacgtcgcctacaccgagatcgacatccgcatgaacaccccggccaccgagcagaagctgcaggacctcgccgacgcctacaaccgcgtcgcccgttcctgcctcaacgtcgagcgctgcgtcggtatcactatctgggtaagtctgcgcccgcccccctgtggaaattaacagcattcggctagtgaggaagtaaaagtgactgttgctgacttttgtttctccttcctcttcccttttcctcttatagggtgtctccgataggtactcgtgggtccccggcaccttcccgggtgagggcgaggccctgctctgggacagcaacttccagaagaaggccgcctacgacgccttcctggagggcatctcctcccctccctccaactctaccaagttctga

SEQ ID NO: 887 - DNA, 1336 bp, Myriococcum thermophilum
atgcaaccgaagggttggattgctgccctcgcggcggcccaagttgctaagggccaggagttgatgcggttcggctgctcgcagctgaccatcgaccgcatcgaccctctggtcaacccgggcagcatcccgtctcctcacatgcaccagatcgtcggcggtaactcgctcaacgcttccatgccaccggtcgagtacgaccctccgacgcagtcgacttgcaccagctgcacttactctgaggacttctccaactactggacggccaacgtctacttcaaggcccgcaacgggtcctacaagcgcgtcccgcagtttgcgaaccttggcctgaacgtcgacggtggtgtgaccgtctactagtaagtcatggttttcctgacgatgggagttagtttttttttttttctttttgtccagatcgatgatctaactcgtcactagcatccgtggctaccagcccagtgctaccgtcacggccttcaagccggtacgtatctcccattcgccccaaataccatatctttatcatgggggagaagaggggggaaagaagaggagggttacgctctgaggtattctgtctgtatcagtaatatgtctaacaaaaagggcaactatacagggattccgtatgctcgttggcgaccccaacaaccgtgatgagagcaaggtgccgccgggtctctgcttccggtgcgaggagaacatgcagcagaacccgttcggtggaccgccctgcacgggcgccgacaccaaggccttccccagccggacgtgcggcggcggctggcgcgtgacggtgacgttcccgacctgctgggacgggcagaacgtcgacacccctgaccacaagagccacgtcacgtacccggccagcggcacgttcgagagcggcggcccctgcccggccagccacccggtcaagatcccgcaggtcatgtacgaggtcatgtacgacacgagagagttcaacaaccaggccgagtggcccgaggacggcagctcgcccttctactggagccacggcgacaacacgggctacggcatccacggcgactacgtcttcggctggaagggcgacgccctgcagagggccatggacaacaagtgcgccggcgaccggtgcgctccgcttcagaggcagtccgatgccgaggccattgcctgcaccaaggaacagagcgccaaggaggatatcggcgacaactgtgagtgaacattctcattcccggctttccattttttttttggtcatgtctgctctctctggagacaaatgctgacgtgtctcgcttctctagggcttcctcacatccctggccaagagttgtaa

SEQ ID NO: 888 - DNA, 1045 bp, Myriococcum thermophilum
atgaagttcctcagccagctctcggcggcactcgccctcgccggcagcaagctggctgccgcgcacccggtcttcgacgagctgatgcggccaacggcgccgctgttgcagccgcgggcgtctctgcagcaggtgtacaactttggcgataacccgtccaacacgaagatgttcatctatgtgcctgacaatctggccgagaacccgcccatcatcgtggccatccactactgcaccggcaccgcccaggcctacttcacgggctccccctatgcccgcctcgccgaccagaagggcttcatcgtcatctacccggagtccccctacagcggcacctgctgggacgtctcgtcgcgcgaagctcttacccacaacggtggcggcgacagcaactcgatcgccaacatggtcacctacaccatcgagcagtacggcgccgatcccagcaaggtcttcgtcaccggttcttcctctggtgccatgatgacggtacttccaacctcccctcctcccctttccttttttctttcccttctttttttttctttctccctacatcgtagagccagtttgctaacttgatgaaatcaagaacgtcatggctgccgcgtacccggaaatgttcgcggcaggcatcgtctactcgggcgtgccggccggctgcttctacagccagacgggagcggtcaacgcgtggaacagcacgtgcgccaacgggcagatcaactcgacgcccgaggtgtgggccaagatggtgttcgacatgtacccggggtacgagggcccgcgccccaagatgcagatctaccacggctcggtcgacttcaccctctcggccaacaactacaacgagaccatcaagcagtggaccggcgtcttcggctacgactacaaccgccccgactccacccaggccaacaccccacaggccggctacaccacttacacctggggcgacggccagctcgtcggcgtctacgctcagggcgtcgggcatagtgtccccatccgcggtgacgacgatatgaccttcttcgggctgtga

SEQ ID NO: 889 - DNA, 1399 bp, Myriococcum thermophilum
  misc_feature (437)..(837): n is a, c, g, or t
  misc_feature (916)..(916): n is a, c, g, or t
atggtctccttcaaggccctcgttctcggtgccgtcggcgccctctccttccccttcaacgtcaccgagctgcgcgaggcgcacgctcgcggtgagaacgtgaccgagctgttgatggctcgcgacggcactccgagccagaccggctaccacggaggctactactactccttctggaccgacaacggcggctacgtcaactactggaacggtgacaatggcagatacggcgtcgagtggcagaactgcggcaacttcgtcggcggcaagggatggtaagtattattacctacctaccaaattattaacgtttcatgacctactccccccctccaccttcccaaccatccatcaccatggcccaagagagagagagagagagagagagagagagagagagagagagagagagagagagagagagagagagagaagannnnnnnnnnnnnnnnnnnnnnnnnnnnnnnnnnnnnnnnnnnnnnnnnnnnnnnnnnnnnnnnnnnnnnnnnnnnnnnnnnnnnnnnnnnnnnnnnnnnnnnnnnnnnnnnnnnnnnnnnnnnnnnnnnnnnnnnnnnnnnnnnnnnnnnnnnnnnnnnnnnnnnnnnnnnnnnnnnnnnnnnnnnnnnnnnnnnnnnnnnnnnnnnnnnnnnnnnnnnnnnnnnnnnnnnnnnnnnnnnnnnnnnnnnnnnnnnnnnnnnnnnnnnnnnnnnnnnnnnnnnnnnnnnnnnnnnnnnnnnnnnnnnnnnnnnnnnnnnnnnnnnnnnnnnnnnnnnnnnnnnnnnnnnnnnnnnnnnnnnnnnnnnnnnnnnnnnnnnnnnnnnnnnnnnnnnnnnnnnngagagagagagagagagagagagagagagagagagagagagagagagagagagagagagagagagagagagagagaganaagagagagaagagagagaaaagagacatcatagaacaacgtgactgatgcaatgaaaacaaaaggaaccccggcgcggcgcggaccatcaacttcagcggctcgttcaacccgttgggcaacggctacctggccatttacggctggacgcagaacccgctgatcgagtactacatcgttgagtcgttcggcacgtacgacccgtcgtcgcaggcccaggtgctcggcagcttctaccaggacggcagcaactacaagatcgccaagacgactcgctacaacgccccgtccatcgagggcaccagcaccttcgaccagttctggtccgtccgcgagaaccaccgcaccagcggcagcgtcgacgtcggcgcccacttcgcccagtggcagcaggccggtctccagctcggcaaccacaactaccagatcgtggccaccgagggttaccagagcagtggctcctctgacatcaccgtctggtaa

SEQ ID NO: 890 - DNA, 1501 bp, Myriococcum thermophilum
atggtgactccctctctgaagaaggcggctctggctgccttgtccctccttccactcatgtcctccgcatcaccagtgccggtattcaatgaaactagcgtggaggcccgacaggcatcgggatacaagaacattgtgtacttcaccaactggtacgtttacaatgtcgtccgctctccccattcactctcactctactactgttttataactagacaaatcaatctgcaagacctcacttacttactggcatatcaaacaggggtatctatggccgcaactaccagccggaccagctgcccgcgtctcagctcacccatgtgctctatgcgttcgccaatctcaggtctgacggcgaggtcttcctttccgacacctatgcggacctagagaagcactatcctggcgactgtaagtttgttttccctttctcgacacaaaaaccacccgtcctctcatcacctccttttttttctcttcatcattcctcttcttttccactaacagaaccaaccctgcagcatgggatgagaccgggaccaatgtctacggctgtgttaagcagctcttcctgctcaagaaggcgaaccgccaactcaagaccctcctgtccatcggcggctggacctactcatccaccttccccgcggcggctagcacagaagccggccgggccctcttcgcgtcctcggcggtccggctcttggctgacctgggcttcgacggcctcgacgtcgactgggagtacccggccaacgaggaggaggcggccaacttcgtcgccctcttgaaggcggtccgctcggctctggacgagtatgccgcccagcacgcgcccggctaccacttcctcctcaccatcgcctcgcccgccggcccgaccaactacgcccacctgccgctgggcgagatcgccggcgtgatcgacttcttcaacttcatgggctacgactacgccggctcctggagcaccgcggccggacaccaggccaacctgtacccgacctcggaccagaacaagacgcccttctcgaccgacaaggccctgtccgactacgtcgccgccggcgtcgacccgtccaagatcgtgctcggcatgcccatctacggccgctcgttccagaacacggacgggctgggccagccctacagcggcgtcggcgagggcagctgggagaacggcgtgtgggactacaaggtgctgcccaagtccggcgccaccgtcgagttcgacgaggaggccggcgccacctacagctacgacccggccacgcgcgagctcatcagcttcgacacggtcgacatggtcaagaagaaggtcgactacgtcaaggagaagggcttcatcggcagcatgttctgggaggcctcggccgaccgcaccggcgacgagagcctcatcggcgccagcttcaacgccctcggcggcatcgaccagtccgagaacctgctgtccttcccggacagcaagtatgacaacctcaaggccggcttcgagtaa

SEQ ID NO: 891 - DNA, 1758 bp, Myriococcum thermophilum
atgcgcatctcatcgaccactctcacggcggcgctcgccggcgttgcctcggcgtctctccaggtcgtccccggaggcacatggacaacagtgagttttgcccgcccatctttaggaaatgagatgaggtgtggccctgggaatcgctaatacgccttctcgtgtttttttttttctcctgggagcagccggacggcgagcacctgcaggcccatggcgcgggtttcatcgagatcaacgggacatactacatgattggcgaggacaagagcggcggccattccttctctaacgtcaactgctactcgtcgaccgatcttgtccagtggacctacgtcggcgccctcctctctcgaaccgactccggtgatctgggaccgaaccgcgtggtagagcggcccaaggtcatctataacgacaagactggcaagtacgtgctctggatgcacatggacagcagcgactatggcgaggcgagggttgccgtcgcaacgggcgacgaagtatgcggcaaatacgaatacatcgggagcttccgaccgtaagtgaaccgtcccgttgcgagtctcaacttcgacctcctagctttgcccgatatcacgattaattattaacgcaagaacactgtagactcgggaggcagagccgggatatggggcttttcaaggatgacgacggcaaggcctacttgttgactgaagacgtgcgtgtcacccagagcaaggctctcaccaggaagtttgcaaagcataggactaaaataagcacgccagcgagaatacggcctccgcattgtcgcgctttcggatgattatttgacccccaccaccgacgtctactcatggagactcgaaggagggaaccgggtcgaggcgccagccatggtcaagctaggcgatacttacttcttgttcgcgtccatgatgaccggatgggaccccaacgacaaccagtacacaacgtccaagagcctcagctccggttggtctgagtggcgaaagtttgccgatcagggaacgaatgtcagttattaatctcgcggcctcttatgccattttcatacgtttttcttcttctcctcctcctcctcctcctcctcctccccttttttgtttccctttttggggtcggagactgacgtactatggacacgatttaaataaatagacgtacaactcacaaacgacgtacatcctcaaaacgagcgagagcagcgctatttacatgggtgataggtgggtcaaggacaaccttatggcgagcacatacgtgtggctgcccctggacatcagcggcaccagcgtcaccatgaagaactttgtcagctgggtgccgacgtccaacttcgcctcgtggcagaacccgccggccgagacgagctacgaagctgaggcggccacgtacggcggccaggcgcgcaacatcgactgctcacagtgctcgggcggggtggcggccggctacatcggcggcccggacggcggcagcgtcaccttctcgggcatccgcagcgacatcgacggcctgaccaccatccgcatcaagttccgcaacggcgacagcagcccgcgctacgccaacgtccgcgtcaacggcgacgccggcaggaagcttgccttcctcaccgcccgcggcgatcccgcctccagcaccttgcacgccgagctcaagaagggatcagacaacaccatcgttatcgagggcatcgacggcggctggggccccgatatcgaccgcctgatggtgccggtgcagtga

SEQ ID NO: 892 - DNA, 1980 bp, Myriococcum thermophilum
atgcggtgttctgtgcccgccgccctgctgggcctgttcatcacctcggtgcatgccgctccggcggtcatacttgaagaaacaaaggggataccgcccggatgggtgtatctgggaaatgctagcgcctcggaccggatgacgctgttcgtggccctgaaggagccaggtattgaggaattgaaggcccagcttcaccagcgccgagatgtggaccatccgtcgttcggccaacatttcagccgagacgaggtggcccaataccgccagccccgcgagcagtcgagcggtacggtcctcgactggctgagatccgaaggcattcgcaacatccatgaccagggcagcctcatcagcttcgaggcatcggccgaaatggtcaggaccttgtttcacgccgagctgggatactacgcatacgaggagggcgatgttgatactgacccggcgccggtgctacgagctaagtcctatgcaatcccggcgtcactgcgcgattacatcgattttgtccaccccatcaccaatttcatgcccccgcgccgacgctttggcaaccgcggtcctccccacggtcctccctggggtcctcgtccgcgtccgtacccgaaaccaaccaagaggccttcttcgacgagaacgacgaggaccccgatcacgaccaccaccatcaccgccaccagttggaccatctcataccccatccccagcggcagcacgctgccacccaagcctcagcccacgtccgacacacctgagaccatcaacccatttcctaacctgccctgtctggcagcgacggtgccggactgcatcaagaagctgtacaacatcagctacacgccgtcgtcgcccgagacgccgagcccggtacggttcggcgtagccggcttcctggagcagtggattctctactcggacgtggaccagttcctggacacactggcgccgaatctgccgaaaaactacaacttcacggtcgagctgatcaacaacggcaccaacccgcaggactcgccgcgcaacgcgggcatcgaggcctcgctcgacgtcgagtacgccatggcgctcggatacccgaccaacgtagtttactacagcacgggagggcggggtaccatgctggacccgagcacggggctggccctgcccgtgttgcagagcgacaacgagcccttcctcgagctcttgcaggccttgctggccaagccggacgaggagctgccgcacgtgctgagcatcagctacgccgacgacgagtcgggcgtgccccgggcgtacgcccgacgcgtgtgcgaccagttcgccgccctggccgcccggggaaccacggtgctggtggccacgggcgacggcggcgcggcggggaccggccggaccaagtgcgttgaccgcaacacgggcgcccgccggttcgtcgccaccttcccggccgactgcccgtacgtgacggccgtcggggccgtcagcaacgtggcgccccccatcgccggcgccgcctacagcgccggggggttcagcgacttcttcgcccggcccgagtggcaggacggcgtggtcgagccgtacctggccgcgctggtccgcggcaacgacacgcgcatcggcctcttcaaccacgccggccgcgccatgcccgacatcagcgccgtcggctccgccttccagatcgtcatgggcggcgagaacagccaggtgctgggcacgagcgcgagcacccccgtcgtggccgccatggtcgccctgatcaacgacgcccggatgcgggccggcaagccgagcctcgggtggctgaacccgctgctctactcggaaaaggtcaagagggtgctccgggacatcacggtgggcgagagcatggggtgcaggttccccgacggtgtcaggtcggtcggatggtctgccgtcggcggttacgatctggtgactgggcttggtgtggtggatgacttttacgactttatgcaggctttgatgtga

SEQ ID NO: 893 - DNA, 2445 bp, Myriococcum thermophilum
  misc_feature (1813)..(2109): n is a, c, g, or t
atgatccttcaggcatctgcgctgctggcggcggcagccctcgtgcgggcttccccaaccaaggtccgccgcgatgctccggtaggagccgccgcgtgggaagctgctcactcctcggcagctgccgccttgggaaggctgtcccagcaggacaaggttaacatcgtgaccggcgtcggctgggaccaggggccttgcgtgggcaacactcccgctatcaactccatcaactacccgatgctctgcctccaagacggacctctgggcgtccgcttcggttccagcatcacggcattcaccccgggcatccaggccgcgtcgacgtgggacgtggagctgatccgacaacgaggcgaatacatgggcgaggaattcagggggtgtggcatccacgtccagctcggtcccgtggccggcgccctgggcaaaattccgcacggcggccgcaactgggagggcttcggcgtggacccttacctcgcgggcattgccatggccgagaccatcgaggggatccagtcggcgggcgtgcaagccacggccaagcattacattgtcaacgagcaggagctcaaccgcgagaccatgagcagcaacgtcgacgaccgcaccatgcacgagctgtacgtctggccgttcgccgacgctgtgcactctaatgtggctgccgtcatgtgcagctacaacaagatcaacggcacgtgggcttgcgagaacgagtgggtcttgaacaccatcctgaaggaggagcttggcttcccgggatacgtcatgaccgactggaacgcgcagcactcgaccgaggattcggctaacaacggcctggacatgacaatgcctggcaccgacttcaacggagggaatatcctctggggcccgcagcttgacagcgccgtcaacagcggccgggtacccagggaacgcctcgacgacatggttgagcgcatcctcgcggcatggtatctcctcggccaggacagcaactacccttctatcaacatcggcgccaacgttcagggcaaccacaaggagaacgtgcgggcggtcgcgcgcgacggtatcgtgcttctcaagaacgacgacggcatcctcccgctcaagcaaccgtccaagctcgccctcgtcggttcggccgccgtcaccaacccgcagggaatcaacgcttgccaggaccaaggctgcaacaacggcgccctgggcatgggttggggctccggagcggtcaactacccgtacctcgtctccccgtacgacgccctcaaggagcgcgccggccaggacgggacgacgctcagcctgcacgacagggacgacacgaacggagtgcagagcgtggtcgcggacgcggacgcagccatcgtggtcatcacggccgactcgggcgagggctacatcacggtcgaggacgtcgccggtgaccggccgaacctggacccatggcacaatggcaacgagctggtgagggcggtggcggcatccaacccgaacaccatcgtcgtcgtgcacagcgtcggccccatcatcctcgaggatatcctgtccaacgaaggtgtcaaggctatcgtctgggccggcctgccgagccaggagaacggcaatgcgctggtggacatcctctacggcctggtctccccgtcgggcaagctcgtctacaccatcgccaagcgggaagaggattacggcaccagggtcgtgtccggagatgactcgttctcggaaggtctgtttatcgactacaggcactttgaccaagaggacatcgagccgcgctacgagtttggcttcggcctgtgtaagtccctctccccccccnnnnnnnnnnnnnnnnnnnnnnnnnnnnnnnnnnnnnnnnnnnnnnnnnnnnnnnnnnnnnnnnnnnnnnnnnnnnnnnnnnnnnnnnnnnnnnnnnnnnnnnnnnnnnnnnnnnnnnnnnnnnnnnnnnnnnnnnnnnnnnnnnnnnnnnnnnnnnnnnnnnnnnnnnnnnnnnnnnnnnnnnnnnnnnnnnnnnnnnnnnnnnnnnnnnnnnnnnnnnnnnnnnnnnnnnnnnnnnnnnnnnnnnnnnnnnnnnnnnnnnnnnnnnnnnnnnnnnnnnnnnnnnnnnnnnnnnnnaccatccccggcggtgcctccgacctctgggaggaggtggcgacggtctcggcgaccatcaccaacagtggcgaggtggagggcgccgaggtggcgcagctgtacctgacgctgccgtcgtcggccccgcgcaccccgcccaagcagctccgcggcttcaccaagctcaagctggagcccggcgccagcggaaccgccaccttcagcctccgcaggcgcgacctcagctactgggactcgggctcctcccagtgggtcgtgcccgagggcgagttcggcgtctcggtcggcgccagctcccgtgatatccggctgacgggaactttccaagtataa

SEQ ID NO: 894 - DNA, 2357 bp, Myriococcum thermophilum
atgcatgaccctatggccttcgtttcctccttagcctttgccgccctcggggcactcatcgtccctgcgaggggcggagtaacttacccggactgcgccaacggaccgctcagatcaaacacggtatgcgatacgtcggcgtccccggcagctcgagcggctgctctcgtggaggcgatgaacacgaacgagaagctcgcaaatctgatcaagtaataattaatattatgtcttccgtgtactttcttggagttctcaggctgacgatgaataagcaactctccgggtgtctcgcgactcggcctgagtgcgtaccaatggtggaacgaagccctccacggagtagctcataaccggggcattacctggggtggcgagttcagcgcggctacccagttcccgcaggctatcacgacttccgccacgttcgatgacgctttgatcgagctgatgggcaccattatcagcaccgaggcccgtgcttttgctaacaatgggcgtgctcatcttgacttctggacgccaaatgtcaacccgtttcgagacccgcggtggggacgtggacacgagacgccgggagaggatgctttcaggaacaagaagtgggctgaggccttcatcaagggcatgcaagggcccggaccgacacaccgagtcatcgccacgtgcaagcactacgcagcttacgacctcgagaactccgggagcacgacgcgattcaacttcgatgcgaaggtgtcaactcaggatctcgccgagtactatctccctccgttccaacaatgcgcccgggactctaaggtgggctccatcatgtgcagctacaatgcggtcaacggcgtccccgcctgcgcgaattcttacttgatggacaccatcctgcggaagcattggaactggaccgaccagaatcaatatattgtgagcgactgcgatgctgtgtactatctcggtaacgcaaacggcggtcaccgataccagccgagctacgcggcagcgatcggagcttccctcaaggccggttgcgacaacatgtgctgggcgaccggcggcactgccccggatcccacgtcggcttttattccggtcagttcgacgaaacgacgctggacactgctatgttgcgccagatgcagggcctcgtcctggcagggtactttgacggtccggacggcatgtaccgcaacctgagcgcgtcggacttgaacacgcaagccgcccaagatgctgcgctcaaggccgccgaagaaggcatcgtgctcctcaagaacgacggaatccttccgctctcggtcaatggttccaattcccagctcgctatgatcggcttctgggcgaacgcagccgacaagatgcttggaggttacagcgggaccccaccgttcaaccatgatcccgtgacggctgcaagatcgatgggcatctcggtcaactatgttaacggacccttgacgcaaccttacggggatacgtcggcagcagtgaatgccgcccaaaggtctgatgcggtgatattctttggcggaatcgacaataccgtggagaaggagagtcaggacaggacatccatcgagtggccatctggacaactggccatgattcgggcgctcgctgaaactgggaaaccaattattgtcgtgaggctcgggacacacgtcgatgacacccctctcctcagcattccgaatgtgagggccatcttgtgggcaggataccctggccaggatggcggtacagctgtcatgaacatcattaccggcctcgccagtccggcggggaggctgtcggccaccgtgtatccggcttcgtacaccaaccaggcaccctatacaaacatggccctacggccgtcttcctcctatcccggccgaacataccgctggtacaaggacgccgtatttcccttcggccacggcctgcattacaccaatttcagcgtctctgtgcaggatttcccggaaagcttcgagattgccgacctcttggattcctgcggggactctgtgccgtatcttgacctttgcccgttcccgtccgtgccgctcaacgtgacgaacactggctctcgtgcgtccgattacgttgcgcttggcttcttatcgggagaatttggtccaagtccatatcccatcaagacactggcaacgtataagcgcctgtttaatatcgagcctgggcaatcgcaggaggtcgagctcgagtggaagctggagagcctagcccgagtggacgagaatggtaacagggtgctctacccgggaacttatacgcttttggtggatcagccaaccttggcaaatatcacctttaccttaacaggtgaagaagcagtattggatagctggccgcagccatga

SEQ ID NO: 895 - DNA, 856 bp, Myriococcum thermophilum
atgaaggttgttgctgttgctgtccccgtcctggccggcattgccggagccaaccccatcgacgttgaggcccgccagtcgtgccccgaggtccacgtcttcggcgcccgggaaaccacaggttcgtttatctagggttagggttattagagggctttggctaacgtcgacaccagcgccccctggctatggcacctctcaaggcctcgtcaacatggttgttcaggcgtaccccggagcaacaagcgaggccatcgactaccccgcttgtggcggtcagccgcagtgtggcggaatcgacgtgggtaatccccgaacctcacctagatggaatcaaccttgactaactcggcatcttcagtacgattcttccgcgaatcagggcactcaggcggttgtttccgctgtgactagctttaaccagcgttgccctgacactaagatcgtcctgattggctattcgcagggtggccaaatcatggacaacgcctactgcggcggcgccggcgccaccctcagcggaagcgccctcgacgccgttaaagctgctatcttcttgggagatccgcacttctcccaaggccagagcataaacgttggaacgtgccaggctcaaggcgtaagtttctctgtcgagatgtcttcgaggtgtgcagcctactgactgtactagttcgctgcccgccctccgggatatcaatgcacgcccggcaatccagacaacgccaagtcctactgcgacgctcaagatccctactgctgcaacggaaacgacgcaaaccaccaccagcagtatgtcaacatctacggccaagaggcgctcgcgttcatccagtcgaagctcaacgctgcttag

SEQ ID NO: 896 - DNA, 1373 bp, Myriococcum thermophilum
atgcagtggaaagcgcttgctctcacgctccttgttggccgcggcttgggccagtccgtgtctcccacgcagccatggttcccgaacccgaccgatataccggcgatgctccgattccaatgttcacagctcgtcatcgaccgccttgaccctctcggcagcccggggttgatcccatcaccccatcttcaccaaatcgtcggcggtaattccttcaatgcgaccatggaccccgagacccacgacctcgtggccggctcgacatgcaccacctgcaccttctcggaggacttctccaactactggaccgccgtcatgtacttccgagcccgcaacggcagctacaagcgcgttcctcaacgtccgaacatgggtttgtctggaaacggtggtgtcacagtctactacatcccgccgcacgacaagagtgttggcgttactgcatttaagccgggattccggatgttggttggagatgctgcaagccacgagcctggccaggatcccaaggtgtggtaagtagcgataaccctaacccttactccgtatctcgaagctggactgctctgtctccacagccctctttgagcctcgccgctgacgatgttgattttcaagccatcgctgtatgccgaaggaaggcgagctccctcacctgaattgtgctccgccggactcgcaggagttccccaaggaaccctgtgagggcggcatccgttcggtcattactttccctacttgctgggatggtgtgaatctggatactccggatcacaagagtcacgtggcctatccggtctctggaaacaccgacatgaccccggatgctggaacctgccccgacactcatccagtcaagatcccgcaggttatgctggagacgatttgggatgtaaggacacccagttcattgtaaactccccaagttcgtatctgattgctgacttaattgcttgaattattaatagacaactccgttcaacgacaaggagttgtggcctgaagacggctcgcagccgttcgtctggagcactaatgacaagtaagattcctatcgtcactacggaaatgcctattactttgcggtttgtctaacctttggttgcagggatggctatacccagcatggcgattacgtgtttggctggaaagacgattctctccagcgggcgatggatgcgcgctgcacgggagacgtttgtgacgtactggagcgacagagtgtcgaagagtctgtcaagtgcacaatcgagcaaactgtgaaagacgacgttgatggctgtaagttgtccctagagcctaaaagttgttttccatgtattaaccattccacaggggtcgctagcattccgggtcagaagcccttggcctga

SEQ ID NO: 897 - DNA, 992 bp, Myriococcum thermophilum
atgaagggattcctcggtgctgctgccctcgcgctggccgttggcgaagcctcggctcactacatctttcagcagctgacgacgggcggcaccaagcatgatgtgtaccagtacatccgcaagaacaccaactacaactcgcccgtgaccgatctgtcgtccaacgacctccgctgcaatgtgggtgccacgggcgccggcactgacaccgtcgaggttcgcgctggcgattcgttcaccttcaccaccgatacccctgtgtatcaccagggcccaacctcgatgtgagtttgctccggagtcccccaagcctggcctccctgagaagacaaaacaaccactgacgaaagcatccagctacatgtccaaggcccccggcagcgcgtccgactacgacggaagcggcccttggttcaagatcaaggactggggtatgcccagaacccctgctctttatccacgcggctcgcgacacatcacgactaacagccttgccaaataggtgccgacttcagcagcggccaggcaacctggaccctgacgtgtatgtacaccttgcccatctcgaccatccctcttttcagttccccctttaccttgaagcgcgaaactgaccaagcggaatcttttctctccagctgactacactgctacaattccttcgtgcatccctccaggagactacctgctccgcatccagcagctcggcatccacaacccttggccggcgggtatcccccagttctacatctcctgcgcccagatcaccgtcaccggcggcggcaacgtcaaccccagcccgaccgtctctattccgggcgctttcaaggagaccgacccgggctacaccgtcaacgtgagtctccatcctaactcccaaaatcgttcaagccagtgtcttcttccaagctaaccgccaaatcacaaaaatttagatctacgataacttccacaactacaccgttcctggccccgaggtcttcacctgctag

SEQ ID NO: 898 - DNA, 2779 bp, Myriococcum thermophilum
atgtatctctcgcgacttgctctggcgtcgctcggcctgcttctggcgggtgccgaggcggctgaaccatatcgtcttcgcactccgcccctcgacacgcagtggaccaaggaagtgggcacgaacccttggcctcaacaccctcgccccttgctccgccgcgatgagtggaagaatctcaacggcatctggacataccaacctaccgaaggcgagcccgacgccggctcccttccggagctgcctttggagaaggaagtcctcattccgtcgtgcatcgagagtggcatctcgggcattatggacatgagctttcaagtcacccggatgttctttggcaccaccttcagcgtaccctcggactggaccaaatccggccgccgcgtcttgctcaactttgaatcggtcgattacgaggccactgtctacgtcaatggcgccaaggttggctttaaccgcggcggttatgctcgcttcacctttgatattacggatcacattgctgaagatggtgacaatgagctgtaagtacctattatgcaacaaaccaaagaggccaatgaaccgtagaagatgtcggaaaatgaaaaagagaacaactgcttctttcctgcttagaagccatgaaagcgagctaacaacatgagcctagccacgtctttgtctttgatccgacggatgaccagagcatccctcagggcaagcagaccaagcggccgtcacacatcttctacacaccctgcacgggcatttggggaaccgtgtggctcgagagcgtcccggagaactacatctcggggctcgaccttgccggtgacatgcacggcgagctgaccgtcaccgtccacagcggagccaaggaagagacccccgtcgaaatctcggtcgtggatccgcagggcgacgtggtggccacgcacaagagtgtctcggaccgccagttcgccttccgagtgcccaatcccaagctctggtcgcccgacgagcccaccctgtacaacgtcaccgtcaagttgggcgaagacgaggtctcgagctacacgggcttccggaccatctcctccggtgtcgtcaagggggtcaagcgtaccctgcttaacggcgagttcgttttcctattcggccctcttgatcagggttattggcccgacggcatctacaccccgccgacactggaagcaatggtttacgacttgagagtaattaagagcctcgggatgaacatgcgtaagtcacttatccttccttggtccatcctctcacacgccaacatgaaataaaaaggatagagaaaaagatgctaaccttattattcaaaccaagtccgaaagcacatcaagatcgagccagacctgttctatgaggcatgcgatcgtcttggcatcatggttttccaggacatgccctcgatgtgagtagccaactctcttgcattagaaaaaagaaaaaaagaaaaagaaatctgtgaagcggggttgaattctggctcagcgaggggggcctgatgatcaacccgtccaaccgtcagtgtgtttgcgtgtgagcgggtgtgactgacgtcggcttctgcaggagggttttcaccaatgcgccacccacggacgaagaccaaagggagttcgagcgtcagctggagatcatggttaacgagcacaagagccacccgtccatcatcacctgggtcatctacaacgagggctggggccagagaaccgactacttccccgagttcgagctgaccgaccgcgtccgcgagctggacccgaccaggctcatcgacgcaacctcgggctggatagatcacggcgcggtacgcttaacttacaagaagctggcttccttggcatatcttttcccctttgattggatctggactaacactgccatgcttttgtgatttgctatttgacagggcgacttctcggtacgttaatccctgcctattagacctagttttgcctccccatccacctgcccacctgataccttactacctacccgacgcacgtattatgcacagtactagttgttgctttaagtaatgtatggtgttgctgtgcatgttgggctgaccttgacatccccaacaggacaatcataaatatgccgagccgcagtgtggcacgccatggcactcccagccgtcggcacccttcgaccccaaccgaatcggtctccagggagagtttggtggcatcggtcatcgaccagccgacgagaagtatgtcgtctaccccctggtctcccccgtctctctccattccctgcctcccccccccctggatctcatttgtctcctttgctgtagtgaaccccttcttttctttccactctccccagtgcaagcaacggcaacgacaggattacactgcgggggagtggggagaaagtaacacagggaaaacatgagcaagggggtacatgcggtgcggggttgttggggttgggaaagatgtgcaagacagtcattactaaccaacgtcaacaacaaaaaaacagcctctggcccatcgaaggggcggtcaggaccatcaaccagacgtacgagatccacggcgggctcgagtcataccactatcgcgcccacgtgctcctcggccagctgcgcgaccaggtcgaacgctactcctgcagcggcgccatctacactcagactaccgacgtcgagggcgaggtcaacggcctcctgaccatggaccgccgcgtcattcgcatcgacgtcgaccaatggcgcgaggacatcgaagccttgtataaggccgcccgtgcgagggcctga

SEQ ID NO: 899 - DNA, 1968 bp, Myriococcum thermophilum
atgctccgtggaacgatcgcggtgggcgtggcgtgcctcgcgcaactcgtcgcgggcttcaatgggccaccattccggacttccttgacgctccgggactttagggaacaggtatgcgcagatgcacagtcaagatactgaaacccgtgcaaatatttcggttattggctgcaccatacatattatgtgtggaacacctcttcgttgacacggcacagctggaacgccgccagacgcgagatgctacttccctggaagcccggaagaccgacctggaggatctctatccggcgcacgccctccaggtccccgtggatcatttccacaatgatagcctctacgagccgcactcgtccgataccttcccactgcgctactggttcgacgccagttactacaggaagggcggccccatcattgtgctgcagagcggcgagacgagtggtgtcgaccggcttcctttcctccagaagggcatcgtggccaagctcgcccaggccactcacgggctcggcgtcattcttgagcatcgctattacggcgagagtattcccaccccggatttcagcaccgagaacctgcgcttcttgactacggaacaagctctggccgacatggcttattttgcccagcatgtcgtcttcgagggattcgagcacctggacctgacgtcggccaagaacccctatatcgcctacggcggctcctacgccggcgctttcgtggcttttttgcggaagatttatcccgatgtctactggggtgccatctcttcctcgggtgtccccgaggccatctacgactactggcagtactacgaggccgcgcgcatctatgcacctcacgattgcgtggtggccacccagaagctgacacatatcgtggacaacatcctcctcaacaatgaggctgattccgactacgtcacgcgcctcaaggctggcttcggcctcggcggcgtaacgcgcaacgacgactttgccaacgccatctcatggggtatcggcggcctgcagggcctgaactgggacccggcggagaacagcactaatttcggcgagtactgcaacaacctgactgccacggagactctctacccgacttcccccagccttgagcaagacgcccgcgagctcgtcaaggtcggtggatatagcaaggaagccgatacccttactacccaactccttaattacatgggctatgtgaacgccacgacggttcagacctgccgcaaggacacccaggacgagtgcttcaccaactacaactccaccttctaccagcaagacgacaagacgcaggattggcgcctctggtcgtatcagtactgctttgagtacgtttaatttacttcacctttctttctaggccgccaattcaccccttatcaacctgatattgctccggggtttctcgcgctcgctgactcactttcacagatggggatacttgcagaccggttcgggtgtgcccgccgaccagctgccactcatctcgcgtcttatcgacctcgacttcctctcggtcatttgtcgcgaggctttcaacatcacgactccatcacaagtcgaacgaatcaacaaatatggcggggtcaatatcagctatccgcgcctggctttcgtcgacggggagcgcgacccctggcggtacgcctcgccccaccgcatcgggctgcccgaacgcaagaataccatcagcgagcccttcattctgatcgaggacggcgtgcaccactgggatgaaaacggagttttccctaacgagactcggccgggtgtgccgcccaagccggtggccgatgcgcagcgggcggaagtcaagtttgtcaaggcgtggctgagagagtggaaggagaaggagaagtgtaggggctggaaattctggatatttttctgctggttatgaagcggctaacagattactaaccgagcagcagatccgtacgacggggatgatctctga

SEQ ID NO: 900 - DNA, 813 bp, Myriococcum thermophilum
atgctctactccctctcccgcctctgttcgtgcctccgcctcccgcacggtcgtcgtctccgccgccgacgcatggctactctactcctcctcttccttattctcctcctcttcttcctacccctatacgctatctacaaaccgccctcaccgctcgtccgctacctctcccaccgctggaccgacgtgctcttccgcatctggctgcccccgtccaagccgctggtcgccctgaccatcgatgatgcgccgtcggaccacacccgggccatcctggccgccctggccgccagcggcgcccacgccaccttcttcgtcatcggatcccaggtcgccgggcgcgaggacgtgctacgcgagatcgtccgagggggccacgagctcgccaaccacggcatgcacgacgaaccggcccgggcgctgcccgaggccgagctcgaggcccagatcacccgcgtccaggagctcatcgaggccgcctacgtcgccgagggccggcccccgcctcccgccggcaggcgccgctactaccggcccggctcgggcttcttcagcgagcgcatccgcagcgtcacgcgccgcctcggcttccgcgtcgtcctgggcagcatctacccgcacgacgcccaggtcccgtgggcctggctgaacgcccgccacatcctgagcatgctgcatccgggcggcatcatcatctgtcacgacaggaggtcctggaccgagccaatgctgaggaaggccctgcccgagctgaggaggaggggattccaggccgttacgttgaccgagctgctgagcgaggtgactggatga

SEQ ID NO: 901 - DNA, 1199 bp, Myriococcum thermophilum
atggccctcaaactcctgtgtcagtccctactcgtcctcggggcgctgggttctgtcctccctcctcgggcggatcagtgtcctgccctgccaaccaactactcgcccaggcccaacccaaagcttcccgatccgttcctgcagctcgacgggacaaggatcaccaagaaggacgaatggacatgccagagagactacctcagccagctgatccagaagtacgagctcggcgattacccggcaccgcccgagtccgtgacggccagcctgtcgggcagcacactctccatcacggtccgggacaaggagaagagcatctccttctccgtgtcgatccgggcgccgtcgtcgggaggaagcggtccgttcccggccatcatcgcgtacggcgggccgagcatcccgatcccgagcgggatcgcgaccatcatcttcaacaacgacgagatcgcgcagcagatcaacacgggcagccgcggcaagggcaagttctacgacctgtacggcagcggcgccacggccagcgcgatgctcgcctgggcgtggggggtcaccggatcgtggacgcgctcgagaagacgccggcggcgcgcatcgacacgacccggctcggcgtgacgggctgctcgcgcaacggcaagggcgcgctggtggcgggcgccttcgtcgaccgcatcgccctcaccctcccgcaggagtcgggctcgggcggggcggcctgctggcggctctcggacgagatgaagcggcgggggatcaacgtgcagacggcgagccagatcatcaccgagaacgtgtggctcagccggtcgttcgagcaattcgccaggaacaacaacgtgcccggcctgcccatcgaccaccacgagctcgccggcatggtggccccgcgcgccctgctcgtcatcgagaacacgtcccaggtctggctcggcaacatggccacctacggctgcatgaagacggcccacaagatctgggaggccctcggcgtccccgagaacatgggcttcacccagaccggcgaccacagccactgtcagtggtccagctcccagagcgccgagctcaccgccttcatcgacaagttcctcaggggaaccggaacagccaacaccaacatcatcaagaccgacaaccccaacctgggctttgtcgacagcgattgggtcgactggtatgttccgactttggtatga

SEQ ID NO: 902 - DNA, 1137 bp, Myriococcum thermophilum
atgatgctcaagcgtttcgtggctagcctcatcggcatctccgccgcggacgctgcccttacctacaaaggtgtagattggtcgtcagtgttagtggaagaacgggccggggtctcgtataagaacatcgacggtagtgctcagccgcttgaaaatatcctggctgccaacggcgtcaatacggtgcggcagcgagtctgggtcaacccctcggacggcaactacaacctcgattacaacatcgagattgcgaagagggcaaaggctgccggacttgacgtgtacatcgacttccactacagcgacacctgggccgatcctgcccaccagaccacgcctgctggatggccgagcgacattgacaacctctcctggatgctctacaattacactctggacgtcgccaacaagctccaggaagcgggtatccagccaaacatcgtctctattggtaacgagatccgggcaggttttctatggcccacgggtagaaccgaaaattggggcaacatcgcccgcttgttgcactccgccgcttggggtatcaaggactcgtcgctcagcccgcagccgaagatcatgatccacctcgacaacggatggtgagtaactccattgcctgtacttgtctggtaaagcgcctcggcctggtagacgcagagagctgatgagggtgagccaaacagggactggggtacccagaattggtggtactcaaatgtcttgggccagggcgcactggagatgtccgactttgacatgatgggtgtctcgttctacccattttactcctcatcagcgaccttgagcgccctgaaatcgagtttggacaacatggccaggacctggggcaaggaaattgccgtggtcgagaccgattggcctatctcctgcccagccccaatgtatgaattccctgcggacgtcaggggtatcccattctcgcccgagggacagacgaccttcatcacccaggtggccgaagtcgtggcctcggtgagcggcggcgtgggcttgttctactgggaacccgcttggattcacaatgcgaacctgggctcgtcgtgcgccgacaacacaatgttttcgcagtctgggcaggcgctgtctagtattgccgttttcaaaaatatttaa

SEQ ID NO: 903 - DNA, 2201 bp, Myriococcum thermophilum
  misc_feature (1588)..(2078): n is a, c, g, or t
atgaggaaggcagctgtgatggccgcggccgcggccgttctcgccaatggcgcgacggcccgggttcacgggcaccgccatgcccacgccctcttccagaagaggagcgatgccggtgatgtgtgcacaccgagctgcaccaccatctactcgaccatcactggcgaaccgacccgtatgttacactctccccgacggagtgataccaaccaaggttgggcagcacaagacgcaagtccaaaggctaacaaaacgatacagttctcccgcctgcacctgcgccgacaccctctactagcacgcccgttgccgagcctaccacgtctacgtcgagcgggcctgtcctcgttccgacgccgatcgagcagactttgccgactccgggcacctacaccatccccgcgacgaccgtcgtcctgaccaagacgaccaccgtctgcggtgcgtcctcgtccgaggtcccggccggcacccacacgctcggcggtgtcaccaccgtggtcgagacggccaccacggttgtctgcccggtggccaccaccgagacccaggacaatggcgttgttaccagcgtcatcaagaccacgacttacgtctgcccgtcggctggtacctacaccattgcccccattactaccgaggttcccgaggccaccaccgtcaccatcccggtcgtcgagacttatcccccgggtacctacactgctccggaggtcgtcaccaccgtcaccgagaccagcgtgatcgttacctgccccttcacttcggccacccctgctgagcccacttcggccccgtcccccaccgagccggctcctgcccctccgtccacgtccaaggacgccccggcccctccttcgtcatccaaggtggccccatcaccgtccccatccccgtccaagggccccaatcccgacgaccacggcaagcggtgggccattacctacactccgtacactcctgagggcaactgcaagggccccgccgaggtgaatgaggatgtcgctgccattgccaaggcaggtttcaaggctctccgcgtctactcgaccgactgcgacaccttgcccaacgtcggtgacgctgctcgcaaccacggcctccgcttgattgttggcatcttcatcggccaattcggctgcgagaacggcagccccaccgtcaacgagcagatcaacgctctcaagaagtggagccagtgggatcttgtcgacctgtgcgtcgtcggcaacgaggccctgttcaacggcttctgcaccgtttccgagctcgccagcctcattaaccgcgtcaagtcggagctcggctcggtcggctacaacggcgccttcaccaccaccgacgtcgtctccgcttggatcaacaatgacgtctcggccatctgcgacgccattgacgtcactgcctgcaacgcccacgcctacttcaaccccgagaccaaacccgctgatgccggcaggttcgtcgccggccagctgtccatcgtcgagaaggtctgcggcaagcccggctacgtcatggagaccggctggccttcggccggcaagtgcaacggcattgcctgcgccggcgaggctgagcaggacgnnnnnnnnnnnnnnnnnnnnnnnnnnnnnnnnnnnnnnnnnnnnnnnnnnnnnnnnnnnnnnnnnnnnnnnnnnnnnnnnnnnnnnnnnnnnnnnnnnnnnnnnnnnnnnnnnnnnnnnnnnnnnnnnnnnnnnnnnnnnnnnnnnnnnnnnnnnnnnnnnnnnnnnnnnnnnnnnnnnnnnnnnnnnnnnnnnnnnnnnnnnnnnnnnnnnnnnnnnnnnnnnnnnnnnnnnnnnnnnnnnnnnnnnnnnnnnnnnnnnnnnnnnnnnnnnnnnnnnnnnnnnnnnnnnnnnnnnnnnnnnnnnnnnnnnnnnnnnnnnnnnnnnnnnnnnnnnnnnnnnnnnnnnnnnnnnnnnnnnnnnnnnnnnnnnnnnnnnnnnnnnnnnnnnnnnnnnnnnnnnnnnnnnnnnnnnnnnnnnnnnnnnnnnnnnnnnnnnnnnnnnnnnnnnnnnnnnnnnnnnnnnnnnnnnnnnnnnnnnnnnnnnnnnnnnccgggcgagtgcaactgcgagcagcactggggcatctccaagatctttggcttttaagctctcatccccgcccttcctctagccctgcccgattccttccacgctcgtaggcagttcatttaa

SEQ ID NO: 904 - DNA, 1185 bp, Myriococcum thermophilum
atggttcgattgggatcgagcctcgccgtctttacgctcgcagcaagcacggctcgagcggactcctacactctagtcgacacgtttgacgcaagcaactttttcgacgagttcgacttcttcaccgagcccgacccaacccacggtttcgtccagtacgtcgacggctacacggcaaaccgcaaggggcttgccggctttgcctctggaggcatctatctgggcgtcgacttcaacagcacgaccacgaccggccgggcgtcggtccggctgacgtcccgaaagtcctacacaaagggcctcttcgtcgccgacatcgcgcacatgccggcaggcaccgccgagtccagctcgtgcggtctgtggccggccttttggatgttcggccccgactggcccaactcgggcgagatcgacatcctcgagggcgtcaacagccagacgaccaactcggtctcgctgcacacggggcccggctgcaccgtctccaacgtgggctccctgcccggcaccgagctcgtctcggcagagtgccaggccgacgtgggctgcacccagaacaccagcgcgcccaacaactacggtgcgagcttcaacgctgctggcggtggcatctacgccgtcgagtggaccgacgccgccatcaaggtctggtttctgccgcgggacagccccgtaaccaacgagctctcttcttcttcttcttcttccaccaccacttccacttcgagagtaaacgacatcaacacaacaaccatcatcaccctggacccgtccactttcggcacacccctggccgtcttcgcgggcgggcccgagtgtgcaatcgccgaccacttcgccaaccacaaccttgtcgtcgacaccaccttctgcggcgactgggccgggagagtgtgggattccgacgccacgtgcgccgcgctggcggatacgtgcgaggaatacgtaggcgcccacccggaggccttcgccgacgcctactggattttccggtccatccgcgtctaccagctgcagttcgatactgatccgcgcgctgatggtactggcggtggcggtagcggtgaatacaatgatcaaggcagtgaggaaaggggaggagtaggaggaagagaggcagcacggcagcggtggctgcgggggagtctgaggcctgagatggcgaggaagtggcgggcttga

SEQ ID NO: 905 - DNA, 1648 bp, Myriococcum thermophilum
  misc_feature (461)..(1109): n is a, c, g, or t
atgcatctttccaccaccgccggcctcctcgccctcccggccctcgccctggcccaggcctcgggcaacggcgagacgacccggtactgggactgctgcaagccgagctgcgcctggcccggcaagggctcgtcggcgccggtgcagacgtgcgacaagagcgacaacccgctcaacgacggcggctcgacccagtcgggctgcgagcccggcggcggcgcctacatgtgctccaaccagagcccgtgggccgtcgacgaccagctctcgtacggctgggccgccgtccgcatcgccggccagaccgaggagcagtggtgctgcgcctgctacgagctcaccttcaccagcgggcccgtccagggcaagaagatgatcgtgcaggcgagcaacacgggcggcgacctcggccagaaccactttgatttggctgtcagttttttctctttccttcacaccannnnnnnnnnnnnnnnnnnnnnnnnnnnnnnnnnnnnnnnnnnnnnnnnnnnnnnnnnnnnnnnnnnnnnnnnnnnnnnnnnnnnnnnnnnnnnnnnnnnnnnnnnnnnnnnnnnnnnnnnnnnnnnnnnnnnnnnnnnnnnnnnnnnnnnnnnnnnnnnnnnnnnnnnnnnnnnnnnnnnnnnnnnnnnnnnnnnnnnnnnnnnnnnnnnnnnnnnnnnnnnnnnnnnnnnnnnnnnnnnnnnnnnnnnnnnnnnnnnnnnnnnnnnnnnnnnnnnnnnnnnnnnnnnnnnnnnnnnnnnnnnnnnnnnnnnnnnnnnnnnnnnnnnnnnnnnnnnnnnnnnnnnnnnnnnnnnnnnnnnnnnnnnnnnnnnnnnnnnnnnnnnnnnnnnnnnnnnnnnnnnnnnnnnnnnnnnnnnnnnnnnnnnnnnnnnnnnnnnnnnnnnnnnnnnnnnnnnnnnnnnnnnnnnnnnnnnnnnnnnnnnnnnnnnnnnnnnnnnnnnnnnnnnnnnnnnnnnnnnnnnnnnnnnnnnnnnnnnnnnnnnnnnnnnnnnnnnnnnnnnnnnnnnnnnnnnnnnnnnnnnnnnnnnnnnnnnnnnnnnnnnnnnnnnnnnnnnnnnnnnnnnnnnnnnnnnnnnnnnnnnnnnnnncctctctctctctctctctctctctctccctagcatttcccggatttcatggctgaccaaacaataccatacgaacagatccccggtggcggtgttggtatcttcaatggtaagttgactgcccttttgagaatcgccgagatcacacaaagctcacacgattctctccctcaaaaacagcctgcaccgaccagtacggcgctcccccgaacggctggggcgaccgctacggcggcatccacagcagggaagagtgcgattccttcccggaggccctcaaggatggctgctactggcgcttcgactggtacgttgcttcgataatataccggcacccgatatctccttttctttttttccttttttttttttactctcttcttcgtcgtcttttctcccaggtccgaagcagtcgaatgaaaacttgttgactgaccccattttctttcaggttccaaaacgccgacaacccgaccgtcagcttccaggaggttgcctgcccgtccgagctcacgtccaggagcggctgctctcgttaa

SEQ ID NO: 906 - DNA, 2007 bp, Myriococcum thermophilum
atgcatctcagcggccttctccctctcactctcctccccctctgcacgtccaccgtcgctgccacctcgggcggcgggaagcacggtatcgacgggaagcatgttggcacgaacatcatcacggtgcgcgacgatgacgggaccctcagcgtacgggcacgccccgacgcgcccaacggctacgcgccggccgtcgtgccttgcccgcagaacaagccgaccatcaggagcgctagctcgctatccaggagcgagagagactggctcgccaagcgccgtccgctcaccgtcgagcccatgatccaactcctcaagcgggccaacatcgatggcttcgatgctgaggcctacatcaagcaggtcgccgaaggcgtcgagaacctgcccaacatcggcatcgccgtctcgggcggcggctaccgtgccctcatgaacggtgccggtttcatcgccgccgccgacagccgcacacccggctcgaccgacaagggcggcatcggcggcctgctccaggcgagcacctacctctcgggcctgtcgggcggcggctggctggtcagcagcatctacgccaacaacttcagcaccgtcacggccctgcgcgacggcaggaaggacagcagcatctggaggttcgacgacgacatcttcagggggcccgacctgcctggcatcctcgacacggcgaggtactggggcaaggtcgcaggccaggtcgcctccaagagggacgccggctttgaggtctccatcaccgactactggggccgcgccctgtcatggcagctcatcgacgcccccgacggcgggccgtcctacaccttctccagcatcgccgaagacgacgacttctccaacggccgggcccccttccccatcctggtggccgacgggagggcgcccggcgagaagatcatctcgctcaacgcgaccgtcttcgagttcaacccgtacgagatgggctcctgggacccgaccacctacggcttcgcccccatccgctacctggcctccaacttctcgggcggcgtgatcccgtccgacggcaattgcgtccgcggcttcgactccatcagctacatcttcggcaccagcagctccctcttcaacgccttcctgctccagaacatcacgtcggtcgacggcgtgcccgacttcctcctcgaggccgccaccgctgtgctcgagaacatcagcgaggccgagaacgacgtggcccagtacgtgcccaacccgttcctgggctggaacggccagtccaacccggccgcccggtccgactcgctcgacctcgtcgacggcggcatggacctgcaaaacatcccgctgcacccgctgatccagccgatgcgtgccgtcgacgtcgtctttgccgtcgactcctcggccgacaccactttctcgtggccaaacggcaccgccatgcgtgccacctacgaccgcaccaagggcgacatcgccaacggcaccctgttcccccccgttccggacgaccgcaccttcatcgcccacgggctcaacaacaacccgaccttctttggctgcgacgtcgacaacttcacttccgacgcaactcctccccccctgatcgtctacctgcccaacgcgccctacacggcctggtccaacgtgacgaccttcacgccctcgtactcgctcgggcagcgcaacgccatcatccgcaacggctacaacatagccacgcagggcaacggcacgctcgacgagcactggactgcctgtgtcgcctgcgccgtcctgagccgctcgctcgtccgcaccggcacgcccgtgcccgaccgctgccgctcctgcttcgaccgctactgctggaacggcacagtggcggacgcttccgcttccattgcttctggcgccggcggcgaggagtaccagcctaccttcaagatcggcaacgacagcgaagactctgctgccattgcaggtagccgccctgcctgggtcgccctggtcgccggcttggtcgctaccatcgtcatgctgtga

SEQ ID NO: 907 - DNA, 1607 bp, Myriococcum thermophilum
atgaagttcgccgtcttcgccctcgcggcgtctctcgtcgcggctgcgccccgcgtcgtcaaggtcgacccctccgacatcaagcctcgccggctcggaggaaccaagttcaaactgccccagattcacaatgacttcttccgccagcatggcagaggccccagggccctggccaaggcctacgagaagtacaacatcgagctgcccccggacctcttgcacgttatccggggcattctcagagacctgggcatcgagccgaaggctaagaagatccccggactccactcgtctcacggcgatggcgcgccctacaccaacgagacggatgattcgggtacgttatgtctcttgctcctcctgttcctgttgtttgtttggcattggggccgggatcagctgggttgttttttttttttttttttttactaacgctgtcatcttaggtgaggtttctgccatccctcagctctttgatatcgagtatctggctccggtccagattggcactcctccccagaccctgatgctcaacttcgacacgggttcttcggatctgtgggtgttcagctccgagacgcccaagcggatgcagaaaggccagaccatctacaagatcgaggagagcgtgaccgcccggcggctcaaaaaccacacgtggtcgatccagtacggcgacggcagccgctcgtcgggcaatgtctacctcgacacggtcagcgtcggcggcgtgaacgtgttcaaccaggcgatcgagtcggccaccttcgtttcttcgtcctttgtcaccgatgccgcctcctccggcctgctcggcttgggttttgactccatcaacacggtcaagccgatcaagcagaagacttttatttccaacgcgctggagtcgctggagatgggcctctttagtgccaacctcaagaaggctgaacgtaagccgcacccgccctctccttttttcttcagtttttttttttcctttttttttctgaaaataaaagaaaaaaaaaccttaatgaaacacctgtgatctaattaactaacgtttcctctcatatatagccggtaactacaactttggcttcatcgacgagaccgagttcgtcggccccctgcacttcgtcgacgtcgactcgtccgacggcttctggcagttcgaagcctcgggctactcgatccagcccaacgacgacccgaccgggaacagcacgggcacgcccttccggccggtcgcgcacacggccatcgccgacacgggcaccaccctgctcctgctgccccccggcatcgcgcaggcctactactggcaggtccagggcgcccgccaggcgcccgaggtcggcggctgggtggtgccctgcaacgcgaccatgcccgacatgacgctgcacatcggcacctacaaggccgtcgtcccgggcgagctcatgatctacgcccccgtcgacaccgacgacatggacacggccaccatctgctacggcggcatccagagcgccagcggcatgcccttctccatctacggcgacgtcttcttcaaggcccagttcaccgtctttgatgtcgagaacaagaggctgggcttcgctccgaagccggagctttaa

SEQ ID NO: 908 - DNA, 1709 bp, Myriococcum thermophilum
atgaagtcctccgtcctcgccagcgtcttcgccacgggcgccgtggctcaaagcggtgcgtggcagcaatgtggcggcgcgggatggcaagggtcgaccgactgtgtgccgggctaccactgcgtctaccagaacgagtggtatagccagtgcgtgcctgacacagcgtcgaccacgctgcagacatcgaccacgtcgaggcccagcaccaccagcaccgcccctccgtcgtccactacgtcgcctagcaaggggaagctcaagtggctcggcagcaacgagtcgggcgccgagttcggggagggcacctaccccggcctctggggcaaacatttcatcttcccgtcaacttcggcgattcaggtatgaccaatctgatctagcagacagagaaaatggggaggaaggaaaggaattgcaggagaacgtggaggcgctgaccattgttgatcttgtgtatgtgcagacacttatcaatgatggatacaacattttccggatcgacttctctatggagcgtctggtacctgaccagatgacctcggccttcgacgatggctacctccgcaatctgaccgaggtggtcaatttcgtgacgaacgcaggcaagtgggcggttttggatccgcacaactacggccgctactacggcaacatcatcacggacacgaacgccttccagactttctggaccaacctggccaagcagttcgcctccaactcgctcgtcatcttcgacaccaacaacgagtacaataccatggaccaaacgctggtgctcaacctcaaccaggcggctatcgacggcatccgggccgccggcgcgacgtcgcagtacatcttcgtcgagggcaacgcctggagcggcgcctggagctggaacacgaccaacaccaacctggccgcgctgacggatccgcaggacaagatcgtgtacgagatgcatcagtacctggactcggacagctcgggcacacacgccgagtgcgtcagcagcgacatcggcgcccagcgcgtcgtcggcgctactaactggctccgcgccaacggcaagctcggcgtcatcggcgagttcgccggcggcgccaatgccgtctgccagcaggccgtaaccggcctcctcgaccacctccaggacaacagcgacgtctggctgggcgccctctggtgggctgcgggtccctggtggggggattacatgtactcgttcggtaagtttgttgtctttcttctctcttttgtctcctttgcttccttttctttccttttccccccaaaccaagtatatcccctctcctcccccccgcgtcggtgcatactggagcaacatgcccaccattcgcgccgtttctgccttaacgtgttgtgcacaataattaagagtcccacctccccaacccgttcttgtttccgatttggcttagaagagcaagaagggcgaggaaaaggggaagggggtccctggtgggttggtgggtttgtggggggggggggaaagggctcaggaggtggaggcccacatggggggaaaccccccacggcttcgcacagcgctcggaaccaacagtctcttgggtctcgactcgacccagccctacggtcatccaagctctcgctaacgcgtttcgtttttttcttggtttccagagcctccttcgggtaccggctatgtcaattacaactcgatcctgaagaagtacttgccgtag

SEQ ID NO: 909 - DNA, 1092 bp, Myriococcum thermophilum
atgtggtccaccttccgctcgctactatcgctcgcctcgctgatatcgtcggcttgcatcgccacggccgaactgagcatcgtggcgagcgtcaagcagcatggaaagcacgtcgacgcgtccagcctgagcctcatccggaccccgccgcaggagcatcgctggcatgcgccttggccccgccgatggcgcaaccacaacaacaagacggtcgagagggatgccgtcagctacagcgccaattggtgcggtgcgtcgcagcacgcgactgactcggacggcatcaagaacgtgctcggatacttcaccgctccggacctgacgttgcgacccggcacgccggcgccacagttcgccgcggcatgggttggaatcgatggggctgagtgcaacactaccctgctgcaggcaggtgtgacgacaattgtaagaaatcaggccctgtcatgattttttttttttttattttcctctcatgagaaggaggaggagaaggaggaggaggagaccgagacaagcggtgaacgatgataaggacgacgaactaaccaatctgctaggtcaacgcggatgggggccagagctcttcggcatggtggcaatggtacccggaagcttcgttcaccatcgaaaccctcaaggtcaagccgggagagtgggtgtcggtcaatatcaccaccaaggatgattctagcgccatcctgtaagtgcgaccggtcggccggggtggcttagtttttttttttctcgagctgggcgacaccattctaactctttcccttctctcttatcaggaccatggagaacacggataccggcctgtcggtcaccctggagctgaacaacgggccgcagctgtgtcgccgggatgccgagtggatcttggaagattttttcgatgctggcaagcaggtcgcattggcgcattttgcagatttgtggttcgtcgactccggagcgacaacgaagaaaggaaagaaagtgggctttgacggggcgaccatggtgcacctccaagacgaaaatggcaaggtactctgctcgccggagccatacgacgactccaactttgtagtcgtctcaaatccctaa

SEQ ID NO: 910 - DNA, 1739 bp, Myriococcum thermophilum
atggcgagaacgctgcagtatcttctgtgtggtatcctcgcattggcggcgggcacaaccaatgccgctcctgcagcccatggttcgacccgggtagcggccgcggcagagcccagtgccactacgtacgaggccgaagacgctgttctgagcggaactactgtcgaaaccgaacaggaggggtatacgggtgagtaccttgctgagcggccatagaaccctctgtaaccgtctgagagggtgccggaccgcagtgattccctaggtgcttgtctgtacgtagttaagagtcatgtaactaacctccgagctagggaccggctacgtaaccggttttgatgaggccagcgacaagatcacgttcgaggtcgagagcgagacgacgaagctctatgacctcagcatccgcatcgccgccatctacggcgagaagcacaccaccgtggtgctgaacggtggggcgaacagcgacgtgtccatcccggccagcgacacatgggccgacattccggccggccaagtcctcctgaacgagggcgccaacacgatcgagatcgtcagcaactggggatggtacctggtcgactccatcacgctcacgccatcgacgccgcggccggagcaccagatcaacgcggagctgaacaacccgtcggcggacgagagcgccaaggtgctgtacgactacctccggtccatctacggcaagaagatcctctcgggccagcaggacctgacctgggccgactacgtgacggagcagacgggcaagacgccggcgctcgtgtcggtcgacctgatggactactcgccctcgcgggtcgagcggggaacgcagggcacggcggtcgaggaggccatcacgcacgcggagcggggcggcatcatctcggtgctctggcactggaacgcgccgacgggcctgtacgacacggaggagcagccgtggtggcgtggcttctacacggaggcgaccgacttcgacgtcgaggcggcgctgagctcgaccgacaacgccaactacacgctcctggtgcgcgacatcgacgccatcgccgtccagctcggccgcttgcgcgacgctggcgtgcccgtcctctggcggcctctccacgaggctgagggtggctggttttggtggggagctaaaggcccggagccggccaagaagctctgggccctgctctatgaccgccttgtcaaccaccacggcctcaacaacctcatctgggtttggaactcccttgaggccgactggtaccccggtgacgacacggttgacatcctcagcgcggacgtctacgctcagggcaacggggtaagtttataatcatcgccttacctgaaggacgaagctaacgtgcacttcaaacagcccatgtctactcagtacaaccagctcattgagctcggcaaggacaagaaattgatcgccgccgccgaagtcggcgccgcgccgctcccggatctgctgcaggcctacgaggcccattggctgtggttcgccgtctggggtgacacattcatcaacaatgccgagtggaactcgcccgaggttttgcagacggtaagttttgcactatcctatccggctgggttccgtccccgaaaggaaatgagagggaaaaaagagtggaaacgaagaaaaaaagacactgaaactgacatctctcctccagatctacaccagcgattatgtcctcaccctggacgagattcaggggtggcaggactcgtaa

SEQ ID NO: 911 - DNA, 3417 bp, Myriococcum thermophilum
atgatcttgctaacctcggcatcccttttctttcttgctggattctacctgcgtacgtcgtcgagtgctcgaatctcggaagtgcctagccagacctctggtcatgcccctgtattcacggtgcctgcttcggctgactggggccaacatgtcctccccaatataaaggatcctcaggccaccgaccctcagagagtatgcccgggttacaaagcatccaacgtgcaagacaccaaagacggctttaccgcggatctttaccttgccggtccggcatgcaatgtttacggaactgatgtcgagcacttggtgttgtccgtcgggtttcagggtgctgatcgggttcatgtcgaaatccgaccacgttatattgcctccgagaacgcgacttggtttcttcttccagaggagttgattccaaggccgtcagtggggcaggaacacgggtctgagcctaacgacttgaccgtttcgtggtctaacgacccaagtttctccttcactgtaaaacgcagagaaaccggcgacattctcttttccacggaaggaaagaagctcgtatacgaggaccagttcattgaattcatctccacactccccgaagactacaacctatatggcctcggtgaagtcattcacggcttccgcttgggcaacaatctcacaagtgaggcggctccacacaaacgcgtgggaaagccattttagctaactggtcgcagggactctctatgccgctgacgttgctgatacgatcgatgccaacatctacgggagccacccggtctaccttgacactagatactttgcaaccgacgaatcaggaaagctcacttatatcgccaatgcaacggacacgacggcaaagtatgtgtcgtacacgcatggcgtgttcctccggaatgctcatgcccaggagatccttttgcaatcgtccggtctcacatggaggacgatgggagggagcattgacctgtacttttatagcggcccaaaggcagaggatgtgatcaagtcgtaccaacagacgacgattgggctgccagccatgcagcagtactggacgcttggttatcatcagtgtcgttggggctacgagagttgggcggtgctccaggacgtggtcgacaactttgccaagtttgagattcccctggaaaccatctggggtaggtgtcaaaccctctctgctgttctgaggattggagaggggagtaactctgagctgacatacgggagccgacatcgactacatgaaaaaataccgcgatttcgaaaacgatcccgtacggttcagctacgaggaaggggcccagttcctagccaaacttcacgccaatcaccaacactttgtccccatagtggactccgccatatacgctcccaatcctgaggatcctgaagatgcgtatccaccgtatgatcgcggagttgaagcaaacgccttcctgatgaatcccgatggatcgatctattacggtgccgtgtggcccggctataccggtttgttccaaccaccccccaacccagggtgaattcccaagccaggatcgcgctcacacacaacgtagtgttccctgactgggtgggtgctgttctaaacggcagcggggctattgactggtggatcgacgaactctcccggtggtctgagaaggttgctgtaagtgctatcagatggcctctctgaactcgtgttcgaagcataatgaatatgctgcgggtggtagctaaccggcacagtttgatggattatggatcgacatgtccgaagtaagtgtgctagctgactggtatgggcatccataaaccgttgtcaactaaccggcatataggttgcttcattttgtgctggcagctgcggcgctggcaacttgacgctaaacccggttcacccgccgttcttacttccgggagaacccggaaatctcatcttggaataccctgaaggcttcgagctcaccaattcatccgaagcttcctcggcgtcgtctgctctcagcacacaatacccttcttcctcgacgacggctagcacgacgactgcatacgtccgcaccacgcccactccgggtgtgcgcaatgtggactggccgccctatgtcatcaacaatatccacggcgaccttgcggtccacgctgtgagcccaaacgcgacgcaccatggcggatacctcgagtacgacttccataacatcttcgggcaccagattctcaacgccacctatcaggccctgctcaaaatttacgagggaaaacggccattcatcatcggccgcagcacctttgccgggtccggtaaatgggccggacactggggaggtgacaacgcggcgctgtgggcatacatgtactttagcatcccacaggcgctgtccttctcgatcttcggcgtgcccatgtttggcgtcgacacgtgcgggttcggcggcaacagcgactacgagctgtgcgcccgctggatgcagctcagcgccttcttccccttctaccgcaaccacaacatcctgggcgccatcccgcaggagccctacgtctgggccagcgtcatcgacgccaccaagaccgccatgcgcatccgctacgccctgctgccgtacctgtacacgctcatggcccgcgccagcacggacgggagcaccgtcatgcgcgcgctcgcctgggagttccccgacgagccgtggctggccggcgccgaccgccagtttatgctcggccgggccatcatggtgacgccctgcctggaacagggcgccaccaccgtcgggggcgtgtttccgggcgtcggggacaagaacaccgtctggtacgactggtacacggggaagtcggtgacgaacgggatcaggccgggccaaaacgtcaccatcgaggcgccgttgggccacatccctgtctacttacgtggtggcagcgtggttcccgtccaggagcccggaatgacgacgacggagagccggaggaacccgtggggtctgctcgtggcgcttgaccgggagggcttcgcggagggtgagctctaccttgacgatggtgagagcttagagcctgcgggggtgacttgggtacaagtacgtctctcccttacctccctttttttcttcttgcactgggatgaggatgatgagaggcatagacgtggctgctaaccttgacttgcctcaaacgtagttcactgccacaagtacatccatcaaagccgttcctcaaggcaattacgtcgacacgaacacatttgccaacgccaccgtcatggggttggctaagagccccaagcaggtgtggctggacaagtacgtgcttgaccgtgcaaactggaagtatgaccatgacagggctgtgctttcgttgcatggattgaatcatctgtttccccggggtgcgtgggcggaagagtgggagattagctgggaatag

SEQ ID NO: 912 - DNA, 1392 bp, Myriococcum thermophilum
atgaaagcctttggtttccccctgctagcagctgttttgctcggtatgtgcctgcttcttcggtcagcaaaacgaacgtgatgggctgacttccttcgcccaattcagccactgctccggcagcgagtacgccggtgtcacattgccccaatggcgacagcggaccgtgctacagcgtcgccgtgcccgactcatcggcggaggccgggtccggcaacatctatttccagatccgggcgccgacttcgttccaatgggtggcgttgggtaccggttcgggcatggcgggtgccaacatcttcctgatgtaccaggacggcaacgggaacgtgaccctgtctccgcgccgaggcgttgggcacaccgagcccaagctcgacacaagcagcagtgccgcccggctgactctcctcgccggcagtggcgtcgacggctcggtcatgaccgccaacgtcgcttgcgccaactgcgagtcctgggacgggggcgagatgtctctccagagcaccagctccaactggatcggcgcctggagagagggcccgtcgctggacaccacggacctggacgccaccatccagcaacacgacgataacacccggttccggatcgacctgacccaggcgaccgtcagcgaagacagcaaccctttcgtctcggccgacggtgacgaggacggcaacgggtccgagtccggtacgggccaggacggcggttctggcagcggttccggctctagcggcggcgttatcgagagcggggggtcttcgaagcccgccattctcgtggcccacggcataatcatggcactcgtcatgggcctgttctaccctctcggttcgaccatcatgccgctcgttgggaagtggtgggtgcacgctacgtggcagatcattgccttctgtctcatgtgggctggtttcggactgggtgtcgtttcaggtcgcaggttattgagcacagaggtgagtagagccccccctccccccttccatatccttaagcaagccgtccgagtaagtagactcactgagacccgaaattcagatgtgggacaagacgcataccgtcttcggcgccgttgtcgtctccctgttgggtctccagcccgtattcggctacctacaccatttgcattacctgaaattccatcgccgcggcctgatcagttatgtgcacatctggtggggtcgcatcctgatggtgttgggcgtgatcaacggcggactcggcctgcagcttgcgaacgaggaggatggtcccatcatcgcgtacagcgtcatctctggtgtcgtcttcctgggttacctggcctacaagctctgccagtttttccgtcgtgggacgtccgacaaccacaagatggcaagcgactcccccgctgcagcttga

SEQ ID NO: 913 - DNA, 6869 bp, Myriococcum thermophilum
atgatgcgggaccaccgtcgtcgcagtccggaaagcacacgccggcggcgcgctgagcgacggcggtcgagggaacagctcgccgccgccgccgccgccgcccttgccgaacgcgccatgcaatcatcatcgcattcgcagcggcgcgcccgttccgattcgagttcgtcatcgacgtcgtcgtcatcatcatcatcgtcgtcgacttcgtcctccttgctgaacatttcgcggaaaagccgattcggcatccgctctttctttgcctcttcgtcggtgaagaaggtcaagaaacgccggtccttccggagaaagaacacatcgtcgtcttcgttcgacagcgatctggcctatggcccgggttacgtctccagatcctccttcgagaggcaagaggccgagtacctgcagcgccacccacagaaaccccagcaccaacaccaacatcaacaccagcaccagtaccagcaacagtaccagcagtaccagcaccaccagcaccaccagcccccctaccatcctcagcaacatccatatccctacccgccctcccagcattcgtattcccatcccccccaacatccgcaacacccccagcacggccagtacccctcgcagcacggaccatcaccaccatcccaccaacatccccaccatcccccagagcaggatcagttgttcggacccgatggtcggccagcgctgcaccgagccgagacagacgaggagattctcgccttgggccggaagctctcggacctggcgcgggcccagaacatccgagatctcgagcgtgtcggcaagaagcgcccgtcacgcttggtagctgccgccaccgctctctccgagttccaccacgaacggaaatcccgccacggccacacttccaagggccatggctcctccaagctgcattctcgccgagatgagtccgatacggagtgggagtccacgtccgactcagactcggactcggactcctactcggaatcctcgagcgatgccgattccagtctggcctacgggcccacgcccaagttctcggaccccaccctccccatcgacgaccggtcgcaacaccggccacttcccgagcccgtccgccctccgcatcacaagagctccgccgtcgacccggccggctcccgtcgcggccacaccgactctccgcacggtttccgtcctggtgactcccctcgttcttcgcacagagagacggatccccgggcttccacctacgagatccctccgccagagagtgcatctatcgaggccaggccgatgcggagggtgtaccccgtcccggctgccgatgacgctgctcggtttgaagcggctcctggttcttcgggcgcgcccgctccggtagctaccagtgagggttcctccacgccaactggccgggagaaagcccgggagcgagataacgatggtggtggtgctttgtactccagccggcccgaacctgttccgatccaggctcccaggccaaggacgctcgtgtcaccccgtgtgctggaggattcccgacagccggtggagcgggagcagctggccgagcaggcgggtagtcctcccgagcgccggtcgaagaagtcccgtgactcggaccggaggaacgccgtggaggccgtggtttccggcgccctgcctgctgtcgccggtgcggctgccggagcggcgctggccagtgtcatcgaggagaggagggagaagaagcgggaggagcaccgctttgagaggcgggaggaaagacgcagctatgaggatcggcatgagcgccaggaggctgctgactggaggagctctgccgacgcggctgccaacgcggtccctccgtcgtccgccgcctcggacgccatcgctcggcgtgagctcgaagagctccgtgccaaggaggccagtgtgcgtgaagaacgtctgcgttatgagcgagaggtacagcgccttcgtgaggctcgtgagctcgaggagagagagagtcgccgtgaggaggaggaggaggaggaggaggaagagaagtaccgccgtcgtcgccgccgggaggaggaggaggcagagaggcgccgtctagaggaagaggagttggacccgcgccgcatccgtgataatcccgagcttgccgaggtgtatgaacgtcgagtgcgtgaggtccgcgagatccgttacaaggaggagcgccggagccgggaagagcagcgcatcgtccggacggagcgtgagaggatgtctaggagcgccgagaagaagcttgagcgcgaggagaagcggaagctcgagtcctctgaggaccagggggaacgtagccgcgagcgtgaggaacgtcgtcgcctgaaaggcaaggacgttgctcccgtggtcgtcgacgacgaacgtggccgtagccgcaggcctgaccgagaggaggtgcctacccccggcccagaggagaacaagtcgggcgggttggagcccgaggaatccaaatctagccgtgaaaagagacgagcgaagcgcgaggagaccctccgcaagctccgggagatccaggagcagatcgagctcgagaggaaacggctcgctgagttggacgccggcaaagagccgccgccgcccccggcggccgagaagccagttgaagctggcccttcgactagccggaaggatgccgttgacccgttcaaataccaggtgccggacgatgccttccctacgcctgcacacagtcccccccagaggccgctcactcccgtaatctacacggtcgaaagcgaaccagactgggcacgtgaggaggcgaggaagtccgacgacgagcccgaggagcggctgagccggcgctgctcgtacgagcgagagcagaaagctgcccaagccagcaccggtcaaaccctccactccacgattcaggatgagaaggacagtgaggcacggcgggctcggtcccgctcccgcgaacccccgcggcccagggattcggagcctgtcagggaccccgtacaggaggaggccaaccgactctaccgcgagagcaggatggcccagaggaaggccgaggaggagatacgctcccgcacaccctcgccgaccaggtccgtcgtcgataagtacgaagacgatgatgatctcaacgaggaccccatcggccgcatcgtcactccacccgagatgaagcgggcttcgacaaagagcaagtatgacggcccgaacgccgacgtccgcatcgacaacatcattacgccgcacgaccttcacaggttccaacccccgcctcccgatgcctccgggctcgtcatggtgcccatcttcaaatcccgggacccgtcctgcgagcgcgagcggccgatgctcaacctcgtcctccccacacccaggacttcgccgtcgctggaaaagatgaaggctaggcaggcggctgcccaggctgccgctgacgaagccacgtctgaggacgagaagaagacgcaggagaagaagccggcgcaggaccgcaagcccaacttcatcatcgaccgccacggccaggtagtggaagcccccgaggactacgccaccggacgggtcgccgagtcggacagccgcgattcgtctcgggagcgccccgcgatcaagttgaggttctctggagccaggaagaagaatgcctggagtaacctgattgccgccgccgtcgcggatgccagcgccaagtcgaagggcgagaagaagtcggaaagcatcaaggaggccatcgagaagaagaagggaggcagtgcttggcgtagcctggttgctgccgccgtcgcgaatgcaggttccaagtcgaagggtgagaagtcgggtgatgccaagaaggaggagcgggaggaggaggccgtcaaggacaacaacaacaacaacaacaacaacaacaagggtgactacaccgctggagcggatcaagataataaaccgcgggatgcgccccagcccgtgtccgagggaaagcccgagaagaccgctgctccggaggtccgcccgtcgtcaatcgaagcggtaccggaaccagcagccttcccggctatggtcctgattgctaccccagagcaagcactagaagcagtacctgacgaagccttgccggacacgcaacccgatgcggcggcccctaccaaggtctcggaggaaccgtcgacccctcctcgctggtcacgggtcccctacgaatttgacgacgaaccccctcaggtcggccccaagccgtcttttagccctgagtcttcgtccaaagtgccgggttcctacgaagaggatgccgagtttaccgccaccctcgctgccggcctacagagctcggggttcaaccctgatatcgtgatccaggatcccacctaccgcaagcgagactcccctcccgggtcggacgagcccaagtacgtgcctccgtcctgcgagacggtgacagatctcggcgtcgagaccttgcaccaggagagcacctctggcaagggccatgacgcacccctcctcgaacgcgtggcccctgtagaggagggctcttctgctaccgccgaacagggcgagaaatctgggaacaccggggacgacagcaacacggcactcacgaccgaggttgtcgagccgagtgtggagccatccgtggctgaagctgatgatgagtggtctatgaggagcctcacggattcgaggaagcaggagagcgagcatcccggttctttcgattcgacgacgtactctaacccgccgtccgaggtgtcggtggcgagctcgagcagcaggaagaagaagaaaaaccggcgcaggagcagcacgaaggacacgtacgatataccagaaaaggacgagccgccggatcgacccggcgattcttttcagtggatcgaccgtgaggtgagctcggtcgcctccgacccgactggtaagaccaacggcacctccggccaccatgacgccaactctgtcgtgtcgcttcatacaaatgggtccggcgagcaccgcgagcaactgaccaagaacaacggccatagcgaggaggattcttttttaggtaatgccggcacctttggcgcaggtgccggctatgcgggagccgtagcagtggccgccgctgctgctcagctcttccgcccaaatgccacccaggattccgttgaggaagcgcagccgtttcgccgcccgcgtagcttcagctacagctcgcagatcgtcgacccggaagttgtccagcgcgagatcaagcccgccattgacccccaatacagggatctcctccctttgcctcccagcgagcctggttcacctaagtttctcaacaacctagatgaagaagaagagcatttcttacctccccttccagacagtgacgaggagccaccactggtggcaccagctcattccccccagcaaaagcgtcctcgccgggccactgtcgcccatccccacgctcgccgtcgcagcatcattgaaatccccaaaacgcccagcagcagcacggccgtccctgttcagtttcgcataggccgtacttccctcccttcctcccccgtcttcttccgcttctcacccacgcattcacctgtcgggtccgacaagaagaagcccgagtctccagatagcgcctcgccccgcaggggccgcttcagccggccgacctcgtgggacagtacgcgagatttcaagcctctctacctgctcgagaagacggccggccgtgccgaacccgaggtgtatcccgagctgccgcctagcgaaccgtcttcgagggaaagccccgggccgtccgagtccgagtccgagtccgagtccaacaccgacaaagacggccaggatgatgggctggattacctcgacgtcggcctcagggtcgctgccggcatgggggcgtccgcggagctgttgcaagccttgcacattgatacgactgtcggaaaaggcctcgatcacggcgccggcgagtccgccttcggggagcccctcggctccggggacacgacgcccagggcggccgttccgccttcgcccccgcattcgcttgacgctcctctaaaggagctgtcggctcaaggcgaggaggtacgccccgagcaacaacaacaacaacaacaacaacaacttgtagaggagctcgagacgttgcctcccctgccggatagcccagctgattcgccaacttgggccccgtcatctccggctgctctcgctgctgttacctccgatgtcgccccggctcccccgcccatttttgagagcctggagagcttaccgccgtttcctgatagcccgccggcgtcgcctcacgttcaagattcgccctcggctctggcttctgctccggttcccgctcctacccctttcatggacgatgacaaggcgttggaacagcttcccccgcttcccgagagcttgccgacctcgcctccgctggcaccatcttcgccccctacatcagcatggccgccggtcgatgaagaactggaggagctgccggcccttcctcagagctcgccagcctcgcctcccttggcgccctctcccccggtatctgcgcagctgctgcccgatgaaaatttggaagggctgccggctcttcctgagagcttgccaggcacgccccgtgtacacgagctgtcctcggttgatacgtatttacctactgccgaagaactggaggaccttcccccgcttcctgagagcttgccaacatcgcctcccttggcacctccctcgcctcctacatcagcatggctgccggccgatgaagacctggaggagctgccggcccttcccgagagcttgccaggcacaccctgtgtacaggagctgcgttcgcatttaccgaccgccgaagagctccctcctttgccagagagtttgccgggcacaccccatgtacaggagctgccttcgactga

SEQ ID NO: 914 - DNA, 1714 bp, Myriococcum thermophilum
atgtaccggcaggtcgcgaccgctctctccttcgccagcctcgtgctcggccagcaagcgggaaccgtcaccgaggaggtccacccctcgctccccattgaagtgtgcacggctccgggctcgtgcactaaggaggataccaccgttgtcctggacgtaagtggccgtctcgcagacgaaactcccccctagccgcatcgtctcctttggggaaagggccgggggatacaaaaaaaaaataggacggctaatgaaggttttttgctctcgatctaggccaactggcgctggacacacaccgtcgatggctacgacaactgctacgagggcaactcctgggacgagtcggtttgcccggatggcgcgacgtgcgcggctaactgcgccatcgatggcgccgactacgaggccacgtacggcatctcgaccccgtccgagggcgctctcaggctcaacttcgtcactaaaaacgagaacggccagaacgtcggctcgcgagtctacctgatgaaggatgacgagacgtaccgcctgttcaacctgcttaacaaggagttcacctttgacgttgacgtgtccaacctgccctgcggcctgaacggcgctgtctacttcagcgagatggacgaggatggcggtctgtcccgtttcgagggcaaccaggccggtgccaagtacggtaccggctactgcgacagccagtgcccgcaggatatcaagttcattaacggcgaggtacggccctttttccatgccggcggcccggacagttgactgacacaaagaaataggccaacgtcgagggctggggcggcactgacggcaactcgggcaccggcaagtacggcacctgctgcgccgagatggatatctgggaggccaactcggacgccacggcctacactccgcacccgtgcaaggttaccgagcagacccggtgcgagagcgaggaggagtgcggcgcgggcgacaaccggtacgccggcctctgtgacaagggtacgtgccaattcttgattacttccatatagcaaagaagcggaggaggagaatgaaggaaaagagcacggcagtgacaaggctgacattacgagcagatggctgcgacttcaacagcttccgcctcggcaaccaggagttctacggccccggcatgacggtcgacacgaacaagcccttcacgatcgtgacgcagttcatcaccgaggacaacaccgacacgggtgccctcaaggagatccgccgtttctatgttcaggacggcaccgtgatcccgaactcggagaccgtcgtcgagggcgtcgaccccaccaactccatctcggatgagttctgcgagcagcagaagacggcctttggcgacaccaactacttcaagacggtcggtggcatggccgctatgggcaagtcgctcgagaagatggtgctggttctcagcatttgggatgaccagtaagacatcctcctttttgtcctttttttttgcataacctttggctgacatcaacctcttcttttcagtgctgcctccatgaactggttggacagcaactaccccgtcgatggtgacccgtccgtgcccggtgtcgcccgtggccgttgcgaccccgaggccgggctgcccgagaatgtcgaggcggcgcatcccgacgcctacgtcatttactccaacatcaagatcggtgccatcaactcgaccttcaccgccgcttaa

SEQ ID NO: 915 - DNA, 4539 bp, Myriococcum thermophilum
atgagcggcgagtctcccctggcagtcgtcgctgccgtcatccgatctctcgcgaccgacccgacaacgaccccacccgccgtcgccaatgcatgtccgagcgtgaggttaccgggtccagtcacgcccgagaagctcgagcttgagcgcgagcttgccgccctcgttgccagggtgcaggaccttgaggcgagggcgaacgctgctgccaccggtgccctccccgacacgccaaacgagacgtccgactctttctcggcagatgataggggccgcccaagaccgaggtttccgagccatctctcgcgaaatggctttatcgacgaggccctcgaggggttgcgggagcatgtcgatgaccagtcgaaactgctcgacagccagcgccaggaactggacggcgtcaatgcccagctgctcgagcagaagcagttacaggagaaggctttggccatcatcgagcaggagcgcgttgccaccctcgaacgcgagctctggaaacaccaaaaggcaaatgaggccttccagaaggctctgcgagagattggcgagatcattacagccgtcgcccgcggtgatctctccaagaaggtccgcatgaacaacgtcgaaatggacccagaaatcaccaccttcaagcgcaccatcaacaccatgatggaccaactgcagatcttctccagcgaggtgtctcgcgtcgcccgcgaagtcgggaccgagggaatactcggcggccaggcccagattgaaggggtcgatggtacatggaaagaactgacggacaatggtgcgtttctctctcctgctcctcttcctccttcccatctctcccgattcatactccttccgtcctcgtacttcaggggttcggagtgacccgtccagtgctaatttttggggtatgtggcagtgaacgtaatggcgcaaaatctcactgatcaaggtatgtttatccaactctccgcagacccgtgcagtccttttttttcccctttcccttttggaaagatatgtctgactgacactcccaacctttctccccctcccccctccccgcagtgcgcgaaatcgcatcagtgacgacggccgtcgctcacggtgacctgacgaagaagattgaacgccccgccaagggcgagatccttcaactccagcagaccatcaacaccatggtggaccagctgcggacttttgcctctgaagtcacgcgcgtcgccagagacgtcggaaccgagggtatcctcggtggtcaagccgatgttgagggggtgcagggcatgtggaacgagttgacggtcaacgtgaacgccatggccaacaacctcaccacccaagtgcgggacattatcaaggtcacaacggccgtcgccaagggcgacctcactcagaaggtgcaggccgagtgcagaggggagatcttcgagcttaagaaaaccatcaattccatggtggaccagctccagcaattcgctcgggaagtcaccaagattgctagggaagtcggaaccgagggaaggctcggtggccaggcgaccgttcacgacgtacagggcacctggcgagacctcactgagaacgtcaacggcatggctatgaacctcactacacaggtgcgcgagatcgcaaaggtcacaaccgccgtcgctaaaggcgatctcaccaaaaagattggggtcgaggtccagggcgaaatcctggatctcaagaacaccatcaataccatggtcgaccgcctcggcaccttcgccttcgaggtcagcaaggtcgccagggaggtcggcaccgacggcacccttggcggccaggcccaggtcgacaacgtcgagggcaagtggaaggatctcaccgagaacgttaacaccatggccagaaaccttacttcacaggtacgggcacggttttttactcgttctctcatactcacccttcccttcttttatcttttccccgtttcctgcagcataaattcgcggtagattaatgctcacaaaaaatacctgttcaccaggtgagagggatctcgaccgtcacccaggccattgccaatggcgacatgagccgcaagatcgacgtcgaagccaagggcgagatactagtattgaaggagactatcaacaacatggttgaccggctgtccatcttctgtaacgaggtgcagagagtggccaaggacgtcggcgtcgacggtatcatgggcggtcaggcagacgtggccggcttgaagggcaggtggaaggagatcaccaccgatgtcaacaccatggccaacaacctggtacgtcatctactctctttctgtctctcctcactctctcgtaccgcctggcggttgacgacatgtgttcgagcgactaacacgtcatgacaacagacggcacaagtgcgggcgttcggggacattacaaacgccgcgaccgacggtgatttcaccaagctggtggaagtcgaggcttctggcgagatggacgagctgaaaaagaagatcaaccaaatggtttacaacctcagggacagtatccagaggaacacccaggctagagaggccgctgaactggccaacaagaccaagtctgagttcctcgccaacatgtcccacgagatacggacccccatgaacggcatcatcggcatgacgcagctcacgctcgatacggatctgacgcagtatcagagagagatgctcaacattgtaaactcgctggccaacagcttgttgaccatcattgacgacatactggatctgtccaagatcgaggcgaggaggatggtcatcgaggagatcccttacacccttcgtgggaccgtcttcaacgcgctcaagacgctggccgtcaaggcgaacgagaagttcctggaccttacctaccgggtcgacagctccgtgccggaccacgtcgttggtgactcgttcaggttgcgtcagatcatcttgaacctggtaggcaacgccatcaagttcaccgagcatggtgaggtcagcctcaccatccaaaaggcgacaaccatgtctccccccaatccgggagagtacgccatcgagttcaccgtggccgacacaggtatcgggatcccggaggacaagctcgacctgatcttcgacaccttccaacaggccgacggctccatgacgcgcaagtttggcggcaccggcctgggtctgtccatctcgaagcggctggtcaacctgatgggtggtgacgtctgggtcaagagcgagtacggcaagggcagcaagttcttcttcacctgcgtcgtccgcctcgccgaggaggatatctcattcatctcgaagcagctcaacccttacaagggccaccaggtcctgttcctcgacaagggccggaccgggcatggcgccgagatcgcccggatgctcaaggagctgggtctggtccccgtcgttgtcgattccgagaagagtccggccctagacaagattcgtggccgaggatcggctccgtacgacgtcatcatcgtcgactccattgaggatgcccggaggttacgctcggtcgacgacttcaagtacctcccgatcgtgctcctggcacctgtcgtccacgtctcgctcaagtcatgccttgatctcggcatcacttcgtacatgacgacgccgtgtaagctgatcgaccttggcaatggaatggtacctgctctcgagaacagggctacgccatcacttgcggataatacccgctcgtttgagattttgctggccgaagacaatactgtaaatcagcggcttgccgtcaagattctcgagaagtaccaccacgtcgtcaccgtggtcgggaacggcgaggaggcggtcgaggcggttaagcgcaagaagttcgacgtcatcctgatggatgtccagatgccaatcatggtgagtttttttttctctttttttttttttcggggtaagcatgtgcttcatcccaagactaagttctaacatttctttttcaacagggtggtttcgaagccacaggcaagatccgcgagtacgagcgcagcctcggcacccaacgcactcctattattgccctgacggcgcacgccatgatgggcgatagggaaaagtgcattcaggcgcaaatggacgaatacttgtccaagccactacaacaaaaccaccttatccagactatcctcaaatgtgcgaccctcggcgggcagctgctggagaagaaccgcgagcgggaactcgcgcgcgctgccgatgccgtcacgggaggccgccgtgacaatcacgcgctcgcagctgcttaccagaccgccgctgccgcaagcacgaccgggagagggagtagctgcaacgccccaaccacagccctcaaacccgcgagcagcagcagcagcagcagcagcagcagtagcagtagcagcgacaatggcatcagccgaccttcgctctcgactcgctccgtcaccgcggacgaatcccataccagcggggccgatagtccgacgctggtaacggcggaccaggacgacccgatggataggacacacagcagcctctctgagccaagcatgtctacaacggaatga

SEQ ID NO: 916 - DNA, 1392 bp, Myriococcum thermophilum
atgcgcctcaacaaccttgtctggttaccactctgcgctctcgctgccggtgcgaacacaaacccgtcgataccaaaacgaaatccacaatatcaacacccatctcaggaggtcctcagtgactggcacaatccgcacccacaaggaggtaaacgcccgggaagcggcggcgatggttccgaaggagggttggaaggggaaggaggaggaggcgtatctgccgccctcttctcgtcactagagcgaacctcccgcctcgtcgacatcacctattgcgtcggcacggcgggaaccggcatcatgccgcccttctcgtgcctctcgcgctgcaaggactttccctccgtccggctggtccggacctggaacacgggcatgcttctgtccgacagctgcgggtatattgccgtcgaccacgggcatgggcacagtcacgagcgccgcacgccgtcctcggagaaggagaaggaggaggtggtggtggtcccggtagtggcgggggataggggaggaaccaaggagatcatcgttgccttccgcggcacctacagtctcacaaacaccattgtagacctaagcaccgtgccgcaggagtacgtcccttatccggcaccgcctgaagatggagacggagatgggaacgacgggggtagtggtaagaagtgtcacaactgcaccgtgcacatgggcttcatggcctcgtggcggaacgctcgcgaggtggtgataccggcgctcaaggccgcccgcgagcagtatcccgggtaccgggtgcacctcatcggccacagcctgggcggggcggttgcggcgctcgcggcgctcgagcttcgggtaggactcggctggcaggacgtggtcgtcacgacctttggggagccacgggtggggaacgcggagctggccgactacatcaactgggcgttcgggctcggggacgacggcagcgccaacgaggatctcgtataccgccgcgtcacgcacgccggcgacccggtgccgcagctgccgctgagcgagtggggctaccggccacatgccggggagatctatatcagcaaatcggacctgcctccagcaccggaggacctgaggctctgccacgggaacaacgacccgcggtgtctgagcgaggacgagacgccggattggctaagctggctcttcgggcgaacgaggagcggcagggtacaaggagaggcagaggcactatcatcaggcttgagccgatggctcccgacgcggtttcaactgtggcagttgctgttcgcgcaccgagactacttctggaggttggggctctgcgtcccaggaggagacccgactgactggggaaaggacaggtacaacgtgactgttgacggcgatcaggatgagatgcaagatttatga

SEQ ID NO: 917 - DNA, 2387 bp, Myriococcum thermophilum
atgtacgcaaccagcctgcgctacgccgcgcgcaatccgggcggcaatggcgccaagtgcggtccgttgcgaactcactgccgattcttgagcacccacatcgccaacccgcaccgatcgctgcgacataccccccccaccccaccataaccggcgctggctagcaccgacgaccacggcggcattgccattattgatctcatcattatcgtcatcgtcatcgtcatcgtcgtcgtcatcgtcgtcgtcatcgtcatatttaccgccccaatcaaggagtcaacaacggcggcactatgccgtgggcaacatatatcacccgccgcagaccattgccgtgctcggcggtggcctgaccggtctcaccacggcgtggtacttgacgcggttccttcccgaggcaaaaatcaccatctacgaggccaacaagcggctgggaggctggatagagacggaaaaggccgaggttaagacgcctgacggccaggtcggcaccgtgcattttgagcgggctgcccgcatggtgaagccgctgtctgctccggggcgtgtacccagatgggacgacctggtattttacgatctggtgcgtcttactcggcatggaggttccctgtgcctccgaccctcctcctttcgggtgtatatgacatagagaggtgatgctgaccacctgccacggctgaggaatcattatcgtcaaacaggtcaccaagctcaacctgacggaccagctcgtgtgggcgaagcaggacgaggaggccgtctccggtttcgtctactaccccgaccacctagtcccgcttcccaaggtcaccatacggctttccgaccccctcggttctctccggcagctggccggcctcgtctcgctcctcttcgaacccctctttcgcgatctgatccccgccatccccaacatcttccgcaccaggaatgaccccctcaggaaggacctgttccacggccgccgggacatgtcggtcggggagtactacgcgcaccggctggggggccccgccgtggtggacaagctcatgtcggccatggtgcacggcatcacgggcggggacgtgtggaagctgagcatggggagcggctttctggcggaccagctggtgcccaccgacgacgagcccatcaccaacgtccccgtgcgcagcgtcgactacgagatgatgctgcagctggcccgtgacaaggccgtcttcgacctggcctcgcagcacctcgacacgaacgccctctggttccgcggcggcttcagcaccctgaccgacgccctggcggacgcgctcaagaagaaccccaacgtctctctcgtgacgggcgagtccgtcgttcgtgtcgagtacatggaaaacaaagataagattggggtaagtttatctcttcttcttcttcttcttcttcttcttcttctctgttatttgtcataaccgcgtcctaaccatctcgcccccacttctctttctgttcttttttttttttctttttaggttctctcaacgaactccaccgaggggaaacccgtcttgtacgacaaggtcgtctcgaccatccctgccaagaagctacacaagatcaccgacgggaagcttccttcgctcaaaaaatctcccgccgtcagtatcatgctcgtcaacatctggtaccccgtcccgcgtgccaacttcccgtacaacggcttcggttatctcatccctcaggccctcccgttcgagcagaacccggaatgcgttctcggtgtcattttcgactcggaccgcgagttccccctcccgactccgtccgacctggatccaatcccgcgtgggtccgacacgatccaaggcaccaagctcaccgtcatgatgggcggccactactacaccgactggccgccgcacgccatggcgcacacgtaccgggccaagaaggcggccctcgccgccgtcgagcgccacctgcgtctgtcgcccgagctcacggaacaggcgcacgcatcggccaagctctgccgcgactgcatcccccagcacgtcgtcggccacgccaagcgcatgcgggccgcccacacggagctcgagctggccttccggggccgcctcgccgtcgccggccagagctaccagaacccgggcgtgctcaacatgctgcgcgccgccagggacgtggccgcccagatcgccggccacgaggaggagcacggcaccgccgccgccgacgactggcccgtcggcgacaccggcctcgagcgcttcacccgccagcccaggtacctgtccctgcagaggctcatgctgcccctgcgctacggcagcgacgcctttgtcgacgagtccggcaaggtcaggatgggggacggtggcggcggccccttgggcggcgctgggggcgatagttag

SEQ ID NO: 918 - DNA, 1987 bp, Myriococcum thermophilum
atgtggtcgccgtcgctctcttcgttttctgttttgttggctgcggctttgcaacccgtcgcggcaatctggccagcaccccaaagtttgtccacgggcagcgaggttctgtacttgcatcagaacatcaagatcacatataatggagaatccgtacgatggtcttcctcttcttgcccttcttcattttctcagtcttcccatgaggtatgctcagacaaggaggtggcggtggatgctaaacaatatctgcaccaacagattccgtacacgtacggatacacgcccagcgagttgaccagcaaggaggttgttcaggcaggcatttcccggacgctcgcgggcatctttgagagcaagtttgttccttggaagctgcacaagcccgggtccaagtgggagcccgatctgtccgagagtcagcagtggatcgagacgctggagatcgtccagacgggcaaggataagcccagtgccttcaagcctcttgccggccaggtggacgagtcgtacaatctgacggtgagtgccgagggcgaagccaagctcacggccgtctcgtccatcggtgtgctccgcggcctcgagaccttctcgcagctcttctaccagcactcggccggcacgttctggtacacgccgttcgcgcccgtgtcggtgcaggatgcgcccaagttcccccaccgcggcgtcttgatcgacacggcgcgcaacttcctccccgttcccgacatcctgcgcaccatcgacgccctggcctggagcaagctgaaccggctgcacgtccacgtgaccgactcccagtcgtggccgctcgtgatcccttctctgcccgaggtctcggagaagggcgcctaccacccgagccagacgtattcgcccgaggacattgagaggatccagaagtatggtgccgagcggggcgtcgaggtgtacttcgagatcgacatgccgggccacatcggagtggtgtcgctgtcgcacccggagctgatcgtggcctacaacctgcagccgtaccagtggtggtgccaggagccgccgtgcggcgccttcaagctcaacaacacggcggtcgatgagttcctggagaagctgttcgacgacctgctcccgcgggtggagccgtactcggcctacttccacctgggtggcgacgagctcaaccggaacgactcgatgctggacgagggcgtccggtccaacgacaccgaggtgctgcggccgctgctgcaaaagttcatcgacgcccagcacgggcgcgtccgcgcggccggcctgaccccgatcacctgggaagagatcccgctcgagtgggaaatcgagctggccaaggacacgctcgtgcaggcgtggctgggcggcgactcggtcaagacgctgaccagcaagggtttcccagtgattgacagcaactataacttctgggtaagtaattcttaaccccttatcttcatctctcgaaactcaagccaagaaaacactgcttgcaaaccttcacttcctcccctccccgcaactacttctcctactctcttgggctaacattcaatagtacttggattgcggccgaggtcagtggctctcgtgggggaacggggaggcgttcgcccagggctatccgttcaacgactggtgcggtccgaccaagtcatggcagctggtctaccagcacgacccgacggccgggctgacggccgaggaggccaagctggtgctcggcggcgaggtggcgctctgggccgagaccatcgacgcagtcaacctggacacgatcgcctggccgcgcgccagcgtcgccggcgaggtcctctggtccggccggatcgacccagccacgggccagaaccggagcgccgtcgacgccgccccgcggctcaacgagttccgcgagaggctcgtcgccaagggagtccgggcctcgcccatccagatgaccttctgcactcaaggaaaggcggaggagtgcgagttcattgttgcttga

SEQ ID NO: 919 - DNA, 1431 bp, Myriococcum thermophilum
atgttatccttaaaccagggatggagaagggcagcagccacagcgctggctctgctaagcagtccaacattcgcccagacttggtcggcatgcaacccgttaacatcaagtaagttgccatcccacatccctttgatccgggcaacccagccggtctttctcccttcctccccctctctctctgtctctctcgtagcccatgctgacatcgagccaagcaaattgcccgccagacacggcgctgggcatgaccataaatgtcgacttcaccgagggcgaggtcaactccttcgtccctagcgggggggagccgacctacggtgaggacggcgtcagcttcaccgtcgcctcctccggtgacgcgccgcagctgacgagcatcttctacatcatgttcggccgcgtcgagttcaccatgaaggcggcccccggcgccggcatcgtcagttccctcgtgctgctctccgacgccctcgacgagatcgacatggagtggctcggcgccgactcgagcgaggtccagaccaactacttccgaaagggggagaccactacctacaaccgcggccagttcaacccggccccgaacaaccaagccgagttcatcacctacaccgtcgactggaccgccgaccgcatcgcctggtacgtcggcggcaccctcgtgcgcaccctgaccttcgacgaagccaacggcgagtacccgcagacgccgatgcaggtcaagttcggcgcctggtccggcggcgacccgtccaacgcgccggggaccatcgagtgggcgcgcgggccgaccgactactcgcaggggcccttcaccatggtggtccggtccatctcggtgaccgactactcgaccggcaagcactacgtctacggcgaccagtcgggcacctggcagtccatccgctccgagggcggcgagatcaacggcaaccagggcgccgccggctccgtctccgtcaccgccagcgcccccgccccgaccgactcggcctcgcccaccatcccgcccggcggcatcatcggcggcggcaccgctgccgacgggagtcctgcccccacccgcaccgtcggatccatcccggacggctgggtcatgacgtccgagggcaaggtcgtacccgttggctccagcactgtaagtacgtaccaactattcatcacacatgtatgaaaaaaagggggggagagagagagagagaggagaggagcgcggcggcccggggggggggggaagcctttatctctctctctttctctcctttctaaagacctccttttttttttcattcattcatcttatcacaacaacgaatgtatatatgtatgctaacaacacccaacgatccagacaccccccggctcacaaccctcctcctcccgctcgccggggctctctacttcgccctcaacggctggccccggtga

SEQ ID NO: 920 - DNA, 1074 bp, Myriococcum thermophilum
atgtccctcaggccggtcttcctcatcacgggcgcctcgtcgggcttcggcgaggccatcgcgcacgaggctctcttgcgagggcaccacgtcatcgccacggctcgcaaggccgccaagttgggcgccctgcggtcggcgggggcagccgtgctcgacctggacgtgacgagcgacgaggcagcgctggcggacgtctttgccaaggcacacgccttccacgggcgcatcacgcacgttgtcaactgcgccgggtatctcctagagggagctgttgaggaggctaggtgagttcctcttcccgttttcgctgttttctttttgtcttttttttcaaccctcggtggggccagaaattgatgatatgtgtggccaccaagcgccaaggaagcattcgatatcttcaacaccaacgtgctggggacatgcaacatcgcccggactgcggcaccgtacctgcgtgaggcggccaagacgcccgggcagacggcggcactggcgactttcggatccctaggaagttggcggtcggtgccggcagcagcctattgtgagttctctcggttccggaccggctgtgggccggataaagcggttctctatggcgttttttatgctaaccaggcgtcacaccgtcgtgtcacagactgcagtaccaagtatgccgtgagcgggttaaccgagggccttgcaaaagagctgcaaccgtttggggtggacgtctactgctttgagcccggatacacacgcacggggttcttgaagaacggggcggcggatggaggggaccaccgggtcaagacggcacgccagatggatgtatatcgggggactgacgtggagaaggcgcgggccgccttggacgtctacaacggaaagcagcccggcgatgttgtgaaatgcgcccgggtcatcgtcgacgtcttgaccaaggagggcgttgccaagggaaaggatgtgccagtaagggtcgtcctcgggtctgacacggttgagacggtgcggaccaagtgcaccgagacgctgaagcaggttgaggcgtggggggacattgccgcgtcagttatgcactga

SEQ ID NO: 921 - DNA, 983 bp, Myriococcum thermophilum
atggcattcaactacaaatgcatccttttgatcggtgccacctctggcatcggcgcggccatggccgataagttggttctcgagggtgctaaagtcattgccgttggtcgtcggcaggagaggttagatgcctttgtgcagaaacacggcagcgaaaaggcaagcggaatccgttacgatatcaacgacagggccggtatggacgcttttgttgaaaggtacctaagaaaccctctcatgctctcccctttctctttctccggaactgacacgacgtagtgtcgtcacccagtatcccgacatcgactgtgtctttttgaactcggggttccaacaacagatcaggctgtcaagacccgaggaggtcgatctggatgctttccaccaggagatgagcaccaacttcagccggctggtcgacttgtccatcaagttccttcctcacctcaagcggaagcgagatccgaccgccctggtgtttaccggtagcctgcttgctactatacccgccgtcacggtcccggcgtactcggcctccaaggccgccctgaacgcgtacatcatgtgcctccgccgccaaaacagggggtcgtccacaaagattattgagatatggcctccttctgtacagagtaagttccccaactctcacggcctttgtgcttccctactcttcccacccctctttctccgaagcttcctctttttaagtttcgttgcggccgctacgtggctgctgctaaccttttcccccttcggtcccagccgagcttcatgattacatgggcccggaagtcgggaggaagatgggcatgcccgtacaggagttcgtcaacaaggcgtgggagcagctggcggcgggatccgagctcgtcgctgttggtcctctcgcagcccaggcaagtttcaaggacatgctggagactcggcacacaactttcgagaacatatcgagcatcatgttgatgcactatgagttgtga

SEQ ID NO: 922 - DNA, 1449 bp, Myriococcum thermophilum
atgagacacctcttcttcacttccctcgtcctctcggccctcaccgccacccaggcctacaccccactatccgacgcctccctgcgccgcttgccccggctgttctcttcgtcatcatcatcaccatcatcatcatcatcatcatcatcatcatcatcatcatcagagaaccagccagacggcttcgacccggacttcgaccctacgcgcggggccctgctagcaccgattttacggccgcgcgtgccgggcacggaggggcacgcggccgtgcaggagcactttgccgccttcgtacgcgaccggctgcacggcgggggcggtgacgggggtgatggtgatggtgatggtgatggtgatggggatggtggtggggggtgggcggccgagtggcacaacacgacgtcgaccacgccggcgacgggggaccggcccgtgcccttccgcaacctgatcctgcgacgggacccgccgtggacgacggggtcggggtcggggtcggggtcagggtcgcgggagggcgacgtggcgcggctgaccctggcggcgcactacgacagcctctaccgcccggagggcttcgtgggcgccatcgacagcgccgtgccctgcgccctgctgctctttgtcgcccgcgccgtcgacccggccctggcccggcgatgggaggctatcgagcggtccggagaggccgggctagagagtgaggagaagggcctacagatcttgctgctggatggggaggaggcatgggtccagtggagcgagcaggatagtctgtacggttcgaggtgagttcatatgtatatgcaaacatgcgtttccccctttgtcctgtttcgtttgtcgtcatgctttttatatggttgccattgcaccttgcttcttagtagcttcgtggggctgacacggactggaaaaaaaaaaacatttagggccctggccgagtcatgggagaagacgcggtacgatgatggcagcagcttttccacaccgttggaggccatcagtctatttgttctgctcgacctgctgggtacggccgagccaaacattccctcatacttccccaaaacgcactgggcgtaccagaacttggccaagatcgaagagaggctaaggaagctggacttgctcgagacgaagccgaggaaaccttttttagccgagagtcagaaggaagcaacgcggttcagaggcttcgtgcaggatgatcacatcccgttcatgcgtcggggtgtcgatgttctgcatatcattcccacgccatttccttcggtgtggcataccatggatgacgacgcggcccatcttgatctaccaaccatcagggactgggccaagataatgacagtgtttgtggccgagtggatggacttggaaggttactttcctgaggtggaaccatctgacgcgggagacgagtctacggaaaaggaagagctgtaa

SEQ ID NO: 923 - DNA, 2236 bp, Myriococcum thermophilum
atgaagcaagctgccttcctgtgtgcccttgccggcctggcgctggccgcacccgagtatgccgtccccaactcggtcgagagtaacgacgtgttcgacggttatgtgagctacagcatcgagtttgcgagctttccggactttgcaggtacgtacacgtcggcctggctttttgtctctacccggccgcctgctcaactttaccaggaaacaagtcgaacccaaacacctactcggatatcctcttggataaccttggaaagcttcaggggcacaagccctacatacgtgtcggcggaaacacccaggattatgcactttataacgagtccctgccctacgccttgaacgggacaatcgacccgaaccgggccgtagattatcctaccacagtgttcattggtccctcatacttcgagtcctacgacacctggaaggacgtcaagttttcccacggctttaacctcggcctaggcgggaacaggtcaagtggatggcaaactttgctggataccgtgccattggcttgcaaggccctgggcactggcaagttctacgtcttggaatatgggaacgaaccggacttgttctctacctcggctcagggaccagtgagacctgccaactggaccgagacgacatacgtatcccagtggtataacggtaccaggcagatcaaggccctggttcaggagcattgtcccgagatgctggagtcgggcaattatggctacatggcaccatcttttgccggtgttaacaatcacctgaaggagcctgcagcctgggcggctgggctcgacggagatgaggacatcaagctattttccacccacaagtaatgtctcctgaaccgcttgctcccccagcagtccctgctgaccaattccttccccaaagctacattagcggcgctacgtctccgggcgtgactcttcagggcacattgatgaatcacgccgtgaccaaacgctcagtcgacgcccatattgtggagtataacaaaatcatctcgcaatcttccgccccggtacctcccctgatctttggtgagaccaactcgctgtttaaccaaggccgtcctggcctgtccaatacattcggcgccgctctctggggcgtagacttcaacctctactctgcctctgtcgggttcaagcgtgtgcacatgcacatgggcacgaatttccgggtatgtgtgttctacatcattgcctcgcatgctcttctttgctgagacctgactaccataatccagtacgtcgcctggcaacccatcgaaaccgacaaagcgaccataggtaccaaagcaccctactatggttccatcgccgtagctgccgccctgggcccccgtcctgccactgttcacgaaattcctctatctagccagatctctggtgaagagctccagccggaatccgcatacgcaatctacactgagagtacgtttccgtgcttccctttcaaaaccctcctcacctccattttcttttcataacccttctcgcccttcctccttttgcgccctcaaatcggccatcgtgaaagggaaaaaaaaacgaaaaaaggcagaaacgaaaacgtgaaaaaagaaagaagggggaagggagggtgaaagagaaaatgctcgagaaaaaaaaaagaagaaaaaaacagctaacattcatttccccagacggcacggtgctctcccgcctgatggtcctcaacctccggtcgtacaacacgacggtggacggcgcgggcttggagccgctgccggagccgccggcgcgcggggcggtcgagtacgcgttccggctcgagggcgtgccggcgggcgcggccgtccccgtgcggcgcctggccgccaacggcagcgacgccatcacgggcatcacctgggacgggtggagctacagccacgacctggacggcggccgccccgtgcgcctgcccaacgtgaccgacacgtccgagacggagcgcgtcgttgtcggcgaagacggcctcgtctccgtcaccgtcccggactcgagcgccgcgctgctggatatcgaggatgcaaaggtagggaagggaaaaaaaaaaggtaagggtaaaggaaagggtaagggaaaggcgaggaggatgcggtggtgagcagacaggagggggggggggggggggggaaggtttgaggggcggtggtgggagaagagttgttgatcacatttcatgaataacgaaggcgatcaatgcccatctttgctga

SEQ ID NO: 924 - DNA, 420 bp, Myriococcum thermophilum
atgcttcttccggcctttactcctcttctcgctctaacggccactctgtttggcactgtttcggcaaccccgatcgagtcgaaccgcaaccctacgaacctggcacctcgagcctctggccgctttacttggtataacccaggcctgggtgcttgcggcaattggaacggcgacggcgacctagttgctgccctcaacgctgccgacttcgacccttatacacctaacggcaatcctaacaacaactccctttgtggcagacgcttgcgcgtctcctacaatgggaagtccgtcgatgtcaccgttgtcgaccgctgcccgacttgcaatgccggcgatctcgatctcagtccggctgctttcgaggcgcttgagcctctctctaccggcgtgatctacggcagttgggactggatttga

SEQ ID NO: 925 - DNA, 1297 bp, Myriococcum thermophilum
atgtcaccagccaagcatctgttggccgccacggcggcgctggccccgggcgcgctgggcgccaacttgctcgtgtctcacttctcgggcaccgtctacagcctgtccttcaccaactccaaccagacgggcacgctgtccgtcacctccgagacggatggctgtggcaccacgcccgcttggctgcagctctattccgacattggcaaggtctactgctttgacgagtcgtggtttggtttcggcacgagcgccgagtacgagatcggcgaagacggcagcctcactcttaccggcaccctgcggaccggcggcaactcggtccacggcgccctgtacggcggtgccgacggcaagggcttcatcgccacggtcgagtagtacgttatccccctcccccccgccttttagtttcgtccttgagggagtcgagaggaaagagagagaaagaaaaagagaaagaaaaagggctgacggctatacctcggacagcaccccctcgacgctgacgacttacaagacgccctccaacggtggtgagcagcttgcgctggagaagttcaccctggaacagccggggccgcacccacgtcaggacgcgccacacccgcacgaggcgtacgtcgacccgacgggcaagtacatcctcgtgccggacctgggcgccgacctggtgcgcgtgttccggatcaacgccgagacgggcgagttgacgggctgctccgagggccaggccgacccgggcgacgggccgcgccacatcaagttctggaagaacgccgagggcctgcagaaggcctacgtggtcaacgagctgggcaactcggtctcagcctgggacgtcgagtaccccaccgacgaggtatccgcggacggctgcctggtgctcaacaagacgcagacggtgtcgacgtacgcgcccggcacgagcggcgggccgaacaccaaggcggccgagatccgcatcgtcgacaacttcctgtacgccagcaaccgggccgacgagaccttcggctcggagcaggactcgatcgccatctacaccattgacgaggccaccggcgagatcgcctggctcggggctgccaactcgtactcgtactacccgcgcaccttcgagttcaacaccgacggcaccctcgtcgccgtcggcggccagacctcgtccaacgtcgccatcatcgcccgtgacccggagacgggcaagctgggcgagctggttgctaacatcgaggtcggtcagaagggcagagccggcgaggaggacggtctgagcgctgtcgtttgggtgcagtga

SEQ ID NO: 926 - DNA, 1461 bp, Myriococcum thermophilum
atgaaggttcaaaccgtcgtttcggcggctgcgctctgcgcccaccaagccgccgcccagttcgcccaagccgccatgatgcggttccagtgttctcagctcgtcatcgaacgtctcgaccctctggtcaaccccggccttattggatctccccatatgcaccagattgtcggcggtaactcgtttaatgcttctatgacccctgtcgagtatgatccgtccgagagatccacttgtaccacctgctcgttctccgaagacttcagcaactactggacagccaacatgtacttccgcgcaaagaacgggagctacaagcgcgttccgcagatggttaacttaggattgtctggagagggtggtgtgacagtgtactatatcccgagttgcaagtacccccagaaacactcgagtttcagtagagttttcttttttcttttctttttttctttttttgccaccgcccccaacacaagttacgggagttccggatattcgaaccaaatgggaatgactctgaagaaaattcacggacttctagacgtcgatttattgagctaacaccgttggctggtatcagatgacgggaagaccaaagtcacggccttcaaacctgggttcagaatgttggttggcgacgcggctctccggacgcaagacggcatgcagaaacagatctgccaccgctgcgagcacaatatcgagcagaatccattcggcggtgcgccctgcacgggtaacgatacagctgggttcccaacccaaatgtgccccggcggcatccggtcgaccattaccttcccaacgttggtctccgccacgcagagttacggctttatgacaaatttagactgacacgagccgcagatgctgggacggcaagaatgtcgacactccggaccacaagagccacgtggcgtacccggaaaccggcagctttgagacgaccggcccgtgcccggcaagtcaccccgtcaggttgccccagctcatgtacgaagtcatgtgggacacgcgccagttcaacgatccggagctgtggccggaggagggccagccgttcgtgtactcgatgggtgatgcgtaagtgttgggccaactctcacattgttctcttctgcaagctagtacagacggttttggttaacgtttcttgtttgctaggactgggtatggtcaacacggtgactacatcttcggttggaagggtgatgcgctccaacgcgctctcgacgcccgctgtaccggcgatagatgctcggaactcaagacacagagcgtagaggaggctttggcgtgtgtgaaggaacagacagtcaaggaagaggtcgacaaatgtaagtttgaccgacctacgcgcctctgcccaatcaacctcgagtcaaatcgacaagtatagaatacactaacattctggcagggctcgattctctccctggcggagtgcaccctgatatgtga

SEQ ID NO: 927 - DNA, 1444 bp, Myriococcum thermophilum
atgaagtattccactctgtttctcgggctcctggcccagggagccgcggcgcagcagatgatccgcttcggctgctcgcagctcgtcgtcggccgcatggaccccctggtcaacccgggcgtgccgcagtcgcctcacgtgcaccagatcgccggcggcaactcgttcaacatctccatggacccggagacgcacgacctcgtccgcgactcgacctgtaccacctgcaccttctccgaggacttctccaactactggaccgccgtcctctacttccgcgcccgcaacggcacctacaagcgcgtgcgccagttccccaacgtcggtttgcgcactgacggaggcctcacagtgtactatatcccgccgtgtgggttgcccgtccttgttctgtttgcctggttgtgtatatgagtatcaggagatgagacagtagtgtcgtgttggggaaaacaaaaagggggtggggccggttgtggatcaagactgacatgagatctcgtgtgtccagatgacggcaagagcaaggtgacggccttcaagccgggcttccgcatgctggtgggcgatgcgtcgctgcgcaaggaggaggggatgcaaaagcagctgtgccaccgctgcctcggggccggctacgaccagggcggcgccccctgcacgggctccgactccaagacgctgccggaccacttctgcgagggcggtatccgcaccaccgtcactttcccgacttgctgggacggccagaacatcgacagcccggaccacaagagccacgtcgcctacccggagaccggctccttcgagactaacggcccttgcccggccagccaccccgtcaagctgcctcagctcatgtacgaggtcatgtgggatgtacgtagaatcatgcccttctactttcttctgtccctcccccacaatatgactcttgctcggaacggtccaggcttgtgactaacgtctgaaaacttgacagaccacggagttcaacgaccccgagctctggcctgaggatggctcccagccgtttgtctggagcactgacgacccgtaaggatcatcctccctcagggatagataaaatgatgtgatgatcactgagactaatcatgataaccttcaaccacaacagggtcggctactctcagcacggtgactacatgttcggctggaagggcgactccctgcagcgggctctcgacgcccgttgcggcaatgccgtctgcaaggagctcaagacccagacgtccgaggaggccatgcgctgcacgctgccgcagtacgtccccgaggacgtggatggatgtaagtctttcctccctgttgcggaagatgggaactgttcgaaagaagtcctcgatgctgattggtgtgctactcacaaacagggctggatcacattcctggtgtgattatcgatgacggaaagaagaacaactaa

SEQ ID NO: 928 - DNA, 2553 bp, Myriococcum thermophilum
atgcggcgtccctcgttccagtcactccttgctgtctcggcgctggtctcgggcatcaccgccagtgcagacccggactaccaaggatacgatgcctcgaccacctttgtcaccaagacgctcactacttcttcgtattcctctactgcttactccaactcgacgaccaagaccctatcgtccaccagctctcaaccacccaatcccaccagcaccgcttgtgctcccgcctgcactgacttctggctcgaaaagatcaagcatcagggtgtagcccccttcgccggccggggctacgaagtgttccgcaacgttaaggactacggtgccaagggagacggcgtctcagatgacaccgaggccatcaaccgggccatcagcgatggcgagcggtgcggtcccggctgcactggcagcaccaaaacccccgcactcgtctacttcccgccgggcacgtacatggtgtcgacccccatcatcgacttctactacactcagctgatcggaaaccccggctgcttgcccgtcatcaaggcaacgtccgacttcgagggtcgctgggtgctcgacaccaacccgtatggtgaatcaggtctggcctggggcgccaccaacgttttctggcgccaggtggccaactttattatcgacacgaccgacgtgccggccgagacgctaatctcgggcatccactggcccagctctcaggcgacgtcgctgaccaacatcgtcttcaaatcatcatcggccaaggggacgcagcaccagggcctttttatcgaggagggttcgggcggctacatgggtgacctcgtcttcttcgggggcgcccaggccatgtccatcggtaaccaacagttcactatgcgtaacatcacagtctacggagccaagacggccatcgagcagctgtggtcgtgggggtggacgtaccagggcgtgagcatccacgactgcgaggttggcttcgacttcacagccatggtcgacggtgacctcaaggtcgggtccatcaccatcttcgacagcgagatcagcaacacgaaggtcggcatcaagtatggtgccgccaacgccaccagccccgatgtgcccaacaatttcgtctttgagaacctgcggctcgacaatgtgacgactgccatccgggggcccaagggcaccgtcttgcccggcacgtccggccagaccgtcatcgaggcctggggccgcggccacgcctacacgccctcgtcgtcgggccccaccaccttcgagggtcccatcaagcccaacaaacgcccggcctcgctcgtcgtggctggggatgcttcctcctcctcctcgacccccatctattaccagcgctccaagccacagtacgaggacgagccggtgtccgagttcgttagcgcccgggagttcggcgctcggggcgacggcgtcaccgacgataccctcgcgctcaacatcctgtttgcctgggcggcggcggccggcaagatcgccttcctcgacgccggcatgtacgtggtcacgcggacggtgcggatcccgcccggatcccgcattgtcggcgaggccttccccgtcatcatctcgacgggcgatttcttcgcggacgagtcggccccgcagcctgtcatccaggtgggccgctccggcggcgaggccggccggatcgagtggtccaacacgatcatctcgacccgcggctcgcagccgggtgccatcctgatcgagtacaatctcgactcctcgtcctgctccgaaccgtctggcctttgggatgtgcacgcccgcgtagggggcttcgccgggtcggagctacagctcccccagtgcgccaagacacccgagacggtcattacgccagagaacctaccacgcgaatgcgtggctgccttcttgacgatgcacatcacacaacccgcggccggcctgtatatggagaactgctggctgtgggtagcggaccacgacctcgaggagggcgccgacaaccagcagatctccatcttcgctgggcgcggcctgctggtcgatggcacgcgtgggccgctgtggctggtgggcacgggcgtcgagcaccaccagatgtacgaatactaccttgccggggcggccaatgtgtacatgggccagatccagaccgagacggcctactaccagcccaacccggacgcgcggctgcccttcgcatccgaggtggaggcctaccacgacccggtcttcgccgagggcgagtcgggctggggcctgcgcgtcgtcgactcggaggacgtgctcatctacggcgccggcctctatagcttctttgacaactacgacgtcaactgcagccagattggcgagggcgcccgctgccagaagcgtatcttcagcctcgagaacaccagcggtggtggtggtgatggcaccggcaacggtaatcgcaacgtgcgcctgtacaacctcaacacggtcggcaccaacaagatgatcacggtcgatggtgtggatgtggcaaactacgaggataatatcgacggcttcgtccacaccgtcgcgctctttgagctggatgaagagtaa

SEQ ID NO: 929 - DNA, 1017 bp, Myriococcum thermophilum
atgaagtcatttaccccggccgtgttcgccgctgggctccttgctcagcaggctgcagcccactccatcttccaacaggcgggcagcggttcgaccgacttcgacactctgtgcacccggatgccggtcagtcaccacgagacctcaccccctggttattatctgccaaaaagaactgtcgccggcgggctgacattttctgaataatagcccagcaacagccctgtcactagcgtgaccagcgccgacatggcttgcaacgtcggcggcacctcgccggcgtcgggcttctgtgaggtgaacggtatgggttcccgacctttagacccgcccctgttttgattgatttcacgatttgtctaacacatagaccttctttcttttctccctaacagctggcgacgagttcattgtcgagatgcacgcgcaacccggcgaccgctcgtgcgccaacgaggccatcggcgggaaccacttcggcccggtcctcatctacatgagcaaggtcgacgacgcctctacggccgacggcgcctctgccgaatggttcaaggtgtccgagttcggctatgactcgagcacccagacctggggcaccgacaagctcaacgagaactgcggcaagtacagcttccagatcccgagccacatccccgcgggcgattacctcgtccgggccgaggctattgctctgcacactgccagccagcctggcggcgctcagttctacatgagctgctatgtaagttctgggaactcttttttgccccgccccttcatccttcttccaccaccctcttcttgttaggatcatcatgtcgtctcacttactgattctcttcctccaattagcaagtcaaggttgccggcggcgaaggcggccagctccctgctggcgtcaagatcccgggtgcctacagcgccaacgaccccggcatcctcgtcgacatctggggcaacggcttcagcgagtacgtcattcccggcccgccggtcatcgacagcagctacttctaa

SEQ ID NO: 930 - DNA, 1679 bp, Myriococcum thermophilum
atgtacgccaagttcgcgaccctcgccgcccttgtggccggcgccgctgctcagagcgcttgcaccctgacgactgagaaccacccttcactgacgtggtccaagtgcacgtctggcggcagctgcaccaccgttcagggttccatcaccatcgacgccaactggcggtggactcaccagatcgatagcgcgaccaactgctacgagggcaatgagtgggacacttcgtactgcgatgatggcccctcttgcgccgccaagtgctgcgtcgacggggctgactacagcggcacctacggcatcaccacgagcggtgacaccctgagcctcaagttcgtcaccaagggccagtactcgaccaacgtcggctcgcgcacctacctgatggagagcgagaccaagtaccagagtaagtcacgggttcccctctcctacccgggcttccgggaggtccccggtgatgacgaccaccagcctgctgacgtgcatgacgcctaatagcattcgagctcctcggcaacgagttcaccttcgatgtcgatgtctcgaacatcggctgcggcctcaacggcgctctctatttcgtgtccatggatgccgatggcggtatgtctcggtactcgggcaacaaggcgggtgccaagtacggtaccggctactgtgatgcccagtgcccccgtgacctcaagttcatcaacggcgaggcgaacgtggagaactggcagagctcgaccaacgatgccaacgccggcacgggcaggtatggcagctgctgctctgagatggacgtctgggaggccaacaacatggccaccgccttcacgccccacccctgcactatcatcggccagtcgcgctgcgagggtgagacgtgcggcggcacctacagctcggaccgctatgccggcgtctgcgatcccgacgggtgcgacttcaacgcgtaccgccagggcaacaagaccttctacggcaagggcatgacggtcgacacgactaagaagatgacggtcgtcacccagttccacaagaactcggccggcgagctctccgagatcaagcggttctacgttcaggacggccaggtgatccccaactccgagtcgaccatccccggcgtcgagggcaacaccatcacgcaggactggtgcgaccgccagaaggccgccttcggcgacgtgaccgacttccaggacaagggcggcatggtccagatgggcaaggccctggcccagcccatggtgctcgtcatgtccatctgggacgaccacgccgtcaacatgctctggctcgactccacctggcccatcgacggcgccggccagccgggcgctgagcgcggtgactgccccaccacctcgggcgtccccgccgagatcgaggccgaggcgcccgactccaacgtcgtcttctccaacatccgcttcggccccatcggctccaccgttgccggcctgcccgacggcggcgacggaggcaacccgcccgtgagctcctccaccacctcggtgccttcgtccaccaccaccactacctcctccgctaccaccaccccgaccggcggcgctggcacggcgccgcactacggccagtgcggtggcaatggctggactggtcctacccagtgcgagtccccttacacttgcaccaaggtgaacgactggtactcccagtgcctgtag

SEQ ID NO: 931 - DNA, 1313 bp, Myriococcum thermophilum
atgcttcgccatctcaacagcctcctaatcttcttccgcctccgccgcgccgacccctgggatccccgaacgccgctcgactggttgctcgcctcacccctccaatggctcacctcgctgctctaccaccacatcctgctccccctccgtggccggcccttccatcctccgcctcgtcgcagcagcagcagtagggggagaagggggaggggcccgatccgggtggtctgcgtctcagacacgcacaacctcgtgccgggtcccggcgggcgctccggagccatcccggacggcgacctgctgatccactgcggcgacctgacgatgggcggcacgccggccgagatccagcgccaggtcgactggctgcgcgggctgggccaccgctggaaggtggtcgtcggcggcaaccacgactcgtggctggacgagcgggtgaggaagcagatgagccagggagggcaggtggaggagggtaaggaggaagtcgtcatcgactggtcggggatcgagtacctctgtgatagggcggtcgagctcgagtttgacggcgggaggcgcctcaatgtgtatgggtttggggcggtgccgtattgtggtgaagggtttgcgtaagtgtcttctctcttacacctccctttcccaagacgagggggaatgggggaatggttcaatggatgtaaagagaccgagatgaggccgtactgacacgggtaaacagatatcaatatgacagggacaagcatccatggcagggaaggatcccggaggagacggatgtcctagtgacgcacacgccaccggtgagtacatgccacattcactgtcaccctcctttttttttttgcggatatcacagaccaagaaggaaggggacatttggggaggagggagatagagagaaaagagagagatggactgacgaacaaaccccgtgcatgcaggctcaccacctcgacctcggcctcggctgcgccgggctgctggacgaggtctggcgcgtcaagcccaagctgcacgtcttcgggcacgtccaccacggccacggcaaggaggccatctactacgacgagtgccagcgggcatacgagtcgctcatggcccagccggcccgggggcccctggtggacctcgtctcggtcgcccgctggagggacgcgttcaacgtgctccggtacggcgtcgctagcatcctgtggaagtggatcatgctcggcccggggaccaacaacggcgccctgatggtcaacgcatcgctgatgtatgggaacacggggcgtctggggaatcctgccatcgtggttgatctgtaa

SEQ ID NO: 932 - DNA, 1614 bp, Myriococcum thermophilum
atgatccggctaagtgtatgtgtctctgcactcctggccggcctctcggcagccaagtatatcgtcccggggggaagatggcgggatacggacggtaatctcgtcaatgcccacgcaggctgcgtaacagtggacaaggataccagcaaattctggctttttggcgagtacaaggtcgaaggccaaaccgaaggtggtggtgtctccgtatacagctcggatgacctagcgacgtgggaataccacggccttgccttaggttcgtgatcgttttcttgtttcccaatttgctcctcaatacattgtcttacagagcgtctcacagcacccattgagggccaccaatacatctcgccctctcatatcatccaacggccaaaggtggtctacagcgaggtctctaaggagtatcacgtacgtaggctctcgggccgggtgaatcacaaggcctattaaacatgcgtcgcggacgctgatgttagagagcagatgtggtggcacgcagataactctacctatggactgctgctccaggggtttgctcggtcgccaaacatttcggggccttatacctttgtgagcgccacggcccctctaggcaactggtcccaggatttcggcatctttaccgactacaaggacgggaggtcctacgcactttactcaaacggcgacagcgcggaaggtcgagacgtctatattacagcctacaacgaagatgtgtcggagctcgacaaggtcatccaccgcttcgacaaatatgatctcgaagctccgacaatcgtccagacggacaagagttactacgccctcatgagccataaaacgggctaccggcccaacaacgtcgtcgccttccgggccgactcgctggccggtccgtggtcgcagccattcatggttgcgccgcccaatacgcggaccttcaattcccagtcgggctacacattgaccatccggggcaagaacaggacgacgtacctctacctcggtgaccagtgggattctaactcgctttgggagagccgatacatttggcttccgatcgagattgacgaccgcaagaagacgctcagcctcgtgtggcatgacgtgtatgacctggacgttcggacgggcgagtggtcccccgtccaaggcaagacgtactacgcagccgacgccaagacggccggcaacgcgttcaaacaggaggccaacttcgccagcaagggcgtcatcgtcaccggcatctacgacaaccacagcaccgttacgtttgaagggatcgaaggcaccgggaagccgcagtgggtgtcgttctactaccagaacacggacgacatgggcttcggcgaccagccgggcggcacgccggaccgcatcggcggcacgtggcagctgcgccggatcgcgagcgtcgtggtgaatggtaactgggagaaggtcgagacgttgtaccagcgggacacgcacaagggcatcatcctctcgacgcccctgcagctgacgttgaacaaggggaagaacaacaccatcacggttggcgggttgtacaatgggtttgattacaagggggccgatctggaccgaattgtcgtgtatcccccggaaccggaccacgagaggcaatga

SEQ ID NO: 933 - DNA, 836 bp, Myriococcum thermophilum
atggtctcgctcaagtctctcttcctcaccgccgcggcggccgtgacggccgtgacggcccgccccttcgacttcgacgacggcaactcgactgagctgctgggcaagcgtcaggtcactcctaacgccgagggctaccacgagggctacttctactcgtggtggtccgacggcggcggccaggccaccttcaccctgctcgagggcagccactaccaggtcaactggaggaacacgggcaactttgtcggcggcaagggctggaacccgggtaccggccggtaagtgttaattttttttttttttttccccttttgagctactgctgtcttcataatcgtcagggtcatggacatatatatacatggcaaagaataaaatgtacctagagatggggacaggatggctgactctatcgaccggttcacaggaccatcaactacggcggctccttcaaccccagcggcaacggctacctggccgtctacggctggactcgcaacccgctggtcgagtactacgtggttgagtcgtacggcacctacaaccccggcagcggtggccagtacaagggcaccttccagagcgacggcggcacctacgacatctacgtctcgacccgctacaacgccccctcgatcgacggcacccagaccttccagcagtactggtctgtccgcacctccaagcgcgtcggcggctccgtcaccatgcagaaccacttcaacgcctgggcccagcacggcatgtacctgggcaaccactactaccagatcgtcgccaccgagggctaccagagcagcggctcctccgatatctacgtccagactcactaa

SEQ ID NO: 934 - DNA, 1463 bp, Myriococcum thermophilum
atgcggacttcctacagtgccgctatcgcgctctcggccggcttccggttggcaacagccgccccgacccatggttgcggctccaattcacctcttctctttgtcaccacctatcccgcgggtgatggtgagggcaaactcctcaccctcaagcagaccgggtccaatctggaggtcgttggccagtccgacgcttgtgggccctatccttcgtggctgacccaggatggcgacgttctctactgcgtcgacgaagcttggggcggcgagagcggcaccctgttctcgctcaagatcaatgccaaccataccttcacgaagttgagtgacaaggaaacgattgtgggcccggtgagcaccgtcatctacggcgagaatggcgacggattggcagtggctgattagtgagtatcttcctcctccgagagtgaatgccgcggcctggcgcctgttccacaaggtctgagcaggggagagaggggccatgagcgatgttggaattggaccgaggctaatgggcgttcgttcgtagtgccggaggcggtatcaacttgttcaacatcgccgatcctgcctcgattcaggagattgacaccattgtgtacccgcccccgggcgacgagcttcccgacccgcagaactcggcccggcctcacgaggccatcttggaccctaccggcgagtttctcgtcttccccgacctgggcgccgatcagattcgcgtcttgaaggtgaacaaggagacgctggaatacgaggagaaggtatgtgtgaccctttcccccttctctactgctggtgtagaattaccggagttctgacagtttcggcagccgagctacaccgatttcgaccgtggcactggtcctcggcacggcgctttcttcaagtctggcgacaagaccttcttctacctcgttggcgagcttgcgaacgtgctccagggcttctccgtcacttacaatgatgacgacagcctcaccttcacccggatctacaacgccaccacgcacggtgacgaccagccgctcccggatgaaacggctgccgctgagctttggatcgccgtacgtccacaaactcttcgtgtcctcccaagttattgatctgatgagctgaccgcttcacagcccgggagcaacttccttaccctctcgtctcgcttcgagagatcgctcgagtatacgatttccaacggcaccaaggtgccctcggaccctctcatcaccttctccatcgacgaggagacgggcgaccttactcacgtgcagacggccccagcgggcggcgtcaacccgcgccacttctccttcaacagtgacggcacccgcgttatctctgcgctgcagtctgacggccgcgtcgtcgtctttgagcgcgaccctgctaccggcaagatcggcaagaccattgcctccggcaatgtcgagggatcgcccaactttgccatctataagcagtag

SEQ ID NO: 935 - DNA, 953 bp, Myriococcum thermophilum
atgaagtaccaactccagctcgccgcggctgcagcgtttgccgtgaacagtgcggccggtcactacatcttccagcagctcgcagtcggcgggaccacgtaccagccctggcagtacgtccgccgcaatagcaacccggactggctgcagaacggcccggtgacggacctgtcgtcgactgacctccgttgcaacgtgggcgggcaggtcagcaacgggaccgagaccgtcacggtgaacgctggcgacgagttcaccttcatcctcgacacgcccgtctatcatgctggccccacctcgatctacatgtccaaggcgcccggcgctgcggccgactacgacggcagcgggccctggttcaagatcaaggactggggtccgcaaggaacgagctggacgctgagtggtacgcgtgctattgccctggtactgttggcagggagtatctgacccatctatccagaccggtacagcgggaatattcccaagtgcatccctgacggcgagtacctcctccgcatccaacagatcggactccacaaccccggcgccgagccgcaggtacgttcatagatttgcgttgttttccaggttttcttctcgcgcaccgtcactgacatgggacaaaagttctacatcagctgcgcccaagtcaatgtcgtcaacggcggcagcacaaacccgacccctactgcccagattccgggtgccttccagagcaacgaccctggattgaccgtcaacgtaagcccaacctcgtgatttctcgagaactgaatcagcaacggcgctgttcatttagtctgagtgtagccgggcactgaccgtcgcctacagatctacaacgaccctcttaccaactacgtcgttcccggtcctcaagttgtaagtctttctggatactctccgttgacggtaacaccttgctgatgtcattgaagttctcttgctag

SEQ ID NO: 936 - DNA, 1377 bp, Myriococcum thermophilum
atggtgttgctcgcctttttggcgctcttttggagcgccattctcgagctccccttcgcggcagccgccaataattccattccgaccgtccagcagctccttgcccaagccgacgccgacgccgctcatttcaacgttaccgcctttgccgttaacccacttccgccctccctcgatccatggtaccgagctccgtacacatacgactggaaggaggccgatccgggtcaagtcctcaagattcgccaggctccgcttctcaatcggacgatcggccatgcccgggtcgcctaccaactcctctaccgcaccactgacagccgatacgaaccgtcttgggccgtcaccacgctgttgattccccgctctttcccgcttccttcctcctcctctggcacatcctcttccgctgccgccgccgccgccgattccgtcgtgccggtactgtcgtaccagctaccctacgattcgtgtgatgtggacgcaagcccgtcgttcgcgctgcactttggcgagccgtacggcgagatcgccgcggcgctagcgcatggctggctcgtcgctgtgcccgactatgaagggccactggcgagctacgcggcgggcgtgcaagccggccatgcgacgctggacggggtccgcgccgtcctggccgtcgccggtgtgggcaccacgggcataaacgcaagggtcgccctttgggggtacagcggtggggctctggcgagcgagtgggcggccgagctgaccgaggagtacgcgaccaagctacccatcgccggggtggcgctgggcggggtaacccccaacgtgacgagcgtgaccgggtacctgaaccggaaggaaggggccgggctgatcccccagggcttgctgggcatctctacgcagcacccggacgcgcgcgcctggctcctgagccggctcaagccggccctgagggacatattcctgagcgccacgaagatgacggcgacccagtccatcctcgcctttcagtaccaggacatcttcagctacttcatcggcggttatgaggacctgcacacaccggtcatggagcatatgtacaacgtggatgggtacatgggctaccacggggtgccgcgcatgcccgtcttcatttacaacgctatcaacgacgaactcatcgacatcagggacgtcgacgccctggtggaccggttctgtggcgtcggcgccaacattctctatcaccggaatacggccggcacccacgcccaggagctcttcaacgggaggcagagggcattcacctggctgcggagcgtgctcgacgggacttacggccagttctacccatcgctagggtgtacgatacagaatgttacgctcaactacgtaccatggatctga

SEQ ID NO: 937 - DNA, 1817 bp, Myriococcum thermophilum
atgtattccctgctcattgctctcctctgcgccggcactgccgtcaacgctgcggctccccgggcccggtctgcgctccatcgtggcagacaagcgcgtgggagccagcatgcggcccatatcctccagcagcgccaggccgggactactctcaccgtcgacctgtccacgacgtaccagagaatcgacgggttcggcacctcggaggcattccagcgcgcagtgcagatgagccagctgcccgaggaaggtcagcggcgtgccctcgacatcctgttcagcaccaccaacggcgcagggctcaccatccttcgcaacggcatcgggtcgtcccccgacatgagctccgaccatatggtctcgattgcgccaaagagccccggctcgcccgacaacccgctaatctacgagtgggacgggtccgacaacaagcaactctgggtgtcacaagaggccgtccacacgtacggcgtcaagaccatctacgccgacgcctggagcgctccgggttacatgaagaccaatggcaacgacgctaacggcggcaccctctgcggcctctccggcgcctattgcgctagcggcgactggagacaggcttatgctgattacctcaccaagtgagtacacccctcctccaactcagatctttgatgtcctgcgaaggcagggcaggagaaggcgaagaaaagagaccaagaagctaagaaatgaatatagatatgtcgagttttaccagcagtccaatgtgacgattacccacctcggcttcatcaacgagccagaattgacgtaggtcccctccctcccaacccccccctctaggccttcgtccttctttccccagattgactacaagcctttgagtgcacgactgatgacccggcttctcaataacccttgcgtaacagaacgagctacgcctcgatgcgcttctcggcctcccaggcagccgagtttatccgcatcctctacccgaccatccagagctccaacctgacccataagccgaccatcgcctgctgcgacgccgagggctggaactcgcagtctggtatgctgggtgccctgagctccgtcaactccatgtttggcctcgtcacggcacacgcctacacctcgcagccgactttcgccatgaacacgcctcatccggtttggatgactgaggctgccgacctacgtaaggcatcccttcttcctttttctcttttcggtagcaaagctgacattccatgtcaaaaaaaaaaaaaaaactaaaagagggagcatggacttcggcatggtaccaatggggcggcgcaggcgagggctggacgtgggccaacaacgtgtaccaggcgatcgtgaacgccaacgcgtcggcgtacctgtactggatcggcgcgcagacgggcaacaccaacagccacatgatccacctggacctcaacgcgggcaccgtcgagccgagcaagcggctgtgggcgctgggccagtggagccgcttcgtgcgcccgggagcccgccgcgtcgccgtctcgggcggctccggcagcctgcgcaccgccgccttccgcaacgaggacggctccgtcgccgtcgtcgtcctcaacagcggcggcgacgccgccctcaacgtccgcctcgacgccgcctcgtccggcgacgaccagcaaccggcctcggccaagacttgggtcacggacaactcgagggccatcgaggagatcgagactagcttcgccgatggtgctgccaccgtcaatgtgccctcgaggtccatggccaccgtggtgctctatccggctccggaggaggagaaccccgaggagtaa

SEQ ID NO: 938 - DNA, 1412 bp, Myriococcum thermophilum
atggaacggctttctgcaagattcggccgcttgttcgcatcgctaccgaaaccgcagaccggcaccgttctgcgctcatccgccctatctgtctccactgctactgccgttgccgccgccgccgccgccgccgccgcatccatggctgtatactcaagttccgtctccaagctggacctggctgccgacgttcccgatgaggcccgtcaggcgccacatcacgtcaaagattccaatgggaagctcatcaagttccgcaatccccatccgtcggccggggagccgccacgatctgtcttccacgtgatggccaagattttccagtacggaaaccgggggaccaagcttcgcattcttggaggttgggggaagagtgcgttcggtgctgacctttcgttcgcagggccatgatcgcaggcgagtggtccaaccccgacacgtccaacgtcacgatcccggccgtcaagcccgactttagggagaggcgagctggactggacagcctgcgcgccacctggctcggacatgcctgctacctggtcgagttccccagcgggctgcgcgtcttgttcgatccggtcttcgaggcccgctgcgcgccggtgcagtggttcgggcccaagcggtacacccctccaccgtgctcgctgtcagacctcccccccgtcgacgccgtgatcatcagccattcccattacgaccacctctcgcacaccagcgtccaagagctcgcccgccggaaccccaacgcccacttcttcgtcggcctcggcctggagaaatggtttcgtaacagcggcatcaacaacgtgaccgagatggactggtggcaagatgccgacctcgtcctgaagaggcagcatgacggccaggtccaaagcccggaaaaggcagatcccgaggccatctcggcccgtatcacctgccttccctgccagcactcgtccgggcgctcgcaccaggaccagaaccacaccctgtgggcctcgtgggccgtcaagtcgggcgacaagtcggtctggttcggcggcgacacaggctaccggcgggtgcccaagctgcccgtccacgtggacgactacgggcccgagtacgactcgctgccacgctgtccccaattccgccagatcggcgccctgcgcgggccgttcgacctcggcctgatccccatcggcgcctacaagccgcgctggatgtggagctggatgcatgccaacccgtacgacgctgtcgagatcttcaaagagacgcgctgcaagcgcgccatgggcatccactggggcacctgggtcctgaccgtcgaggatgtcgacgagccgcccaagctgctgaagcaggcactcaaagcaagcggtatcccagagacgggcgtcttcgatgtttgcgcgattggagaatccagggagttctga

SEQ ID NO: 939 - DNA, 880 bp, Myriococcum thermophilum
atgctgcgcacatccgccctcttcctcgccctcgccgcgatggggcttgctcaggctccagaaggctacagcaccgtgtacatcacctctaaggtggacaccaacttcgtcattgtgcccaaggagcgtgtcgcggggaccacgacgatcgtgtacgctcccctctcctttctacacgtccattgaagacgaaacaaaggggaaaaaaagaaaagaagagaacacgagctgacgaaatatacttggctgtatagtaagacggccaacaacttgcctgagcagcagtggtatctcaagctgggatcgaccaagattcagttggccgacagcaccctctgcatggatggcggtccgcaaggtgcgttctattattgaagggaagaaaggagatagagaaggaatgggagatataggcccgatcgagtgctttctgacgtttgcgagcagaaaactggagggacatgggccagatcttcgtcgaggagtgctcggatgccgagtctcagaactggttcgtcatggatgacggccgcatcgccttggaggcatcgaatcagcgtaagtaccaccggaggagagacacatcaacatcagccaaaaaaaaaacccttgggggaaggggaggaaaggagagaattattattatagggcgacaacctctgagtcaccagaagccccctttttccctcccaccatgcacagagtaagaactcccagctaacaacgagacaactcgacagagcaatgcgttgacctggtgttcatgagggcggtggagaacaacgacgtcggactgttcagctgtgccggactgggcggcagcggtgctgccgacgcgggtatcaactggccgctggtcaacgtgacggacagcgcttga

SEQ ID NO: 940 - DNA, 1421 bp, Myriococcum thermophilum
atgaagatatccaacacctctcttcttgcgctgctgctgccggcggtaagcagccgtttcgttgagcctggagaggctgatcgcgttctgctttatcccgacggcgtccctcaaccgtctgcaagcagcgagaagtaccacatagagctggccccgggagagacgagatgggtgacggaggaggagaagtgggaactgcgccgggtaagtcatcttcatacgaaacccgctcccagctcccaactcttcatggtgatcgcgctgaccctctcacgcagcaaggcaggcggttttttgacatcaccgaccatcccgagctcggtaccctccgcgcgcgaaacgcattcaacaagaagagcgtattccccgagggtcccaaacaacaggagaaggtcagcccactcctggagaacttgtccaagaaggagatggaggaccacttgaccaccttcacatcattccatacccgctactataaggtaacaaacgtcttgtgcgcgcaatcacttcgttccctgctaagcgacgcatgacagtccgattacggccggcaatcaagcgagtggctcctcggccaggtgcgccagaccatcaaggatgccggcgcggaggactacgtccgcgctgagcacttcgagcacccatggggccagaacagtatcatcgccaccatccccggcaagaccaactccactattgtcatcggcgcgcaccaggactcgatcaatctctggctgccgagtattctggccgcccccggcgccgacgacgatggcagtggcaccgtcacgatcctcgaggccttccgcgtcctcctccagtccgaggacgtggtcaagggcaaccacgagaacaccgtcgagttccactggtacagcgccgaggagggcgggctgctgggcagccaggccatcttctccgcctacgagaaggagggtcgtgacgtcaaggccatgctgcagcaggacatgaccggcttcgtcgcccgcaccctggacgccggcgagccggaaagcgtgggcgtcattgtcgactatgtggacccggacctgacggagttcatcaagcgcatcattgaagaggtaagctccaaatcggcaccacacttgtctcccctgagacctccgttctgaccttgcctccctttgcagtactgtgacatcccttacgtcgagaccgagtgcggatacgcatgctccgaccatgcctcggcgtccaaggccgggtatccctcggcctttgtcatcgagtcggcgttcgagtactcggacaaccacatccactctaccgaagacttgatcaagtatctgtcattcgaccatatgttgcagcacgcacgcatgactctggcattcggctacgagctggcattcaccgactttgatgccctcgagcggccagaccactcggatgcgttgtaa

SEQ ID NO: 941 - DNA, 1423 bp, Myriococcum thermophilum
atggcggtctcgttgttggtcaggggtctcctgctcctgattctcggattttataaccacgctgccgcagcctgcacgcgcaccgtagtcgccgagcaaggggatacatgcgccaccatcgccgctgccgccggtattacggtcgccgacttcctgaggctcaatccctcggtcaggagctgcaccgagctcgtcgctggtgaaacctactgcgtcgagagctcagacgacagctctcctcctcagacgtcgacccccccgggacttgacgtcagcatcgacggcacatgtgggcagggtgtcacctgtgcgggctcgaggttcggagactgctgctcgcagcatgggttctgcggcagcacccccgcctactgtggcgagggctgccagccggcttttggtatttgtgatgatggtggcggcagtagcagcactagctctcctgtgacttccgttaccgtcaccgtcaccaccatcacatctgtcaccgtgacggctaccagtccaccagcaacgaccactaagtgcacctccattatcagcctaaccaccatcatcaccagcaccagtgtcagcaccaagaccagtacaactaccaaaatcagcactactaccaaaactagtaccaccaccaaaaccagtatcgacacccttaccagcatcgtgacgtcgacatccacgcacgttatcacctcgggcacgtgtgatggcagcagcacgccgaccaagacgactacgacgagctcagccctaccaacaggtagacctctgcttccaggaactccaagcaattgtaagtcctgatatccttgccaagacggggtcctacttatccttgctgttcggggtttttcgggggggggggagggggggggaggttggccgctcccgtcacgccatatcggcaaactccccaccctcttcctggactgagctataatagaaaaataaagagtacggcttgacgagacactgatgatcactcctctgttccaggtagaaactactcccggatccaagacggagatacctgccgcagcattgcaacgcgcaacaacctatccttgcttgatttgtaagttcccaccccttgccctatatgaggacgcatatctaagggtactcgtttggtttgctcccttggacatctttttgctgtgttttttttcttctccctctccttgcccgttttacttttccttttttttttccttttcccgcttgcttggacgtgcctacgtatgagtccatgtcatataatagggcttctccgctaactcgcgtcatcagttacgcgctcaacccagctgtaagtggatctattccgaacctcagccgcgatcttattgcttatcagagcggcccgctccagatcaactgcgacgcccttttgccgggttattatgtctgcgtcgggaaatga

SEQ ID NO: 942 - DNA, 1386 bp, Myriococcum thermophilum
atgaagacactcgctacccttttggtttcggccggcctcgtggctgcgcacggctatgttgaccgtgccactattggcggagaggagtaccaggtatagattcctacgaacggaaaccctcgtttgaactcatggtcgacaagtgactaatagtgcaatcactacagttttaccaggtgcgctctcggtaccggtccgttggctccccatgccggcagttactgacacgcatcttgcataccatttagccgtaccaagacccgtacatgggcgacaacaaggtaacaatgaactacaatagtaattcataataatcctaataatatcccgacactacactattcttgcttctccatcaccgctactagctaaactcccccccccccctccttcctcctccgttttaccaaactccaaccttgtttccataatgctccagttggatcctcactaaacaagaggtcatgatgggtgtctcagcccgatagggtttcccgctccatcccgggcaacggccccgtggaagacgtcgactcgatcgacatccagtgccacgccggcgccgagccggccaagctccacgcccctgccgccgccggctcggacgtgacgctctactggaccctctggcccgagtcccatgtcggccccgtcatcacgtacatggctcgctgccccgactctggctgccaggactggtcccccggaactgagtacgtcatcttcgaaaactcgactccgtctatattttggcagggaaaaggacgaggggaacaccatgaatactaattcacttacttctctcgataatagggccgtttggttcaagattgccgaaggcggacgtgagggcacctccaacgtctgggctgacgtacgtgaaccgtgttattcctctaatctctccatccctgaaagaaaaagaaaaagaaagaagggccaaacacgaactaacaaatatcctctgataacccatgattagacccctctcatgacggagccctccgcctacacctacactatcccgtcctgcctcaagagtggctactaccttgttcgacacgagatcatcgccctgcacgcggcctgggagtaccccggcgcccagttctacccgggctgccaccagctcgaagtcaccggcggcggctccaccgtgcccagctccaacctggtctccttccccggcgcctacaagggcagcgaccccggcatcacctacgacgcttacaagggtgagtcagccagcccttctgtttttctttcttttggccctccgttgatccctgagtttctctctgcactactattgaaacggccgactgacgcggaatttgtgcagagcaaccttacaccatccctggcccgcccgtctttacctgctaa

SEQ ID NO: 943 - DNA, 1073 bp, Myriococcum thermophilum
atgcacttcgcttcgtacctctcgattctgtccgtcctcggcgccagcggcagcggtgtcctggcttgggctcctccgaactacgacgggtacaggctggtctggtcggacgcgttcccgggctctccgggccagtcgccggacgagggcaggtggaacatcatcacgggcaacctgggcgtcaacaacgagctcgaggtgtacacgcgggactcgcgcaacgtgcagatgagcggcggcgacacgctgcagctcgtcccctggctcgacggctccacctggacttcgggcaggatcgagtccaagtacaccttcacgcctaccgccggcggccgcaccatggccgagggccagatccgcttcggctccaacgaccccagcaccaagcagggcatctggcccgccttctggctgctcggtgactctatccgcaatggcaccccctggccggactgcggcgaactcgacattcttgagactgtcaacggcctgctgacgggctacgggaccgctcactgctccagttcgttatacctcgttgatttcttctttgttttcctgtttttctttttaaaaaaaactttttcatatttcgttaaagagggtgggagataactaacgtctatcagcttgcaacgaacccatcggtcgcggtggcagcatcggcatccccaaccaggattggcagcggtggcggatcgtctgggacctcaccaacggcgactggcgtgcccagaccatcacctggttcatgaacgaccagcagttccaccagctgagcggcgcgaccatcggagaccagggcgtctggaccgccctgaccaacaggccgctcttcttcatcctcaacgtggccgtcggcggcaactgggtaagtcttccattcgctatttccctgtttctcccccgcgccacgagagaaagccgggggcgtgtgtgaaggagaaaacatgagaattgtgtgatttgatgtgctaacgaatccgtcatagcccggctatcccaacgacaggactcagggtggctggggagccatgatggaggtgggctatgttgctcattactccacctag

SEQ ID NO: 944 - DNA, 1023 bp, Myriococcum thermophilum
atgctctcgaaggttctcgttgggttcacctcaataaccggggtgctggtggcggctgctgctgctgcacctctccagagccgggctgcacgcacctcgccgccggaggggtgcctgacggtgggcggttcggggacatacaagacggtccagtctgccgtggacgctttgagcactacggagacttcggagcagtgcatcttcatctatgggggcacataccaggagcaggtctacatcccggagctgcggtcgccgctggtgctgtacggcgagaccgaggacacgagcagcttcgccgccaacaaggtgaccatcacgcaatcccggagccaagacgactctccgaacaacgatgcgacggcgaccctgcgggcacacacacccaacctgcgcgtctacaacctcaacctggtcaacacccgcggtaaagggtctcaggcgctggcagtgagcgcgcaggcagaccggcagggctactacgcctgccagttcctcggctaccaggacacggtgttggcgaacgaggggacgcaggtgtacgcgcgcagctacatcgagggcgccaccgacttcatcttcgggcagcgggcacgggcatggttcgacggggccgacatccgggtgctggccgcgtcgaagggctacatcacggccaacgggcgcgactcggccgagaatccgtcctactacgtcatccacaactcggccgtctcggcccgtgacggggacagcgtccccgccggcgcctactacctcggccggccgtggcgcaactacgcccgcgtcgtcttccagaacacccgcctgtccgaggtcgtcaacccggccggctggagcgtgtggaacgcgggcgacgagcgcacggacggggttgaatttggcgagtacggcaacacgggcgcgggcgcctctgcctcctcccgcgccgccttcgcaaggcagctgtccgcccccgtgagcatcgagacagtgctgggcagtgactacgcgagctgggtcgatacctcgtacttgtcgtaa

SEQ ID NO: 945 - DNA, 630 bp, Myriococcum thermophilum
atggtctctcacctcgcaacgctcttcctcctcccgcttggcgccattgccgcggccgtcaccaacaccggcccgggcacactggggctgacccggcgcgaggtgtcccccgacaacacatgtggcggcgagaatgaatacacgtgcccggaggagctggcctgctgctcgcagcacggctactgtggcatcaccgacgagttctgcctgacgacggctggctgccaggccgacttctccaactcgactgacgcctgccacgagcccatcccaggcgagagcacctcgatcgatggtacctgcggcaccgagggcgctggcaccgagggttaccgctgccccggcaatgccactgtcattagctgctgcagcgctgcgtaagtcttcttaacattttcacctccctgattctcctttggatcttctcttgttatatcccgaataatgcacttcggtccggctgtcaacagagagctgactgcgattacttctgtcagtggatactgtggtacgactgatgaccactgcaacccggagaagggctgccagagtgacttcggcaactgcactaccgatgccgaacagcccgagaaccccgaggatcggggctttagcgtcaagctcttttaa

SEQ ID NO: 946 - DNA, 1334 bp, Myriococcum thermophilum
atgaagaatctcctcgccctcctcccgctggcctccgtcgccctcggagcaccaagcttagtgaaaagacaaggtacgccgtgcgctgatgaggacggtcatgtgtgggtgtgagagaaagggagaaggagagagagcgtgtttatgtttatgatgtctgtgtgtttgtgtggttctgtgtatgcgaaaactaacaagactcaagctcccctcactgatgaagagctgagcaacctcgaactgtacgtccaatgggctgcagcctcggggtgcaacggagaccaggccgcgggccagcccgtcatctgcaatgcgaacttgtgcactaggtttgcgtcccacggcgccaccgtcgccgcatcgttcatgtatgtttctcccagcgcccaactaaaccccctttcctccccctccccctccccccccaaaaaaaacccaccctctttgtctttgtatattacgccgtatgtattgtctaacatcaaggcttcgacagtggtgaagatacggatatctggggtttcataggcgtggaccctgttgacgagaacattgtcatctccttcaggggctccagctcggtccagaactggattaccgagtaagacattgtcccccaccccaggagcacattcctccttttttctccgagcgcaatctgacaagcgtgacctctccgcagcttcgactttatccaggtttcctgcgacgacctcgtcagcggctgccaagtccacaggggtttcaaccgggcgtgggaagaagtgtccggcgcgctcctggacggtctcgccgcggccacggcggcgcaccccaactacaagatcgccgtgacgggccactcgctgggcggcgcggtcgccaccgtcacggcggcacacatccgcgcggccgggtacgcggccgacctgtacacgtacgggtccccgcgcgtgggcaacgaggcgttcgtcgacttcgtgaccaagcaggccggggccgagtaccgcatcacgcacgccgacgacccggtgccgcggctgccgcccatctggctcaactaccggcacacgagccccgagtactggatcgacccggacgacaaggaccagctggtcgtcggcgagatccaggtctgcaccggctactccaacaccgactgcaacggcggcaccggcggcctcgacacctctgctcacagctggtacctccagagcctcggcggctgcgccgtcgagaccttgtcgcagcccttcgaggccttcaacgatacgaagctcgagaacactctgacccagtacgccgagatggatatcaaggtggccgccaacttgaatgctgcgcaccactcttaa

SEQ ID NO: 947 - DNA, 3049 bp, Myriococcum thermophilum
atggtttatcacgcgagtgccgtctggctctcgctggccttcagcctctctgcgcccacaacttttgcccgcgccattggaccgagagataaagtccctgaaggattctatgcggctccctactaccccgcgccgcacggcggctggcttgactcgtggagggatgcatatgcaagggcccatgccttggtgtcccagatgactctggctgagaagaccaacatcacatctggcgtcggtatctttatgggtaggcagtagagaaccccccctgaatatgcggccctctctccccctacaaacttccacacccccactcttcccatcatattcccatgccttcagcatctcatgtggctaatatgttcttcttacagggtcggtccaatagatcgtttcctctttccgcatccttcattttgctgactagaggtatgtgtgtaggccatgtgtgggcaacacgggaagtgccgaccgcctgggttttccccagctttgccttcaagactcggcactaggggtggcatccgccgacaatgtcaccgcctttccggccggcatcaccaccggggcgacatgggataaggccctgatgtacgcccgcggagttgccatcggcaaggagttccgcggtaagggggccaacgtccatctcggcccttcggttggcccaattggacggaagccgctcggcggccggaactgggaagggttcggcgccgacccggtactgcaggccaaggcggccgctttgcacatcaagggcgtccaggaacagggtgttatcgcgaccgtcaagcacctgatcgggaacgagcaggagatgttccgcatgtacaacccattccaacccgggtacagcgctaatattggtaagtgagtgtgtgagtgtgtgagtgtgtgtgtgtgtgtgtgtgtgtgtgtgtgtgtgtgtgtgtgtgtgtgtgaggaggaatttttaggagccctaccagctccgacgtgctccccgtacagccttgctgaccaaaaagtcgctagacgaccggacgcttcacgagttgtacctatggccgttcgccgaggcaatccatgctggagtcggtgcggtcatgaccgcctacaatgcggtgaacgggtctgcctcgtcacaaaacagctacctgatcaatgggctccttaaggacgagctcggcttccagggcatggtcatgtcagactggctcagtcacatttcgggcgttgactcggccctggccggtctcgacctcaacatgccgggcgacaccaacatcccgctcttcggtttcagtctgtggcagtacgagctgaccaggtccgtcctgaacggctccgtgcccgtagataggctgaatgacatggctactcgggtggttgctgcctggtataagatgggtcaagacaaggatttcccgcggcccaacttctcgtccaacacgcgggacaagaacggactcctgtaccctggcgccgtgatctctcccatcggccaggtcaactggttcgtcaacgttcaggaggaccactacaagatcgcccgccaggtcgcccaggatgccataaccctcctcaagaacaacggcagcctcctgccgctgacgggctcgggcaagatcaccgtcttcgggacggatgcgcaggtcaaccccaacgggccgaacgcctgcctaaacagggcgtgcaacaagggcacgctcggcatgggttggggctctggcgtggccgactacccctacttcgacgaccccatcacggccatcaggaagagggtttcagacgtcgaatttcacaacaccgacacgttcccgctcttcttcaaggacgaggccccggcccccgacgacgtcgccatcgtcttcatcagctcggactcgggagagaacagcttcacggtcgagaacaaccacggcgaccgcgactccgacaagctggcagcctggcacggcggcgacaagctggtccagaaggtggccgacaagtttccgaacgtggtcgtcgtcgtccacacggtcggcccgctcatcctcgagccttggatcgatcacccttcggtcaaggcggtcctgttcgctcacctccctggccaggaggcgggtgagtcgctggccggcgtcctctttggggacgtgtcgccgagcggccatctcccttactccatcacccgagccgagaccgactacccagacagcatcgccaagctcaaggggttcacctttggtcaggttcaggatacctactcggaggggctctacatcgattaccgctggctcaacaagcactcgatcaagccacgcttcgccttcggccacggcctcagctacgcccccttcgccttcaccaatgccaccatccgggccgtcaacccccctctggaccccgtcccgccgccgcggccctccaaactgccgacgccgtcctactcgaccgacctgccggccgcctccgaggcctacttcccggacgggttcaatcgcatctggcgctatctctactcgtggctgccaaagtccgaggcggacgcggcgtgggagatcggcgccgccggcgagaagaagtacgcctacccggacgggtactcgaccgagcagaagccggggccggcggcgggcggggccgagggcggccgacccggcgctgtgggaggtggcgtgggagagtcacggtgacggtggccaacgcggccggcgccgacttcagcagcagcagcagcagcaactcgtcgtcgtcgacgccctcccgcttcttccccggcccggcgcgggcgtcggtgcaggcgtacgtgcagtacccgcccgggatcccgtacgacacgccgccggtgcagctgcgcgacttcgagaagacggacccgctggcccccggcgagagccagacggtcacgctgcgcctgacgcgcaaggacgtcagcgtctgggacaccgagctgcagaactgggtcgtccccccgggtcggtacaccgtctggatcggcgacgccagcgataggctgttcctcgcttgctataccgataccggcgagtgtgagcagggattggagccgcctgtctga

SEQ ID NO: 948 - DNA, 1715 bp, Myriococcum thermophilum
atgcgactacccgtgcgatccttagccgcctttcccgtcatcctttccctcgtctttcccttgccaaccgctggcgctgggctgcagccgcccgcgtaccatcacctagatcgcgcagaggcaaacagccatgtgttcccttttctgaaatggctacgtgacagcgcggtggaggccgtcttcggaaaaccgacgaccaaagcaaaagaccagagacctggcccgcaattacaatctaggtaccaaaatgacgtcgtggttcgatttaacgtcaccagctccgaggaagagggtgccatcgcccaggcagttggccagatgtttctcgatgtctgggcttttacacccgatttcgtcgacgtgagacttgccaaggacgacgttcctgcgctcctcaccctgctgcccagctcgctggagccttcgatactcatacccgatgtcgcagcagcagtatgggcgacatacccttcgtcatctactggggcttcctggctcgagtggagcccggcagacgctgctaagatgaggaggtccctggatggggttggaaatatcttttttcaggactaccagcccttagctgtatgatgtcttgtggcttcacccctgctgttctccatactgatcccgcttaggttatcgaaaactggatgcgcctgcttgaagccatgttcccatccgtcgccaacatgagcagcatcggcaaatcgtacgagggccatgatatctatgctctccgtgttggtgctcccagtgaagatggcgagactagcgggcctagaaagacgattctcatcacggggggtctccacggccgtgagtggatatcgacaagttcggccaactacctgttatggtcggcagttacgacatatggtaccgattcgatgatgaccaagcttctcaagcatttcgatgttgttttcatcccggttctcaatcccgacggctacgagtacacttggaaagttgatcggctctggcgcaaatcacgacaaccaaccaagatgcgtttctgccgtggcctcgacctcgaccataccttcagccatggctgggacgcaggtggacaagcctccgacccgtgctcggagagctacggcggggaacagcctttccaggccgtcgaagcagccgctttggcgcggtgggcccgcaacgagacagaacatggcgtcaacttcgtggccttcctcgacttgcactcatattcgcaacaagtgctctatccatatgcgtatacgtgctccctcgagccgcctaatcttgagaacctcgaagagctcgcggtcgggttagcaaaggcgattcgtatctcgagcggagagccgtacaccgtcagttcggcatgcgagggagctgttgcccgggcttacagcgcgaatgatccgcttcagcgtatcgaggtcgggggcggcgcggccatcgattggttctatcgtaagctttccgtgcgggcatctttttgaagaacaccaggctgacattctttagatgaactccacgcacggtatagctaccaaatcaagctgcgagacactgggagctacggatatttagttccgagcgacgatatcgttcccactggcgaggagacactgaacgctctaaaatatcttggcgattttctcctcgggaacaatggcattgagaagatctcggctcaggagccactggatcactggaaagatctgaagcggcgcagacgttaa

SEQ ID NO: 949 - DNA, 1063 bp, Myriococcum thermophilum
atgaagcccttcagcctcatcgccctggcaacggccgtgagtggccataccatcttccagcgggtatcggtcaacgggcaggaccaaggccagctcaagggtgtgcgagcgccgtcgagcaacttcccaatccaggatgtcaacgacgccaacatggcgtgcaacgccgtcgtgtataaggacaacaccatcatcaaggtgcccgcgggagcccgtgtgggcacatggtggcagcacgtcatcggcggaccgcagggcgccttcgacccggacaacccgatagccgcctctcacaagggtacgatagtcaattaatcccctgatgaacgaagtgacggctctcaggagcacacgtaactgaccaccggatctaggtcccatctcggtctacctagccaaggtggacaacgcagcgacagcgtcgccatcgggcctccagtggttcaaggtggccgaacgcggcctgaacaacggcgtgtgggcggtcgacgagctcatcgccaacgacggctggcattacttcgagatgccgtcgtgcgtggcccccggccagtacctgatgcgtgtcgagctgctcgctctgcacagcgcctcgagccccggaggcgcccagttctacatcggctgcgcgcagatcgaaggtgcgtcaactcatattcgaaacaggatgagaagaagaaaataaagaaaacgagctaacaggaacaaaccagtcaccggctccggcacccactcgggctccgacttcgtctcattccccggcgcttactcgaccaacgacccgggcatcgtgataagcatctacgacaccacgggcaatcccaacaacggcgggcgtccatacccgatcccgggcccacgccccatctcgtgctccggcagcggcggcaacaacggcggcggcaacgacaacggtggtggcaacaacaatggcggcggcagcagcggcggatccgtccccctctacggccagtgtggtggcatcggatacacgggcccgacctcttgtgctgagggaacttgcacggcgacgaacgaatactacagccagtgccttccctag

SEQ ID NO: 950 - DNA, 1101 bp, Myriococcum thermophilum
atggtcccactaacttccaaagccctgatcctgagcagccttgccagtctggttgccggccatggctacttgaagagcatcacggtcaatggccaggactacctcgcttggcaggtcggccaggacgactatgtcaacccccctccggtccgatatgcccgcaagcttgccgacaacgggccagtcccagactttaccacgaaggatatcacgtacgttcccatgacggtcggcactgggtgtgccaaggaagggcaaaggccaccgagctgacgcttggtcacgacttacagctgtggtgctggtggtaatgagccggctgaaggaattatcgagctgaaggctggcgacactgtgtaagtgttgttcactcccgaggaatttagtctcttgcgcttgggcagttagctgacaactccgacttctctctttctcacaaaatagaacacttaactgggaccagtggggcagcagccactccgggccagtcatgaagtacgtattgcagcttatcagggcaacgggccttaccaggggctacatgaccaccagagtctgtccgattctaacatcctctctcttcagttatctcgcccattgcaccaatgacgactgcaaatcgttcaagggcgacagcggcaacgtttgggtcaagatcgagcagctcgcctacaacccgtcagccaaccctccctgggcgtccgatctcctccgtgagcaaggtgccaagtggaaagtgacgattccatccagccttgctcctggtgaatatctgctgcgacacgagatcctgggcctgcacgtcgccgggaccgtcatgggtgcccagttctaccccagctgcactcagatcagggtcacggaaggcggaagcacacagctgcccgagggcattgcgcttccaggcgcttatgacccacaggacgagggtgtaagtcctgattccgtgatccgagaaccgtttcgccggtaactaataagtatctattatagatcctggtcgagctgtggagggtgaaccagggccaggtcaattacacggcgcccggaggacccgtctggagcgaagcggcgccagatcccaaccggcctggtccctga

SEQ ID NO: 951 - DNA, 1271 bp, Myriococcum thermophilum
atgaagctctcagcagcatcgtccgcggcggcatgcgccgccctgctcccaggggcgtccgccactatctactacgccggtgtcgcccagtcgggcggcgagttcggcgtctggagcgatacggccaccccgggcaccggattacccggcacattcggggttgattatcagttcatcagcacgtcgggcgtcgacgtcatggtggacgagaacaaagtgaacctgcaccggatcgccttcctcctcgagcgcatgtgccccctggagtacgggttgggtgccaagttcaacgagacgcactttgacttgttcaaggaggcggtcgactatgtcactgtgaccaagggagcatgtttagttttttttttttttttttttccctctaccattccgtccctctcgtcgtttctcttttcatcttctaaccggtgctcccaatcttctaattagacgccatcctcgacccgcacaactacatgcgctacaataacccttcgcagcagcccttctccggcagcgtgatcggcaactcgtcggacccgacggcggccacgacggagcagtttgccgagttctggggcgagctggccaagcggttcgccgacaacgagaaggtcatcttcgggctgatgaacgagccgcacgacatgccgagctcgctgctgctcgacaacctgcaggcggccgtggacgcgatccgggcggcgggggcgaccaacctcatcctcgcgccgggcaactcgtggtcgggcgggcactcgtggaccgagggcgggtccgaggccagcagcgagtggctgcacaagctggtggacccggccaacaacacggccatggacatccacgagtacctggacgaggacttctcgggcgggcacacggcgtgcacgcaggaccccgtcagcaacctggagggcgtgacggcgtggctgcgcgagcacgggctcaaggccatgatcaccgagttcggcgggtccaacacgaccgagtgcgccaccatgctcaacgacctgctcgactacatggccgccaacgacgagtggatcggctggaccgcctgggccgccggccctttctggggtagctacagcccctgctgcaccgacgacttccagttcgggagcctcgagcccgggagcaaggccgccggcggctcgcccagcctgtacgacaccgtctggatccccgtcatccagaagaaggtgccggccaagctgcagtggagcggaccgtcaagcgtcgacgggggtgagttgaccgagaagccctaa

SEQ ID NO: 952 - DNA, 2164 bp, Myriococcum thermophilum
atggttcggaacatcttcctcacggcagccctcgcggctctgggccaatgcggttcaacagttttcgagtctgtcccctctaagccccgcggctggacacgtctcggcgatgcatccgccgaccagccgctccggctgcgcattgctttgcagcagcccaacgaagaactctttgaacggaccttgtacgaggtatcggacccgtctcatgccaggtacggccagcacctgtcccgagacgagctctcggcgctgcttgccccccgagccgagtcgacggcggccgtgctcaattggctgcgcggcgctggcatctcccccgacaatatcgaggaggacggcgagtggatcaacctccgcgtgactgtgcgtgaggcatccgagctgctcgacgccgactttggcgtgtgggcccacgagggcaccaacgtcaaacgagtacgggcgctgaagtactctgtgccggaagagatagtcccgcacattcgcatggtcgcacccgtcgtccgtttcgggcagattcggccggagcgcagccaggtgttcgaggtggtggatacgcctctgccgcaagtcaagacggcggcggccatcccgccgcaagagctcgatgtcaaggcttgcaacaccagcgtcacgcccgagtgtctgcgcgccctctacaaggttggctcgtaccaggccgagtcgaccgagggcagcctgtttggcgttgctggttacctggaggagtgggccaagtacgaccagcttgagttgttcgctgacgcgtacgccccgtatgctgctgacgcaaacttcacttcggtcggcatcaatggcggagagaacaaccaaagcccatctaatcaggacgacattgaggcaaatctggatatccagtacgccgtcgccctgtcatacaagacccctatcacctactatatcacgggaggccgcgggcctctcgttccggaccttgagtgagtacaaaccgagcatgttcgacttaggaactacgctaatacgcgaaacagtcagccagatccggatgatgtatgacgtcttcctccccaatttcaatgtgctaatgcttcggacgcagttcgtgattcgtgctgacggatcccgcaggtctccaacgagccgtacctggaattcttctcatacctcctgaagctccccgactccgagctgccgcagacattgaccacctcctatggcgaggacgagcagtcggtcccccgtgcctacgctgagaaagtatgccagatgatcggccagctcggcgcccgtggtgtgtctgtcattttctcgtcgggagagtaagtcccattaagccccattatgcctcagaaaaaaaacaggccgtggagggacagaataagctaacaactggcctcgtagcactggtgtcggatccgcgtgccaaactaatgacggcaagaacacgactcgtttcttgcccatcttccctgcgtaagtgccctgattggaaaaaagaaaaatctggagaaaccccgggattgtggagcactgacgattatgtcttcggtcccacagggcatgcccctacgtgacttctatcggtgctacccgttacgtcgaacctgagcaggccgcgaccttctcctcgggcggcttctccgacatcttcaagcgccccgcctaccaggaggcggccgtcagcacctatttggacaagcacttggggaaccgctgggaaggcttgtacaaccctgagggtcgcggcttcccagatgtttcagcccagggcgtcgcctatcacgttttctcgcgtgaccaggacatcagagtctcgggtaccagcgcgtcggcgcccctgtttgcagcgctcgtcagcttgctgaacaatgcgcgtctctcgcagggccggccgccgctcggcttcctgaacccgtggctgtactcggaggaggtccggaaggcgggtgccctgactgatatcgtccacggcgggtcgaccggttgcacgggcaaagacatgtactcgggcctgccgaccccctacgtgccgtacgccagctggaacgccacgcccggctgggaccccgtcaccggtctgggcacgcccatcttcgacaagctgctggaggtcagctcacccggaaagaagctgccgcacattggcggcggatacgggcacctggccggcggtcgctag

SEQ ID NO: 953 - DNA, 1023 bp, Myriococcum thermophilum
atgcccaagacctctgctctccttgccggcctgacgggcgccgccctcgtcgccgcccacggccacgttagccacatcatcgtcaacggcgtttattacaggaactatgaccccacgacagactcgtaccagcccaacccgccaacggtcatcggctgggcggccgatcaacaggacaatggcttcgttgagcccaacagctttggcacggccgacatcatctgccacaagagcgccactcccggcggcggccacgccaccgttgctgccggagacaagatcaacatcgtctggacccccgagtggcccgagtcccacatcggccccgtcatcgactacctagccgcctgcaacggcgactgcgagacggtcgacaagtcgtcgctgcgctggttcaagatcgacggcgccggctacgacaaggcggccggccggtgggcggccgacgccctgcgggccaacggcaacagctggctcgtccagatcccgtcggacctcaaggcgggcaactacgtgctccggcacgagatcatcgcgctccacggcgccagcagccccaacggcgcccaggcctacccgcagtgcatcaacctccgcgtcacgggcggcggcagcaacctgcccagcggcgtggccggcacctccctgtacacggcctccgacccgggcatcctcttcaacccttacgtcgccgacccggactaccccgtccccggcccgtccctgatcgccggcgccgccagctccatcgcccagagcacctcggccatcacggccaccggcacggccaccgtccccggcaacggtggcgactctcccgccaccaccacccctaccaccgctcctagcaccaccctggaaacgacgacgaccaccaccaccccaaccacgacggccgctccttcgggtgatgtccagaccaagtacggccagtgcggtggtaatgggtggaccggcccgacggcgtgcgcccctggctcgagctgcaccgttatcaatgagtggtactcgcagtgtgtgtaa

SEQ ID NO: 954 - DNA, 1516 bp, Myriococcum thermophilum
atgcagcatatcgttcgggtcggggtcagcctcagcttccttgcagcaacggcggtcgcagcagctgccgggaaatgcaccagcacgatccagcgcgacgttgccgttatcggcggcggtgcctccggtgctcatgccgcggtctggctacgcgataatggctacagtgttgtggtcgtggagaaggccagccagctggtgaatccctcattgttccccgtgggaagttacggtttttgctgactacctagtctagggcggccacaccaacttctacaaggacccggtcacgggtaaagaaatcaatgtcggcgtgcaagcttggatggagtacaaagacagctacgacttcccgaagcgcatgaacgtgtcgactagcgggtctatggtcttcacgcccaacacggcccggttcatcgatttcaagacggggcggccggtgccgggctacgaggcgcctgcggacgaggagatgtacgcagctctgcagaggttcctcgacgtgatcgagcagtacgaggacatggtgcttccgggcttcttcaacttcccgaagccgggcgccatccccgaggacttgctgatgccctttggcaagtttgtcgccaagtacaacctagaagctgccgtccctcagctctgggacgcgacagtgcaaggtctcggcgaccccatgaacgtgccgacgctctgtgtcattcaagcctcacccatccccatgacccgcgccctgctgggtcaggccgccgcggcagtgcccgagtcgggccggctgtacgacttgtatgagagcgtggccaacttcctcggcgatgacgtcctctactcgagcaccgtcgtctcgtccacccgcaacggcgaccgcaacgccaagaagggcgtctcgctgactgtgaggggctccggtggcaagctcacctgcgtcgaggccaagcggcttcttatttcgatcgagccgacgttggccaacatggcccccttcgacctcgacccgtcggaactgatgatcctgtcaaagttcgagtacacgaccgtctacgccggtatcctccgccacccgtccctgcagataagcaacgcctacaccggccgcaccaccggcccggcctcgctcaactacaccgacttccccgtggcgccgcaggtcggccggatcgaatacctcggcgacaccgaggacctgttccagttcaccgtcgtcggcaccgcccacgacaacaccaagagcatgcaggctctcctgtccaagtcgatcgacaggatgatcgccgccggcatcctcccggccgcaccccgcggcagcggcaggatcgactacgccatctttgccgaccatgggcccatgcactcgcgcgtctcggccgctcaactccgcgccggcttcatccagcagctctattccctccagggccgccgtaacaccttctacaccggcgccgctttctcctccggcttctccactgtcctgtgggagttcaacaaggtgttgctgcccaaggtggtcgaggggctttga

SEQ ID NO: 955 - DNA, 747 bp, Myriococcum thermophilum
atgctcctcctcaccctcgccacgctcgtcagcctgctggcgcgccacgtctcggcgcacgcccggctcttccgcgtgtccgtcaacggcaaggaccaaggggacgggctgaacaagtacatccggtcgccggcgacgaacgatccggtgagggacctgtcgagcgcggccatcgtgtgcaacacgcagggggccaaggcggcgcccgagttcgtcaaggcggcggcgggcgacaagctgaccttcctgtgggcgcacgacagcccggacgacccgggcgactacgtgctggacccgtcgcacaagggcgccatcctgacctacatcgcgccctacccttcgtcggggggtggcgatccgacgggccccatctggaccaagctggccgaggaggcgttcgagggcggcaagtgggcgaccatcaggatgatcgacaacggcggcaaggtcgacgtgacgctgcccgaggccctggcccccgggaagtacctgatccgccaggagctgctggccctgcaccaggccgactttgcctgcaacgacccggcccaccccaaccgcggcgccgagtcgtaccccaactgcgtccaggtggaagtgtcgggcaacggcaacaagaagccgaaccagaatttcgacttcaacaagggctatacctgcgataacaaggggctgtactttaacatttacatcggccaggacgaccaatatgtgccccctggaccgcggccgtggaacgggaactga

SEQ ID NO: 956 - DNA, 4416 bp, Myriococcum thermophilum
atggtggggccaccatggctcacggtggcctttggggctctcggcctcatgccgtgggccgtagctatcaaccctccggtcggaatgggagcacaggcagctgacgtctgccctgagcggtgcgccgtgtccggtcctcagacggggaactggtctgtctatccagacttcaaagtcatcaagagatgccagcagaccatgttctttgatttctccatctacgaccccgttgatgacccaaacaccactcatcgcatccatgcttgctcctccttcagctcggacttcggcaacatagtaccatcggcgccggtagccgcgaagcttgtcgactcggccagctctgtcgaagtcgagttcgagcttggatggtggcacgagggcttcggtcttgccaaggctggtatccagtcacttgtaacacagattcgcgattatatcgatcgcggtcacggaccgccagaccggccatttatcctgtatggccagtctgggcaagccacaatcggtctgtacatcggccaaggtctgctgagccaaggccttagcgcctcgggcctccagatcttccaagacaacttggacaacattggcgtcaccacacccagtctggcaatgcagctctgcggcccggaccacaccagcacccacatctttggcgttgcagtgactagcaacggcacattcgcacccatccagaacgccatcaagtcctgggccaacgcgacgtgcctttcgtttctcggatcaaagagcttccccggcacagccaagttcaccaagcctctcttgaagggcgcctccttgagcagctccaccctgactaattccacccatgatacaggtgcgaagggattcgccccgcattccgagcacctccaggagcgtgccgaatgcaggacggtacaagccgaggccggcgagggctgtgcagagctcgcagtcaagtgcggcatatcgggagacgaattcaccaagtacaaccctggcatccgcagctccctcagaccaaagcagcacgtatgctgctccagcggcactcttccggatttccgcccaagacccaacccggacggatcgtgcttctcatacacggtccagaacgacgataactgcgccaatctggcggccgagtacgggctgacgaacgaagagatcgagagcttcaacaaaaagacttggggctggtctgggtgtgagttgctctatgccgggaccatcatgtgtctgagcacgggaatgcccccctttccggcgcccattcagaatgccgtgtgcggccctcagaagccgggtacgaagccgccgacagacggctccgacattgccgagctcaatccctgccccctgaacgcctgttgcaacatctggggccaatgcggcatcaccaaggacttctgcatcgacacaaacacgggcgcgccgggtacagccaaacccggcacctacggctgtatctccaactgcggccttgacgtcatcaaggggaagggggatggctctatcaggatcgcctacctccaaggctatgggctaaaccgcaagtacctgtcccaagacactctccagatcgacacttcgaaatacacgcatatccacttcggattcgccgtcctgaccccctcgtacgaggtcaagtttgatgacctgctgatctcgtacgaatttggagaattcaaacgtatcggggaggctaaaagaatcctatctttcggcggctgggacttctccacctctcgcgacacctacttcatcttccgcgaaggtgttaagccggccaatcgcctgaagatggcctcgaatcttgccaacttcatcaaggagcatgacctcgacggcatcgacatcgattgggaataccccggcgctccagaccttccccctgatgaccccggcaaggaggaagacggccccaactatctggccttcctcgcgatcctcaagaacctgctgccgggaaagtcagtctccatcaccgcacccgcatcgtactggtacctgaagcagttcccgatcaaggagatcagcaggattgttgactacatcgtctacatgacatacgacctgcacggccagtgggagggttgcgacacgggaaattgccttcgcagccagatcaacctgaccgaaaccaagcaggcgctggccatgatcactaaggccggcgttcctggggagaagatcgtggtcggggtggccagctatgggcgctcctttgaaatggagcagccgggttgctggggtcccgagtgcaagtttaccggcagccgattcgagccccgggcgaagccggggaggtgtaccgataatacagcaggctacatcgccgacgccgagatcaaggagatgattgacggcgagtccggcggcagcaccgccaagcgccagagccgcgtggtagcgcacttcctcgacaccagcagcaacagcgacatattacttgtctccgatgacaaccagtgggcggcgtacatgagcgaggacacgaagcgcgtccgcacgaacctgtatgcgaactggggcatggcaggaaccacggactgggcgagcgatctgcaggagttccacgacccgcccaagccggcaaaggaccgggcttcctttatcgcgctggccgccaacggagaggacccgaaggaggaccccatgacccttggccactggaaagagttcacctgcgagcatcccgcgatttccgatctatactactactacccgtgggagcgctgggaggcattggacgcggacagcgcctggcgtgaaatcctcgtcaagtggttcaagaccgaccgcgcacgtggtcttttgttttccgagtcggtcgagcagacactcaagtcaggtcccggaatgaactgccagacgtttgcaaaggacaaagaccattgcgatcacgcgataacttgcccggatagtgccgacagcgacaagtccggaccagcggcgcggctcgtctggaacgcgctgatagagatacatagtatataccatggttactatgacgccctactggctgcgcaaggacagttgaacagcgctttggacgatctggagaatacgttcgctccgatctcggaacccgagtccaaccaatggctcttgatcctgatcgacctcatcacaatcggatctcttacgactgccgggcccttctttaacgggtacctcaagacgctggacgcccttaataccgaacagacgtacgataatgtcaaaggcaccagcatgaacatgatcaaccaggtcacggcactggcaaagaacatgctggagaaccccgaagatgacggctgggccccagagaagcaagacaagttttcccactacatcggccaagtcatctttgggtggcggaacgctacggaaagggctgttcaggacttgtttcgccgccccgaccaggatcgtgtcaacgtgctggggaaggccatggcaaacggcacgctcaccgagggcaggagggacaggataaagcccaagatcaacacgcagaccgagctggtggcaaacgtcctcaagaccgtcttcggtttcaccatccccgccctgtggcgccgctccaaaacatatgcctttgttctcgactcgggtgccggctgcggcggtaatcccgccagcaagtacgtcaacgacaccacagctgacgagacgagtgtctgctacaatggacggctctactatctggtccacccggacggcgacgcccgggaatgccggtgcgaacgtgtgactgataccggcccttgccagaccacctgccgggacaataccttctcggcgccggtcggcctgagcaggcttggggactttggccgcgtgaccaaggaggagctggtgaagggggcggtgcgcacgtggatcaagaaaggccggaccaacgagggcgagccgccggacccgatcaaggacgagtcggtcaagagcggactggtggacatggacatcacaacgcccggcttcgtccggctccccgtctgcagtgcagaccgggcgttccggtcgtggaacacggccgagaagggcagcagccccaactacccgtgcgacatcccgccgggcatcgaccggtgcggcgcctccagcttcgaggaccagaccagcgacgcgtcccccaaggtgtcggactgccggcagatcatccgcaacatcgagggcgacgcgtccaccgagtggacgcaccgcatcaccggccaccgcgagatcctgtcgtacggcacctgccactttggcatcgagcgcaccggcggcaccggcggcgccgtcgagttcaaggtcggcggccaggacgtcatcgacatcatcaacgactctatcaagaagttcggcggcagcggcaaaatcggtgccaagggcgtcatgccctgcgacggcaccaccgtcggcacgacggtgaatgtattgtggggcatctactga

SEQ ID NO: 957 - DNA, 1619 bp, Myriococcum thermophilum
atgaagctcaacttgctcgcttcgtccactctgctggcgctcgcctcagccgtggctgtgcgttcgccacagtggaagtcctacgacggatacaaggtcgtccgtctcactgttggggaagatgtggccaaggtcagcgatattatcagccggctcggcctcgagacttggaagggcaaggttcgggccggtgccgtggccgacgttgtgatcccgccctcgaagatcagcgcctttgtcaacgagacggctggtatggaagccgtcaccatgcatgaggatctcggagcgtccatcgcggccgagtcgacgttccatacttatgtcggtatgtgaccatcacaatgtggctgtcactttacttgcatttttttttttatttcgtttttgtatttgttgcttaccagttgcatctcagctggatctgccaacgagacctggttcgagtcgtaccacagcttggacgaccatgttcagttcctgaacgacctccaggagcagttctcgtcccagtccgagatcgtctcatctggaaagtccctgaacggaagggacattaccggaatccacttctggggccagtcgggcaaggggaaacccgccgtcgtcttccatggcactgtccacgcgcgcgagtggatcacaaccatggtgagctaacatacactcccccaatgcactgctatgagagacgaatgattttctaatgcgttttgagctaggtcgttgaatatattgcctactacctgctcaacaaccaggactctgctgagatcgccggcttcctcgacaagtacgactttatcttcttccccttcgtcaaccctgacggtaagtctttcatgtctttcactgctgaatattatctctgttggtctgttcttctgacgatccactctaggattcgcctacacccagacagacgaccgactctggcgcaagaaccgccagagcacctctggtagcagctgcctcggccacgacatcaaccgcaactgggacttcaagtgggacgtcagtggcggtgcctcaaccaacccttgtgctcaggacttcaggggaagtgagccggccgatgctcccgagacccaggctctcgccgccttcctgcaaaagacacagcagagccagggtgtcaagctgtacatcgactggcattcgtactcgcagctctttatgactcgtaaggctccctcacttcccatccccccctaattacctcttgtcatgttctttccttgtctgttatgttatatgttgggagctttgaagctaacatgacgaccaccttttttaccttcttctctcctccagcctacggatactcgtgcacagacgttgcgcccaacaactccgagctgcagtcccttgcccggggcgccgccgcggccatcagggaggttcacggcactagcttccagacgggtcccatctgctccaccatctacaaggccaccggtaacagcgtcgactacgttagcgatgtcatcggtgccgactacgtcttcaccgccgagctgcgcgacaccggaagatacggcttcgtcctccctgccaaccagatgtacccagcagcgaggagacttgggctggtgtccgctacctgctccagaacatga

SEQ ID NO: 958 - DNA, 1449 bp, Myriococcum thermophilum
atgatccatgtctctccattggtgaggctggccttggtgctagccaccagccggctggcgagcgcagacagcaccaccaccattgacgccggctcaaactggggtacttgggaaggttggggcacgtctctggcatggtgggctgccgctttcggggaccgagatgacctggccgatgccttcttcaccatggactcggcgacagtgaactcggagacactgcccgggctgggcttcaacattgtgcgctacaatgcgggagcgtcgagctggacaccagtcggagacgagaggatggtcgagtccccttccatccggcggtcgcgccagatggaagggttctggctggactggcacgacacagaccccaactcgtcggcctgggactggagcgtggatgtgaagcagagggcggcgctccagaaggcgatcgagcgtggggcaaacaggacggagctcttctccaactcgcccatgtggtggatgtgcaagaaccacaacccgtccgggtccagcgacggcagcgagaacatccagtcgtggaacctggagcagcacgccctctacctggccaacatcgccatggtgttccgggaccggtgggacatccacttcgagagcgtcgacccgttcaacgagccatcggccaactggtggaaggccgacggaacgcaggagggctgccacatcgacgtgcccacccaggccaccatcgtcaaccacctcgccaaccacctgtcccagcgggggctggacaccatcatcacagcgtcggacgagtcctactacgaccaggcgctgtacacgctccagaacatcggcagcagcgcactcagccacatcagccggatccacgtgcacgggtaccagtacggcagcggcaatcggaagggcctgcgcgacgcggcgggggcggcggggaagccggtgtggaacagcgagtacggcgacggggtggcgtcgggcgagaacatggtgcggtacatgctgcaggacctgcgcgagctccggccgaccgcgtgggtgtactggcaggtgctggacggcggcggctggggcctgctggacgccgacaacgacgagaagtggctcggcgggccgacgcagaagtacttcctgctcgcccagttcgcccgccacatccgccccggcatgcgcatcctcgacggcggcgccgacaacgtggtggccgcctacgacgctgccgcctccaagctcgtcatcgtcgccgtcaactgggacgccgcccagtacatcaactttgacctgtcgcgcttcgccagcatccctgccgatggtaccgccgtgccgcgctggaacactcagatcgggagcggcgatcgttatgtctaccatgagagcgataccgtcatcagcgggaccaggttctggtcttactttgaacagaacatggtgcagacctttgaggttactggtgtgaaactgtaa

SEQ ID NO: 959 - DNA, 1406 bp, Myriococcum thermophilum
atgcacatgaagtcgcttaccgcgctcgcactcgcggcgccggcgtcggccctgattcgtttcggctgctcgcagctcgtcgtcgagcgtctggatcccctcgttactcctgggagcaacccatctccgcatcttcaccaaatcatcggcggtgtaagtaccgaaaagcgtagagaacaggtgtttttttttgggggggggggggaaggtgcacctgtttgaatagaaggggggaaaaagacagactgaacaaatccgcaacgttgatcataaccactaatcatttgttttagaacgctttcaatgccaccatggatccggggagcggcgacatcgcggagcgggcgacgtgcacgacgtgccagttcagcgaggacttctccaactactggacggcggtgctcttcttccgggcgcgcaacgggtcgtaccaccgggtgccgcagatcccgaacatcgggttcgagggccagaagggcggcatgacggtctactacatgcaggacgggctggccaactacgagcagacatccaaggtgacggccttcaagacgggcttccgcatgctcatcggcgacgcgtcgtaccgcaccaaggaggaggcgaaccggttccggcagatcacgtacacgtgcctgcaggacctcggcacccgcttccccgagaccatggacttccccaaggagccctgcccggccggcatcatggccaacctccgcttcccgacctgctgggacggcaagaacctcgacagcccggaccacatgagccacatgtcatacccggagacgggcactttcgagaacggcgggccgtgcccggcttcgcaccccgtgcgcgtgccccagctcatgtatgagaccatctgggacacgcgccagttcaacgacaaggagctgtggcccgaggatggctcgcagccgttcgtgtggtcgatggatgacaggtattaagaatcatccctcccccttccttcttttctcttcccttcccaaccactccccccccccccccctccttcaggcctggctagaaccccgagatgctgacgaccgaccgataatttgaacagcaccggcttcggctcgcacggtgattacatgttcggctggaagggtgacgcgctgcagcgggccatggactcgccgtgctacgtcaactgcccgacgctcaagacgcagagcatcgacgagatgaaccagtgctccgtccccgacgtcgtgggcgagcagatcgacggctgtaagttgaacacgcgccctccttggccggccggctggctggctggttgccacaacgggcacggcaacgagctggtgtggcttgatgattagaaggtaccttactgacgcgcaacagggctcgagtcgcttcctggctacccgccgcaggagaagaaggcctga

SEQ ID NO: 960 - DNA, 890 bp, Myriococcum thermophilum
atgaagactcttgcgcctcttattctggccggcgctgccagcgcccacaccatcttcacctctcttgaggtgggcggcgtcaaccatggcgtcggccagggtgtccgcgtgccgtcgtacaacggcccgatcgaggatgtgacgtccaactcgatcgcctgcaacggccctcccaacccgacgacgccgacggacaaggtcatcacggtccaggctggcgagaccgtgacggccatctggcggtacatgctcagcaccaccggctcggcccccaacgacgtcatggacagcagccacaagggcccgaccatggcctacctcaagaaggtcgacgacgccaccaccgactcgggcgtcggcggcggctggttcaagatccaggaggacggcctgaacaatggcgtctggggcaccgagaaggtcatcaacggccagggccgccacgagatcaagatccccgagtgcatcgaacccggccagtacctccttcgcgccgagatgcttgccctgcacggagcctccaactaccccggcgcccagttctacatggagtgcgctcagatcaacggtacgttttgtccacaaactcccgataaacatgagaaggggaagcagaacaaactcgtggctaacatatacttcttcagtcgttggcggcaccggtaccaagacgccgtccaccgtcagcttcccgggtgcttacagtgtacgttgtcccaataaacctcccatttacttttttcaacctttttaagaactacaacctcctgtgtaacggttactaacatggtcatgatcaacagggcaacgaccccggtgtcaagatcaacatctactacccgcccgtcaccgactacaaggttcccggccccagcgtcttcacttgctaa

SEQ ID NO: 961 - DNA, 3374 bp, Myriococcum thermophilum
atgcgactgttcggccgtagagtcggccgaggggccatgtccacctgggcggcctcggctgctctgatttcgttgttttcttcacggtttgggctctgcacggctgcgtcctcgtccgacccgagtccaattctcgacaatgggctccaggacgagatccagtgggaccaccgcagcatcatcatcgggggcgaacgcctgttcttgttcgggggggagatgcaccccttccggctgccggttcccgagatgtgggaagacgtcctgcagaaaatcaaggccatgggcttgaggatggtgtcaatctacgtacactggggattccacgcgccaactccggacactgtagacttcagcaccggcccgcgcaacatcacccgcttccttgagatggcccgggacgtgggcttgtacgtgatcgtccggccggggccgtacatcaacggagagttgaacgccggcgggctggcgctgtgggcgacgacgggcgagcacgggtcgttgcggctgaacgactcggcgttcacggaggcgtggacgccctatcaggacggaatagcccaggttacgcggccgttccagctcacagaggaggggacggtcatcatgtaccagatcgagaacgagtacgggaaccaatggctggacccggaagccaaagtgcccaaccccgaagctatctcgtacatggaggcgttggaggacaatgcgaggaggaacggcatcgtcgtgcccctcatccacaactcgccgaatctgaactcgcccgtgtggtcaaaggactacgacacggtcggtgccggcggcaatgtggacatctacggggtagacaactacgtgagtacaatgacgtgattatactccccgcggtcctcagaaaggaaataaagtcaaagaataaacccagctaacaacaggaaccttctcaccttcccgcagccgcaatgttggtcctgtgtcctggaggaatgcggtaacgtaacaccatgggcggtccgcgactactttggccacttcgagaaagtctctcccacgcaaccgtcccttatgcccgagttccagggaggcgccatgaacccgtgggccgggccggcgggaggctgcaaggagcgcaccggggcggactttgtcaacttctactaccgcgacaacattgggcagaaggtcagcatcctcaacctctacatgatttacggcggcaccaactggggctggctggcggcgccgttcatcgggagcagctacgactacggggctgccatctctgaggaccggagcatcgacgacaagtattacgagatcaagagcctcggcttgttcaccagagccgccaacgagctggcctcgactgatcgagtggggacggggctcgagtacacgaataacagcaacctgttcacggccgagctccggaacccggagaccggcgcggggttctatgtcatccggcatgacgacaccgcctcggattcggaggagtggttcgttctgcgggtcaataccagcattggcgagttcttcgtgcccaaggtgtcgagcgctgttgtgctgagcggacacgaggccaagatcctggtagccgacttccattttggcaaccatacactgtactactcgactgccgaggtactcacgtattccatcatcgacggcgaaaggacagtgttggtcctgtggacgcccacgggccggtcgggcgagttcttcctcaagggcgccaaggaagggaaaatctcctcgggtccgtcggtaacactggacgctcaggaagagggcataatcgtcgcgtggtacgagcaaaaggaggagaggaccattctcgagttcgacaacggggtgacggtagtgcttgtagacagggcaactgcctataaaacctgggttccggcgctcaccaaagatcctaaggttcccgtggaccagactggtaagtatctgggggtcgaagaggattggttgccccagaaatcagaaatcagaaataataattaatcatgaggcgctaacattcacgaactttgttagtcattgttatcggcccctatctggtccggtccgccagcctgaccgacgacaccatctccatccagggcgacgtcaagacggctacgccaatcgaggtcttcacctcctcccgcatccagagcatccgctggaacggccgcgacatgcagacgaccccgtctaactattctactctcacaaccaccataccggcacccaagcccgttcaaaacccggtcgggattggcacctggagagtgcacgacgccctcccggagcgcttcctcaactacaccgacaccgggccggcgtgggtcctggcgaaccgaaccacaaccccgaacccggtcgccggcccggacacggccacccggccattcctcttcgcagacgagtacggcttccacacgggcatccgcctgtggcgcggccacttcttcgtacctccttccaacaccaccaccaccagtacctcgtcctcttcaacagctaatagcagcgaagacgagccccgcccgacgggcgtgttcctcaacgtgcagggcggcacggcgcacgggtggtcggcgtacctgaacggcgagttcctgggttcgtggctgggcagcacggacacggcggcgagcaaccgcacgctgtcgttcgtgctcggcgacgaagaaaacggccggtcggccgtgcgggagggcgagaacgtgctgctggtggtgcacgacgacacgggccacgaccagctcggcgccgccgtcaacccgcgcgggatactcaacgccacgctgctgggaggcgggggcgataatatcggcttttcgtcctggaaggtcgccggcacggcgggcgggtcggccccggacaaggccgggctggacccggtgcggacgcactacaacgagggcggcctggtggccgagcggctgggctggcacctgcgcggcttcgacgactcggactgggagacgacttcaaccgtcagcttcgacggcccgggagtgcgcttctaccgcgcctgggtgcccctggacataccgccggatatcgacctgtctctcgccttccgcttcacgcccgccgccgaggacgtcgagcgggacacgctgggctaccgcgtgctcctcttcgtcaacggctggcagtacgccaggtactacccctccatcgcctccgaggacaccttccccgtcccgcccggcgtgctcacctacggcggcgacaacctgatcagcttggccgtctggtccctgcaggaggaaggggcccgggtcgatctcgacatcctggtcaggtatgtgacggactcgtcgctggatgtgcactttgatggcgactatctgcggccgcaatgggatccggagaggctcgagtacgcgtga

SEQ ID NO: 962 - DNA, 922 bp, Myriococcum thermophilum
atgtaccgcacacttgcttccgttgccctgctcgcgggtggcgctgccgcccacggtgctgtgaccagctacaacatcgctggcaaggactaccctgggtagggatcccgacagcaaccatgagatctttctctatctcgctgtccttgtactaacacgagcaccgctctgcagatacaacggctttgctccctccggtgagcccgtgatccagtggcaatggcccgactacaaccccatcatggacgccagcgactccaagatgcgctgcaacggcggtaccggggcggagctgtatgctgaggctgctcccggcgacaccatcactgccacctgggcccagtggacgcacgcccagggcccgatcctggtgtggatgtacaagtgccccggcgacttcagctcctgcgacggctccggcgccggatggttcaagatcgacgaggccggcttccacggcgacggccagaccgtcttcctcgacaccgagaacccctccggctgggacatcgctaagctcgtcggcggcaacaagtcatggagcagcaagatccccgagggtctcgccccgggcaactacctggtccgccacgagctcatcgccctgcaccaggccaacaacccgcagttctaccccgagtgcgctcagatcaaggtcaccggctccggcaccgccgagcccgactcctcgtacaaggccgccatccccggctactgctcgcagagcgaccccaacatttcggtaaggaggctttttttttccaaatccaaagaggggaactattatgtgttggtgctaacaggtcactccctcttgcagttcaacatcaacgaccactctctcccgcaggagtacgagatccccggccccccggtcttcaagggcaccgcctccgccaaggctcgctccttcaaggcctaa

SEQ ID NO: 963 - DNA, 1827 bp, Myriococcum thermophilum
atgagactcaagtcggccctagccggggtgctggcctggggaacggcagcaacggcggcggcggcggcagagaactcgacttattacaacccaatcctcccaggatggcactcggacccgtcatgcgtacaggtggagggcatcttctactgcgtgacgtcgacctttatctcgttccctggactgcccatctacgtgtcccgggacttgatcagctggaagctcgtcagccacacgtggaatcgcgagtcccagctgcccgggtacagctgggcgaccgagaaccagcaggatggcatgtatgcagcaacgatccggcaccgtgacggcgtcttctacgtcatctgcgagtacctgggcatcgctggcaaagatgctggcgtgatcttccggacaacggacccgttcgatgacttagcctggagcgacgctgtgaccttcgaggcgcccaagatcgacccggacctgttctgggacgacgacgggacgacatgggtggccacgcagggcgtgcaggtacagaccatcgacctcgagacgggcgaggtcggcccggccataccgctgtggaacggcacgggcggggtgtggcccgaaggcccgcacatctaccgccggccggaccactactacctcatgatcgccgagggcggcacggccgaggaccactccatcaccatcgcccgcagcaagaacctgacgggcccgtacgtctcgtgcccgcacaacccgatcctgaccaaccgcggcacgaacgagtacttccagacggtcggccacggcgacctcttccaggacccggaaggcaactggtggggagtcgccctggccacccggtccggcccggagtactccatctacccgatggggcgggagaccgtgctgttccccgtcacctggcccgaggacgactggccgatcctgcagccggtgcgtggcgagatgtctgggtggccgctgccggctccagtgcccacccgggacctgccgggggaggggcccttcaactcggacccggacgagtacgatttcacggatgaaggaaaaccgctcccccgaaacctggtctattggcgggtcccgcgcgagggtgccttcaccaccacggaccgcggtctacgagtcgtcctcggccgcaaccgcctcgacggctggcccggtcccgtgaacgacccggccgggcgggccgtctccttcgtcggccgccgccagaccgacagcctcttcaccttctcagtcgacctccacttcgccccgaccgacgccggccaggaggcgggcgtgactgccttcctgacccagctcgctaaccaccagctcggcatagtcagcggcggagagagcggacggatgctgctgcgcctgaacgcgacaaggcatgtcaacgacacggagctgccggcggattggatcaacaaggacgacggcagcgtccaggtgcggctggagatccgcatgacggccgaggacccgacgcagtaccggttcgcggccatgctggcgacggctgacgacccggagagcacccgcatcgaggccggttcggcgtccgcccagttcctcagcggcggctccggctccttcgtcggcaccctgctcggcgtctacgccacctgcaacggcgccggcctcggcatcgactgccccgatgatacgcccccggcctactttacacgctggaggtacacaggcgagggtcagttttacacggagacggatattcgtccctctcaaccgaccgacgagggccacggccagggtaagggcaagggcaagggcaaaggcaagggccaaacggttgccgagaaacgcaggtttgtagcttaa

SEQ ID NO: 964 - DNA, 1510 bp, Myriococcum thermophilum
atgcggttctcgacactgtttctgacgctctgcactgccgtcctcccgtcctcggccgacctcgtcaaggaaggctcgaggtgcgtcgtgacgtccctgtcggccagcgccgcatcgtccgaggctggcgagctggtggcacgccagggccaggtggacgacacgccgcagatcctcgaggccttctcgcagtgcggccaggacggcaccatcgtcctggaggagggtacctatcacatccggcaggtcatggacttgaccgacctgagaaacgtatccgtcgaaatctacggcacgctgatctggagcgctgataacctcgactactggcgccgggccagccctgctgtcgtctacgccgatcgccagacggcctggcgcatcggcgggcgcgacatctccattcgcggcttcggcaaggccctcttcgacggtaacggacaggcatggatcgacctggccaacggcgctgccaacctgcaaggaaggcccatctcgttgaccatctggtacggcaccaacgtgttgatcgacggcatcacctggtaagcttcttttgccctctcaccttttttcgttgtggttgttattgccctaatctgaccgggcgaggataggcgcatgtcacagttctggcatacttttgttgcctactcggagaacgtgactatgaccaaccttgacatgtacacctactccaacaacggtaggagctcccagaacactgacgggacgaatacctggaactccaaggacatcttcatcgcaaactggacggtgacatgcggcgatgtgagtgaaccctaagccgacagtccaaagagcagcaacgctgaccttttcgtgaccaggactgcatcgctgttaagggtaatagcaccaacgtccacgtcaagaacgttacatgcaacgagtctggttctaccgtcatcggcagcatcggttccaactcgtggcaacccgactacgtcgagaacatcgtgtttgaggacatcaaggccaaccattcaagcaatgtcgcctggatcaaaacgtaccctgggaatggatacgtccgcaacgtcaccttccgcaactaccaattcacggacgtcaaccagcccatctacctgtcctcgtgcatctgtaagtctttttgttctctccgtcctctccctctctcgccctctatctgcctttcccaaaatgtagcaggaacagaaaaggggaacctaacagaccataactaccagactcgtacaacaactgcgactcgtcccgcctcaggatcacggacgtcacctggcagaacatcacgggcacgagccggtacaacgtggcggtggccatccactgcagcgcttctgccccctgcgacggcttccacttcgagaacatcgatatcaagcccaaggacggcggcaccgccaaggttctgtgctccaacatccagaaccagaactccatgggcatcacttgcaccgggccctgccctggttcccagccacagcagctgaacgggaacgtataa

SEQ ID NO: 965 - DNA, 2181 bp, Myriococcum thermophilum
atgctgtggacgagccttctctcggccttcctcctcaccggggtggccgaagctgctgggcgtagcatagcgcatgccgggaaacgccatgtcgagcacgctgcgaagagggcgaggcccatcatatccccgggttcttatcaacccgtggtcgagcgggaggagaaggcgcccaaattcctgaccccgaagacaaagagtgggttgccagtttccttaggagggatgcccagttgggccagaagacgtttctaactggcaattagaatttgccgtcgacgggaagggcattccggatgtcgactttgacatcggcgagtcatacgccggcctgctgcccctcagcaatgaccccgccgacgacaagaacctgtttttctggttcttcccctcgaccaacccggcggccgagaaggaaatcctcatctggctcaatggcggtgtaagtcctgcccgcgtaagccgttcctgccagtacgccttcgctgaccgttgaggataatgcaaaacaaacgtacagccgggttgttcgtcctttgagggattgctacaggagaatggcccattcctgtggcagtatggcacctataagccggtcaagaacccttggagttggcacaccttgaccaacatcgtctatgtcgagcagcccgtcggcactggcttcaccacgggcacacccaccatcactaacgaggaggagctcgctgctgagttcatgggtttctggaagaactttgtcgacacctttggcatgcacggctacaaggtgtacattgccggcgagtcttacgcgtacggtccctctttacccgtctctttactctcctttgatactttttttttgaggaggttttagcactgactctctctcaagtggctactactgcccgtatattgctgccgccttcctcgacgcggaggacaagacgtacttcgacatgtcgggcatgaccatttacaacccccttctcgccgccgacgagcttcaagaacccatcccagttgtggctttcaccgagtactggaccggcctcttccccttcaacgacaccttccgtgccgacatcaagcgccgcgagaagaagtgtggctatgacgattacatggccaaatatctcgtctacccacccaggggccccctgccgtcccgcctgccgggcacccatccggacggtaccacgcgtgaggagtgctggaacatctactgggacatctttgacgctatctccctcctcaatccctgcttcgacatctaccaggttgctactacctgtccccttctctgggacgcctcggcttcccaggatcgttctcgtacttgcctgagggtgccaccatctacttcgatcgcgaagacgtcaaacgtgccatccacgcgcccgtcaacaagacttgggaggagtgctcgtcccgcgatgtcttcgtcaatggcacagaccgctcggagccccccatcttccgggctctgccgcgcgtcatcgacggcaccaagaacgtcattgtcggccatagcgctctcgacatgattctgcttgctaacggcaccctactggccctgcagaacacaacctggggcggcaagcgcggcttccagaaccggccggaccagccattctacgtgcccctcaacaacatcaccgacctctccaccctggctgctgctggcgtcttcggaagccttgtgtcggagcgcggcttgacatacgtgggtgtcgacctggccggacacatggtgccccagtatgccccttcggccgcctaccggcacgtcgagtacatgctgggccgcgtggactgcatgaactgcaccaagccgttcactacggatcctttcacgccccagagtgaagggaagttgggcaagggcactgcgccgcagggctggagcaatgcgcatgggcacggccatgaccatggccctggccatggtcacggtaaggggaagggaaaaggtcctagaaggtttatagtctagtgggatgaaaaaaaaaggaggggaggggttatcactagagatttgatgccccataaaaatataatcagggctgaaaccattgcatgagacaaccggctttgaatttagtggcggttcggtaatgactgtgatcataacttgtccatccagccgtcctccgccctgtcatgatccttcgccagtcctttcatcagtctaaatga

SEQ ID NO: 966 - DNA, 3029 bp, Myriococcum thermophilum
atgtctgcgaataacacggcctccaagcccctcatcgccaacaacggcgccgcgactgccaccgcctccaccaccgcctccgccgtctcggcctctaaaggcaattgacaatcaaagctgacgcagcgtttcccgttcctccgcacgaagcgcggcatcgccctcgtcgtcgtcgtcgccatcgtgctcatcgtgggcggcggcctgtccgggctggccgcgctgcgcacccgtggcggcggggatggggactctgcgtcggcagacgagtatggcgagggggtgattagagacgactcgtggttctacgggctgtcgccgcccgtgtatccctcgcgtgagtgattaccgtttatttttatttttatttttttgctggtttccttataatttttcttggccattatcttgggcggctaacagcgatgttagcaaatataacgggcagtgaaggcaggtgggtagaggcgacgaggaaagccagagagttggtgcgaagaatggcgcttgaagaaaaggtgagtggtatgctccccaatgcctacggggggatgttactgatggccggtgggatgttttagatcagcttgactgccggcgatggctcgtttcccggctgttccggctctctcccgcctatcccacgcctcaagttcccgggcatgtgtctgagtgacgcgggaaatgggctccgcggtaccgatttcgtcagcacctggccaagcggtatccacgttggtgccagctggaacaaggctctcacccgccggcgaggctctgggatgggaggcgagttcaagaccaagggcgtcaatgtgctactggggcccgtcgttgggccggctggccgagtggtgctaggtggcaggaattgggaaggtaaaatctcctttccccaacagcgctcccgggaccagtcgctaaatttaacaggcttctcggttgacccgtatttgtcgggagttttggtatccgaaactgtcacggcagtccaagcagccggcgttatcaccagcaccaaggtaggatctcccaatcaatatctcgctttttttttttcactacgcttgttccgcgttgcttcccttgctggagtctcctccgaacatttattatagatctggctaacatccaacgcagcattatattgcgaatgagcaagagacgaaccgaaacccctctggggatattcagtcggtgtcgtccaacattgatgataggaccatgcatgagttctatctatggtaagtcgtgaactcctgttcttgttcctcctgaagccctgctaataaagtgctaggccttttcaagatgctatccgcgccggcagtggaaacataatgtgttcgtaccaacggctcaacaattcgtatggctgtgcaaatagcaaggcgctcaatggattgctcaaaaccgagctcggctttcagggttgggtcgtgagcgactggggtgcccaacatgccggagtcgctacggcgctggctggaatggatgtcgtcatgccgaacggtgatgccttttggggtccgcatctgatcgaggccgtcaacaatgggtccgttgccgagactcgcgtggacgacatggtcgtcaggtaagtgccacttcgcttccgcttcgtagccattaacctaacaaactgcagaacgctcgcgacatggtacctattaggccaggatcgggacttccctcgccccggcatcggcatggccaccgatctcacgagggatcacaggattgtcgatgcgaggaactccagtttccggtcgacattgtttgacggtgccctcgagggccacgtgctcgtcaagaacgcccgaaatgccctgcccttgaggagaccaaagatgttgtctgttttcggttattcggctaagaacccggaccacaacaatccctcacctggtcaatcaccctggctctggggatccgagtccttcaactacaccgagttcagcggccgcttcttcgggttcggcggcgaatacagctctacgcccattgcgtttaacggcaccatctactcaggtggcgggtccggggccacatcgccggccaccatcgtttctccctttgacgcgctgatccagcgggcatacgacgatggcacggctctcttctgggactttgtcagcggagaacccttcgtcaatcccatgtcagatgcctgcttggtcttcggcaatgcttatgccaccgaggccgctgaccgacccggcacccgcgacgactacactgacggcttgatcaggcacgtcgcagaccgctgtgcaaacacgatcgtcgtcatccacaatgcggggatccgcctggtcgaccagtttatcgaccaccccaacgtgacggccctcatgttcgcgcatctgcccggggaagcgtctggtcgagcggtggtgtcactgctgtacggggatgagaatccgtcgggcaagttgccgtacacggtggctcgcaacgagtcggactatccggtgctggggccggacgtggagcccgaggggagcatgttcgcgctgttcccgcagagcaacttcaccgagggcgtgttcctggactaccggcactttgacgcgcggaacatcacgccgcggtacgagttcgggttcgggctgagttataccacgttcgaatacgacaagctggtggtgcggaaggtaggctccgccggacggttcggtgagtacccgacgggacggatcgtcgagggcggccaggaggacctgtgggacgtgttggtggaggtgtcggccgaggtgaccaacaccggggaggtggacggcgccgaggtggcgcagctgtacgtggggatccccgccgagggggcaccggtgaggcagctgagaggcttcgagaagccgttcctcaacgcgtcggccacggcgacagtccggttcccgctgacgaggagggacctgagcgtgtgggacgtggtggcgcagaagtggcggcttgtcaggggcgagtacaagatcgaggtgggcagcagtagtaggaacttgccgcttgttgggacacttacgatctga

SEQ ID NO: 967 - DNA, 1107 bp, Myriococcum thermophilum
atgaagatctccacccccttcttcctcgcgtcaacactcctcctcagcccggccgcggcgcagctccacgcgctcgccaggaaggccgggctgctctacttcggcgcggccacggacacgcccggccagcgcgagcgggccccctacccggagtcgtacccccggtacgacgccatcttccggaacccggccgagttcgggcagacgacgccgaccaacgggcagaagtggctcttcacggagccggcgccgcggctgtacaacttcaccgagggcgacgtggtggccgacttggccgagtcgacggacaagatcctgcggtgccacgcgctcgtgtggcacagccagctggcgccgtgggtcgaagagaccgagtggacggccgaggagctccgggcagccatcgtgcggcacatcaaggccgtggccggctactaccgcggccgctgctacgcctgggacgtggtcaacgaggcgctcgacgaggacggctcgtaccgcaagagcgtcttctacaacgtgctcggcgaggagtacatccggctggccttccgcaccgccgccgaggccgacccgaccgccaagctgtactacaacgactacggcatcgagcggcccgactcgcccaagaccgccggcgccgtccgcctcgtccgcatgctccgccgggccggcatccgcatcgacggcgtcggcatgcaggcccacctgcacgccgacgaccaccccagcgccgaggacctgatccgcaccagcgagcgttacgcccgtctggtacccgaggtcgccttcaccgagctcgacgtccgcatcaagctgcccgtcaacgagaccaagctcgagtggcaggccgactgctaccagaaggtcgtgaccgcctgcgtcaaggtcaaggcctgcgtcggcattaccatctgggacttttacgaccccttcagctgggtgcccgacaccttccccggccagggcgcctccctgctgtggttcgacgacttctcaaagcacccggcctattaccgcatggtcaagaccttcaagaagctgatccgtgaaaggaaaaagccgtggtggtggaggcgcgacgaagagacagtaacagcaaactaa

SEQ ID NO: 968 - DNA, 540 bp, Myriococcum thermophilum
atgctcccactgacgacgcttctttgggctctggcgccctcgctggccgcggccaccctcacgttccaggtgcagcggacgggcaactcggcggacgagcaggacgcgtacgggcggatcgaggcggcgatgcaggcggcggtgaaccggtacaaccggctggcgccgctggcgcagaagcagatcacggtgcagtacgtgccgtcggtgccgacggcggacggcaacttcaacggcaacatccgcttcggcgccgaccgcgcctacatgacggagcgcaccgccctgcacgagatctcgcacacgctcggcgtcggccagacgcgcgccttcgacgaccgctgcgccgccggcccctcgggatggcccaccgccatcgagctcctccgctcctgggacggcccggacgccgtcatcaactgcggcggcggccacttctggccctacggcctcaactacgagaacgagatgagcgagaccaacgccgagcgtcactgcctgctcgtcaatgccatgcttgctgacgggcttgccggctaa

SEQ ID NO: 969 - DNA, 1494 bp, Myriococcum thermophilum
atgaagctcaatcaattcctcgcgggcgctctgctcgcagcgcccgtgctggctcatccgactcacaaggagaaggtttatgcccaccgggctctccccctcgagcgcaagtctctcgcccactgctccgccaagttcaaggagcccgagttcgtcaagaggacggttgagcaccatggccgcgagttgcaccggctgaagcgtgcgcggggcattccggttgaggaagagtaggttccgctccttatcccctgtaagacggacgggaacgaggggaaaaacacaataataccggggtgcgtgtggcttgaattgctaacgacccccctctttaggcccaaggtcagcccgcgggactacctcgatgtcatcaggatcgaccaccagagcaacaagacggtcactgaggggatggatctcagcacgctgtttgacgactacggcgcctgcatgctgatgcccgcggtcgatcagggtcccctgtgtaagtttccgcgctgggttggagtctacagaaggatggggggaagtggcttgatagtaatcggtcagtcgctaatttgttggcgctacacagacgtcaagggtgaggagatccggaaggaaattacgaatggcgaggccggcatccccttgaccctggccatccaggttgtggattacaacacgtgcgagacggtcacggatgcgtatgttgacatctggagctgcaacgcgactgtgagtacaaaatacccgtccttttttttttttctctttgactgctttgttgggaagtagggcgggagtcggtaggctgacgagcaaaacagggcatctacacgggtgtgcagggctacccaggcatgggcgaccccaacgacgcctcgatcctgcagggtaccacgctccgcggcgtgcagccggttgatgaccacggcattgcttcttttgactcgctgttccctggtcactacgacgggcgtgccagccacattcacggtgagatccaaggttctacctgaacgatggcgagcaagggaagactaacgtatcactgcagctattgtctaccttggcgccaccaaggagcctaacaacacgatcacgggcggccgtgcggcgcatgttggccagatctactttgaccagaaactcatcacccaggcggaggcggcgtcgccctacaacaccaacacgatgagaattgtgcccaacgagaacgacttcctcttccgggcgggcgccaacggcgacgacccgatcgtccgctacgccttcgtgggcgacaagattgaggacggcctgttcgcctggatccgcttcggcattgaccagaacgccgacatgcctgtcaacccagctgctttctggaccgaaaatggtggtgttatgaacccaaccggccccatctctcagcttcctcctggcggcttccctggctggcccggctggggcatgaagaagagggttgaggccctcctggctgcggctgaggagaagaacaacgcgtag

SEQ ID NO: 970 - DNA, 894 bp, Myriococcum thermophilum
atgaccggatatcttggtcgactggttgccacggtaggcctcacggtggcctctctccgcggggttgcggccgccacgccgtcgtccggatgcgggaagacgccgacgctgatcacggacgggtcggcctcgacgccgctgactctgacgtccaacggcaagcagcggcagttctacgtcaagctgccggacgactacgacaacagccacccgtaccggctcatcttcaccctgcacgccctcggcggcacggccgagcaggtcatcagcgggacgggcggctacctgccgtggtacggcatcccggacctcgccagcaacgacacggtgggcgccatctacgtggccccgaacgggctcaacaacggctgggccaaccagggcggcgaggacgtggccttcctggaggcggtgatcgaggcggtcgaggcggacgtgtgcgtggaccaggacctgcgcttctcgacgggcttcagctacggggcggccatgtcgtggacgctggcgtgcgcgctggggcagcggatccgggcggtggcggcgctgtcgggcagccccttcatcagcggcggctgctcgggcgccggccagacggagcccgtggcctactacggccagcacggcctctccgactcggtcctccccgtctccggcggccgcgagatgcgcgaccacttcgcccagaacaacggctgcgacgccaaccagaacatccccgagcccgccgtggggagcggcacccacgtcaagacaaccctgaccggctgcgacccggactaccccgtcgtctgggtcgccttcgacggcgaccacaccccgcagcccatggaccggggcgctacctccactttctcggccgtggagacctgggagttcttttcccagttccagtaa

SEQ ID NO: 971 - DNA, 1094 bp, Myriococcum thermophilum
atgcgtctccttcaattgatcaccaaggcggctgccatggccggcctggctgcgggtgcctcgctgcagccggtgagcaactttggcgacaacccgaccggtctgcagatgtacttgtacgttccggacaatgttgcgcccaacccggccatcatcgttgctgtaagtcgacaaaaaaaaaaattcgatccatacacgaatattaatattcgtgttgtccggttttaagagttgatgaatggcgaccgctaactttcgttgtcaaacaaatttagctgcacccctgcggaggatcggcccagggatggttctcgcagacccagctcccgtcttacgcggaccagcttggcttcatcctcatctatgccggcacgacccagatgagcaacgtatgtaatagtcaaaagtcctattattataacacgagagttttataataaccttactaaccatatttcttttttctttttcctttttcgttacagtgctgggatgtccagaacccggctagcctgacgcacaacggcggtggcgacgccggcggcatcgtcagcatggtcaagtacacgctgcagcagtacaacggcgacgcgtcgcgggtgtacgtcatgggcggctcgtcgggcgccatgatgaccaacgtgctggcgggctcgtacccggacgtgttcgaggccggcgcggccttctcgggcgtggcgcacgcctgcttcctgggcgccgactcggccacgcccttctcgcccaaccagacgtgcgcccagggccagatccagcgcacgccgcaggagtggggcgacctcgtgcgcaactcgtacccgggctacgacggccgccgcacccgcatgcagatcttccacggcaacgccgacttcctcgtccgccccgagtgcgcccaccaggccctctcccagtgggccaacgtcctcggcctcgagctcacccagaccaaccagggcgtcccctcggccgagtacacccaggaggtctacggcgacggcacccagctgcagggcttctttggcgagggcgtcggccacatcgcccccgtcaacgagcccgtcatgctccgcttctttggcttgttggagtag

SEQ ID NO: 972 - DNA, 1542 bp, Myriococcum thermophilum
  misc_feature (307)..(915): n is a, c, g, or t
atggtctccctctcttctcttttcgtcgccgcctatgcggcggctgtggccgtggcggccccgagcgaggccgcccttcagaagcgccagacgtacactagcagccagacgggctggcacgacggctattacttctccttctggaccgacggcggtggcaatgtccggtacacgaacgaggccggtggccggtacagtgttacctggtccggcaacaacggcaactgggttggcggcaagggctggaacccgggtgctgctcggtatgttcttttttcggttttccgtttcatcttaagcaaaaaannnnnnnnnnnnnnnnnnnnnnnnnnnnnnnnnnnnnnnnnnnnnnnnnnnnnnnnnnnnnnnnnnnnnnnnnnnnnnnnnnnnnnnnnnnnnnnnnnnnnnnnnnnnnnnnnnnnnnnnnnnnnnnnnnnnnnnnnnnnnnnnnnnnnnnnnnnnnnnnnnnnnnnnnnnnnnnnnnnnnnnnnnnnnnnnnnnnnnnnnnnnnnnnnnnnnnnnnnnnnnnnnnnnnnnnnnnnnnnnnnnnnnnnnnnnnnnnnnnnnnnnnnnnnnnnnnnnnnnnnnnnnnnnnnnnnnnnnnnnnnnnnnnnnnnnnnnnnnnnnnnnnnnnnnnnnnnnnnnnnnnnnnnnnnnnnnnnnnnnnnnnnnnnnnnnnnnnnnnnnnnnnnnnnnnnnnnnnnnnnnnnnnnnnnnnnnnnnnnnnnnnnnnnnnnnnnnnnnnnnnnnnnnnnnnnnnnnnnnnnnnnnnnnnnnnnnnnnnnnnnnnnnnnnnnnnnnnnnnnnnnnnnnnnnnnnnnnnnnnnnnnnnnnnnnnnnnnnnnnnnnnnnnnnnnnnnnnnnnnnnnnnnnnnnnnnnnnnnnnnnnnnnnnnnnnnnnnnnnnnnnnnnnnngaataatggctgacggcatcccacagcaacatcagctacacgggccaatacaaccccaacggcaactcgtacctggccgtgtacgggtggacacgtaacccgctgatcgagtactacatcgtggagaacttcggcacgtacgacccgtcgacgggggctcagcagctcggcagcatcacggtggacgggtcgacttaccggatcctcaagacgacgcgcatcaaccagccgtccatcgagggcacgcggacgtttgaccagttctggtcggtccggaccaacaagcgcagcagcggctccgtcaacgtcaaggcgcacttcgacgcctgggcccagctcggcctccgcctcggcacccacgactaccagatcatggccactgagggctacttctcgagcggctccgctaccatcaccgtcagcgagggcagcagcaacggtggcgatgacaacggcggcggcgacaacggtggtggtgacaatggtggcggtgacaatggcggcggtaactcgggcaactgcagccccctctatggccagtgcggcggccaaggatggacgggcccgacttgttgctctcaggggacctgccgtgtctccaacgagtggtactcgcaatgcctgtaa

SEQ ID NO: 973 - DNA, 1507 bp, Myriococcum thermophilum
atgcacttctccgccgctcttctggctcttcttcccgtcgccctcgcggcccccgctggcgaggtcctcgacaagcgcgccccgctccttgctgctcgcagcggccagcacatcccgggcaagtacatcattaagctccgcgagaatgccgccgacgacatccttgagaaggccatcggcaagctccgctccaaggccgatcacgtctaccgcggcaagttcaagggcttcgccgcccatgtcgacgaggatatccttgacgccctccgtcttctccccgaagtgagttcgcatcccggaaaaagaagtggaaaaaatgtgggggaaaacatggcgtagattaaccgctgtcttttgtacaggttgagtacgttgaggaggacgccatcgtgaccatcaacgcgtacacctcgcagtccaacgccccctggggtattgcccgcctctcgtccaagtcgagcggctctcgcacctacacctatgacagcagtgctggcgagggcacttgcgcctatgtgatcgacacgggcatctacactggccactccgtatgtctataccgcttctctcaccgtcaagtaaaacctattttctaacagctgcccatcatgcaggacttcggtggccgtgccaccttcgccgccaacttcgccgacagctcgaacaccgatggcaacggccacggcacccacgtcgccggcaccatcggcggcaccacgtacggtgttgccaagaagaccaagctctatgccgtcaaggtcctcggctccgacggctccggcaccacgtaagtaacgcaagcgctccgcccgcgccgcgatctgaccgagctgacatttccccctttttttccctaatagttccggcgtcattgctggcatcaacttcgtcgctgaggatgcgcccaagcgcagctgccccaatggcgtcgtcgccaacatgtcgctcggcggctcctactcgagctctctcaaccgcgctgcggccgcccttgtcgactctggcgttttccttgccgtcgccgccggcaacgagaaccaggatgcctccaacacctctccttcctccgagcccagcgtctgcaccgttggtgccaccgacagcagcgacaggaagtccagcttctccaactacggcagcgtcgtcgacatccaggcccccggcaccaacatcctgagcacctggatcggcagctcctccgctaccgtaagcctggcccactctttatcttctcccttttgcaatattttgcccattttttctctttgggaaatggaaacaagaatcaaatgactaacgtgcgatacctcaaaagaacaccatctcgggtacctcgatggcctctccccacgttgctggtctcgctgcctacctcctgggtctgaatggcccccagagccctgcctctctctgcaactacatcaaggagaccggcaatgctgtcgtctccggcgagcccagcggcaccaccaaccgcctagctttcaacggcaacccctccgcctaa

SEQ ID NO: 974 - DNA, 1218 bp, Myriococcum thermophilum
atgcgcgtctcgagcttggttgcggccctcgctaccggcggtcttgtcgccgccgcgcctaagcccaaggagcaatcgcaacccagggccgtggacgtgaatcctttcaagggcaaggcgcagttcgtcaacccggcctgggcggccaagctagagcagaccaggcaggccttcctggcaaagaacgacacggtcaacgcggccaagacggcaaaggtccagcagaccagctcgttcgtctgggtctcgaggatcgccgagctctccaacatcgacgatgccattgaggctgctcgtgaggctcagaggaagacccgcaggaggcagatcgtcggccttgtgctctacgaccttccggaccgcgactgcagtgccggtgagagcgccggcgagctcaagagcgacgagaacggactcgagatctacaagaacgagttcgtcaagcccttcgccgagaaggtggcagccgcaaaggacctcgacttcgccatcgtcctggagcccgactcgctggccaacctggtgaccaaccagcacatcgagttctgcgccaacgccgcccccgtctaccgtgagggcatcgcctatgccatctccagcctccagcagcccaacgtgcacctgtacatcgacgccgcccacggcggctggctcggctgggacgacaacctcccgctggccgccaaggaattcgccgaggtggtcaagctcgccggcgagggcaagaagatccgcggcttcgccaccaacgtgtccaactacaatcccttccacgccatcgtccgcgagaacttcaccgagtggagcaactcgtgggacgagtctcattacgcttcgtcgcttgccccgttcctcgaggaggaggggctgccggcgcacttcatcgtcgaccagggtcgcgtcgccctgccaggcgcccgcgaggagtggtaagttctgacctgactgcctaccccttgtcctcttacgatcagaactacgttactgactgacatacgcaggggcgactggtgcaacgttaaccctgctggcttcggtcccgcgcccacgaccagggtcaacaacaccgtcgtcgatgctctcgtctggatcaagcccggtggtgagagtgatggcgagtgcggcatggctggcgctcccagggccggccagtggttcgacgaatacgcccagatgctggtcaagaatgcccacccatccgtcttccgcaggtggtag

SEQ ID NO: 975 - DNA, 4739 bp, Myriococcum thermophilum
atggcgtctctactcgcacttttcttgactttgacggccgtacaagggagccttgtacggtcgtccagcacgattccagttcgcgggctatcgaacaaaaccaaactcgattatgaccctcgtgtatgtgacggctctctgtcatgtccgcgagtgactggaatgctgacatgtctcttcaacagccggcgccgtcgtacatggttgacaaccagcacaacttctacaagacagcgcccgacaaaggcaggcagaatggcccagtttgggcctactcgggcagtctagatacttacttgagcaatcttcagcgcggcgttgtactccgcgccagctctcccgggtccaatgataccaagcagaccagctttaggtctgacgaccgcaaacggcagtcatcagacttctggctctcaaacttgggacctttaggaatcgtaagttaggcgacctgattgagactaatattaatcatggatagatgcaactctaacgtggaggtaaacaaacaatagcaaccatttgctggtggagacgactaccagttcttccgcaacgttgtggaggactttggcgccgacaacacgggagaaacagacacaaccgaggccctcaacgcggcatcagccagttggaatatggaaacagtgggtgactcccggacgcgatgcggcgagacatgtggaaatacgttcgcacagggtgccatcgtatacttcccaggtggcacctacaagatttgccggcctgtgattcagtattactatacgcagtttgttggtgaccccaatgacatgcccgtcatcaaaggctgcgacgagtttcagggaatcgctttaatcgacgtggatccgtacgtccccggtggatcgggtcagcaatggtacatcaaccaaaaccagttctttcgtcagatccgcaactttcgcttcgacctcaccgatatgcccgagtcgacggcggacaacgaccaggatcttgtgcccacgggaatccactggcaggtgtctcaggccacatcactgcagaacctagtgtttgacatgccgaccacgagcaccacgactgccgtcggcatcttcactgaaaacggcagcggcggtttcgtgtccgatatcgagttcaacggcggcaacattggctggcgcgcgggctctcagcagtatacggcgcgcaacctagtgttcaacgagtgcaatacggccgtccagatggtctgggactggggctggaattggcagcagattaccgttaatggcggcaccattgccttcaatatttctggagcaggtggtgacaccggtcagggcatcggcagcgtgtccatcatcgattccactatccgagacgtcgaggttggagttctcaccaacagccactcgacctcacccaacattgtgctcgacaacaccaagtttgagaacgtggccagcccggtcaggactgagggtggcgacaccatcttgtcggggaattcggatctgtgggccacaggcaagcggtacaacggttcagacggctcgacagaaacgggcgccgtgaccgcccctggacgaggggagggtctgaacgattctgatggcttcctctatgtgcgctctaggccgcagtacgagaagcacagtgtcgactccttcctcgtcgcgaccacggatggcggatgcaagaatgatgccagtggtgaccaagcgtcttgcattaacgccttcctgcgccgtgccgtggacagtggcaagatcgcctactttccggccggtgtctatgcggttggatccacggtacacatcccgaccggttcggtcgtgcaaggttcttcatggtcgcagattctcggatcgggcttctacttcagcgacatgaaaaatcccaaagtcatggtacaggtcggcaacaagggtgaaataggtaccatggagattaccgacatgttgttttccgtgcgtggcgccacagccggcgcgatcttgatggagtggaacgtcgccgccgtgtcccagggcgcagcggccatgtgggattcacacttccgcgtcggtggcgccctgggcactaatctcgacctgaccaattgtcccaagttcagtaacaacgccgaatgcatcgctgcctccctcctgtttcgcgttaccgcccaagccaatggctattttgaaaacgtgtgggcgtgggtgagcgaccacgacaacgacgagtcgatctacaaccaaccagactccagctccacgcagatttctatttttgcagcccgtggcatgctcattgagtctgaaggcccgtcatggttctacggcggtggctccgagcacgccgtgctctataactatctcattagtggggccaaaagcgtgttcatgggccacatccagaccgagtcgccttattatcagcctgttcccaagcctccagaacctttccgtgctgccgccagcttccccaacgaccctgacttcagccactgtgaggttacggccgaagtgtgggatgaccggtgcaactacgcctggggcctgcaaatcattgattcgaaagatatcatgatccattcggcgggcttgtacagcttcttcaacgaatactatcaggactgcgttcctacccacaactgccagaaacgcatcctcgaggttaagggctcaacgggcgtcgtcatttataatttgttcactgtcggaaccgtcaacatagccagtggtatcgacaacaccaatatcccgcaggatgccaaccagcgagggttcaccaccgaggttagcgtatgggtgccacttcctgggtccgacaatgtcgacattgtgtgggttggtaccgacgtgtgggacacgcccacggtgagctgcccggcccagtcctgcatgttgatcattccgacgtcctcgttggggtcatcaaccaccatcagacccagcagctatacaacctctctggagtatggaggattctcgagtactaccatcggcggtgtccctactaccatttttgtcacaacaaccactactgtcaccatctcggtgccacccatcgtcaccgacggcatcggcttctccaacgtaaacgtgtcgacgtcgggggccatgcccattaccatctttcccagcgtggaaatcccgcccgtggttgtaacattgccgaacggcgagggcagcgaaaccactcggacagtctcccttcccccttggcctcagatcgacggaggtccctcaattggatatacagacccggccaccttaccttctaacagcagtaccggcctccctaccagcacgacctactttactcctatcagtacctccattacagtgcccagcgccacagtaacaacggtgacgttccctggctcgactggagccattactatcagctgccctgctactacctccattgtcttctccacgccggcaatcgccgtcgccacgacgtgtactgactcggccgatctgaccctgaacttcgcgtgcccgacaacccgggtcctcaccttcctcgggcccgccacggccgtggctaccgttgactgctctctggtcacggcctggaagaccggatctagctctgccaccacgccgctgcccacgtacacatcctggcctccctacgtccgaatcgagcctgaagaagaggagcgcgatgaaccagaacccgatgacgacggcgtacatgttccgtgtaccgcctggttcttcttcttttgcatatcgtggggcgagatccgcgtccgctcctggcactggatcctgccgccgggtatctacggcccgggcccggcgcccatcaacaacatcaggccccccccaggcgtcgaattccgcggaaccctgcctaactggccgcgaatcactattgggcccgaccaccaactcacaaccgagtcggagcccgagtgcgaaacgcagacggccgaggcctgcacgacgaccgactatgtctcggacggtacaacgacgtcgtcgacgacgctgtgcgaaaccatcacgggctgctccatcagcgtatcggactcgtctaccgctgtcgtggtcggaagccagacggctgcgccggtcggcagttggggtgatgagcgatgggcaaccatgacgctgggtgacgcctacaccaactcggtgtatgaggccatcgagtcccgtatggcgcgcgaggaggtcagctccggtggcaccaccctctcgtttacgtcgggcccaaccgctgggccgacgtgcgccggcgcgagcaccgcgtgcggcggcaccatctgctcaggctactggtgcaatccgacaccaacgggcgcaccgccggggtacaaggacccgaaggacccgaactcaaaggggtattcggcgccaacgacgacgatcggtggaggaggctcgtcgtcgtccacgagcacggcgaaacccacaacgccgctgacgcggggtcccatcaactgcttcgacgaggccgatttccccggccatgccgacatccaaccggacgatcaggacgagttctcagtcgaattcagcagctggcagtcggacacgggtgacgacctgattgggccggacgacccacccgttaagctgcacgggatagatctccacggggtcaactatgattactcctgcagctgggttcccggctgcgttactgaggtcgagaagcagagctttcgctttccgcttggcatgtcgaatagcttgatcactgcttacttgctggtccgggaggattataccaagtgtaagtggaccctgtcccgaagaacaaagccgtag

SEQ ID NO: 976 - DNA, 777 bp, Myriococcum thermophilum
atgcgtaccaccaccatcgccaacgccttctctagcctcgccctgctgctcggcagtccggctgccgcggcggtggtagacaagagacagagcaaggtggggcaatactgtaatccgacaacgcagatctgctacgtcgagtactcgtggggtcccacggtgcctgtcttccgcatcgcggtccccgacagcgcgtcgaccggcaccgacttccagacgctgctccagatcgtcgcgcccgccaccctcggctgggccggtttctcctggggcggcggcatgacggccaacccgctgacggtggcgtggcccaacggcagcggaggggtcacggtttcttcgcgatgggcagagtacgtcttccttcctccctacctccctcccttctcggtccttgtgcttgtgtgccgccatgattttgaatgaaaccagtggtgactgacgggttctgcttttttggggcaaaaccaaagttcacggaccctccccacggtgtactcgtcggcgacgtaccgcactatctcagccgagaacaacgggacgcactggatagtcgagacggtctgctctggatgcagccagtggagcggcggcaggctgagcaccacgggtgtcaatacctttgcctgggccgtcagtgaccaacccgtatcgaacccggccgacccctcgagcactttccaggtccacaacaatatcggcagcttcggtacatccttggacgacggaaaggtgccccaggcgacctttgaccagtacgtgcagggggcccagtaa

SEQ ID NO: 977 - DNA, 1352 bp, Myriococcum thermophilum
atgaagccagtcccagcatacacgttgatagcggcagcggtgggtagcgcctcccgggtgccccggatcccgcgacaaagcggcggcaacggcacgatcgaatgcgccccggtcccgtcccccttcccgacctggcaagaactcccgctgcaaccgtcactgcccgaccctttcctgccgctggcgtacaccacgcccgacgacgccgagaacgtggtggccggtagaggcaagggcagggtccagactccggaggagtggtaccagtgccgtcggcccgagatcatccagctgctgcaggagtaccagtatggctactacccggacccctccgaggagatagtcgaggctacgcgcagcggcaacacgcttaacatcgtcgtgacggcgggaggcaagcagggcagctttagggccactatttcgttgccctcgggtgcttcggagtcgaacccagcaccggtggtgatcaacattggcggtatgcagaaccagccgtacctgaacgcggggattgccattgcgcagtttgattacacgagcgtggcaccggatagtaacgcgaagacgggcgcgttctggagcatctacaatgggagggatatcggcgtcctgacggcttgggcctggggcttccaccgcacgctagatgccatcaacatgacggttcctgagatcgacgcgagccgggcgggcgtgaccgggtgctcccgcctgggcaaggcggcacttgcggcgggcctcttcgacgagcgcatcacactcacgatgcccatgtcgtcgggcgtccagggagcggggccctaccggtactatgacctcagcggacagggcgagaacctcgagaacagcaagcagggagctgggtggtggaccaacagcaaactgggtacttttatgaatcacgcggagaatttgccgtacgacgcccacaccatcgtggccgccattgcaccgagggccgtcatcatcgaccagggcaccggcgatccgttcgtcaacagcaaaggcaccgccatcgtcgtttacccggcggccaaggttgtctatgactggctgggagcaagcgaaaacatcgggatcagtgtgcgcgggggcggccattgcgatctaagcggctagtaagtgccagaccagatcctttcatgtgtttgttccatgtagtattcctagcgacgaaggctgactaataatgctacacttctcgctctattattagctcttctattctgccatacgtccaaaagatcttctttggaaccccgacagacaaggattacaacgatctgggctcatacggctcacccatgtcgtcggcatatccatgggcgactgccgttccgggagcgtga

SEQ ID NO: 978 - DNA, 744 bp, Myriococcum thermophilum
atggtttccgtcaaggccgttctcctcggcgccgccggcgccctggctttccccttcaacgttacccagttccaagagctcgctgcccgcgccggcacccctagcggcactggcacccacgacggcttctactactccttctggaccgacaacggcggcaacgtcatctacgagaacggccctggcggttcctacaccgtccagtggcagaactgcggcaacttcgtcggtggcaagggctggtacgtgaacaagaagagagagagagagagagagagagaaatggtgaaatcgaacatgaagtagtaaccggtttgcaggaaccccggccaggcccgcaccatcacctactcgggcaatgtcgacttcatgggcggcaatggctacctggccatctacggctggacccagaacccgctgatcgagtactacatcgtcgagtcgttcggctcgtacgacccctcgtcgcaggcccagaccttcggcaccatcgaggtcgacggcggcacctacacgctggccaagacgacccgcgtcaaccagccctcgatcgagggcaccagcaccttcgaccagttctggtccgtccgtcagcagcaccgcacctcgggctccgtcgacgtcggcgcccacttcgaggcctgggcccaggccggcctccagctcggcacccacaattaccagatcgtcgccaccgagggctaccagagcagcggctcctcttccgtcaccgtcgaggcctaa

SEQ ID NO: 979 - DNA, 1232 bp, Myriococcum thermophilum
atgaagtggaacgtcctcacagctgccacggggctggctgcccctgcgcatgccctactgcgcttcggctgctctcaactcaccgtccagcgtctggaccccctggtcacgcccggagagaatccgtcgccgcacctgcaccagatcattggaggggtatgttgctcgcatatatctctctttataaccctaaggaaaaaaaggggcagaatcaggctgaccagatttcatattagaactcgttcaacgtttctatgccttacccggagcacgaccttgtgaccaagtcgacgtgcacgagctgccagttcactgaagatttttccaactactggaccgcagtgctcttcttccgtgcgaggaacggaacctttaagcgtgttccgcagctcgctcaggcgggcatggagggtactaacggaggcatggtatgcgccacttcaacatggatagatggatgatgtaatcggattggacactcacacttctccctcccaaacaggtagtctactacatgtcggacgccctgttcgacacgcagcagcggtcgacggtgacggcgttcaagccgggcttccggatgctgatcggcgacgcgtcgtttagcaaccgggagcaggcgcgcgagttccggcagatcacgtacacgtgcatggagaaccaggcgtcgcggcaccccgagacggtcgggttccccaagacgccgtgcaagctgggcatcatggccaaccaccggttcccgacctgctgggacggcgtcaacctggactcgcccaaccatcgcgaccacgtggcctacccggagtcgggcaccttcgagtcgggcggcccctgcccggcctcacacccggtcaagctgccgcagatcctgcttgagaccgtctgggacacgtcccagttcaacaacccggacgactggcccgaggacggcagccagccgtttgtctggtccaccggcgacagcaccggctactcgtcccacgccgactacgtcttcggttgggagggtgactcgctccagcgcgccatggacgcccacacctacgtcatcgccccgatgctcaagacccagagcatcgccgaccagaacaggtgcactgtcaaagacatggtcggcgaggacattgacagctgtacgtgttccctcttcaccttttcccgcttccaacagaggctaacaattcttgcttgcagggctccctgaactccctggcggtcacgagatctactaa

SEQ ID NO: 980 - DNA, 1017 bp, Myriococcum thermophilum
atgggtcgcttcctaaagacgacagcactggctgttctcgccacggttggtgcagctagcgcaatccctttcagggctaactcctcgacgaagtacctcatcacattcggcgactcgtattctcagacaggtttcgacgtcgggggcaccaagccgtcggcggacaacccgctcggcaaccctcctttgcccgggtggacggccagcggggggttgaactgggtgggtttcttggtctccgagttcaacacatcgacattgttgtcatacaactttgcctatggcggcgccacaaccaacgccaccatcgtgccaccctaccagtcgaccgtgctcagcttcatcgaccaggtggcccagttcagcgacagcatcgcaagcaagccggactatgcgccgtgggacgccaacaatgcgctctttggagtctggatgggcgtcaacgatgtcggcaatgtctggtgggatccaaactacgactcactcttagagcagatcatggcgagctacttcggtcagcttcagattctctatgacgctggggccaggaactttgtcctcctcagtgtgccgcgtaagttgggatcttaccctctctgagtcttcttccccctgactactcggaagcggataatgctgacggactgccactcgccgcgacggggctggggcgaaataatcacagccattcaccggacaccggccgtgttgctcaacaactctcccgaggaccaggaggtcgaggcgctcgcgattgacaagtacaacgaggccatcgcggccaacctagaggccttcacggagaagaacgagggcatcaccgccaagatcgtcgatacaggggtgcccttcaacaccgccctcgacaacccaaccgactacggtgctccagacgccacgtgctacaacagcgacggcaagtcctgcttgtggttcaatgactaccacccaggagttgagatcaacaggcttgtggcgcaggctgttgccggtgcttgggagggcagctttttctga

SEQ ID NO: 981 - DNA, 972 bp, Myriococcum thermophilum
atgaagcttttgagcagaaggattgcgatgcccctcctgggcgctctgaccgcggtgacgtccgctgcctcgctcacccagatcactgaagactttggtcccaacccacgcaacgtcgccttctacatctacgttcctgatgacctgccggccaatgctcctatcctggtcaacccacactggtgccatggcactgcccaggcggcctttcagggctcgcaatgggctacgttggcaagccagcacggctttatcgtcatctacccgggcacaccggcctcgtcgacggatcagtgctgggacgtgtccagccgcgagacgctgacgcacgagggcggcggcgacagtctcggtatcgtcagtatggtccgctggacggtggaccggtacgaggcggacgcgagccgcgtcttcgtcacgggcgtctcctcgggcggcatgatgacccaagtcctcgtgggtgcctacccggacgtcttcgccgccggtgccgcctttgccggtgtgccctttggctgcttcgcgccacccggtaacaacacgggccaattcggctattggaacgccgactgcgctactggcactgtcacccacacggccaaagaatggggtgacctcgttcgcgccgcctacccggagtatgacggctggcggccgaggctgcagatcttccacggcaccgaggacgagacagtcagctacgtcaaccacgaagaggccatcaagatgtggacaaatgtcctgggtctgagcgagaaccccgctgaggtagtacaagacactcctttgcccggctggaccaagagcgtctacgggccgacgggttggtttgaggcctacagcgccgctggcgtcccccacaatatccaggtccaggagaataccgccttggcattcttccagctcaattgcaccgccaactgcttctcctggggtcagggcagccccaccggcgagaattcgagtgcgtga

SEQ ID NO: 982 - DNA, 1668 bp, Myriococcum thermophilum
atgaagttctcatattccctgctagcagccgtggcggccgaagcggccgtaatcggcagaggacgtcacgtaaagccgccgggtgaggatggccgctataccatctcttcggacggtatcaaggcgcaggtacgcacgcccacgacgaagacacgcgggggaggcgcagaagcaaattcaaaccattctttctttttcgtcgctaaccacttgtcattagttcatcccgtatggcgccaccctgaccaacttgtttgtcaaggacaagaacggcgaggatattgacgtggtgctcggctacgacgatgtcgattactaccgtaagtctcggctccgctgacagagagcttagaaactgtggggaacgggaagacaaacttacgaggacgcatacagccgaggaccccggccacccggtttacaacgccattcctggccgatatgccaaccggatcggcaacgggaagtacactctcgacgggaagacgtacctcaccgagaagaatgacggcaacaacacgctgcacagcggcaccaacaactggtcgtaccgcttctgggacgtgaccgaggtcacggacgactccatcaccttctccatcctcgacaaggccaattcatcccagggcttcccgggcgacgttaaggcgtccgtcacgtactcggtcaagggctcgacctggaacatcaagatgacggcggaggctcttgaccacaagactcgtatgtgctccctttcctcccttctcccctctgttcctttttttttttcattttcacttttccattcccattttttcaccctttctttcccacattatggatccaattctttttttcttcctcccctagcacctaaggaacgacggctgacatgcatggttaattaacccccgcctgtttgacctataacagccctcctgctcactcagcacacctacttcaacctggacgcgtaccggaacccggacacggccaagatctgggaccacgggctgtacctgccctactcgaagcggtacctggaggcggaccagggggcgcttccgacgggcgagatactgacggcggagccggggtcgatcaacgactttgcgtcgtcgccggacctgacggtcgggcacgcgcgggaccagcccggcttcgagggcaactgcggagccgacggcgcctgcgagggctacaacggctactttttgatcgaggacaagccggccgacgacgccgtcgtcgtccgcctctcgagcgccttctcgggcgtcaccgccgagctgcgcaccgaccagcccggcgtcgtcctctactcgtgcaactggatggacggctccgccgacctcaagagcacccagggcatcgagggcgtcaacgagaaggtcatccgcagcagctgcatcgctatcgaggctcaggactacccggatggcatcaaccagtgagtttccccttggtttttgcctctcaaccttttcaatccccctccccccccgggccccgtttcccttccgtttcgcacgctctaccttgttcttgttgggggagtcatggctgacaatattttctttccttcgttgcagccctgaatgggagcgtctcgatgcgcagatctggggtcctggtgagacgtacacatgggagagttcatggacctttggcctgctcgacgagtga

SEQ ID NO: 983 - DNA, 1506 bp, Myriococcum thermophilum
atggtgtttaccctgaggcttgttggcggcttactcgccacggccactaccatctctggcgcctcttggactcccgaagtcgtcatcagggatgtcgccgtcatcggtggcggcgccagtggtgcctacgcagctatcaggttgaaggaggacttcaataagagcgtcgtcgtgattgagaaggctggccgcatggtacgcactgcaaccccccccccccccccttttcattctgtgatggttgtcactcaattgacatgaatcgcacagggcggccatgtctcgacctacgatgatccgaaaacgggctcatcgtacgactttggcgtccaatctttcaatgattacggcccagccaaggccttttttgagcgcatgggtgtacccatcggcagttccccgcgcgtcccactgacgtcgcagtacgccgacttcaccaccggcgcccctgtaaacttcaccgcgccgtcaaacgatgaccgcgtcgtggccctgggccgcttcctcaacgccaccgaggcctaccaggagtacatcttgccgggctactggaacttccccgctccagacaagatccccggggatctgctactcccgtttggcgagtttgtggagaaatatcagctccatgccgccgtaaaccaggtcttcgaggttaccggattgggcgtcggcgacatgataaacaccctcaccctctatgtccttggagcatttggtcaccccatgatccgcttcttcctcggtgaggccgccaccttcacacctgactcccgccgcaacatcgagatttatgaggcaattcagtcccgcctcggcagtgacgtcttgctcaacaccgaggtcagctactcgctgcgcacccccatcggccacattctgtggaccaaatctgcctcgggcaagagcaccatcatcctcgcccgccgcctgctcatggccatcgagccgacgcccgagaacatggcccccttcgacctcgatccggtcgagcagaagaccctctccaaatttagctattcgcgcctccatgccggcattgtctcgcatccatcccttcctgtcaacgtctccctggtcaacactcccgcagctgcgagcccggacaactacgtcgttcttcccaagcccaacttcaacgtccgcttcgactacatgggtggcggctcggacttgtggcgcgtcgtggccgtcggcgacgagcagttcaccaaggacaaggcgcaagacctgatccgcgagaactttgccgccctcgtagaggcgggcaccgttcagcccaagacggctaacccggcagaggagctcgagttccgcgcctgggccgaccatggcgccatgcacatgcgcgtgtccgcggccgagctcaaggacggctttatccagaagctgtacgcgctccaaggccggcgagccacgtggtggaccggcggtgccttttcggtgcagttccaggccgtcctctgggcgtttgacgacattttgttgcccaagatgtttgcctaa

SEQ ID NO: 984 - DNA, 1232 bp, Myriococcum thermophilum
atgcggctcagccttcttactattgcatcggtcctcgctccattgaccgcggcgttccctctcgggacctttggcctcgcgtcgtgggatatcgagggctttgccaaggacaaccccatcggcatcactaccggtggcaaaggcggatcaacagtgaccgtggataatgcggctgacttcagggaagccgttgcgggagacgagcccaagacggtgctcgtcaagggcgagatcaacctgccgtctcggccaaagattggctccaacaagtccgtaattggtgtcggacgcactgcccacatcaccggcaacggcctcgacgtgttcaactcgaccaacgtcattatccgcaacctcaagatcagcttcattgaggacaatgattgcatcaccatccggaactcgaccagggtctgggtggaccacaacgaatttgcttccgacatcaacaaaggacccgacgcttacgtgagtctcctgtacaataaaatagctttatggattgcccatgacgggattcgctaatgaggatcatctatctttcataatgtgcaggatggtcaagtcgacatcatccgcggctccgactggattaccgtatcatggaactacttccatgaccactggaagtcatccctggtcggtaacgacgccactttccgcgacatcgacttcggccacttgcacgtaacctatcaccataactactggcgcaatgagggcacccgcggcccagccggccgcttcggacaccagcacgtctacaacaacctctatgtcgacttcctctatcaggccatccactcccgctccgacaaccaggtccttgtcgaaggcaacgtattccgcggcaagacccgcgaggccctgagcacctacggcttggtgatcccagaagattcgcccaacacctgcacttgcggcgacgaagaactggatggctatgcaaacttgggagccagtaagtttccttccccgtcatttatatcttcgaaaaacgagtaaagtggatgaatgggatgttacctgggaaagagagtcaatgcggatgtgctgtccatcttcgttgtactctactgacgcaatgacatgcagaaaacgattggggcaaggcaactgtcaacataacccaggtcggaaactttcacaaggctccctacaagttcaagttgactcccctgccgttggttgaactaattgtcaagctcggggccggcgtgggcaagatttga

SEQ ID NO: 985 - DNA, 2622 bp, Myriococcum thermophilum
atgaggattcggaacttactggcgttcgcggccatcggcctagccgctgccgaggacggcctggacggctggcttcgctatgcgcggatcaagggagcattgagctaccaccatcggctgccatctaccgtcgtcgccctcaacgccaccgagggactccccgtctacacggccggacaggagctcgtccagggcatcgaaggcatcttcggcaagaaggtcgacctcgatgtcgatctcgcgacagccggctccggcaggggtaagggtaagggtaagggcaagggcaagggcaagggcaacaaccacgggcccggccgccatgccaccatcacggttggcacggtcgccgcgtacgctgagagcgattccggcgctgctgccgccgccgacaaggtccccgagctggacgatgacgggttctacctccgggtctcacgcggcaatgtcctgatcctcggccagaacgaacgcggggtcctgtacggggccttccactacctctcccgcctcgcccagggcaaagtatccgactacactctgacgtccaacccggacgcgccgctccggtgggtgaaccagtgggacaacctgcaggacggcggcacacacggcagcgtcgaacgcggttacggcggcgactctatcttcttctgggacggcaaggtgcgcgacgacctgacccgggcccggctgtatgcccgtctgctcgcctccatcggcgttaacgcagtcgtggtcaataatgtcaatgccgacccccagacgctgacacccgagaacatggacgggctggctcgcattgccgacgccttccggccgtacggtgtccagctgggcatctcgctcaacttcgcctcacccgaaaccctcggcgggctcaacacgttcgacccactggacaagcgggtaatcaagtggtggcaggacatcaccgacgccatctacgagcgcatccccgacatggccggctacctggtcaaggccaactcggagggccagccgggcccgatgacgtacaaccggacgctcgcggacggggccaacgtgtttgctcgggccctcaagccccacggcggccgggtcctgttccgtgctttcgtctacgaccacaccagcttggaccaggacaaggactggaaggccgaccgggccaacgcggcggtcgagtattttgacgggctggacggcaagttcgaggacaacgtggtggtgcagatcaagtacggcccgatcgacttccaggtgcgagagccggcgtcacccctcttctcgcgcctggtccagaccgcgtccgccatcgagctgcagatcacgcaggagtacctcggccagcaggcccacgtggtctacctggcgcccatgtggaaggagatcctcgacttcgacttccgggtcgacggccggccatcgcgcaccgccgacatcctcaacggcaagcggttcggccgcccgggcggctacgccggcgtcgccaacgtcggtaccaacacgacctggctgggcagccacctggccatgtccaacctgtacgccttcggccggttcgcctgggacccgtcctcctcgcccgagggcgtgctccgcgactggatccggctgaccttcggcaacgatcccaaggtgctcgacgtcatcacgcgcatctcgatggagtcgtggccggcctacgagaactacagcggcaacctgggcatccagacgctgaccgacatcctgctgggccactacggccccaacccggccacgcacgacggcaacccgtggggccagtggacccgcgccgacggcgacagcctcggcatggaccgcaccgtctggaacggcaccggcttcgccggccagtacccgcccgaggtggccgcccggttcgagaagatcgagacgaccccggacgagctgctgctctggttccaccacgtgccttacacgcacgtgctcaagtcgggcaagacggtcatccagcacttctacgacgcccactacgagggcagcgcgacggcccagaccttcccccgcctgtggaagacgctccggggccggatcgacgaggagcggtaccagcacgtcctgttccggctcgagtaccaggccgggcactcgctcgtctggcgggacagcatcaacaacttctacttcaacaagtcgggcatcccggacgcccacggccgcgtgggccaccacccgtaccgcatcgaggccgaggacatgcggctggacggctacgagccctacgacgtgagcccgttcgaggccgccagcggcacccgctgcatcgtcacgcgcgacaactcgacggccgccacggccagcgtcgacctgcgccacgtccgcacgggcgtctacgacgtcgccgtcaactactacgacctcgccatcggcaactccacctgggatctctacctcggccaccgccgcgtcggccgctggaagggcgacctcgagtacaacctcggccgcgccccgtccccttacatcgacggccagacggccgcccgcatcacgttcccccgcgtcttcatcaagaggggtaccaccctcaagattgtcggccagcctgacggtctcgagcctgctccgatcgactatgtctctatcctgccgctgggtattgtcgattaa

SEQ ID NO: 986 - DNA, 1382 bp, Myriococcum thermophilum
atgaagctctctgcgtctttgacagccctggctgcggccatgggggcctcggccaccttcgacattcccgcctttgagcagttcgctatcgactccggcctggctcttgctggcctgaacggcatcgccctgctgcagtcggccaccaagtacggcggctcgtgcaatcttggcaacgtcaagatccgccgggaatggtatgtcgatcacccgtccgccctgatctcctccattccgtgacgggccgcgtgctgacccggacactaatacactattataggaggacgctgtccaaagaacagcggaggagctacatcaaggcggtccagtgcgtccaagataagcccagcagactggaagagggtgtcgctcccggggccaagacgctcttcgatgactttgtttacgtacacatgaatgcgacacccgtcatccactacactgtgagcacctcttctccgttgttgctcggggagtcctgtggctgccgtgaaccacaagagcttaccgtttccgtagggcaacttcctcatctggcaccgcaacttcatccacgcgtacgagaaggagctcaacgcctgtggctacaagggtacgtgctccttgtgaatctctacatttatgcttatgccccttggcgttcggctgaccaaggaaatgcagacgcactcccctattgggagtggggtttcgatgtcgaggcgccacacctctcgcccgtctttgatggctctgatacctccatgagcggcgatggcgagttcgtggatgggcccccgctcgagcttgctattcccggcaaccccgagcccgtggtgctggccaaggggaccggtggcggctgcgtcaagacgggcccgttcgccaacatgacggtccatttgggccccatcacgcagccggacccgacggcggacaacccccgctgcctgaagcgcgacctgaacgccgatgccggcaagcgcttcgccagcttccgcaacacgaccgagctcatcctcaactcgcccacgatcgagtatttccggaccgtcctggagggcgaccccgcctatgcgcccatgtcgctgggcgtgcacggcggcggccacttcatcatcagcggcgacccgggttcggatgccttcatctcgcccggcgaccccgccttctacctccaccacgcccaggtcgatcgggtctactggatctggcagatgctggatttcgagaaccgccagggcgtcttcggcactaacaccatgctcaactatcctcccagcgagaacaccacggtcgaggataccgtcgatgtcggccaccttggcggcccaattaagatcaagaatctcatgagcactatcggccagaatggctctcccctttgctacatttatctttaa

SEQ ID NO: 987 - DNA, 3403 bp, Myriococcum thermophilum
atgtttacagcgggcgtgaagggagccctctggctcgccttcagctcggtggtggccgctctgggacaggagaagatcatctcgactagcccccacggcgctcacttccagatcgctggcggccatgttggcaagggccaaattctggtctcgagcaacgactactggggcgtcatccgcgctgccggtgatcttgccgtcgactttggtcgcgttacggggacgaactatacgctcagcaatggcgagaaaaatgcgcccccggcgacgtacacgtaccatccggtcgacaacatgaacaacacccacgtgagttgcaacagcgcttaaattgttgatgtacgaacctcgtagtgccagaacatccttactaatacactctcgccagtattccaccaccggcactgccaacttcaccggcccggcctacgcagaccccgatccggaaaaggtggtgatcattgccggcacaattggccactccaaggtcatcgacaggctgattgagaagcggtccctcgatgtgtcgcgcgttaagggcaagtgggagtcgtttaccagccagctggtcagaaacccggtacctggatgcaagcaggcactcgtgatcgccggaagcgatccccgcggtaccatctacggcatctacgacatcagcgagcaaatcggagtcagtccgtggtatttctgggccgacagtccgccaaagaaacacgaaaatctctatgtaacaacccggaaaaaggtccagggcccaccgtccgtcaagtaccgcggtttcttcctgaacgacgagcagcctgcattgacgaactgggtggctacacactgggaggacaccccgtacggccccggttacagcgcggccttctacggcctcatctttgagctgcttctccgcctccgcgccaactacctgtggccggccgtctgggctaccatgttcgaggtcgacgacccggcgaaccagcccctggccgacgcgttcgaggtcgtcatcggatcgtcgcacaccgagcccctgatgcgcgcacagaacgaattcggccacttctacgagggcccgtgggcctacaacctcaacaacaagaccatcgacgagtacttccggtacggtgttcagcgggccaagccgtacgctcgcaacagcctgtggaccatgggcatgcgcggaaccggcgatacggccatcgagggcctcggggtcgagtacattgtcgagatgctgcagaccttggtcaagaaccagcgtgagatcatcgccgaaggcctcgggatcgaagacatcactacggtgccccagatgtggtgcctctacaaggaagtcatgagctacctttcggctggcctgcaggtgccggacgatgtgaccctgctgtgggctgatgacaattggggcaacgtgcgccggctcccgctgcggaacgagactcagcgtcacggtggcgccggcatctactaccacttcgactacgtcggtgggccgcgcaactacaagtggatcaacacgatccagctgagcaagacggccgagcagatgcacctggcctacgcccgcggcgccgacaggatctggatcgtcaacgttggcgacatgaaggcgctcgagatccccatcagccacttcttcgacctgggctacgatgccaagcgctggcacgtcgacagcacccaggaatgggccgaggcttgggctgcccgcgagtttggacctgcccacgcccgcgagatcgccgatgtcatgatgaagtacggcatgtatgcggcccggcgcaagtacgagttgctcgagccttgggtctactcggtcatcaactacaacgaggccgaggcggtgctgcagcagtgggccgagctcgtctctgaggcccaggccatccacgacaagctccccgacgaggccaagccggccttcttccagaccgtcctccaccccgccctcgccggcgagatcatgcaccagatcaacgtcgccgccgcccggaacatgctgtacgccggtcagaagcgtaacgctgccaacacggccatccaggaagtcctcgcctactcggctgccgacgcgaacctcactcgccgctgggatgccctcctcgacggcaagtggaagcactttatggaccgtaagttattgtccccttcttttcttcctcctccccaaacccctcccccctctctaaacaaacaaactcccccgtaacaacttcaccttcttttttgttctgaggctaaacagaatccaccccacacagaaacacatctcggctacgatggttactggcaacagcccatgcgtaacaccctcccacctttggtgtatgtacagacagactttacatctcttggaggtgagatcggcatcggtgtcgagggctccaacgccacggtcaggggcgacgacaggtggcaccccaacagcggcaacgatctcaccctgccacctctcgagccgtatggtccggccacgcgctatatcgacatcttctctcgcggctccaaggagtgctcgtggaccttgtccgcctctaagccttggctcaagctgtcccaatccacgggcgtcgtcggtgccggccacccggacaagcgcatcctcgtctcggtcgactgggaatccgccccgcccgccccgtactccgaagaggtccagatcaacatcaccaccccctgcacgggaatggaccggtatggcttcggcgagccgcatgtcttcgtgccggtgacagtacgtaaggcgcccaagtcgttcaagcgcggatttgtcgaatcggacggcaacgtcgcctttgccgccgagcactacagcagggtcatcgagcccgctagcagcaggagcaagggcagggacaaggacgaggtcacctaccacaccttcgcctcgtacggccgcacctcgtcgggcgttggcctggtccccctggacaccgagaagctcacacgcgaggaggcccccgcgctcgagtatgacctctacctcttcaccaacacgtcggctgccaacgtgacgctgtacctgtccccggcactcaactacctcggcgacgccaccccgctcgagtacgccatctccctattccccgcctcttccgacggcgagggcatcgacatcaaatacgtcaagccggtcggcgtcaccgtgggcggcgacatgccggccgggtgggacggcgccgtggccgacggcgtgtgggggctcacggggggttacacgaccagctcgttcgaggtcccccgtgagggcgcctacaagctgcgcgtgtggaccctcatgcccggcatcgtggtccagaaagtcgtcgtcgacctcggcggcgtccggcgcagctacctgggcccgcctgagagcttcctcgtcggtagggacaggatcggggcgaggaatgggactagcttccttggttga

SEQ ID NO: 988 - DNA, 969 bp, Myriococcum thermophilum
atgaagcctacgcgccccagtgccgtcgtcctcctcgctgccgcgacctcggttgcaggacagtcatgcgaccttcccacctcgtaccgctggacatcgagcggcgtgttggcagagccgcagtacccctgggtatcgctcaaggacttcaccatcgccccgtaccaaggccagcacctggtctacgcaacaacaaatgacggaaccaactggggctccatgggtttcggcctcttcagcgacttcagcgccatgggctcggcgtcacagacgggcatgagctcgggtgcagtggcgcccactctgttctacttcgagcccaagaacgtctggatcctcgcccaccagtggggcccgacggccttctcgtacaggacgtctaacgatcccgccaaccccaacagctggtcgtcaccccagccgctcttcaccggctccatctcggactcggacactgggcccatcgaccagaccgtcatcggcgacgacaagaacatgtacctcttcttctgcggtgacaacggcaagatctaccgcaccagcatgcccatcgagaacttcccgggcaacttcggcgaccaggcgaccgtcatcatgagcgacagccggaacaacctcttcgaggccgtccaggtgtacaagatcgacgggcagcagaagtacctcatgctggtcgaggccatcggcgcccagggccgctacttccgctccttcacggccacgagcctcgacggccagtggacccccaacgccgtcgacgagtacagccccttcgccggcaaggccaactcgggcgccacctggaccaacgacatcagccacggcgagctcgtccgcctcagcgccgaccacaccttccccatcgacccctgcaacctgcagctcctctaccagggccgcgaccccaactcgggcggcgactacaaccgcctgccttaccgccccggccttctgaccctgcagcgctaa

SEQ ID NO: 989 - DNA, 972 bp, Myriococcum thermophilum
atgaagctacatcttctctctgctcttttcctgctctgtacgggcattcagggcctccctgcctcagccacggaagataacgcgaccgcttcctcctctccctcttcttcatccgccactgcgactcctacctcatacgacttcgctgccggcgccgttacttcctatccgatccatccgtcatgcaacagcaccctaagacggcagctcgagcgcgctctggacgagacggtggctctggcggcgcacgctcgcgaccacatcctgcgctggggcgtcgactcgccgttcgtgcagaagtactttggcgtcaccaacgacaccaagccaagtgcagaccacgaggaggcggttctggcgtcgactgccgcaccgctgggctggtacagccgcgtggtggcggcggataaagggggaataaccttccgctgtgacgacccagaccgcaattgtgcgacgcaagatggtaagtaaaatcccgctttcccttttgttttccccctttttttctcccgccatatctccttccaagacctacaaagcatagcataaagaacagagaatgctgacaacgttaatattacgtgtgaaaccttaggctgggcgggacactggcgcggtgaaaacgccacccaggagaccgtcatctgcccgctgtcgttttcgaaccgacgctggctggattcggtgtgcgggttgggatacaccgtggccgggtcgccgctcaatactttctgggccaccgacctgctgcaccgaatctttcacgtaccaaagatcagcgaaggggttgttgagcactacgccgaggactatgagggcgtgctggagctggccgcgacggacccggcccgggccgctatcgacagcaacacgctgcagtactttgctatcgatgtgtacgcatatgacattgctgccccagggaagggatgcaccggaaagccggagaaatcggaggagtcggagtga

SEQ ID NO: 990 - DNA, 1194 bp, Myriococcum thermophilum
atggtccatctgacctcagcccttctcgtggccggcgcggccttcgccgtcgctgcgcccatgaaccacgtcttcgagcgccaggacacctgctcggtcaacgatgagtacccgacggtgaacgaggccaagctcccagacccgttcacgacgtcggcgggcgagaaggtgacgaccaaggagcagtgggagtgccggaaggccgagatcagcaagatcctgcagcagtacgagctgggcgagtacccgggaccgccggacagcgtcgaggcgtccctgagcggcaacggcatcaccgtctcggtgacggtcggcggcaagagcatctccttctcggcctcgatccggaagccgtccggcgccggcccgttcccggccatcatcggcgtcggcggcgcctcgatcccgatcccgagcaacgtggccaccatcacgttcaacaacgacgagttcggcgcgcagatgggcgccgggtcgcgcggccagggcaagttctacgacctcttcggcagggaccactcggccggctcgctcaccgcctgggcctggggtattgaccggctcatcgacggtctggagcaggtcggtgccgaggcttcgggcatcgacacgacccgtctcggcgttacgggctgctcgcgtaacggcaagggtgccttcatcgccggtgccctcgtcgaccgtattgccttgaccatcccgcaggagtcgggtgccggtggtgctgcctgctggcgcatcagcgaccagcagaaggccgcaggcgccaacatccagacggcggcccagatcatcaccgagaacccgtggttctcgcggaacttcgacccccatgtcaactccatcccgacggtcccgcaggaccaccacctgctggccgccctcatcgccccgcgtggtctggccgtcttcgagaacaacatcgactggctcggccccgtgtcgacgacgggctgcatgggcgccggccgcaagatctacgaggccctcggcgtgcccgacaacttcggcttctcgctcgtcggcggccacaaccactgcatgttcccaggaagccagacccaggacctcaacagctacatcaacgccttcctgctcggagagggctctcccagcggtgtcgagtacagcgatgtcagcgccaacgtcgacgaatgggccccgtgggccgccgacctcccgaacctggcgtaa

SEQ ID NO: 991 - DNA, 1292 bp, Myriococcum thermophilum
atggcccttcagctcttggcgagcttggccctcctctcagtgccggccgttgcccacggtggcttggccaactacacagtcggtgacacatggtacagagggtgcgtacactacaacgctttgagaagatgcctttcctcgcatcacgatgacgagggaaggcacatcgtccaccaggaggcattcccgccaacaagccaagccgaacctccaatctctttatactgcttccctttccttgtctttctcctcaactgctttacacgaggggattactacgctcactaaaggggacccaagcatcatcagactgtaacaggacactgacacaatgcctactcccctcctagctacgaccctgacctgccgcccgaggtccagctcaaccagacctggatgatccagcggcaatgggcgaccatcgaccccatcttcaccgtgtcggagccgtacctggcgtgcaacaacccgggcacggcgccgccctcgtacattcccatccgcgccggtgagaacatcacggccgtgtactggtactggctgcacgccatcgggcccatgagcgtctggctggcgcggtgcggcgacgccccggacgccgactgccgcgccgtcgacgtcaaccagctcggctggttcaagatctgggaggccggcctgctcgaggggcccaacctggccgagggcctctggtaccagaaggacttccagcgctgggacggctccccgtccctctggcccgtcaccatccccgagaagctcaagagcggcacttacatcatccgccacgagatcctctcgctccacgtcgccctcaagccccagttttacccggagtgcgcccacctgaatatcaccggtggcggagacttactgccgcccgaagaggctctggtgcgcttcccgggagtttacaaagaagatggtgagtaatgcaacggagctgttattgttcgcttcttcgagtgggggaatacgagcatataataaaagtggtagagtgatgtaatgaatgaaacggaggctgacggagaaatagatccttctatcttcattgatgtttactcggaggagaatgcgaaccggacggtaagtgtgttattcttcatcccaaccggagtcaggagattgttgccgaaaaggaaggcgtttctctaacgaatgggcaggattacacggttccgggaggaccaatctgggaagggtaagtgaggttctagcccactcagtaatgcggttttttttttttaatcaagtgctaattaaggtaaacacgcagtttcgcggattaa

SEQ ID NO: 992 - DNA, 1649 bp, Myriococcum thermophilum
atgaagtctcttgctctcttggtatcggttgccgcttcgctggcttcggcgtccgccatcgcgcttgatggcgaagctcttccagctggagcctcgattacctttccacgtgatgaatctcagttcaatccatccgtgacgcccgaaagcaggggccatggtaaggagaaggacaactggggcaacgctgttgagaaggaccgcaagaaggtcactatccgtgcttccaaggacgatcgcgacgatatcagtgacgacttcctctgggcgctcaagaaggcaaacaacggtggtctgctgcatttgcagaagggtgaaaagtatgtcattggcaagaagctcgatctgagctttttgaacgacatttacgtcaagattgacggcgagctgaaggtactgatttcaccccacgatttctgtaccggaataagattaaaagggtactaaccgccttcagttcaccaacgacattgaatactggcaagccaacaacttctattacgacttccagaagagcattaccttttgggtctggggtggcaagtacgcatcatttctacccctcctcttcgagtttgtgaatcacttctaccgtgagcctgcctctcacacacttcccagggacatcaagatatacggctccggcgtcatcaatggtaacggtcaggcatggtgggacggcttctcgggccacgagattctcgatcccgataacgactactaccggcccattttgttcttgaccgacaacgccaccaatgtcgaggtccgaggtctgcatatgaaggactcgccgtgctggaccaatttctttgtgcgctccaagaacattgtttttgacgatgtctacatttctgccgtgtcaaccaacgcatcggtaagaaatctcctattattaatagaacacatgcagaccaacccatattatgacggaggataaataatatataataatactgacgataatcctttctctcctattaatgtttgactaaacactacagaccctgcccaagaacacagacggcttcgactcgctcaacgtcgccggcctgacggtgctcaacacgcgcgtcaacgtgggcgacgactgcttctcgcccaagcccaacacgtccgacatcctggtgcgcaacctgtggtgcaacggcacgcacggggtgagcatgggcagcatcgggcagtacccgggcgtgctggactacatcgccgacgcgcacatcgagaacgtgacgctgctcaacggcgagaacggcgcgcggctcaaggcctgggccggcccggacgtcggctacggctacatccgcaacgtcacgtacaaggacatccgcgtcgagaacaccgacttccccatcgtgctcgaccagtgctacttcaacatcaacgagaccgtctgcgcccagcaccccagccgcgtcaacatctccgacatcaacttcatcaacatccgcggcaccagcagcggcaaggaggggagggtcgtggccgatctcacttgctcccctggtgcgacgtgcactggcattcatctggaagacatcgacatcactagccccaaaggctctcccccgcagattgtctgtgaaaacattcagggtgatattggagttgattgtatccctaaggatgaggcggattattccggttga

SEQ ID NO: 993 - DNA, 975 bp, Myriococcum thermophilum
atgaagctgagcgctaccattgccgtgctcgcggctgccctggccgaggcgcactgtaagctgagcccccctcctgcctccgtcccctgataatggtgaactggaacacatggagctgatggtattcataacaacaagacaccttccctagcattgccaacactccggactgggaatatgtgcgcatcacgaccaacttccagagcaacggtcccgtgacggacgtctactccgaccagatccggtgctacgagcgcaacccgggcaccggcgcccccagcatctacaacgtcacggccggcaccaccctcaactacaacgccaaggcgtccatctcccatcccggacccatggccttctacatcgccaaggttcccgatggccagtcagccgctacctgggacggcaagggcgccgtctggtccaagatctaccaggagatgcctcacttcggtgccagcctcacctgggactctaacggtatgacaattcactacatcttccccctccccacccccctttttttttcatcgtacgaccggcttgttggcttcgcttgcctcttttttagttgcgtcttgaaccaaatattgacaaacggaactctcaggcaaactgtccatgcccgtcaccatccccaagtgtctgcaggatggcgagtacctgctgcgtgccgagcacatcgccctccacagtgctggcagccccggcggtgctcagttctacatctcgtgcgctcagctttcgggtatgtgattcgcctacaggctactcatactgttcggtggggaaagctttgtccgaagatgctaatgctctcctgcagtcaccggcggcaccggcacatggaaccccaggaacaaggtgtcgttccctggcgcttactcgccgaacgaccctggcattctgatcaacatctactaccccgtcccgaccagctacactcccgctggcccgccagtcgagacctgctaa

SEQ ID NO: 994 - DNA, 1724 bp, Myriococcum thermophilum
atgggccctcagagcaccctggcgggcgtcattgccctggccgcctggttggtggctgacgtctctgctcaatcctgccccggcgtgaccggccgattccagcccaagatgggctcgggatacaggtacagcttgctcgcgaccggccttcgcaaccctcgtcacattgctgtcgactcggcgggcaacctgttggtggccgaaggcggaacccagtcggttcgtcgattggtcctgcaagaccagggagacattgtgtgcgtccagtctgaatcacagctcgccagcggttcggtaggtacccaaagacttttgtcaagctgagcatgcaccccgtcaattcgtggctccctcatttttttatcaccgttacccccccctttttttttcccctttttttggccccggggggggggggggggagggggaagaagtgtgattgtgagggttgttcatgaagataagcccggttgcttacatactttaataactctagaccaaccacggcattgccctcagcgccgacggaaagacgctcttcacctcgaacctcgccaccgtgacggcctacgactacgacgcggccaccggccaggtcggccagggcaggcagatcgtgacgggcatggccttccagggcacccatccgacccgggccatcgccacgtccaagtggagcccggacaccatcatggtggtccgcggctcccagagcaacatcgacacgctggccgtcgaccaggcgaacgcgcgcagcatgatcaagaccttcagcatcagccagggcctgcaatccccgcacgactacgccgcaggcggcgaggtcctcgcctggggcctccgcaacgttgtcggcttgacagaagatcccaactatggcggagtcgtacgtacatcttttttccttttctcttcctttttttttggggggggggggggaattgggtgtgtctgtgtgtgttcatgcttgggaatagggatggggaaaatgaatgcaagggggaaaggtcaacccaaccgataagaggtaataatgttctgctaacgtcctcttctctccttttcttcacttccagtggtccgttgagaaccaaatggacgatgtgcacgttaacgggcgggacatccacaatgacaacccggccgagcggctgagctatcacggagtcctcaacgacaccgaaaacaagtacaaggggctcaattacggctatccttcgtgtgtacccgcctgggacccccagagcgtcggcatcgatggcttgctggtcggctccctgttcaagcccgacaacgtgcccaacatcgaccccagtgaatgcgccaaccgaatgacgggtcgcctgcacttccacgcccacactgcccctctcgacgtcaagttcaataacaactcaacggcggcttacattgctttccatggaagctggtgcgttcttctttttcatttccgtgttaatagctatctgtgtaaactcacgcacgcatacaggaaccgcaaccctgcggatggctaccgcgtcatgcgcgttgactttgccaacggcgagcccgtggcggatgtcaccagcacgacggcccagattcccgtcatggagaacagcgacattagcggctgccccttcaactgcttccgccccgtcggcctcgcctttgacgagaagggccgtctgtttgtatcgagcgactcgtctggcgagatctacgtcatttacggcgcttag

SEQ ID NO: 995 - DNA, 2892 bp, Myriococcum thermophilum
atggcctccaccaagggcatcatcctgtcattgtgcctctccgccctctccgcggtcgcaaacgcagcggacacgcctttcctcggctacccttccccgtgggctagcggtgtcgagaacccggacccgtcctgggcggccgcctacgcaaaggccatcgactttgtctccaaccttaccctgacggagaaagtcaacctcacgacggggacgggatgggaggctgatcgctgtatcggcaatacgggcggcgtgccgcgcctgggattccgcggattctgtctcgaagacggaccgctgggcgtcaggtacagtatgcgcaacccgagatgcttccaagtagctttattgatttaatgcctttttttgtggttttctacgagcgaagcaagggggctagttgctgactttgatgtgtccgtgtcgtattccgcctccccgggatatagcccaaaataactctgctttccccgcggggatcaacgttgctgccaccttcagtcgccggctgatgcggctcagaggcgaggcgatcggggccgagttcaggggtaaggggatcgatgtgatgctcggaccggtggccggcgccctgggcaggacgccgcaaggagggaggtattgggaaggatttgggttagtctccctctgtctctctctctctccttttccgtcccttatgttgtcagtacctctgtttctgatggctgacgtcttcacagccctgacccgtatcttgctggtgttgccatggccgagtccattcaaggcatccagagccgtggagtagtggccactgccaagcactacatcctcaacgagcaagagacgttccgggggagcattgacgtgcggatcgacgaccggaccatgcatgagttgtacctgtggccatttgcagacgccgtccgggcaggagtaggctcggttatgtgctcgtacaacaagatcaatgggacgtatgcatgcgagaacgagtggacgtccaactacctgcttaagaacgaactggcctttccgggcttcatcatgtctgactggggagctcagcacaccactctcgggtctgcgcttggtggcctcgacatggccatgcccggcgacagcggcccgcttccgtacggatcgttctggggaggcggtctcgctgaggccgtcctcaggggcgacgtcccccagtggcggcttgacgacatggtggtccgcatcatggcggcatactacaaggttcacacgggcgactacgccgaccgcccggacatcaacttctcggcctggaccaaccagaccatcgggccgctgcacccgtcgtccaacgagtccatcacggtcgttaatgagttcgtcaacgtccagggtgaccatgcctccctcatccgcgagatcggcgccaagtccatcgtcctcctcaagaacgaaaacaacatcctccccctctcgcatccggccagcatcgccatcataggcgaggacgctcgcgacccgcctggagggcccaacgcctgcccggaccgcgcctgcttcggcaatggcaccgtcgctatgggctatggttctggcaccgccgagttcccctacctcatctccccggcgaccgccctgctcgcccaggccaagcgcgacaacacgaccgtcgtcttcgacgccacgtcctccaactgggacttggctgctgccgagtcggcagccgcatccgctgacatcgccatcgtcttcgcctcggtcacctcgggcgagggctacgtggaggtagccggccagttcggcgaccggtccaacctgacgctgtgggccaacggggaggcgctgatcgcggcggcggcgcgcgccaaccccaacacgatcgtcgtcctgcacaccccgggccccgtgctcctcggcgacgtcgtcgccaaccccaacgtctcggccgtcctgtgggccggcttccccggccaggagagcggcaactccctcgtcgacgtgctctacggccgcgtcaacccccagggccgcagccccttcacctgggcggccaacaacgagaccgactacggcgccgagctgctcgtcgacgtcgacgacccccgccggcccgtgcaggtctttgacgagggcatctgggtcgactaccgctggttccagaagaacatcaagggcgtgctgttccccttcggctttggcctgagctacacctcgttccgcttctcgaacctgacggtccagctgttggatggtggggatgatgagggggagggggatgaggcggaggaggatggcgacctgacgccgccggcgccgacgtacggcgtggtggacgaggacctcgagaagcacgttacgcccgagggattcagacgcatctggccgtacgtgtactcctggctcaacagcagcgagggcttcgtcgccggggcacccggcaacatcagcgagttccctgccgccgccaggaacgggtcggcccagcccgttctgcccgcttccggggcccctggtggcaacccgaagttgtacgaggtgctctacacgctcactgcgtacatcgagaacgagggcgacgtcaagggaaccgcgatcccgcagctggtaggtgttactccattccaatctcacgccttgagggcaggcactgctgacacgaacgattattattagtatctccaattgggcggcgaggacaatccctggggcatcctccgcgggtttgacgaggtcgagctcgagccgggagagaccaagatggtcacgttcaacttgacgcggagggacgtcagcaactggaataccaccacgcagaactgggagatcacggatctggtaaagaccgtctttgtgggctccaacatcagggacatccacctgaattcgacacttcccgcgcccaaggggatgacatggaggtacggctga

SEQ ID NO: 996 - DNA, 845 bp, Myriococcum thermophilum
atgaaggccctctctctcctcgcggcggcctcggcggcctctgcgcacaccatcttcgtccagctcgaggccgacggcacgaggcacccggtctcgtacggtatccggaccccgacctacgacggccccatcaccgatgtcacgtccaacgacgttgcttgcaacggcggcccgaacccgacgaccccgtccagcgacatcatcaccgtcaccgccggcaccacggtcaaggccatctggaggcacaccctcgactccggcccggacgatgtcatggaccccagccacctgggcccgaccctggcctacctcaagaaggtcgacgatgcgaccacggactcaggcgtcggcgatggctggttcaagatccaggaggacggctacagcaacggcgagtggggcaccctcaaggttatcaacaacgccggcgagcactacatgtgagtccttcctccggaagaagactgagaggcacactcgaccatctagctgacccgcgctaccaaacagtgacatcccgtcctgcatccccgagggccagtacctcctccgtgctgagatgattgccctccacgctgctggttctcccaacggtgctcagctctacgtaagcctctctctctacccttcccctttttctctctcaaccctggactgtctaacacgattgccagatggaatgtgcccaaatcaacattgtcggcggctccggctccctgcccagccagactgtcagcttccccggcgcgtacagcgccaacgacccgggtatcctcatcaacatctactccatgtcgccctcggacacttacaccattccgggcccgccggtcttcacctgctaa

SEQ ID NO: 997 - DNA, 1988 bp, Myriococcum thermophilum
  misc_feature (1101)..(1851): n is a, c, g, or t
atgaagggcagcaccttactcgccctcgccctcggctttggcgcctacgcccactttccgccggagagggaggggatcaccgtagtggagtccaagttttacaacaatgtcagcatctcgttcaaagaggtcagtcattctagtcttccccctccccccgggcaaaaggaggaaccaggagacgctgacaatgacaagcctgggatttgcgagactacgccgggagtcaagtcatactcgggatacgttcacctcccgcctaacctgatcgagggagcagatcaggactacccgatcaacctgtcagtatagctgggtttcctctttccaacagttttttttttaaaaaaaaaagagaacggagtaaagaaaggtcggcatctgattgacagccccccagcttcttttggttctttgaagctcgcaaggacccggccaatgcccccttggctatctggcttaatggcggacccggagggtcatccataatcggcctgctcgaggaaaacggtccctgtttcgtcgggcccgactcggagacgacgtacctcaaccgttggagctggaacaacgaggccaacatcctgtacattgaccagcccgtccagaccggcttctcgtacgacgtgctcaccaacgtgaccatccggctggacgtcgacgacccgttcgaacccgtcatcacacccaccaacttctccgaccacgacggcgtcatcccccagaccaacaacaccttccggatcggcacgacggggagtcagaagctgtcccagacgaccaacacgaccgagctgtcggcctacgccatgtggtacttcctgcagacctggctgttcgagttcccgcactaccggtccgacgacggccggatcagcctctgggccgagagctacggcggcacctacggcccgatcttcttccacttcttccagcggcagaacgagcgcatcgctgctggccagctcgacgcccgctacttgcatctcgacaccttgggcatcatcaacggggccgtcgattggcttcttctcggcgagagctggatcgactatcctcacaataatgtaagtgcccgctccttcaacttttctatttttnnnnnnnnnnnnnnnnnnnnnnnnnnnnnnnnnnnnnnnnnnnnnnnnnnnnnnnnnnnnnnnnnnnnnnnnnnnnnnnnnnnnnnnnnnnnnnnnnnnnnnnnnnnnnnnnnnnnnnnnnnnnnnnnnnnnnnnnnnnnnnnnnnnnnnnnnnnnnnnnnnnnnnnnnnnnnnnnnnnnnnnnnnnnnnnnnnnnnnnnnnnnnnnnnnnnnnnnnnnnnnnnnnnnnnnnnnnnnnnnnnnnnnnnnnnnnnnnnnnnnnnnnnnnnnnnnnnnnnnnnnnnnnnnnnnnnnnnnnnnnnnnnnnnnnnnnnnnnnnnnnnnnnnnnnnnnnnnnnnnnnnnnnnnnnnnnnnnnnnnnnnnnnnnnnnnnnnnnnnnnnnnnnnnnnnnnnnnnnnnnnnnnnnnnnnnnnnnnnnnnnnnnnnnnnnnnnnnnnnnnnnnnnnnnnnnnnnnnnnnnnnnnnnnnnnnnnnnnnnnnnnnnnnnnnnnnnnnnnnnnnnnnnnnnnnnnnnnnnnnnnnnnnnnnnnnnnnnnnnnnnnnnnnnnnnnnnnnnnnnnnnnnnnnnnnnnnnnnnnnnnnnnnnnnnnnnnnnnnnnnnnnnnnnnnnnnnnnnnnnnnnnnnnnnnnnnnnnnnnnnnnnnnnnnnnnnnnnnnnnnnnnnnnnnnnnnnnnnnnnnnnnnnnnnnnnnnnnnnnnnnnnnnnnnnnnnnnnnnnnnnnnnnnnnnnnnnnnnnnnnnnnnnnnnnngaaggccagtcttgccctcccctggtcacggcgggacgagttcgccgcggccgagtatgcgcccctggtcgtctccagcaagaacggcgacgacgacgacgacgacgacgacggggaggaggaaaaggtggaggtaa

SEQ ID NO: 998 - DNA, 1323 bp, Myriococcum thermophilum
atgaagggtgctttactgaccgcagccgtcctgctcggctccgcccagggagcagttcacaggatgaagctgcagaaggttcctctttctgagcagcttgtatgttttgaagccgctcaagtatgcgcaaagcaacttgctgatcttatcgcttccaggagacggttcccatcaacacccaactcgagcatctcggccaaaaatacatggggatgcgcccgcgtgaatctcatgtcgatgctattttcaagggcatggtcgccgacgtcaagggcaaccaccctgttcccatttccaatttcatgaacgcacagtgtatgtgatgccattgtggcacggatactcgtcataacaattgaggaaactgacatctggtgcacttaagacttctccgaaatcacgatcggaacaccccctcaatcattcaaggtggtcctcgataccggcagctcgaacctgtgggttccgtcagtcgagtgcggctcgatcgcttgttacctgcactcgaagtatgactcgtctgcttcgtccacctacaagaagaacggaacctcgttcgagatccgctacggttctggcagcctgagcgggtttgtctcccaggacacagtgtccatcggcgacatctcgatcaagggccaggactttgccgaggcgaccagcgagccaggtcttgcctttgcctttggccgtttcgacggcatccttggcctcggctacgaccggatctcggtcaacggcattgtcccgccattttacaagatggtcgagcagaagctcatcgacgagcccgtctttgccttctacctgaccgataccaatggccagtccgaggttgtctttggtggtgttgaccacagcaagtacaagggcaagatcaccaccattcccttgaggcgcaaggcctactgggaggttgactttgatgccatctcctacggcgatgacactgccgagctcgagaacactggcatcatcctggacaccggcacttctctgatcgctctgcccagccagctcgccgagatgctcaacgctcagatcggcgctaagaagagctacactggtcagtataccattgactgcggcaagcgcggctccctcaaggacgtcacgttcaatctggctggctacaacttcacgctcggcccctatgactacattctcgaggccggccagggcagctgcatttccacctttatgggtatggacttccctgctcctaccgggccccttgctatcctgggtgatgccttcctccggaggtattacagcatttatgaccttggtgccgacaccgttggcctggccgaggccaagtga

SEQ ID NO: 999 - DNA, 2075 bp, Myriococcum thermophilum
atgagacaaccacttttatcatctttcctgacgctcgttactgcgctgagcggctcgttcggccggagtattcctcgagatccagaggcgtccctgcaaccacgggaggaatgcgaaaacacgccgacgtctcggcactgctggggcaaatacagcatcgatactgattactacgataactatcccaccaacaacggtccagccaaggaattctggctctctgttgaggaaggaccttgttcccccgacggctatgagcggacgtgcaaaacattcaatggcactgtccccgggccgacgctgttcgtcgattggggcgacgaggtcatcgtccatgtgaccaacaatatggtgtccaacgccaccagcgttcactttcacggggtacgcatgctgaataactctatcaacgacggcgttccgggcgtgacccagtgccccatcccgcctggccataccatgacgtaccggttccaagttacccagtacggttcgacctggtaccacagccacctcagcctccagtacgccgatggtatgttcggcggcttcgtcgtgcgcggcccgacaacggacaactacgatgaagacttgggcgtcctgttcctgcaagactggtcccacgtcgaagccttcaccaactggcatgtcgccatggcgggcccgccgccgcccatcgataactggctaatcaacgcgacaaacacgtacaactgcaccggcaggaacgacgacaagtgcgtgggcggcggcaagaagtttgagatggtctttgaacaggacaagaaatacctgctccggctgttcaacgttgccatggagggcgtgttcgagttcagcatcgatgggcactctctggaagtcgtgggcaacgacctcgtgcccatcgtgccttacatgaccgacagtgtccagttaagcatcgggcagcggtacgacgtcatcgtccacgcaaacgcggacccggggaactattggctgcgcgctcactgggtcaaaggctgcgacgggaactcgagcgcgaacgttgacccctacgtccactccacaggtatcgtccgctatgacgccggcagcactgacgacccggagacggagagccacgtcaccccaaccacgtcttgcctcggcgagccgccggagaagactattccctatctctctatagacgtggcaaacacaaaagggggtgtggtgtatgaggagatgggctccaagcaaccctccatgccggaagaatacttccaatggaccatcaacacaagtagcctggtgctcaactggactcttccaacaatggacaagatcatgaaaaacgagaacgtgtttccgactgagtataacgtcgtacctatcaaggtaagccttggaaccgtcccttccttctctccccccccccccaaccaccccaaccaacacccaattcacctggactttggaaggtgttatcctttgtaacattgttgctgaccaattttcaatcaagtcatctggtacaggcccagaatgggcagccttgttgatccaagacatcagcgaagaaaagtaagcaccattataccatgcaacccacccgcggaagctcccacccccaaccatcgaaaccacaagctagccctccttccgtgcctttatcacgcacttttcaatttttctcttccctaaaccccagatataatacctggttgattaatactgacctttctttccctctcgcgaacagaataccgcatcccatccacctgcatggacacgacttttgggtgctcgcggccggggatggcgtcttcgacggcgacaagaacaaattcaatacgaataacccggcgcggcgcgacgttgccacgctgcctggaggcggttacattgccgtcgccttccgtctggacaacccaggcgcctggctcatccactgccacatcggctggcacgctagccagggcctggcgctcgagttcatcgagaaccagtcggatatcacgttcgacgagctcagcatccgcgagtacgaggaaacgtgcaaagcctggggggaatgggaacctgtttggccccaggatgactccgggatataa

SEQ ID NO: 1000 - DNA, 1779 bp, Myriococcum thermophilum
atgacccgccttctagctctcgttaccagtattgtgttattttgcgccctcgacgcgctggcagtcccctttgatctgccgcacggtatatggccaccggtaaaggctttacgctgcaaccgagtcttctttagccatgtgctccctccgggtgcaacccttgagaaagtcgccgtggttccggagggcgagagctacggcgagggcgaggcgaacgtggcataccccaaaaacccgaaaaaccttccagcattgtgcgccgttaccgttcgggtaaagagctccccaacaagcagctaccgttttggcctctttctgcccgatgagtggaactcgaggtttctggtggtagggaacggcggctttgcgggtggtatcaactggatggagatgtgagtgcccagcccacgtgaagtccccctgaacgccactaatatataagcgatcagggctgccggcccacgtctcggtatggcctcgctctcgaccgatactgggcacaactcgaccgccgaagactctagttgggcatggagggagccagagaagaagaccgactggggttggcgcgccctccacggctcaaccgcgctcgggaagtctcttgtgcgcgcatactatgtgcacaagccactcacctactcgtactacagtgggtgctcgaccggcggccgccagggtctcaaagaactgcaactctctccaggcagcttcgacggtgctctgataggggccccttcatggtgggcatcccacatcggcgcctatcttacccaagccggcctgtacaaccttcccgtagacgaccctaagcgcctttctgacgccgaaaccgccctccttgccgacgaagtcatccggcagtgcgacctggaagacggcgtacaggatggcattgtcagcaacttggaccgttgcaaccccgatctgactgttctcctctgcagcgatcaagacaatgggttaaagagagctggggcctccgggaaggcacactgcctcacaccggctcaattccagactgccagaaacatctacagcgactggaccctcccacccgacaacgagctccttcacccgggtctgacctactcctcagagagggaatggtacatcctcatcaatggcaccgagccaataccgtacgggatcggatacgcacgtgactttttgttcgacaacgaaggcgacgggaacgattcgtcaaagtgggactggcgcacgtccttcaacgagagcgtggtgttctacgcggaggagcacgacccaggcaacgcgacggccgacgactacgccgccctgggtgctgtccgggagcggggcggcaaggtggtactctaccatggcctctccgacgcgctggtgccgaccaaggggaccggcgtgtactggaaccgcaccctggacgccctcggcggcccggccggcgtggaagacttcatgaggctgtttctcgtccccggcatggcccattgttacggcacgaccgtggatgcgccctggaattttggcgccgcgtcccaggccagcctattgggggatgaggtgaggtcggtgcccgggttcgaggacgcgcagcacgacatcctcatggcgttgatcgaatgggtcgagaatggaaagcccttggacagcattatcgcgactacgtggaaagaaccgaaaaatccaagttccggggtaaagagacagagaccgatctgcgcgtggcctcaacaggccgtgtgggatggagagggggatatagataacgccacgagttggcgctgctcgagctga

SEQ ID NO: 1001 - DNA, 1462 bp, Myriococcum thermophilum
atgagagtctcgtttcagtcagtcctgctgctcggcgttttgagcgctcaagcatcggcgtacgcgaaacttgaataccagcagcagactttcgttcgttccccaggcctgcatgtccgcacgtggttctctccccgtgagggcccccggggcaacactccctcgtatcgagtccctctgctcaccctccaccgtgcccttgtcaacgtctcctccatcagcgactccgaaggattggtcggattgctcctggcggggctgctcaaagacttcaattacacggttgagctgcagcaagttccccccagcaatgccagccaaggtctcgatctccctcccaggtacaatgttattgcttggcccggccgcaactccagccgcaccctggacaagcgtaccatcataacttctcacatcgacgtggtgcccccatacatcccctacgccatcaacaacaagactgtcccgccctcggaggaggtcgacttcggtgcgctgtcccccacgacacgcatctccggccggggctccgtcgacgccaaggcgagcgtggcggcccaaataacggcgaccaacgagctgctgagcgagggcgccatctcgccggacagcgtggtgctcctatacgtcgtcggcgaggagaactcggggacgggaatgaagtacttctccagctcgctctccaacacgacggcgtacccggttcggccgcagttccgcgccggcgtcttcggcgagccgaccgagaacaagctcgcctgcggccacaagggcggcgccagcggcaacatcactgccatcggcaaggccggccactcgggctacccgtcggccggcaagtcggccatccacgtgctgatccgcgccctcgacaggctgctggacgaggacctcgggtcgagcgagcggtacggcaacacgaccgtcaacgtcggcctgatcgagggcggcgtcgcgcccaacgtcatcgcccccgctgccagcgcccgcatcctcgcaagggttgccgtgggcaatcatacgacgggaggccagatcgtcgccgagcggatcaaaaaggtggtagaggacgtagaccccgagtcgctgaaggtggaaatcatctcagcgcgtggaccggtggagaccgactgcgatgttgatggtgagatatcccctttgctctgcagtgttctcttcgttgccctccttcttttccaaaccctccctttctgccacctttccatactcctgcgagacaccgtagagcgtgggtgctaacgaagaattaggattcgaaaccgtggttgcacattatggaacagatatccccaacctcgagggtgaccacgtcaagtacctctatggaccgggcagcatcctagtagctcatgctgataacgaggggctggcggttaaagaccttgaggaagcggtggagggatacaagcgcttgatcaagcatgcagtggggtcctcatga

SEQ ID NO: 1002 - DNA, 1492 bp, Myriococcum thermophilum
atggctggccgacttcttctctgcctcactgccgccctcagtgcgctgggcgtgtcggcggccccggccccggacgcttctgggcgcccgttcctcggtctgcccatctccaacccgggcatccccaacgccatcccgaacaggtacatcgtagtgtacaacaactcattcaccgacgatgacatcgacgtgcaccagagcagtgtcatcaacacgatagctaagcgtaacatcgctaagcggtcgttgaccggcaagcttctctccaccactgtcaacacgtacaagatcaacaactggcgcgccatggccctcgaggccgacgacgtcactatcagcgagatctttgctgccaaggaggtcagctacatcgagcaagatgccgtcatcagcctcaacgttcggcagatgcagtcgcgtgccaccactggtttggcccgcatcagccacgcccaggccggcgccaggacctacgtctttgacagcagcgccggcgagggcatcaccgcctacgttgtcgacactggtattcgagtcacccacgaagactttgagggtcgcgctaccttcgccgccaacttcatcgacgatgtggtaggtttcactcctttctcccccgcacccccttttctgttgcgggacctgtaccagtcttgagcaactcgagattgcgcttcacactttatccctctgacgcgtagtatatatactaacttttctgggatataggacacagatgagcagggtcacggcagccacgttgccggcaccatcggtggcaagacctttggtgtcgccaagaaggtcaacctggtggccgtcaaggtcctgggagctgacggcgccggttcgaactctggtgtcattgccgggatgcagttcggtaagcaaaagccccttctcctcgacgtgacatatcttgaggttggagagtgaaagttgaggaacaccgtgttgctaacagctttcgtctcaagtcgcgaacaacgccactgccatgggactgaggggtagggccgtcatgaacatgtctctcggcggtccggccagcagggctgtcaactcggccatcaaccaggtcgaagctgccggcgtcgtccccgtcgtggcggccggcaacgaggcgcaggacacggccaacacgtcgcccggctcggccgaggccgccatcactgtcggcgccatcgaccagaccaacgacaggatcgccagcttctccaactttggagagctcgtcgacatcttcgcccccggcgtcaacgtgcagagcgtcggtatcaggagcgacaggtccaccaacaccctgagcggcaccagcatggccgccccccacgtcgccggcctggctgcctacatcatgagctttgagaacatcacgggcgtccaggcggtgagcgaacgcctcaaggagctcgcccaggccaccggcgcgagggcgaggggcgtcccgaggggcaccaccaccctcatcgccaataacggcttcctgtaa

SEQ ID NO: 1003 - DNA, 1270 bp, Myriococcum thermophilum
atggctgacaagccaaagccaaagcgggagctgcgatgcctcatgtattataccgggtagggactcaacccctcacacactatgctcccggcaacagactgaccccttcgtcatcgaaacagtcagcacccggtggcgccctccattgacgagctccgacatgtaacgcacgtcgccgttgcttttatgagccctggcatcttcaacgagcccgggcggacggaatggccattgtttacaaccgtcgatgaagctcgtgccaagttcccggaagagaccaaagttatagtggccattggtggctggggggacacggtcggcttctctgaggctgcgctgaatgatgaaacacggaaaacatttgccgagaatgtggctcgcatggtagaagccacgggtgcggatggcgttgacattgactgggaatatccggggtaagatctgcgtcggtccacagaatgctcgccgtgtactaactcgcggcgacagtggtaatggcgaggattataagcaggtccccaacgaagccaaggcttgggagattgctgcctaccctcttctcctcgcagagctgcgcgccgcccttggacctcacaaaatcatctcggccgcagtgcccggtctgaagcgggacatgctcgctttcactcccgagacggtgccccgaatcatgcgctacatagacttcctaaacgtcatgacatatgatctcatgaaccgccgcgacgtggtgaccaagcatcacaccggagtggaactaagcctagaggctgttgatgcctatatctctgccggcgccgagccccagagaattaatttgggatttccattttatgtcaggtacttcaagacggaacacgacgcctgcgcgctcgcctccccgataggctgcccgaccctgctacttgaagacccggagacgggtgaggatctcggccgtagcggggcgtttgcgtggcacgatccggtgcctgaaggaatggcagaatcttttgccagggcgctggaagatggtgtctacgacgaagagggcggtggatactactattgggacgccagggaagatctctggtggacatttgacactcctgactccatcaagcgcaagttccctcgggtactagacaagcggcagttggggggagtctttgcgtggggactcggcgaagacgcacctctgtacgaacacttcgctgcactcaatgacgggctggagagatacttagaaggcaaggaaccagactgtgaggaaaaggaagtttcgacctaa

SEQ ID NO: 1004 - DNA, 892 bp, Myriococcum thermophilum
atgaagttcgcttcgtccctcgctgttctggccgccgccggcgcccaggctcactgtcagtattaaccttcaaactacaccacctacccccttcgctttctcctttgcggccggtctccttctcttctcaactagcggttgctgacaatgaccagacactttccccaggggcggcgttggcagctctctctctggggagtgggaggtggtccgcatgactgagaaccgctactcgcacggtccggttaccgatgtcaccagctccgagatgacctgctaccagtccggcgtgcagggtgctcctcagaccgtccagatcaaggcgggcgagaagttcaccttcagcgtggacacctcgatcggccaccccggccctctccagttctacatggccaaggtgccctcgggccagtcggcctctacctttgacggtaccggcaacgtgtggttcaagatctaccacgacggccctaacggcctcggcaccgagcagattacctggcccagcgacggttcgtgaacctcctcccctccccccccccctctgcttcctcccgtcttgccattcaatgatttcactaacaccattgtttgctattatataggcaaaaccgaggtctcggtcaccatccccagctgcatcgaggatggcgagtacctgctccgcgtcgagcacattgctctccacagcgccggcagcgagggcggcgcccagttctacatcgcctgcgcccagctctccgtctcgggtggctccggcaccctcaacaccggctcgctcgtcgccctgcccggcgcctacaagtccaccgacccgggcatcctcttccagctctactggcccatcccgaccgagtacatcaaccccggcccggctcccgtctcttgctaa

SEQ ID NO: 1005 - DNA, 1246 bp, Myriococcum thermophilum
atgctccgtaaaaccgccctccttgccgtcgctgcactcccggccttgtcgtcggcccagatctccaacgacttcgagaacggttgggacgagacggcatggccgatctacgctcctgactgcaaccaaggcggcaaggtgtccctggatacgtcgactgcccacagtggcacaaactccatcagggtcgacggtgccggtggctattgcggccacatcttcttcggaacgaaccaggtccctagcggcgatctctacgtgagggtctatctgtaagtgtgcaacaagcgaaacactaccgctacgaaatgcctcaagaaggacaacagggaggataaaaaggaaaaaaaagggaatgaagaaggcagattgaagaggaaaaaggaaacgaagcaggtctaacgtgtctctttctttcctttgcagcaaggcatccaatgccctcacttcttcccatgtcaccttcatcaccatgccggaccctgcccagggtaccaacaagcacctccggatcggcggccagaaccagatcatcatgtacaaccgcgagtccgacgatgccaccctccccgagctctcgccgcagggcgttgccacctccacctcccttcccaccaacagctgggagtgcttcgagtaccacgtcggcaccgacggcaccatcgagacctggctcaacgacgaggccatctccggtctgacatacggcccgggaatcgacaaccccaacgccggcgcctggtcgcgcagctccatcatccccaagccgtcgggcgtctacttcggctgggagtcgtacggcggcgacacgaacaccttctggtacgacgacatcgtcatcagctcctcccgcgtcggctgctctggcagcggcaatcccccgtcttcttctaccaccacctcttctcctaccagcgccatcccctccaccaccttcaccacctccaccacgtctaccaccagctcggcgcccgccacctctacgaccagcagctgcaccgtgccgcaatatggccaatgcggcggtattaacgtaagttcttcagtgtctcctgtcccaccagttcgataactattattgcctcctttttttctgtcctagtttgaataatacgcttgaacatggtcctgctgactgaccacctacttctttgtcattcttaacttgcagtacacgggatgcacgacatgcgcggccccgttcgaatgcacgttcagcaatgagtactactcgcagtgcctctaa

SEQ ID NO: 1006 - DNA, 1022 bp, Myriococcum thermophilum
atggcactcctcggctcctcggccgtgctgcttctcctaacagcagcgatagcggcggccgcccctcaagggcccagccccttcaggaactcgacaataccaccatggcgagggggagggaactcaacaatccccgggccgtggacgacgacggcggcggcggcgccagatccgcccaaggcgctgccgcagcgggcgacggccaacgacctgcgatggcagccgtcgctggacttcgacacggacgggtgctacaacgtgccggcgatcgacgccgagggcaacatcgccgagggcttgccgcacgagtgggtggacctggcgagcgactgccgggacgcgtcggacctggacaacaacaacgtgtactcgcggcagcggtgcaacagcggctggtgcgtctacctgtacggctactacttcgagaaggacgtgcccgtgcccttcgtgcccctgggcggccaccgccacgactgggagcacatcgccgtctgggtcagcgacgcctcgggccgcgccgagtacgtcgccgcctcgcagcacggcaactacgaggtccgccccgccgccgacgtccgctgggacggcgaccaccccaagatggtctaccacaaggacggctccagcacccactgcttccggttcgcgaacgaagcggacgacaagattgagaaccacaagggggtatgggtaagtatatcgtattatattatacgcacttgatcgaccgggaaatcatctcccaaccgacgccggctgctcccccttggaactgagcaagcaagagaggagaagatcatcacggctgacttggttctattaattggtagttccgtggcgacttggtctcgtacaatggcttcccgtcgaccgagatcagggacaagctgttcgcccacgactttggcgcggcaaccatcgacttcaaggattcgacattccccggcgctatcacgaaggcgatgccggctggtatcacctttgacgtgaacctagacgagggatctccagggactccctga

SEQ ID NO: 1007 - DNA, 3131 bp, Myriococcum thermophilum
  misc_feature (1937)..(2986): n is a, c, g, or t
atggtccgcttcatgagatggctggcagcgatgccggctagtagctggctcggcgttgtattcgcatcgcctacacctgcccgggaacttcacccgcgacaagctcagacgagtttctggtacgccaacatcgaccacacgtccgccgacgtccgtggctacgccccagatctcgacggagattatgtgtatgaggtctacaaagcagttgcccccggggatggggcaggtattcaggcggccatcaacgcagcgacaaatggcaccacccgccacggacaatggtttgcgagccagccgcgcgtaagtgttccgtccaggacctcataatcaggagccattgctgaacaattgggcacaggtcgtctatatccctcctggcgagtacgtcgtcagcgagaccatcttcatgaacaccgacaccattcttatgggcgatgctaccgacgtgggtccaacatatttgccgagaaggtaccactctattttacgacaacgtcactgacccggtccatgaccatctcagccacccgttatcaaagcatcttctagcttctcccgtagcggcactcttctcaacggccaagacccgacaactggcatctcgggcgagctgtccttcgctgtcagtctcaagaacatcattctcgataccaccgatgttccgggtgacgcacccttcgtggccctgtactggggcgttgcccaggctgcccacctccagaacgtcgtgattcgcatgcccccgtctgtcaacggcaacggccattccggcatcagaatgggccgtggctcgaccctggccgtggcagacgtgcgcatcgaaggtggtcaggtacgctcctccctatctcctgattttcgggccttggaaagattccattaccacctgtaactctgtgatgatttggtactgaactttccgacgtagaacgggatctggtacaacggccaccagcaggccgtcttcaggggcgtctacttctaccagaacacgatcggcatgctgatcgacggtggtagcaccatcagcctcattaatcccaccttcgacacggtgggcttcggtatcatgaacacgggcggttccccctggattgcactcgtcgacgccgcatccaagaactcgggcgtgaccctgaagactacctcttggccgagctacctcatcgagaaccttgagaaggataccgacagcaatattgccgagggacctggagactttgtccttcccgcccagtcacacctcgcccagttctcgtacggcaacactgtcggccgcgaccccatctacggccctgtgagcagcgacgacgcggaccgcccatctgctctcttgacttcttccggacggtttccggccatctcagcgcccaactacgccgatgttcccgtcagcgagttcctcaacgtcaaggaccagaaccagaatggcggccggcgtgtgctgggtgacaacacggtcgacgagtccgaagcactcaatgccatcctgcagctggcagcggaccaaggcaagatcgcctacttccccttcggcaagtacagggttgactcgacccttctgatccccgtcggtagccggatagtcggcgaagggtgggcgaccatcgtcgggcacggctcccagttcgccgacgcatcgtcgccccgacccgtcgtgcaggtcgggaaccccggcgacgtcggggtggcgcagatccaggacatgcgcttcaccatcagccagccgctgccgggcgccatcctggtgcgctggaacatggccggcgccaaccccggtgacgtggccatctggaacagcctcatcaccgtcggcggcacccgtggagcggcggagctgaccgacacgtgccgggatgcatcggcaccctgccgggccgccttcctgggcatgcacctgaccgagtcgtcgtccgtgtacgtggagaacgtgnnnnnnnnnnnnnnnnnnnnnnnnnnnnnnnnnnnnnnnnnnnnnnnnnnnnnnnnnnnnnnnnnnnnnnnnnnnnnnnnnnnnnnnnnnnnnnnnnnnnnnnnnnnnnnnnnnnnnnnnnnnnnnnnnnnnnnnnnnnnnnnnnnnnnnnnnnnnnnnnnnnnnnnnnnnnnnnnnnnnnnnnnnnnnnnnnnnnnnnnnnnnnnnnnnnnnnnnnnnnnnnnnnnnnnnnnnnnnnnnnnnnnnnnnnnnnnnnnnnnnnnnnnnnnnnnnnnnnnnnnnnnnnnnnnnnnnnnnnnnnnnnnnnnnnnnnnnnnnnnnnnnnnnnnnnnnnnnnnnnnnnnnnnnnnnnnnnnnnnnnnnnnnnnnnnnnnnnnnnnnnnnnnnnnnnnnnnnnnnnnnnnnnnnnnnnnnnnnnnnnnnnnnnnnnnnnnnnnnnnnnnnnnnnnnnnnnnnnnnnnnnnnnnnnnnnnnnnnnnnnnnnnnnnnnnnnnnnnnnnnnnnnnnnnnnnnnnnnnnnnnnnnnnnnnnnnnnnnnnnnnnnnnnnnnnnnnnnnnnnnnnnnnnnnnnnnnnnnnnnnnnnnnnnnnnnnnnnnnnnnnnnnnnnnnnnnnnnnnnnnnnnnnnnnnnnnnnnnnnnnnnnnnnnnnnnnnnnnnnnnnnnnnnnnnnnnnnnnnnnnnnnnnnnnnnnnnnnnnnnnnnnnnnnnnnnnnnnnnnnnnnnnnnnnnnnnnnnnnnnnnnnnnnnnnnnnnnnnnnnnnnnnnnnnnnnnnnnnnnnnnnnnnnnnnnnnnnnnnnnnnnnnnnnnnnnnnnnnnnnnnnnnnnnnnnnnnnnnnnnnnnnnnnnnnnnnnnnnnnnnnnnnnnnnnnnnnnnnnnnnnnnnnnnnnnnnnnnnnnnnnnnnnnnnnnnnnnnnnnnnnnnnnnnnnnnnnnnnnnnnnnnnnnnnnnnnnnnnnnnnnnnnnnnnnnnnnnnnnnnnnnnnnnnnnnnnnnnnnnnnnnnnnnnnnnnnnnnnnnnnnnnnnnnnnnnnnnnnnnnnnnnnnnnnnggcaagaagaagcacagaagtattgcaacgggttttgtctgtcagattcgacggctgcagggccggccacggctggaagagcgtggcgcggactgagcgtctgagagtacgttgtgatgcctctgtgagtgcgcgccctgtctag

SEQ ID NO: 1008 - DNA, 1563 bp, Myriococcum thermophilum
atggttttgtctaaagtttggggtgcggtgctcctcgccggtgttgctgtggcccagacataccctccagatgtggtcgatgagctggcgaaggagagtttgcccaagcttaaggaatggctcgagaagaatccgcagggagaatgcaccttagagacggcggttaggcggcgtgaatggtttgctctaatttaccgctcaagtttcccatgagtagacatctaacgtgacccctccaggagcgacctgaccctcgaagaacgcaaagcatacattgatgccgttctctgtctccagtcgaagcccgctttgacaagtgaccaggcaccgggagccaagagcagattcgacgattatggtacgcttcctgagcctagcacgataaaggagcatgcgcgatatatatgccgcgctccgacaattaaacgtacctaggtaatttacactgctaacaccatccgggttccagttgtcattcatatgcaacaaacgccgaggaaccatggctcggtaagccaaaaacttcacttctctctcttagtgccataagacgacattatctaacgtcccgcagaccttcttcctcccgtggcatcgttactacatctggcactacgagaatgctctgagagaagaatgcggatatacaggataccagccggtaagactacatcgccattcatccacaacaggatggcacagtggctgaccaagggtggaattttaaaagtactggaactgggaccgatatgccaaggaccccgtcaactcgccgcttttcgacggcagcgagggcagcatgggcagcaacggtgcctacgaagaacaccagggcatacgtttccccggcgcaccaccgccgtacgacgtgatcccgcctggagaaggcggcggctgtgtgaccaagggaccgttctcgaagtgagtttctgaccaagtccccaaatcttggccatgtatctttttgcccttatgaagtcggggatgtttttactgacatgccacctcgctttctcactctacaccagcatgaccgtcaacctcggcccactcgcgccgtcgctgaacgtggagcgcaacccccgggcggacgggttgggatacaacccacggtgcctgcggcgcgacatcaacaagaacgcggcagcggtgacgacggcaaactacacgtacgatcttatcaccaacaaccacgagatctactggttccagacggtcatggagggccagttcccgcagggcaagtggggagtacacgctggtggacactacactgtctctggcgacccagccggcgacttctacgtcagccccggcgaccccgtcttctggctgcaccactccatgatcgaccgcgtctggtggatctggcagctccaggacctcgagagccgcctgactcaggtcagcatgaccaagaccatgttcaacatcccgcccagcgaaaacggcacgctcgacgacctcagcggcctcggcgtcctcgccccggacgtcaccgtccgcgagctcatgagcaccatgggtggccttggcggcaagttctgctatatctacgagtaa

SEQ ID NO: 1009 - DNA, 778 bp, Myriococcum thermophilum
atggtgaagctctctctcattgcagcgagccttgtggcacctggcgtgcttgcgggtcctatgatcggccccaagacgctgaccgagaccacgctgaacccccgtcaaggcggctactacgactacttccagaactggtccgagggaggcagcaacatccagtgcatcaacggccaagggggctcctacacggccgactggaatagcggaggtggcttcgtctgtggcaagggctggagctacggaggcaaccggtgagtcgctgctcgcgtcgcctttgaacctatgtagcgtcgaaatcattaatcggccggcggccggttcaagccgaacccttgctaattactgatggaacgaaagcgtcatcacgtacacgggcgaatacaacgccactgggccgggctaccttgctgtctacgggtggacccgcaacccgctgatcgagtactacatcatcgaggcccacgccgacctcgctcccaacgagccgtgggagtccaagggcaacttcacgttcgaggagggcgagtacgaggtcttcactagctggcgtgtcaacaagccgtccatcgagggcaccaggaccttccagcagttctggtcgctgcgcaaggagcagcgggtcggcggcaccatcactacccagaggcacttcgaggagtgggccaagctgggcatgcagctgggcaaccatgactatgtcatcatggcgaccgagggatacactgccaacggaggaagcggcagcgccggacactcaagcatcaccctgcagtaa

SEQ ID NO: 1010 - DNA, 1010 bp, Myriococcum thermophilum
atggtggctctgagtacacttgccagggcggtcagcgttcccgcccttgccggctggaagattgtttcgacgatcacgtttgatggagaagccggaaaggaagtagacaaatctgcttgggagattatgactaagtaagactctctgtgtgatcgtctgcactgcccgaactaccggaatccgtgacgtccagaataattaataccccagctgtcattatctccgatgcgctattattaacccgtacactaccgcagcatcaatttcaacaacgaggtccaagagtacaccacatcgacagacaacatgcacctctccggtaacggtacgctgctcatcatcccgctcaagtccgagacgggcgagtggacgtcggctcggattgagtccaaggagtcgttcacgcccgaggacggcaagacgacgcggtaccagggcgagctgcgctttggcgactcgccgcaggacaagcagcagggcatctggccggcgttctggatgctgggccagtcgtcgcgcgacaagggcgtcccctggcccgagtgcggcgagctcgacatcatggagcgcaaaaacggcgagccgaccggccacggcaccccgcactgcggcaccggcgactcctgcggcggccttaccaagagtgtgcccctcgacggcaacggctggcacacctgggccatcgagatcgaccggacgaacaagaagtgggaggaccagaccatcacctggttcttggacgacgacgagtacaacaagatccagggctccgatgttcaggatgaggacacctggaaagctattgcgcactcgcccatgtatttcatcctgaacgtcgccgtcggtggtaactggtaagtgtccacttgtgaataaatcttgcttcaacaagaggaaggtgattcagacattgacccctgcaacgcaggcctggcgagcccaacgacaagacagcggacggcatggacaacatgatggaggtcaagtacatcgctgtatactcgaagtag

SEQ ID NO: 1011 - DNA, 1379 bp, Myriococcum thermophilum
atgaagtggttcgcactcagcctcgccctggccgggcagacccaggccgccctgcgcttcggatgctcgaccgtgagcatccagcgtcttgaccccctcgtcgagccgggcaagatcccctcgtcccacgtgcaccagatcgtgggcggcaacagcttcaacgccacgatggagggcgatcggtctgagcacgccacctgcacgacctgcaccttctcagagaacttctccaactactggacggccgtcatgttcttcaagcacagcaacggctcgtacaagcgggtgcccctgatgcagaacactgccctgcccaacggcatcaacggtggcatgaccatctactacacccagcaggacttcttctccaatggcaaccagaagattactgccttcaagcctgtgaggactgcccctttttgaactcgtcttgctccattgaattcccatttccagaaagggtgaccagtcagagagagagacaagttactgacacatagacttgttctagggcttccgcatgactgtcggcagcccgaccagcaacggtgaggagggcaaccccggtctgcggttcgtctgcctgcagaacaagggcactcgtttccctgagcttcccaccttccccaaggagccctgcccgggcggcatcatgacggtgcaccacttccctgcgtgagtcgaaaccctttgcgtcttccccctttcccaaccaaaacctcgtttctttttcccttgccgcggaaagaagaggaagaaaggaaaattagcttttaagatgtgtgtgagagagaaaaggaaaggctaacctagggaaaaacaccaaaacaaaaaacaatagctgctgggacggcaagaacctcgactcgcccgaccaccaatcgcacatgtataacacggtgcgcgaggccttcacgcccgcgggcccgtgcccggcgtcgcaccccgtgcgcatgcctcagctggccttcgagaccctgtgggacacgacgcagttcaacagcatgtggcccgaggacggctcgcagccgttcgtgctcagctacggcgacggcgtcggctacggcacccacgccgactacgtcttcggctggaagggcgacgcccttcagcgcgccatggactcgccctgcatgttcaacgcctgcgagaacggcaacccgctccagagccagagcgtcgccgagatgaacgcctgcacggttgagagccaggtcaacgaggacctcgatggctgtaagtttttttttcttcctccgctctcttgttttacttcgcgctgtgaaaaggaaacaagatactaatgcgatgtgcgaacaatgacaacagggctggatcacctccctggctacgagaacatcgagaacaagaaggagtaa

SEQ ID NO: 1012 - DNA, 1712 bp, Myriococcum thermophilum
atgaggttactccgcaccacgggcgcggcgactcttctcctgtcccgtgcggcctttgcgaccaacaacactctaaccccagacaagcttgcagcggatattaagacggaggagtatgagcagccagcaccgagcccttaaccatcccttcagttgttaacagatgctgtaataccaggttacaaaacgtcctctggaatctcaaccacatcgccgatacccacggcggcaaccgagcctttggcgagccagggttcaaagcctcgtcagacttcattctcgagcgcgcggttacgcgcttccacaatgagtttgacactgttgttcaggcatttaattacacctatgccaagacaaaccagatcaaagtgactgggccagaaggcgaggatgtcattgtggtcagcccacaatacaatccctccacgccgctacccgacggagtcaccgctcctttggtggatacaccagtcgatgatgagcgtgggtccgcgtgctttccggatcagtgggagggaatcgatgcaaaagggaagctggtgctggtaaagcgaggcacctgtgcagtggcggataagtcggccctcgctaaggagcgtggggcactgggtgagctacgtcccggctgattaaaagaaaaaaaaagaagagaaagaaacaatgctgacgtcgctctaggggtgatcctgtacaacgacgagccaggaacggacattatcgtcccgaccttgggcgcagaaagcatcggaaaaaccgttcccatcggaattatcccatcagatgtaggagagaactggaagtcccggttggccgatggggaggaggttattgtgaatctgctggttgacgccatatccgacactcgcgagacgtggaacattcttgccgagaccaaacagggcgaccccgacaaagtcatcatgctcggtgcacatcttgacagcgtgcaggcgggaccaggtatcaacgacgacggcagcggcacggcagctctgctggagatcctgaccgcggtcaggcgctacgatggtttcccacacaagattcgtttcgcctggtgggcagcagaagagagtggtctggtcggatctctttactacacctcccacctgaccgaggaggaagccgaccgcatcaagtattacttcaactacgacatgattggctcaccccatcccgactttgagattgcgagtgatgacaatagcggagtcgggccacagcttctggaggaatatctcgttgagcagggcaaggagattgtccatgggtaagttgaccccatcccaacaagcccgacaccagccctgcgtacctctgcaccagtgtggtattggcgagttcccgctaacctcgggacacaaagcggcttcggttctggctccgactttgtgggtttcctcgaacttggtatcccgagcaccgcgttgcataccggtgccggggctccattcgatgcatgctaccaccaagcgtgtgacaacctcgacaacatccattgggaagccctgaccatcaatgccaaagcggccgctcgggcggctgctcgtttggccctttcactcgagggtgtgccgcctcgcaggaaaactagcctcaaccttaacacgcgccagggtgtggtgcaaaacttccggaagtgggcggcattggccaaggaagcgagtcatgggcacgcatgctcgcacaaaaggaagaaggtcgtagtgtaa

SEQ ID NO: 1013 - DNA, 1182 bp, Myriococcum thermophilum
atgtggcccactcccaggattgcgtacctcatactggcggctcactcgctgctcgtcagcgggaccccggtcgaggccgaggctgtggacggaaccgtcctggccaagcgtcaatgcccgcagattcacatttttggagctcgagaaacaacaggttcgtcgtagtcctggcatatcttcaatgtatctctgagagtgcccggctgacagtatgggacagcgccgcccggatatgggaccgctggcactgtcgtcaatatgatcctcaatgcgttccccggagccacggctgaagctatcaactatcctgcctgtggtggacaaggatcttgtggaggagtccagtacgtaatcccttttgtctttgtgtgatgatgtcgccgactaactaccttatctatcctacaggtacggtgactcggtgaggcagggcaccgacgcggtggccacggcggtgaacaacttcaaccagcgatgtcccaacacacagattgtgcttgttggctattcccaggtatgtgtaactgagaatgagaagacacgttgggtgaaggcgacgaaggagacaaggcggctctaacaaggatagggcggtcaaattattgacaatgccgtttgtggtggcccagacacgggcgctggcatcacgtcctcaacccctcccatctcagctgcggcgctgaaccagatcaaggccgtcatcgaaatgggttctccccggtacgtcgccgggttatcctacaacgtcggtacctgcgcagcacaaggtgtaagtggtcttgtctcctctagaacggtgtactttccagttcctaaaacctcaatgcttagtttgctgcacgccctcctggctacgtctgcggttccaactcagcgtccaagatccagagttactgcgactcaaccgacccatactgctgcaccggaaacgacgccaacagtcatcaacagtatggcaacaagtatggacagcaggccttggcctttgtcagtgctagactcagcagcggtggcgatggcggcaatggcggaacgcccacgtcgtcggccggtggctccgttccgaccggtaactgcagccctctttacggccagtgcggtggccagggatggacgggacccacgtgctgctctcagggaacctgcacggcgtctaaccagtggtactctcagtgtttgtaa

SEQ ID NO: 1014 - DNA, 1623 bp, Myriococcum thermophilum
atgagattcagccacgcgtcaggcattgccagcctggcaacctttggggttgcctcgacactgagtggtcagaaaccattgaccgatgcttcgttgcctcaagtgccgctcgaaggtgactggccgagttccaaatcgcttgtaacctcggaggccttgcaagcgaccatcaacgtcgacgcgctcctctcacgcgccaagcagctcttcaagattgcccaccttagccaggacgagtatggccgccctactcgcgtcattggctccaaaggacacttaggcactttagaatacatttacaattccttggtcgcccttggcgactactatgtcctgtcaacacaaccctttcctgccgtcacgggcaccgtgtttgagtcacgcttgctcatcgacctgagcgtggctgagtcggccttgcccatgagcctaacgccgccaacaaagggaaagcaaccggtggacggcaagctcgtgcttgttgctaacgaaggctgcgatgccgccgactacccttcggacctcaaaggcaacattgcctttatcaagcgaggaacttgcccatttggcacaaagtcggagctcgccgggaaagcaggggctgttgccgcggtcgtcttcaacaatgacagtggaccgctgagcggcacgctaggcacgccttcggaagatcatgtcgcaacgtttggtctgtccggctccgaagcggccccgttcgttcgcaggctggaggctggcgagacggtcgaggcgtcggcatatattgattccgaggtgaagagcatcgagaccacgaacatcatcgctcagactcgcgagggcgaccctgaaaactgcgtcatgctcggcggccacagcgactcggttgccgaagggcctggtatcaacgatgacgggtccggcagcctggccttactggaagtcgcgacgcagttgaccaacttcagcgtcaacaactgcgtgcgtttcgcctggtggtctgcagaggaagaaggtcttctcggatccgactattacgtgagcgtgctctccccggaagagaacaagaagatccggctgtttatggattacgacatgctcgcaagtcccaactttgcatatcaggtgtatgacgcgcgcaacgatgtcaaccctgttggttcacaggaactgagggatctttatgtcgactggtatgccgcccacggcctgaactacaccttcatcccgtttgatggccggagcgattatgatgggtttatcaggaacggtattcctggcggcggcattgcgacgggcgccgagggaatcaagaccgaagaggaggcggcagctttcgggggtgaggccggcgttccttacgatgtctgctaccatgcgatctgcgatacaatcaacaacttgaacctgacggcttgggagctcaacaccaaggtatggcaatgacatcccctaaccagtcatcattctcgtgtttaatatcgctgacatgaccgtttttaccagctcgttgcccactctgttgctacctatgcccgctccttcgagggctttcctgagcgcaccatcgatggactgtctgccgaagtttcgaatgcgtattccgaaaacgtcaagtatcatggcagcaaattgtttatttaa

SEQ ID NO: 1015 - DNA, 1166 bp, Myriococcum thermophilum
atgaagggatccggtctcgttagggtggcggccctgctcccggcatttgtttccgcctatgaactccccggtgaatgtaccggaatctgcaacaactcccacgacccgtcaatcatccgccgcgcagatgggacatacttccgcttctcgaccggtggcaagatcgccatccacacggcgccgagcttgaccggtccgtggacatacaggggacctgctctgccagacgggtcttccatcaacctggacggaaaccaggacctttgggtaagaagaatgaacagagcagccgcagcccacctaccgcctgagatgtattcatgatgatggtaggaaggtgacgttaacaacgcgctctttaggctcccgacgttgcacaggttggagatcagtactacttgtactactctgtcagcacatttggcgtccagaactcggccatcggcatagcccgctcatcgagcctggacgccggcacctggatcgatctcggctctaccggcgtcacgtccagcacgggctatgcgtacaatgccatcgacggcaacctgatcaacgagccggggaccagcaactatttcctcaccttcggcagcttctggaacggcatccaccgcgtccgaatgacgcccacccagacgaacggcaacgtgtaccaagtcgcttttgaccccaacgacccagccatggagggcccgaccgtcttcaagtggggcgactactactacctcttcttctccaagggcagctgctgcggctacgaccaaaacaggccggctccgggacaggagtacaggatcatggtgtgcaggtcgaccgcgcccaccggcccctttgaggacagggacggcaggtcatgtcgctcgggcggcgggaccctggtgctcccgtctcacgactgggtgtatgggcctggaggccaaggtgtctacgatgaccccgaatacggaccggttagttctctgcccttttccgtgcgggttcatcatttggcatcatggtttattaagcatcaagcgccactctgcttggtctactcttgctgacgatcttctgcctaggtcttgtattaccattatgttgatactcgcattggctatgcagacggccagaagaagtttggttggaaccgcatcgacttctcaagcggctggccggtggtctga

SEQ ID NO: 1016 - DNA, 1293 bp, Myriococcum thermophilum
atgaaaggtgttttcattgcaggggccttctgggggctcttcaacttggcctcggctgccgatttctcaaaccctctcaaacccttcaatgggtctgaccctcatatgacctattacgatggatattattacttgatgacaactacttggtccgacctgcagattactcgggccaggacgttagagggccttaaagacggagagaccaaggtggtttgggttgattcgaatccatcccgctgctgcaatgtttgggcacccgagcttcacaaagttgacgacaagtacgtggttatcgtctgttctcgcatgatattaacctcatctattatcaattgttagtaggaggttggctaacagagcactattattaataggtggtacatctactacacagcaggtaacagccagaaccttgatggccagcggtctcatgtcctagaaggtgggtggaagagcaactgcctgctactttttggaggaaatatatctggagctttctcaggagactaacaatacacaccaattcaggcggctctgatccgtggggcgagtactcttatgccgggcagctcacccaagactgggggatcgacggtacgattctccgggtggaggaccaaaactacttcgtctggtcctgcttcgcggataacattcagtccctctgtattgcgcctttgcagtcgccgacatccatcggctctccttgggtgctctcgcagccactccttgactgggaaagggccgacaccccagttaatgagggaccggcaccgctctaccatgacggcagaatcttcctcgcgtacagcgcaagcttctgctggacacccagctatcaactaggccttctgacctacaacggcggagatccgactgcagccagcagctggacgaagacgggacctttcttcagctcagctaatggaaactatggaccggggcacaattcgtgagtttctccaatttcctttatccttatcccttccctctgacccaaacaacaactggaacctccaaattgttcacgactcggcggagtgcactgcaacaccgtctggcggtcggtcctgtaatacatgtactgacttgatgggtcccagatttgtcaatagtcccgatggcaccgagatctggaacatctatcatgccacctccatctcgactggtaattgtgacgggaacaggtatacagcggctaagaaagtgacctggaattcggacggcactcccaactttggcagccccggccccttgggcgttgtcactcctgggccttcgggagaataa

SEQ ID NO: 1017 - DNA, 1474 bp, Myriococcum thermophilum
atgaagttcctcaacgccctcctcggtgctgcagctgccagcacggccctggcagcgccgtcttgcacgaaggcgaagcgcgctggcaagttcaagtgggttggcgtcaaccagtcttgcgctgagtttggccagaacatccttccaggccagctcgacaaggagtacacctggccggccaagtcgagtattgatgtaagtatcgtcatttccgaatttcagggcatcataaaaaatatggagctgaccatgtaaatcagacactcctcggcaccggaatgaacaccattcgcattccattcatgatgtaggattgagtgccctcttcgtcttggagagagaggggcacgcgttgctgacatattaattatgacagggagcgtctcattcccgaccaactgacggggactgttaatgaaacgtactcggctgggctcatcgatgtatgaatccaactttgatgactcccaaaaacgaatttgctaaccggaatttcagactgtgaactatgtcacggagaagggagcgtatgctgtcattgatccccacaactttggtacggctaacttaccgcggtccatgtccaaattattcttaaaagaaaaggacacaaatttcccagagaagctaaccgattcataggccggtactatgaggagatcatcagtgacgtcgatggcttcaaggcctggtggtcgactacggccaaactgtttgccgacaatgagctggtcatcttcgacaccaacaacgagtatcacgacatggaccagaccctcgttgtcgatctgaaccaggccgccatcgatgctatccgtgaagccggtgccacctcgcagtacatcttcgtcgagggcaactcgtggacgggtgcctggacttgggtacgttctggcccgaggcgtttctgtcattgcttccgttttctccccttattttttgtatcagtatggccgtaactaactgttgcgtcatttccaggtctcctcgggcaacgctgacactctgatcaacctcactgaccccgcgggcgatgacaagctcatctatgagatgcaccagtatctggatgaggatggttcgggcacgcatgaggagtgcgtctcggccaccatcggccaggagcgcctccaggaggccaccgagtggctcaagcagaccggcaagaaggccatcctgggcgagacggccggcggccccaacgaccagtgcatccaggccctcaccggcatgctgtccttcatggaggagaactcggacgtctggcagggctggctctggtgggctgctggtccctggtgggcggactacatgtactcgctgtaagtgttcccccgcttccccgtttttcttttgtcccatgttgtttcctgagagcgttttcttcttttccctgtatctaactcttctcagtgagcctccgagcggtaccgcctacacccaggttttcccgagccttcaggcttatatttga

SEQ ID NO: 1018 - DNA, 2433 bp, Myriococcum thermophilum
atgaagcccttcatcggcgctgcggcgcttttggtgggcgtactctctcacatcgtcgctgccgcccctccgtccacatcagagcagcgcgaccttctcgcccccatcaccgagagggacgagccagccgtggagcctcgccagggttgtagctcgttctcaaacaacgaccgggcgtgctggcgtgggggatacgacctcaggaccgactgggaaacggacttcccggatacgggagttgttcgcaaagtgagtgccctccttcgctccactgctcggcaggtaccgcatgtaaaactactgagcaggagctgacatgcgagtggcagtacactctggaaatcacagaaaaggacaattggactggacctgatggcgtcgtcaaggagaaggtcatgctggttaatggtacggcaccctgttttgtttttctcggatgcgggatgatattccttgtttatcagtgagtttgtgagaaaaagagactgaccaagctttttgtttgcaggcaacatactcggtatgcctcattgttctccggcaaccccagctgttcgagaagcgtcccaaaacttttagtgtgtagtaatcaggcataggtaaactaaccaaggggaaacccacaacaggaccaacaatcttcgcggactggggtgacacggtagaggtaaccgtcatcaacaaccttgagcacaacgggtatgctctgctacctgcttcctttccctgctcggcatttccgcggtaatgttgactcgtgataacagaacatccatccactggcatggaatgcaccagaagaagaccattctgaacgatggcgtaaacggtatccttgagtgcccgatccctcccaagggaggaaagaaggtgtaccggttcagggctcagcagtacggaacgagctggtaccactcacacttctcagcccagtacggaaatggtgtcgtcggcacgattgtgttctacgggccggcctcggcggattatgacattgatcttggcgtgttccctatcagcgattactactatcaaacggcagacaggttggtggagtacacgaaacaaaacggaccgcccccggccaacaatatcctgttcaacggaacggccaagcacccgacgacgggtgaaggcgagtatgccaatgtgacgctgactccgggcaagcggcaccgcctgcgcctcatcaacacctcagttgaggcccacttccagctctcactcgtcaaccacaacatgaccatcatcaccgccgacacggtgcccgtccagccccgtacagttgacagcctgttcatcggcgtcggccagcgttacgacgtcatcattgacgcaaaccagacacccggaaactattggtttaacgtcacctttagtgagagctctggttgtggcgaggttttgagtccggatggtgagacaccggtttatccggccgccattttccactacgccggcgcccccggcgaccttcccactaacccgggcggtcctgtgagagaccacaaatgcctcgacctcatcgatctcaagccggtagtgccccgcaaggtgcccgtggacggcatcgggacggtcggatcgctggacatccacctcgagaccacgccctacttcaaatggaccatcaacggcagcgccatcgacgtcgactggcaaaacccagtcatcgactacgttatcaatcagaacaccagctttccacccgagtacaacgttgtcgaggtggaaggaaagagcaataatgtatgacgggactgcaggttcctctctttcccctgacttacctcgctcttttccatctctgcatagttcaaatgcctgatcaagactaacctaaaccgcctctatagcactggacaatctggttgattcagaacgacatggagtcaggtttcagtttgccgcatccgatgcacctacatgtaagttctcaaatacaacaacattagaaagtaatgaaagtaagaaaaatatgtccatgacattaaccaatctcccacaaaaaaaatatagggccacgacttttacattttgggtcgctcgccccaggggtcagtcaggagggggaggaccttcgagttcaacccagcaagggacgcggcccagctgaacgggaacctgccgctgcggcgggacacagccatgcttccggagggcggctggatggtggtggccttcatgaccgacaacccgggcgcttggctgttccactgccacatcgcctggcacgtctcgtggggtctgagcgtcacctacctcgaacgccccggcgagatactcaaggacatcccccaggcggaccttgaccagcacaaccgcatctgcaaggagtggcgcgagtactggcctaccaacccctaccccaagatcgactcaggtctgcggcaccgctgggtcgaggagggcgagtggcctgtcaagatctaa

SEQ ID NO: 1019 - DNA, 1265 bp, Myriococcum thermophilum
atgagatccgccggtctttggtccaccgccttgacggcgttggcacatacagccgttgcagtcacgggtgccgccgaaggtttcgccaagggagttacgggaggcggaaatgcgactccggtctatccccaaaccatagacgagctggtctcgtaccttggtgactcggagcctcgcgtcatcatgctggaccggacattcgacttcaccggaaccgagggcaccgcgaccgagactggttgtgccccctggggcaccgcctcgggctgccagttagccctgaacaagaacgactggtgcacccgggagcagcccaacgcgcccaaagtgagcatcacgtacgacaaggccggcgttctcggcatcactgtcaagtccaacaagtccctcatcggtgtcggtgacaagggcgtcatcaagggtaaaggcatccgcatggtcagcggcaccagcaatgtcattatccagaacatccacatcaccaatctcaacccgcaatacgtctggggaggcgatgccatcacgctcgataataccgacatgatctggatcgaccatgtcactacctctctcatcggccgccagcacgtcgtcctgggcaacaacccgagcgggcgcgtcaccatctctaacagcaagttcgacggcaaaacctcctggtccgcaacctgcgacacttaccattactggggcctatatttcactgggtcaaatgacgtgagttttcacctgcctttctttggatgaaaacaaagcaaaaaaaaaaaagaaaagaaaagaaaagaagagcaaaacatgaccaggttgctaacggagccccctccaccccctctcttcttcacccgataatacagatgatcacgctcaagaacaacctcatcacccacatgtcgggccgcagccccaaggtggcgggcaacacgctgctgcacgccgtcaacaactactggtacgacagccaggggcacaacttcgagctggacgcgggcgccatggtgctcgtcgagggcagcgtgttccagaacaccgaggcgccgctgcaggcgggcggcgccgggcggctcttcgccagctccagcgactcgtcggcctgcgcccagtacctcggccgcgcgtgcaaggccaacggcttcggcagctccggctccctctccggctccgacacctccttcctgcagtacttccagaacaagaacatcgccgacgcgaccgactacaacacggccaaggatgttttcaacactgccgggtttggcaagatctga

SEQ ID NO: 1020 - DNA, 1443 bp, Myriococcum thermophilum
atgaagccaattctaggacttattgcgcttctcaactttggggtcaccacggtcagtggtcatcctgtttccggtcgcgctgactggccaaatgggcccctggtcacctccggccgttggattctcgacgcatcgggaaagaacattacctatgccggcaccaactggcccggacacaacgatgtcatgatccccgagggtctgcagtaccagtcgatcgagtcgatcgtcgagaaagtgaagagtctcggcatgaacgctgtccgcctcaccttcgccatccagatgatcgacgagatctacgacaatggcggcgaagacatcaccatcgagaaggccttcgtccaggccttgggccagaccaacgggatcaaggtgctgaaccaggttctggagaagaatccccagttcaacgcctccacgacccgcttgcaggtcttcgacgcggtggctgaggagctcaacaagcagcagatctacatccacctggacaatcacatctccaagggcatgtggtgctgctccaccaacgatggtaacagctggtggggagacagggtacttttcgactgagaactggctgcgcgggctgtcttacatggccgaacatgtaggtaaaatttttttcgttgttttccttggactccttttgtgttttcatgttttcttatttgtgtgtgtgtgtgttcatacattcattttcttctccctgaaccttcttgtttttgccatcgtatcactgaccaaagccgtgtgctgactatcatgtccacaaaacagggtaaatcctggccggcactgatgtcgatcgggctgcgcaacgagccgcgcgagccgtcgtcgaacccagcactcgtgcagtcgtcgtacaactggcagtcgtggtacgagtacatgcggcagggggcggacgcggtgcacgaggcgaacccggacctgctgatctttttgtcgggcatgaacttcgacacgtacctgacgcccgtcgtgcgaggggagccgctggcgccgggaacggcccgcttcgacgtcgccgacttcgcagctggcccggccaacaagctcgtgctggagttgcacaactacgagaacggggcgaccagctgcgactccctgcgcggaaacctcgaccgcaacggcttcgaagccatgttgtcgggcggagccgctgtcaacgcgttccccgtccttatgacggagtttggcttccagatggacgaccgcacctggcgtggcgtctacgcgagctgtctagctcagtaccttcccgagctcaaggccggatggaccatctgggtgttggccgggagttactacatccggtcgggcacgcaggattacgacgaggggtgggggttgctgagtcacaactggagcgattggcggagtccgtcgtacgtggatggggcgttgaagaccatggtgcaagagacgttgagatga

SEQ ID NO: 1021 - DNA, 967 bp, Myriococcum thermophilum
atgcttgccaagactgtcctcggcggccttgccctggcctccagcgccatcgctgccccggccccgaacccgatcgagttcgtgaagagggccccacccgccggcgtggtcatccagaagtgcagcaagcccggagtgctcgcgcttgcctacgacgacggcccgtaccagttcacctcgaggctggtggacatcctcgacgcggccggtgccaaggccaccttcttctggaccggaacgctctacgggtgcatctacaaccaggctgatgctgttaagaaggcctttgcctcgggacaccagatcgcttctcacacatggtgagcaaaacgcgtctatgcctctccctcatgacaaaccccacccacactcacgttgccaatggcttcccttttctcgcacaatgcttacacagacgtttaaggacccacccccactggtccggctatagcgcggcgcagatccagcaggagatgaccaggctcgaggacgccttcgttaacctgatcggcaagaagccggcgtatgtgcgcccaccctacctcgagacgggcggccaggtcctgtccgtgctcggacagatgggctacaaggtcatcaccaacgacatcgacacgggcgactggaacaaccaatcgccccagcagagcgagcaggccttcatccaggccggcgccgggggcaacggccacatccctctcatgcacgagacctacgactccaccgtcaacgtcctcaccccctggatcattgactgggctaagcagaacaacctgcagcttgtcaccatcggtgagtcttctcctggttccttttctccccggccgcattgcatcacacgaggatctcccagacccgctaacgtaccggttctattctttttctcgcttcagctgagtgcttggatgaccccgatggtgggtaccagcccggtaacttcgagggtaacggccagaacttctgctag

SEQ ID NO: 1022 - DNA, 1333 bp, Myriococcum thermophilum
atgcatctctcctcgtctctcctcttcctcgccgccctgcctctgggcatggccggcaggggcaacggccacggccctcgtaccgggctccatgccctcgccaagcgtgccggcctcaagtacttcggctctgctaccgactctcccggtcagcgcgagcgtgccggttacgaggacaagtatgcccagtatgacaagatcatgtggaagtcgggcgagttcggcctgacgaccccgaccaacggccaaaaggttggaaatcagccctcattcatatgtctgctgccctcaggagcggcggttaactaattaactcagtggctgtttaccgaacccgaacgtggcgtgttcaacttcaccgagggtgacatcgtgacggacctggcccggaagcacggcttcatgcagcggtgccacgcgctggtctggcacagccagctggcgccgtgggtcgagacgaccgagtggacggccgaggagctgcggcaggtcatcgtggaccacatcacgcacgtggccggctactacaagggccggtgctacgcctgggacgtggtcaacgaggcgctcaacgaggacggcacgtaccgcgagtccgtcttctaccaggtcctcggcgaggactacatcaagctggccttcgagacggccgcgcgcgtcgacccgcacgccaagctgtactacaacgactacaacctcgagtggcccagcgccaagaccgagggcgcccgccgcatcgtcaagatgctccaggacgccggcatccgcatcgacggcgtcggcctgcaggcccacctcatcgccgagagccaccccaccctcgacgagcacatcgccgccatcgagggcttcgccgagctcggcgtcgaggtcgccctgaccgagcttgacatccgcctgtccactccggctaatgccaccaacctcgcccagcagaaggaggcgtacaagaatgtaggttctgttttttttttttttttttcgttctttttgtcacagtggacctccctttcccttgacagttgtgtgcactgcatcgtatcgattttgactgatactaattattattcttttgttccgataataggtcgtcggagcttgcgtccaggctcgcggctgcattggtgtggagatctgggatttctacgaccccttcagctgggtcccttacgtcttccccggcgagggcgctgccttgctctggttcgaggactttaccaagcaccccgcctacgacggcgtcgtcgaggccctgaccaacacgaccaagggtgacggcaatggcaaaggcaagggaaagggcaagggcaagggcaggctctggcaagcgtag

SEQ ID NO: 1023 - DNA, 1107 bp, Myriococcum thermophilum
atgcggtctttctcggtcgccgtcgccgccctattcgccggtgctgtcggcgctctgccggcacgttcatacgtgacctctccttttcctctcaataatggcagcgagccagtcaagctgccaaacaagttcaagtggatttccaccgggccactgatcggacccaaggatgacgaacgggagctcgcaggcatcaaggaccccagcattgtcgagatcgacggtacgtaccacgtcttcgccagcacggcgaaggccgagggttacaacctggtgtacctcaacttcacctcgttcgatgaggccggcgaggcgccattcttctacctggaccaggcccctctaggtcccggctaccgcgccgccccgcaggtgttctggttcgagcctcagaagctgtggtacctcgtctaccagaacgacaatgcagcctactcgaccaacccggacatcaacgacccggccggctggacggcgcccaagaccttttacccgtcccggccgcagatcatcgacgacaacatcggcgagggctactgggttgacatgtgggtcatctgcgatgacgacaactgccacctcttctcgtccgacgacaacggccacctgtaccggtcgcagacggccgtggccgacttccccgagggcatgagcgaccccgtcatcgcgctcgaggacccggaccggttccgcctgttcgaggcctcgtgcgtctacaccatcaagggcggcaccggcaagcaaaagtacctgctgctgatcgaggccatcggcaccgacgagcagcgctacttccgctcgtggacgtcggacgccatcgacggcgagtggatcccgctggccgacacggaggagaacccgttcgcgcgggcgaacaacgtcgagttcgccgacggcgaggcctggaccaggagcatcagccacggcgaggtcatccgcacgctgaccgaccagaccctcaccatcgacgtgtccgagcccctgcgcttcctctaccagggcctcgacccggccaaggacgagggcgactacaactccctgccctggcgcctggccctgctcactcagcagaccaacgtgacggctgcccgctggtcgcgagcgtga

SEQ ID NO: 1024 - DNA, 1434 bp, Myriococcum thermophilum
atgcggctcacgggcggcttcttctccgccgtgacggccatcgcggcatggctggcggcccctgcggttgttgcttcaccagcagtgagctaccacaacacgctcatcgagcagcgtgccgacccgcacatcaacaagcacacggacgggtggtactactttacggcgacggtacccgagtatgaccgcatcgtcctacggcgggcgcagtcgatccaggcgttgcaggatgcggccgaaacgaccatctggcggcgcaaaccgtacggggttggcagcggccaggtttgggcgcccgagctacactatatcgacggcaagtggtacatctacgtggcgctgggcgtggccaacgagtggcgtatccgagcggccgtgctggagggcacgggcgacaacccgctgacggcgagctgggtggaaaaagggctgatcaggaccaactgggacaccttctcactggacgcatccacctttgtggccaacggcacccgctacctgatctgggcgcagcaggagccgtctcggccggacgagaactcgagcattatgattgcgcctctcgagaacccgtggacgatccgcggcacggccgttgccatctcccggcctaccctggcatgggagaggatcgggtacaaggtcaacgagggcccgtacgtgatccaacgcaatggcaagatcttcctgacctactcggccagcgcgaccgacgccaactactgcatgggcctgctgacggcggaggagggatcggacctgttggacccggcctcgtggagcaagtcacaggagcccatcctcaccagcaatgaaaagactaaccagtggggaccgggccataactctttcaccgtgtcggaggacgggctgagcgacatcttggtgtatcacgaccgcggttacagggatatccagggggaccccctcaacgacccgaacaggcggacgcgggtgcaaaagttgtactggaaggaggacggaacacctgactttggagtgcccgttccggacggggacacgccagtgcggttgcggtcggcggcagggtccggccagtacgtgacgtactacacgggcagcggcagtccgacgggcaccccggcgtcgctgcctgacacccagttccgtattgctcgtcccggcttggcaggcggcgataccgtcagcttggagtcgacaagcaacccaggcatgtttctgcgtcgggcagacggtggaggggcgcagtttgaaagcagtgacacccttgattcggcttcggccaaagcagcggccagctttaatcttgtccccgggttggcagacgaagaagccgtctcatttgaagcatcggacgctagtggccagtatcttctgttggaggaaagtgggcggctcgtgacggctccagctgaggatactcgggaacaagcaactttcattctagagtag

SEQ ID NO: 1025 - DNA, 814 bp, Myriococcum thermophilum
atgaagttcctctcgctccttactgccacaggcattgctgccgctctccctacctcgccggccgaggtttccaacgccggtgaaatcgaggctcgccaattatcatccacccgcaacgacttggagaacgggaactctgccaattgccctaaggccatcttcatctttgccagagcctcgactgagcccggcaacatggtgagtcctggaggaacatgcacatagatcacacacacacacacatatctcatacatcacacctacaaacctcgttccatcttcgcaaggataactccagtgctgacataaagtcacaacgtagggcatctcggcgggccccaatgtcgcatccgtcctagagctggcgtacggcgacgacatctgggtgcagggcgtaggaggtccatacgaggcaaggctaatcgacaacgcgctgccagcgggcacgacgcgggcggcgatcgacgaggccaagcggctgttcaacctggccaacagcaagtgcccggatgcggccgtcgtcgcgggcggctacagccaggggacggcggtcatgtccaacgccatctcggagctggcggggacggcgacgcaggagcagatccgcggcgtcgtcctcttcggctacaccaagaacctccagaaccgcggccgcatccccaactacccgaccgaccgcaccaaggtcttctgcaacatcggcgacctcgtctgcgccggcacccttatcgtcgccccgtcccacttcctctacacgaccgagtcgctcggcgaggccccgcgcttcctccggagccagattgacgccgcgtag

SEQ ID NO: 1026 - DNA, 1432 bp, Myriococcum thermophilum
atgaagttcctgtggaccgcaactattgccgccttggccggccttgttgccgcctcgcccacacccaccgtcaacatcgacggacagatctacaaacgtgccagtcccgatgacgtttgcgacatcggttacgcctccaccaatggcgggtgagttttgattcctcatatcttctcttagcgccttggatttgccgatgctaagactttggtttgtgataaaaacaacagcacaaccggagggtctggtggaacgaccacgaccgtctccagcttcgacgaactcagtgctgccgctaagggtgacgacaagaagattatcattgtcgacggcagcatcagcgggtctggctccgttcgggtcggcgccaacacgagtattctcggaaaggctggtgcttgtacgtcacctcttacctcgcatttcccctgtcatgacagacaatgagcctgggaatggactgaataattgttaacacaatcggaccagccctcaccggcatcaaccttaccatcaagggagtcagcaacgtcatcgtgcgcaacctgaagctcagcagggtggtggacggcgactgcatcaccgtccaggaagccaccaacgtctggcttgatcacctcgacttgagcggcgacctgaacgccgacaaggacgaatacgacggcctcatcgacatcacccacgccgccgattttgtcaccgtctcgaacacccacttccacgaccacgtaatgatttcccctgcccctcgccttcttagtttttttttttttttttttttttttttttttccttttctcttccttgaagaccacgaagaaaaaagaccacgtcactaactaagtaatcacctcgccttcttttcaactacagtggaaggcttcgctggtcggccactctgacagcaacgccgacgaggacactggcacgcttcacgtcacgtacgccaacaacaggtggaccaacatcaacagccgtacgccctcgatccgcttcggcaccggccacatcttcaagtaagccagacaattttctgtcctctttccatctaaaccatgacaacggaaaaaaaaaagggaaaatatttttgttgaaagaaccggccgaaactaacacaaccgctcttcttcctcctcctcccccacacctcagcaactactacgagaacatcctggcctcgggcatcaacacgcgcatgggcgccgtcgtgctggtcgagtcgagcgccttcgtcagcgccaagcgcgccatcacgtcgatcgactcggacatcaacggctccgccgccgtcgtcgacgtcgacctgggcggctccaccaacgacgcccccgtcgccaactcgcccccgtccatcccgtaccagtactcggtcgtcggctcggccaacgtccgcgacgccactgcgcagagcggtgctaccctctccttctag

SEQ ID NO: 1027 - DNA, 1746 bp, Myriococcum thermophilum
atgtaccccaatctgctcacactcgccgccgccgtcctcgtggccaaggccaccggccagcaggttggtacctacaccaccgagacgcaccctaggatgacccggcaaagatgcagttccggtggttcctgcacgaccgtaaatggagaggtggtcatcgattccaactggcgctgggtgcacgacaagaacggctacaccaactgctacacaggcaatgagtggaattccaccatctgcaccgataacaactcatgcgcggcaaactgcgccatcgatggcgccgactactccggaacgtatggggtgaccacgagcggagatgccctgactctgaagttcgtgaccgaggggtcgtacagtgagtctatccatggcgtgcacacacacgcactctttactcctgcaatgtcttttgctaactgcgcgactaataggcacaaacatcggctctcgtctatacttgatgtccggatcagaaaagtatcggatgttcactcttcttggcaacgagttcagctttgatgtcgacgtctcaaagctcgggtaaggctagtccttgtagtttttttttttttttacaattattcattgcatccctcgtttgctcgcttcctgccttcttcttgggcaacgtactgagacgggacactagctgtggcctcaatggtgccttatacttcgtgtccatggacgaggatggtggaaagtccaagtactcgtctaacaaggcgggtgccaagtatggcactggctactgcgatgcccagtgcccgcgtgaccttaagttcatcaatggcgaagccaatgtttccggctggaagccatcgtccaacgacgaaaacgccggcgttggcaactatggctcatgctgtagcgagatggatgtctggcaagtggtttacccaacctccctttttctcctgtgaatacatgatacctcctcttctcggtcttttcgcccgctttcccactccaaacacctctgacacaagcgaaagggaggccaactccatctcgaccacctacaccccccacccctgcaccacggttggccagcaccggtgccagggcgactcctgcggcgggacttattccgcagaccgatacggagggacctgcgaccccgatggttgcgacttcaacgcctaccgccagggcgtcaagaacttctacggtccggatatgacagtggacaccaagaagaaattcaccgtggtcacgcagttcatcaagggcagcgatggcaacctagccgaaatcaagcgcttctacgtgcagaatggtaagacgattgccaaccccagcagcaccatccagggcaatacgggcaacagcatcacgcccgagttctgcaggacgcagaagacagcctttggcgaccgcgacatcttcaacgccaagggcggtttccctcagatgagcaaggccctcgccgcacccatggtgctcgtcatgtcggtttgggatgaccaccacgccaacatgctgtggctcgactcgacctaccccgtcgacgccggccccaacgtgcccggcaaggcccgcgggacctgctctactagctccggcgtgcccaaggacgtcgagtccaatcaggccaacgaccaggtcatcttttgtgagtacatccacattcacgtacactatttgtcgcgtcgctctcgtgctctctgttactaactgtctttccgtcacttagccaacatcaagtttggccctatcggctcgaccttcaaacagtaa

SEQ ID NO: 1028 - DNA, 1255 bp, Myriococcum thermophilum
atgttttccaagctcttcaccacggtcgccctcgcggcctcgctggtttctgcgcagaccttcacggactgcgaccccaccaagcgtggtgagtatccgcgccctatacctcaacttgtgatccagtgctaacgggattgctcctccatcagatgactgccctaaccccaaggctgtcggctccaagccggtcgacatcgacttccgccagggggccagcaacttcttcaaggcggcagatggcacgagtctcacgtacgacaaggagctcggtgccgtcttcagtatcaataaggagacggatgctcctaccatcacctccagcaagtacatcttcttcggccaggttgacgtgactgtgcgcgctgcccgcgggacgggcatcgtcaccagcttcgtgctgcagtcggatgacctcgacgagatcgactgggagtggcttggggccgacaacacccaggtccagaccaactacttcagcaagggctgcacagaaacctacgaccgtggcggttactctcccgtcgccgaccccatcggccaattccacacctacaccattaagtggacacccgagcagcttgactggatcatcgacggcaacgtcgtccgcacgctcaggaacgagggccttgagggctgtgccggctacccgcagacccccatgcagatcaagctcggcacctgggttgctgggcgcaaggacgcgcctcagggcaccatcgactgggctggtggtcttaccaacttcgaggaggctccgtttgacggatattaccagagcctgcatattgtagactacatgggcggccgcggcgccaaggaggcgaccgagtaccaatacaccgaccgcagcggcacgtggcagagcatcaaggtggtcaacaatggcgaggaatctgacgatgacgacgacgacaacaccaccaccactactactactacttcctccaaaaccagcgcgacttcgaccacctccaaggccacgtcgacctccatgtctagctcgtctagctcctccagctcgtctcgcgccacccccaccaccctttccaccgtgagcacctcggctaccccgagcaccagcgacatcgacagcccgactcccaccaacggcccgaccagcaccgtcggccgcgaggtcgaggccacttccgctgtctctcagaccgtgtccaccggtgcggccccgaccatgggtggcaatttggccgctgtgggtgctgctgccctccttggcgccctcgctctctaa

SEQ ID NO: 1029 - DNA, 2458 bp, Myriococcum thermophilum
atgttattcgcttccctgcttctaggcttcctggccggcgtgtccgcttccccggcacacggccggaattccactttctacaaccccatattccccggcttctaccccgatccgagctgcatctatgtgcccgagcgtgatcacaccttcttctgtgcctcatcgagcttcaatgcctttccgggtatcccgattcacgccagcaaggacctgcagaattggaagttgatcggccatgtgctgaatcgcaaggaacaacttccccggctcgccgagaccaaccggtcaaccaggtgtgctgccgcgtctggtgccttgaaggcatgttcggcgaacacgggctaacatctgacagtggcatctgggcgcccaccctccggttccacgacgacaccttctggctggtcaccacgctagtggacgacgaccggccgcaggaggacgcttccagatgggacaatgtgcgtgcagcacatgattctttctgaatgttagcttttctggggagtgggatcccgaagactgatggttcctttcacatcagattatcttcaaggcaaaggatccgtacaatccgaggtcatggtccaaggccgtgcacttcaatttcactggttacgacacggagcctttctgggacgacgacgggaaggtgtacatcaccggcgcccatgcctggcaagttgggtaagttcatcccacctcgcggaactccggttctttctgctctgggctcaccttccccaagcccatacatccaacaggcagaagttgacctcgacacgggcgccgttggcgagtggcgcaccatttggaacggaacgggcggcatggtaggacttttgctcactttccccctctggctgcatctccccctgacacggctggtggtttaggctcctgaaggaccacacatctaccgcaaagatgggtggtactacttgctggctgccgaaggtgagcacggttctcctcgtgggctggcagttggtgtcgccgatgctgaaatgagccaggcggaaccggcctcggccatatggttaccatggcccggtcgaggaaaatctccggcccctacgagtctaacccacacaaccccgtcttgacaaacgcaaacacgactagttacggtgaggccagccgcaaccccgtagctggtacaacaacgctcaccatctcatagttcaaactgttggacatgcggatttgttccatgacagacgtgggaactggtaagataccccgtgtttcagcacaccgtcgtctctctgtgttctcgaaactcaattggtttctttctttaggtgggcggttgccctttctactcgctccggaccggaatatctccactatcctatgggtcgcgagaccattatgacagctgtgagctggccaaaaggcgagtggccggctttcacccctgtatctggcaagatgagcgtctggccgatgcctcgcccgcataaggacattcgcggagtcgggtaagtggttccccaactcccattcccagctcacctcgatccgtcggaccgtccccgctagctgctaaccttctctcctcctcctcctattggtcttcccacagccccttggtcaactcccccgatccggaacacctgaccttccctcgctcgggccctctgccggcccatctcacctattggcgataccctaacccatcctcctacacaccgtctccaccagggcaccctaatactctccgcctgaagccatcccgcctgaacctgaccgccctcaacggcaactacgcgggggacgaccagaccttcatctcgcgccggcagcagcacaccctcttcacctacagcgtcacgctcgactacgcgccgcagaccgctggggaagaggccggagtgaccgccttcttgacacagaaccaccacctcgacctcggcatcgtcttgctccctcgcggctccgccaccgcgccgtccttgccgggcctgggcagcgatctggacaaagatgccgagtatgagagtggcagcgaaggagcgagagaagacctgatcccacacgtgcgcttcaggggtgagtcgtacgtgccggtcccgcctcccgccgtgtacccacttccgcgagcatggaggggtgagaagcttgtactagagattcgggcttgtaattcaagccatttctcgttcagcgttgggccggcggggagacggtctgagcggagggtcgtcatggaggcttctaacgaggccgttagctggggctttactggtaagttcactcgtattgtcatttcctttttctcgtaaaaagcgcgtgagaatcatggccagagtttaattgacccgatttttgtcctctcccacggagaacaggaacgttgctcggcatatatgcgaccagcaatggtggtaacggaactacgccggcatacttctcggattggcggtacacaccactggagcagttccgggattga

SEQ ID NO: 1030 - DNA, 1242 bp, Myriococcum thermophilum
atggcgtggctaaggtctgtaattcttggttcttttatcacactgttgttaccatggacgggcttggtatttgggcttgctatcgacttcacgggccatagtggtcaagtggctgcacgggcagaccccaacttggccggctacttgggtgttttctttctcggtgccgacccgtacgtctacttttatctcagcaatggaaacaatcctgtctctttcaaggccctgaatggaggctcgccaattataaggccaacaaaaggcaccgggggagttcgcgacccgaccatcattcccggaggtggaagcgaagccggcaagaagtggtacatcattggaacagatctagacattgggaaggtgagtttggcccaagcgcaggtcggctaatccgtcttgcctttctattctgacgttcgagtagacaacatgggatgcggcgcagcggaccggatcaagagggatcttcgtgtgggaaagcactgacttgattaactgggggaacgaaaggcttgtggaggtggaggatgccactgctggcatggtttgggctccagaagccatctgggatcccgagaaaggtatagcattattgctcatcaagcacacccatgcataatatagctgacggccacaggccaatacctggttcactgggcatctaaatttgtgaggagctctcgcaggaattatgacctcgatgcatcacacactgactttctgtagtactcgacctcggacccgggacataccggctctccctccaacattcgcatccgctacgcctatactagcgacttcaccaccttcaccgcccccgaaaccctcatcgacaaaaaccccaccaatatcatcgacttgaccttcctccccctcaacggcacggagtccaactccttccttcggttcatgaaagacgagactctcaaaacggtctttgtcgaggtctccgacactggtctcttcggcacgtggaccaggccgggcggcgactcggcgatcatccagcagggcgtggaggggccggcggcgtactgggacaacacaaccccggggaaggcgcacctcttgctggacttctacggggaggatgggtacaggccgtttgagagtaccgatcccggcagcaacagcgggtggacgggaagcgataggtcggcattcccgaggaatttgaggcacgggagcgtgctgccgattgatcaagcggcttatgatgcgctgaacgcgcagtggggttag

SEQ ID NO: 1031 - DNA, 1023 bp, Myriococcum thermophilum
atgtcttccttcacctccaagggtttcctttccgccctcatgggcgcggccatggttgccgcccacggtcacgtcaccaacattgtcatcaacggcgtctcgtaccagggcttcgatccctttagccactcttacatgcagaaccccccgacggttgtcggctggaccgcgagcaacacggacaacggtttcgtcgaccccgcgtccttctctagtccggacatcatctgccacaagtccgccaccaacgccggtggccatgccgttgtcgccgccggcgacaagatcttcattcagtgggacacctggccagagtcgcaccacggtccggtcatcgactacctcgccgactgtggtgacgagggctgcgagaaggtcgacaagaccacgctcaagttcttcaagatcagcgagaagggcctgatcgacggtaccaacgctcccggaaagtgggcgtctgacgagctgattgccaacggcaactcgtggatggtccagatcccgtccgacatcgcaccgggcaactacgtcctgcgccacgagatcattgccctgcacagcgccggccagcagaatggcgcacagaactacccccagtgcttcaacctgcaggtcaccggctccggcacccagaagccctccggtgttctcggcaccgagctctataaggccgacgacgccggcattctggccaacatctacacctcgcccgtcacctacgagatccccggcccggccatcatccccggcgcatccgccgtcgagcagaccacctcggccattacctcctctgccagcgccattaccggctctgctaccgccgcgcccccggctgccactaccactgccgcccctaccaccaccaccgctggctccgatgttaccgccacgccctcaaccggcggctctgactcttccgctcagcccaccgccaccgctacctccagcactcctcgcccgacccgctgccctggtctgaagaagcgccgtcgccacgcccgtgacgtcagggtttccctctaa

SEQ ID NO: 1032 - DNA, 2597 bp, Myriococcum thermophilum
atgaagggcacatcggtgctgcgtctccttcttgctgccgtcgcggcggtggcccccgccgatgcggcgacggcgtggaaaaatgtcaatatcggcggcggtggtggattcgtccccggcatcatcttccaccccaaggagaaaggagtggcatacgcccggaccgatattggcggtctctaccggctgaacccggacgacgactcgtggacccctctgacggacaacctgggcacccacgagaattggtaagtaaatccggatgtaatatagatgaacctatgagcataatacattagcacatacagatatatctgtgtggattcctttgctgagcaggtacttaccgaactgacaggggccgctggggtattgatgccgtcgctgtcgacccccaggatgccgacaaggtgtatgcggccgttgggatgtacaccaacgactgggatcccaacaagggttctatcatccgcagttcggaccgtggcgccacgtgggaggtctctgaactgcccttcaaggtgggcggtaacatgccgggccgtggcatgggcgagaggctagccgtagacccggccaactcggatatcctgtacttcggcgcccgcagcggcaacggcctgtggaagagcaccgacggcggcgtcacctgggcccaagtcgagtcctttaccaacgtgggcacctacgtgcccgatcccagcgacgccagcggcctgaactcggacgtgatcggcctggctttcgtcacatttgactcgacctcggacgtggtcgacggcgccacctcgcgcatttttgtcggcacggccgacaatgagaccgcctctgtctacgtgacggaagatgccggtgccacctggagccccgtcgagggccagccaggcaccttcttcccccacaagtgcgtgctgcagcccgaggagaaggccctctacctgagctacagcgacggtgccggcccctacgacggcaccctgggtgccgtctaccgctacgacctagcctccggcaactggaccgatatcaccccagcctcgggcgaagacctctacttcggttttggtggcctcagcgtcgatctgcagaagcccggcaccctgattgtcgccaccctgaactcgtggtggcccgatgcccaaatctaccgctcgaccgactcgggcgccacttggtcccagatctgggagtggacagcctatccagacatgaactggtactatggcctctatgtaagcgcttttctcccctcttctttcttcagattgatagcattcctttttttttttcacgtatcgtttctaacgttctttcagaccgacaaagccccctggatcaacgctggcttcatttcccaagatactaagcgtctcggctggatgatcgaggctctcgagatcgacccgcatgacagcgaccattggctgtacggcaccggtctcaccctgtacggcggccacgaccttaccaagtgggataccgagactcgcaacgtcactatctcgtctctcgccgccggcatcgaagagatggccgtccttggcctcgcatcggccgtcaacggatccgaactcctggctgctgtgggcgacgactgtggcttcactttccagaagagcgaagacctcgataccccccctcagactccctggatgaaccccatctgggctacggccaccgatgtcggtaagtacatctatccctattccactttctcatcctcctcctcccgtttctcgtcccctttcccatgtgcgtcggttctgttacatcattaatttgctgacgagtgatccccaccctccctcaaaacacaagactatgccggcaacgagcccgatcacgtcgtccgcgttggtaactcagaggggtctccgcaagtcgccgtgtccgaggatggcggcgtgacctggcaggcccaccctggtgccgatgataccattactgggggcacgctggcctactcggccgacggcgacacgatcgtctggtcgtctggaagtgccggtgtgcttcgctctcaggaccaaggttccttcgccgccgtggactcgctgtcttcgggcgccgttgtcgccgcggaccgccgcaacaacactgtcttctatgccggctcgggtgcctccttctaccgcagcaccgacactggcgccacctttgcagaggttccctccgcctttggtggcgacggtagcgaggtcaccgccgtcaaagacattgcggcacacccggttgtcgctggcgaggtctgggtcgccaccgacgctggcctgttccgcagcaccgacttcggcgccaccttctccgccgtcggttctgacagcatcaccaacgtcatccaagtctcccttggtaagggtgatggttccgcctggaacgtctatgcttttgccacgggccccgagggaaccaaactgtacgcctcggccgacgagggcgccacctgggtcgatatccagggcgaacagggcttcggctcgctcacggccaacaggctcgtcggcagcggcaacgtcgccaaccaggtctacgttggcaccaacggccgcggcgtcttctacgctcaggcatccttctccgccgccgcaaagaactaa

SEQ ID NO: 1033 - DNA, 1642 bp, Myriococcum thermophilum
atgatgcctctcacaaagcgagccgccgccgccgttgcgttgctgctgtctggcgccacagcacaggagagcagcaccaccactagcccagctccgtcggcatgtgcaacgctgacgccggcctactccccgcccgtcgtggcaaagggttggaaggcccagctgattgccacgggtctcacgaggccccgcgggatcaagttcgactcgaacggcggtctgctcgtcattgagcagggcgtcggcctgacacacctgacgctcgacgacaacggcggcacctgtgtgtctgtcgctaagaacaccaccgtcatcgaggactcgagggtaggcagcatacaaaccatgatttttttttttttttcatttaaacggcttcatgtgtacaacacagggaaggcggacaatccggatttggctgaccgaaaacgttacgtagctcaaccatggcctcgagttgtcggaggacggcaggaccctctacgtctcgtcgttcgagtacgtcgaccgatatgactacgatcccgacgccatctcggtgggtgagcctacccgcttgatagtcaatatgaccaacccgggcggcggccactccacccgcactctcctgctgtccaaggcacagcccgacctcctcgtggtctctcgcggcagcgccaccaacctcgacccgctcgctatcgaccagtctaccggcgtctcccacatccgtgccttcaacatctcggacgctgccctcggcgaggagccttacaactacccgtcggacggcatcctcgtcggctggggcctgcgcaactcggtcggcgtgggcgagcatcccgtcacgggcggcatctggtcggtcgagaactcggccgacaacgtggcccggctcgggcaggacgtgcacgaggacaacccgggcgaggagctcaactaccacggcctgctcaacgacacgtcgctactgggcgccaactacggctacccgctgtgcttcgccctctggaacacgaccgacttcccctcgcagggcgacctggtggtgggcagccagttctcgctcgacaacgacgcgacggccaacgacacgtactgcgccgagagcacgaccccgccgcgcctgaccttccgcgcccacacggccccgctcgacatcaagttcctccccggcaacggctcccgcgccttcatctcgttccacggcagctggaaccgggacgtcccggccggctaccggctggcgtacgtgcccttctcggacgaggacggccagccggccgacgagagcgacagccgcgccgccgcccgcgacatcctcagcccgcccgacgtcacgcagtgctccaacgccggcgcctgcttccgccccgtcggcctggcctttgacccgcccgcccagcggctgtttgtcacgagcgatgccacgggcgagatctgggtcgtcctgagggacggtgaagaggaagaggaagaagaagaaggaagggagggtctcgaagagagggagacggccaccgagacgtccgaccagcccgggagcacgtccgagggcgctgcgatgcccagagctgcccttcgtgggttggatatcaaggcgtggctgattgttgctctcctgacggtttggatgatgtttgtcggaactcttgtcttttga

SEQ ID NO: 1034 - DNA, 1662 bp, Myriococcum thermophilum
atgagaggtctcgtggcattttcgctcgtagcctgcgtttcggcagcgccgagcttcacagccgagaccatcaacggcgagcatgctcccattctttcctcgtcgaatgctgaggttgtccccaattcgtatatcatcaagttcaagaagcatgtggatgagagctcggcctccgcccaccatgcctggatccaagacatccatgcctcccgtgagcaggtccgtcaagacctgaagaagcgtggccaagtcccgatgcttgacgacgtcttccacggcctcaagcacacgtacaagattggcgaggaattcctcggctactccggccatttcgatgaggaaaccatcgagcaagtcaggaggcaccctgatgtaagttgacaccatgaccgcctggctccttggccacatactgattcattcgggcaacaggtcgagtacatcgagcgcgacagcattgtccacaccatgagtgtcaccgaagagagttgtgacggcgagaccgagaaaaccgctccttggggcttggcccgtatctctcaccgggaaacgctcggcttctcgactttcaacaaatacctgtacgctgccgagggcggtgagggcgttgatgcgtacgtcatcgacaccggtaccaacattgagcacgtcgacttcgagggtcgcgccaaatggggcaagactattcccgccggcgatgccgacgttgacggcaacggccacggaacccactgctccggcaccatcgcaggcaagaagtacggcgttgccaagaaggcgaacgtctatgccgtcaaggttctgcgctccaacggctctggcaccatggctgatgtcgttgccggtgtcgaatgggctgccaagtctcatctggaacaggtgcaggctgccaaggatggcaagcggaagggcttcaagggttccgtcgccaacatgtcgctcggcggtggcaagaccagggcgcttgatgacaccgtgaacgctgctgtctctgtcggtatccacttcgctgttgccgccggcaacgataacgctgatgcctgcaactactcgcccgctgcggccgagaaggctatcacggttggtgccacggctatcgatgacagccgtgcctacttctccaactacggcaagtgcaccgacatcttcgcccccggcctgagcatcctctccacctggatcggcagcaagtatgccaccaacaccatctccggcacctcgatggcctcccctcacattgctggtctgctcgcctactatctctcgctccagcctgcctccgactcggagtactcggttgctcccatcacgcccgagaagatgaagtcaaacctcctcaagatcgctacccaggatatcctcaccaacatgcccaaggatactcccaatctgctggcctggaacggcggtggctgcaacaactataccgccatcgtcgaggccggcggctacaaggccaagaaggccgctagcgacgagactgacgttgaggcctctgtctctgagctcgagaagctcattgaggacaactttgaggttgtctctggcaagtttgtcaagggcgcctcgtcctttgcggagaaggtcgagaagttctctgagaagatgcacgagctgctcgaggaggaactcaaggagttttttgaggatattgccgcctaa

SEQ ID NO: 1035 - DNA, 2020 bp, Myriococcum thermophilum
atgaagaacttcgtcccatttgcggccctcgccgctggcgtgtcggctactgtaagttttcgctcccactctttcccacttccgaaccgtgctcgtgacgaactctcacttacacggccctccttccccctttgggcaaatagttcatccatgcccctcccttcacctgcccggccaacacggacaaccaatgtaccgacaagcagaagcccggcttcagctgggacgaccttgacttcggtgacttcttcgactatggcggcttccacttccgcggctggaagtgcgaggatgccggcggaagcaggggtcgcttcgctcctcgcaccttcaagaaggtcatcggtggcacatgccacgcggacaagagccagtcgccgtcatttggatgcggccccgacctcgacaggttctcgctaggctccatccacgtcaagcccgagttcgactgcgacctcgagttccactacgacatgcctgatggttccatctgcaagcatcgtagcccctgcagcaggtcgggcaccaccgtccacaacacccagtgcggtggtgctaagaacgtcaccatcatctaccccccgcagccggacaagccaaagccgacctgcagcatccaggtgcccaccatctccttcgactgcagcactgcttccagcaccctgccgcccaagacgaagacgtcccagactgccggagccaccactacccctcccgccggtgacaccacgaccactacatctgcagttgagactacacccacatctgacgccgaggtttcgtctacctctaccggccagaccggcgctcctccggtccagacgagcgttacgctcgtcccgggcaacaacacgactattcccatccccggcgtcagcagcaccagcaccgtttcccctggcgaggagactagcagcagcgacagcagcagcgtggccactcctacgcccggcgagagctcttctgatagcaccgtcatcgtgcctccggtgacaaagacggtcacgaccagcttcgacagcacgtcgaccatcttcaccacctccactcagaccatcacgtcgtgcgctcccgagcagtcggccgactgcccggccaactcggtcaccaccacggtcgtcaccatcgccatctcgaccaccgtctgccccgtcaccgagacccgcacgacggtcgtgagcgtgcctaccgccaccgacgttgctcccactggttcggctcccgtcgacgttccctctgactcgatccccagcgccaccggctcggctgtgtcccccccggtgatgctaccacgacggcggtcggtagcgacgtggtcagctccgccgctccggtcgagaccctcccttgcccggccattgtcccgtcctgcctgaacacgttcctgttcagcgtcggctgctccgacaacacggatgccgcctgctactgcccggacgccaccttcgtcaagaacgtgtatgactgcctctacgcccacggcgagaacgacgccatcatcgccgaggccatcgcctacttccagggcatctgcggcggctgggtgagcgagaacccggccatcgcgacgggcgccaccatcaccacctacatcaccgtgactgccacgccgaccgtcgcccccgtctacaccaccgtcaccgtcgacgtcaccaccgtcgtgccctgcaccaacgatgccggagaggtcatcccgagctccagcaccaccgtcaccgtcagcaccagccttaccgtgccccaggtcggcttcagcccgggcccgtccgacgatggcgacgtcaacgtggttcccatcaccaccgccaccggctccccggccgttcccaccaccgtcaccccgcccgccggcaatggccccgtcttcaccggcaacggcaccgtcaccggcatcaccaccccgaccttcaccagctcgcctagcccgaccgacaccccggttgtggttggcggcagcggccgcgttactgccagcttcggcctggctgccgcggttgctctcctcgcctttgctctctaa

SEQ ID NO: 1036 - DNA, 3143 bp, Myriococcum thermophilum
atgctctccaggactctggctgtcgtggccttcgccgtggccccgaccatagccacaactcctgccgtcaatgtctactggggacagaaaggcactgcctctgacagacttagcactttttgtgacgcatccagcttcgaatatgtcacagtcggcttcatcaacaagtctcccgagaaagacccgtccgcgttgaggtacccgggcagtgacttttccgttcactgcacgaacatagccaagtaccaagacaccgagggagtcgactccaacctcttgcgcaagtgcggccagatcgctgccgatgttcggtattgccagaagaagggtaagaaggtgctcctctccatcggtggcgaatggaacccgcccaagacggattacagcatctccagtccgccagaaggggagtatttcgccgacttcatctggggtgcattcggtccttacaccgagaactggaaggacaaaccaagacctttcgatgacttcttcaacgccgacgagggcgaagagcactttgtttttgatggttttgattttgatatcgaacacaagtttggtaagtaaacacgctcttctcctcccttcccccccccccctttcatggcctcgtattcctaccgagcaggctgttgacgtcccatgttctctcagaggaccagagcggttatgtcgcaatgatcagaaggttgcgtgccctgaccgagaaggacacgacaaagcaatacttgatcaccgccgccccggagtgccccctgaacccggattacttcaagatgaagaccatcatcgacacttgccaattcgatgctctcttcgtccagttctacaacaaccccgtctgcgccggagttgacaataacaactttgacgactgggtggagtacctggccaagacgcccagcaagaatgcgaagatcttcatcgggcttcctggttctccggaagcggccggctctggctacctggctcctggacccgcgtttcagttgatcaacaaacataaggacaagcctgctttcggtggtgtcatggtctgggatgccgtctatggcagccagaagtttggtggcatcccgttctacgacttgatgcatgactttgtctgcggcgccccgtcccacaccacgacggccccggccccgacagcaacggccaccgtttgcgtcaagtggcacacggttgtcagcggcgatacttgctacgagattgccggctcctacggcatctccctggatgacctgtacaagtttaacccgggcattacttgtaacctccaagtcggtgaccaggtctgcgtgaggtttggcgtcccaatccttacgagcagcttgagcagcagcttgacaagcacagaaaccctggctagcactagcacaacttcaagcaccagcaagtcgacaagctcgactagaggctcggctatttcgaccaaaccttcaacaagctcgatcagaacttcggctagctcgacgggaagctctacaagcccaacaggaacctcaaccaagacctcggccagctcaattaagagctcgagcacaactttggctagcccaaccaaagccccgactagctcggccaaaccgtcgacaagttctattaaaacctcggcgagcaagacttcgactagctcaactaagacctcagccagcccgaccaagacaacgacaagctcaactaaagctccgacaagttcagccaaaacgtcagtgagcaagacctcggttagctcaactacgacctcgacaagttctgtccggacctcggccagctcaacaaagacctcggctagcaagacctcagcgagctcaaccagttcaatcactagtccgacgagaacctcgaccagttcagccaggccctcaactagttcgatcaaaacctcggtcagctctaccaagaccttgactacttcaaccagtctctcggttagaccaactacttcgactaagccgtcgactagttctagcccgtcaaccagcccggttagcgtgaccagcgcgaccagcatcaacagcccgagtatcacaagcgcctcggctacaagtacctcgactggcgtcgatgactcgtgcccggatgaggagaccagcacatcaactgctgcgacctctacagagcccgttaccctttcgattaccgaatctgtcaccgtgtccgctaccgagacgactactgggtctgttaccgagacgactactgggtccgctaccgagacgactactgggtctgttaccgagacgactactgggtctgttaccgagacgactactgggtctgctaccatcacactgcctccgcagtctacgtctactagtagcgaagcgctcgctagcacttcgactaacgatgatgactcgtgcccggacgatgagaccagcagcagttcggccacagagactgccaccgtcacatttaccccaggatttacttctacgggtggcgaggcggtcactagcacctctgctgtggacgatgaggccagcacctctgctattgtgtccgctactcagatcaccacatcgtctggtgtcacaatcaccggttcgtcagtctcggacatcagcaccactgcgagcagcaccgcctcctctgagagctggacaacgtcgaccatctacacgaccaccacctacaccgtcactagctgcccggttaccgtgaccgactgccccggcaaaatcggccaggtcgtgactgagacgatcgccgtcagcacgaccgtatgccccatcaccgaaggtgcggaagtgggcccgtcaacctcggcctcctcgccgccggcgccgatcgagtcgggcagcggcgccaagcctcccttccccaccggcggggagagcgagaacacagactcgacatcgaccgcacgagtcactgcgacgcgcttcactaccctgacggtgcccaagtcggaggctaccggctcggcggttaacacctcgtcgtcgccatcgtcgccgtccttgccgcagtcgtcgtcgttgtcacggtccccgtcggctggccttcctatcaagtcgggttccccggccccgccatcggtgaccacgatccccgtgttcgcgggcgccggccgcaacgccgtcacgcttggaatgccggctgtcctggctgttgttctggtacttgctttttaa

SEQ ID NO: 1037 - DNA, 890 bp, Myriococcum thermophilum
atggcatcaaaggtggtcattgtcaccggtgcgagccgcggtataggcctcgctgttgctcagtccctgttggcatcatcccaaaatgtcgtccttgtttccagatcggccgatcggcttcaacaactgaaggatctctttccttcccaggtcgcttttctcgcggctgatatgacagctgctgacgtaggtgacgtgaagacggcctttttggttgcagcaagctcggaacgagcagagatatagaatctcaaggttgaccattctcaagacagcccggagggcagcagagctcgccatccttacctttgggagaatagatggggtcgtcgtcaaccacggcgtgctttctcccatagcacgaatcgaaaacgcctcgatcgaggagtggaagaagctctatgatgccaacttcttcagcgcgcttgcattggtgagtgagcatggccaaggacggcagagactcggcgctgacgctctacaagaccaaggaggccatccctcacctgcgggcttcgaagggccgaatcgtgttcgtctcctccggcgccgcaacgggggcttatactgcatgggcggcctacggctcttccaaggccgccttaaactctcttgcgaagcacattgctgtcgaggaacccgatattaccgcggtagccatcagcccaggccgggtcgacaccgacatgcagaaagaacttcgcgagaaaggctcggaaatgtcaaagaaggattacgacacattcgtagccgattttaacgagggccgactgaacaagcccgagctgcctggaggtgtcatcgcaaagctgtctctggacgccaaaccggagctttccgggaaatatttcaaatgggatgcatcagagttggccgagtatcgtcggtag

SEQ ID NO: 1038 - DNA, 1042 bp, Myriococcum thermophilum
atgatctcgattcgcactctcgctctggctcttgcggccgccgtccaggtcgccgagtccgcctcgcctggctgtggcaagaatcccccttcctcgggaaacaagtatgtgacggtcaacggcaagcagcgtgagtacatcctccagctgcccgataactacgacgcacaaaagccccaccgggtggtgatcggataccactggctcgacgggtccatgtacgacgtggccaacggcggtttctatgatctgcggtccagggccggcgacagcaccatctttgtcgcccccaacggcctcaaccgcggatgggccaacatgggcggtgaggacatcgcctttacggaccagatcgtggacacgctcttgaacgacctctgcgtggacgagacgcagttctttgccaccggctggagctatggtggtgccatgagccacagcgtggcctgctctcggccaggtaagcaatatttgatttgtttccttctaactattcactctttgttctgcgttttgccctgtttcccttttacgtttccttttttttttgttttgttttcctttctttccagtcatcatattcccctttctcttctccccccccccccaaaaaaaaaacaacggaacgctttttggaagagtcaagagtatctaatgtgtcattactgcagatgtcttcaaggccgtcgccgttatctcgggcgctatgctgtccggctgcgacggcggcaggacgcctgtgccgtacctcggcatccacggtgccgccgacgacgtcctccccatcgactttggccgtcagctgcgcgatcagtggctgcagaccaacggctgccagtaccaggccgctcaggaccccgcgccgggccagcaagcccacatcaagaccgtttacacctgcagcaacgcgcccgtcacctggatcggccacggcggcggccacgtccccgaccccactggcaacaacggcgtcaagtttgcgccccaggagacttgggacttcttcgatgctgccgtcgcagcggccaaggcgaagaactaa

SEQ ID NO: 1039 - DNA, 836 bp, Myriococcum thermophilum
atgctgcgcacttcggtcttcgggcttgtcgcagctctgctggggactggcaagtaacccgactattaaccctcccccagagtgactagttggccaggagctgaccatctgctgctctttgaacctatgcagcctttgcggcgaatgaagtcgtccaagacccggacacgggactcaccttcacctccaactaccagctgttcagcctcagtgaagggatcaccttccgcgtcgccattcccgatgacgcgcagcccaacaccgccttcgacgctgtcgttcaagtcgtcgcacccaaccaggccggttgggtcggtctcgcctggggcggctctatgaccaacaacccgctcgctgtcgcctgggagaacggtggctctgttgttgtgtctcctcgctgggcttcgtacgtcaacccccgatgcagactccggttacattgaaagaaaacagaggtgaagagcgcaaagaaaaaaacatggctaactagaaatcttttctcctaaattctcagtggccatgtcatgcctactgagtcctccaatgggggcacctacagggtcttccagacgggcaccaagtccaacggcacgcactggcagtacaccgccctctgccagggctgcaccgcgtggaccaccagctccggcggctcccgctacctaactccttcgggcggcaaccgccttgcgttcgcttactcgtccaccaagccctccagcccgggcagctcgtcctcctcaatctccattcacagcgtgcacggctactgggaccacgacttcgccgccgcgcgcaaccccaacttccacgatgtggtgcagaacctcgtctaa

SEQ ID NO: 1040 - DNA, 1293 bp, Myriococcum thermophilum
atgaagtcgacttttgccgctgccctagcagccctcgctgctcagaaagtggccggccacgccacgttccagcaactttgggtggacggtaccgattatataagtctccctgtgtgatgtccccttctgcccggacccaagctgatggatctagcacggctcaacctgcgtccgtctcccaccgagcaactcgcccatcaccgacgtgggaagcagagactttgtttgcaatgctggcacccgccccgtcggtggcaagtgccccgtgaaggctggcggcactgtcaccatcgagatgcaccaggttcgttagattctcatatacccacacattgaattccttcatcccctctctcactcctagagccccaggccaatgcagagagagagagtcaagtgataattaacacattcttcccagcaacccggcgaccgcagctgcaacaatgaagctatcggaggggcacactggggtcccgtccaggtgtacctgaccaaggtcgacgacgcctcgacggcggacggctcgactggctggttcaagatcttctcggactcgtggtccaagaaccccagcggcggctcgggcgacgacgactactggggtactcgcgacctgaacgcctgctgcggcaagatggacgtgcccatcccggccgacatcgcgtcgggcgactatctgctccgggccgaggcgctggcactgcacacggccggacagtccggtggcgcccagttctacatgagctgctaccagatcacggtcgagggcggctccggcaccgccagcccggccaccgtcaggttcccgggcgcctacagcgccagcgacccgggcatcctcgtcaacatccacgccgcgctgtccagctacaccgcccccggccccgccgtctactcgggcggcaccatccgcgaggccggctctccctgcaccggctgctcgcagacttgcaaggtcggtgagtccccgagcgccatcgcccctggcagcggctcgggcgacggctcgggcgacggcaacggcgacggttccagccccggcggctgcaccgtccaggcctacggtcagtgcggtggcgaaggctacactggctgcactgagtgcgcggtaagtcttaaaaaccccggtggtctccttcactcaatccacctcaaccctccccttttcccttccacaacatctgaggatggttcgttccgttgactgaccgaatcactgtgttgcagcccggctacacttgcacggccatttccccgccgtactactcgcagtgtgctcccagtgcttga

SEQ ID NO: 1041 - DNA, 889 bp, Myriococcum thermophilum
atgccatcgtggtcaaccatcatcgccgcggggcttgctacctcgggagcttacgccactccggttgaggtcgctcggcaagcaacgccgacggtctacctcgctggtgatagcaccatggccaggactggcaacgggctcatgggtaagtactttaccggggcaaatgtcgggggtgaaactccgtcaatttctaacgaggcagcttggctgacaccctcactctctctgcccttgtctaggttggggcgagtacctcgcgaattacatcacgctccccgtggtcaacaaggccatctccgggcggtcggcccgcagcttcaccaacgaagggcgcttcgccgagatcgagtcgctggtacagaccaacgacattgtcgtgatcgagttcggccacaacgacggcggttcgcccaacggggctgacgacaacggccgcagcgactgcccgggcgagggcgacgagatctgctactcgggcaagacgggcgagatcgtctacacattcaaccactacgtggaggcggcggcgcggagctacatcgccaagggcgcccaggtcatcatcagcagccagacgcccaacaacatgtgggagggcggcacctacaacaacgcgccctcgcgcttcgtcggctacgccgccaaggccgcccagaacgtcggcagcggcgccagcttcgtcgaccacttccaggctgtcggcaccatgttctggcgcctcggcaacgaagccaccaacgccctctacccgcaggatcacacccacaccagccccgagggtgccgacttggtcgctcaggcctttgtgcaggctgtgagcctcgactttaacgggacgacgccgctcaaggaatatctcaagaccccagttcctgaggtgttctaa

SEQ ID NO: 1042 - DNA, 936 bp, Myriococcum thermophilum
atgaagatcccactcatcaccagccttacttcggcactacttgccgtatcggctaccgccgccccggctccggccgctcggcaggccaagccggcagctttcttcctcgcaggcgactcgacgacggccgtcaacggcggctggggtgacggcttcgtcgctctcttgcggaacggggccatcggtgagaacaagggccacagcggcgccacgacggcgtcgttcgtcggcggcggtgactgggccagcgtactcgacctggtcgagagcaacaaggctcagtacgactgctatgtgacgatccagttcggtcacaacgaccaggtatgatatatctctccccccaagcccaacccaaccggacccaatagttcgcccatatattttccccctctaggccccaaagatagggtcgtcattatcctgactgcgtatgggtttcgtcgttgctcaccatggtacctaaaactcccacgatggttctgcccgcctgccccctgatcatagaaatcgacatcgggcatcagcatctcgcaattccagaccaacctcgaaaacatggcacgggacgtggagcaggcgggaggcacgcccgtgatcctgacgtcgctgacgcggcggaccttcacgggcggcgtgctggacgacagcctggcggacgtgtcggaggcggcgcgcaaggcggcgtcggccgccggcgtcgccctgctcgacctcaacaaggcctccaaggacttcgtccaggccatcggccaggacgccgccgaccgctacaacctcgccgacggcgaccgcacccacctcaacccccacggcgaggccgtctttgcccgcatcgtggccgatctcgtcgtcggatggaaggaggagctcggcgagtacatcactcccgatccggagatgtcggacaagatcgccaggggggagtatgtctga

SEQ ID NO: 1043 - DNA, 2207 bp, Myriococcum thermophilum
atggccaagacgcttctctggttactcctatgctcctgcctttcacaagtctcttgggctgctaaggcccgggagaccttgcgtctcacgtggggagaaggtgccccaaacggacggccaagagagatgatattcgtcaatgaccagtttccggggccgaatctcatctttgatgaagacgacgatgttgaggtaggtggttttctccctctcttcctttttttttcccgtcctgctaattgtctgaaacaacagatcacagtgtacaatgacatgctcagaaatgcaaccgttcactggcacgggatagcgtaagcacacctaccagtattcccaagccgtttcatctcagatcactaaaatgttgctcgcaccacagccaaacgggcactccgtggtctgatggtgccattggactctctcagaaaccgatcttgccgggggagtcctttgtctaccgcttcaaggcctctcctccgggcacacattggtaccattctcatgaacgtatgtcactcgaggatggtctctacgggggaatctttatcaggtttgtctacctgcctcctggcaatcttgtgtgtgcaagacagttggtactgacacaagacgacccctctcatcaggccaaaacaaaagctcaatggactgtggccccagatcagcaagaaccctaaggatatcaaggcgatggagagggccgcccgcgatccaaagctcatggtcctgtcagagtggacaagtttcacttcggaggaatggtggaaagccgtcgaggaatcagggatgttgatcttgtgagttcgtttgcaaccccctgtgctgcagcttccacatcctcaggtggctgtactagcagtagtgtcattgttcaactaacttggggacacccacatttagttgcgtcgatagcatcttgctgaacggccaaggggaggcctactgcccgcctcacgaattcctcatcaatcagacgaacccgggtcccaaacagaccagtttccccaaccagaacgtcaccgacaaagggtaagatgccgatctcttcaccaaaaccaaagaagcgcgggggcccagctgactgatgatgtgacagctgcttccccataacggcagaaggaattcaggggccatgggtgcgcaaccaaagcgatatcaccaaggttcccaaccacctccaatggggatgccttccgtcgagcgggagcaactacacgctcgaagtcgatccggccgaccggtgggtcagcctgaacttcatcgcgacagggtccaacaagcaggtagatttctccatcgacgagcacaccatgtggctctacgaggtcgatggagcctacgtggagccacaggagttcgtcgccgcggccatcagctcgggcgagcgcttctctgtcatggtgaagctggacaagaagcccggccgctacaccatccgcttgcccgactcgggcgcgacccaggtgatctcgggcttcggcgagatggtgtacaagggcggcgagaacagcacccggcagtcgatcccgtacgtcacatacggcggcatgagcgcgctccccatcacagacgaaaagagctacacgccgtacgaccttgcgtccgacaccatgacgccctggccgcgcgtccggccggcgccggtggcggacgaggagtacctcctggtgatgggccgcgccaactcgtccatcaggtacaccatgaacgccaagtacctctacccgcccggcttgcaggcggaccggccgctgctcttctacccgaacgacacgctcgggacggtggacgagaacctggtgatccggacccggaacggctcctgggtcgacctgatcctcgaggtcgccacgctgccgggggacgagctggcgttccagcacgtgatgcacaagcacggcagcagaaccttcaagatcggcggtggcgtggggccgtggcggtggaacagcgtcgccgaggccatggcggccgaacccgagagcttcaacctggagaaccctggctaccgggacacctggatgacccccttcgtcaccgagatcgccggtggttattggacaatctaccgctaccaggtgaccgacccgggcccgtggttgttccactgccacttcgagctgcacatgatgggaggcatgtccatggccattctggacggcgtcgacgcatggccgaccgtgccgcccgagtaccaaattacttag

SEQ ID NO: 1044 - DNA, 648 bp, Myriococcum thermophilum
atggtatcgttttcgagcctggccatcttcggcctaagcctggccgcgcgagtctctgcgaccattctccagaatggccaagtaagggagaccagtttcccagatacccggatcgatccggcggactactcgtttaagacgtatccggccaatgccaccgagatctcgtacaaggggcgttgggattcaaaatacgtctcttggtggtcgtgagtggacaagccgccgaaatgccccattagattttgcgaggctaatcattttattgacagagcccccggtatcaagtttggctttacggggaagacagtcgccatcaccttcggcagcctgacagacaatggcgtcctggtcggctaccgcatcgggggcctcgactggatattcaccaacatcacagcaggagccactcacctcctcgtgagcccagaaacgccgtgtataaatgagacaggtccaatcaacccgtggacgttcgagatgcgggtctccaattgggcatatggcgtgcagatcgactccgttcacgttgcccccggggagaagctggtcaagataccagattttggccgccggatcgaggtgattggcgacagtctcgctgcgggcatgtacacgacgtatgaagggttgtcgagttgggcctag

SEQ ID NO: 1045 - DNA, 1350 bp, Myriococcum thermophilum
atgcgcctctcactcttactctacggagcagccttgtcgctgaaggaggcgctggctactcctccacatgattcgcctggtgaaggcccggacgagaatgggaaatactggatctatggggagggaattgcggccgccttcattccatatggtgcctccatttccaacctcatcattgaagacaagaatggaattccgcgcgacctcgtgatgggcttcgacaaggccagcgactacgccaatgacgaatcgcacccacatcttggcggcgtccccggccgctatgcgaaccggatcaagaacagcacctttgagattgatggcaagacttaccgcgtctcggccaatgagaatcccactgccgagcacccagacgggctcaataccctccacggcggtaaagaagggtgggattggcgagacttcgaagtggtcgcacacaccaacgagtccattaccttttccattgttgaccccgacggcaaggaaggcttccccggcgaggtcatctcatacatcacttacacaatgggcaagttgacctgggacgcgaagatggtggctatcgcgacgaccaagaagactcccatcatgttgagcagtcacacgtactggaacctcgacggctttgccaacgatgagaccgataccatcttgaaccacaccttccacctgccgtacagcggccagagggtcgacgtcgacaacattctgatcccgaccggcaagatcctgccaaaccctaagggctctgtcaacgacttctggagcgctcctaagcagatcggtgatggcttcaatgacccggagatccatggaaactgtggcttcaattgcactggctacggtatgccctctccctccccccctttttccctctccctcctgtttccgttctgtcgactattgcacgctgagaactccgcgctaacactcatcatctcagataactgctggctcgtcaaccggccgggcgcgcacgactggcgcgccgacggagcctacgtcgccagcctatcctcggcatggtccggcatcaggctcgacatctattccgaccaggatgccttccagatgtactcttgcaacggccaggacggcactttcccgttaaagtcgactcagggcgtcagaggtcacgccaggcgcaacactgacgatggtcatgccaacgagccagcccggactgtgccaaagtatggctgtatcgtcctggaggtggaggactacatcgacgggatcaatcaccctgagtggggccggctggagaagcaggtgtttgggcccgggagcgatccgtacgtgctgcagattagccaccgcttctcagtagacaagggcgacgcatga

SEQ ID NO: 1046 - DNA, 2288 bp, Myriococcum thermophilum
atgcgggccgtatctcttctcctcgtgctgtcctccctcgcggaggcggtgccggttggccaacgccgcagggttgtccaatcgttcaatgtgcaccggaacaagagctctgatacaacacctctgcaagtgggaaatggcaactttgctttcggcgccgacgtcacggggctgcaaacctttaagccctatgccatcatgtcaacatggggctggcacaacttcagcctccccacgacacccgggcagacttctacggacggtaatttccttccttggaacggtgatgcttctcgcatactgaccacgtcaagactacacgggggtgcaattgtggactcatggtagactcgtcacctacgagattccgaacccgaaccagagcgacatctcaaactggctcagggagaatccccatcggctgaatttgggccgcgtcggctttgattttggacgtgataacgtcaccgaggaccagctgaaattcaagtcccaggagcttgacatctgggcggggaagctgtcttcgtttttcgtatatgatgggcacccggtcagggttgagacttgggctgaccctgactccgacactgtcgccgtcaacatcaagtcaagcctcctgaggaaatgcctaggcctgttcttcgatttcccttaccccgacaaggagaagttcaacgccccatttgttggccagttcaacctcacatctcaacactcgaccgcattggagagactatcgcgtgactcagccaggatcaggcatacgctacaaaacatgacctattacgtccacatctcatgggacggccatgggagggtgacaggcccggcggagggtagccatcgctacttcttcacgtcacctcaaaccaacgtccaactgaccatcaccttttccccctcgacaaggaatccccatccgaccacctatcaccgcgtcacctctgcctcacgcagctggtggcgtacattctggtctaccggtgccttcatcgatctaacctcagtccgccatgacccacgtgcccgagctctccaacaacgcatcatcctgtcccagtacctcaccgccgtcaactcggcctccgactacccgccgcaagagtccggcctcgtcaacaacggctggcacggcaaattccatctcgagatggccctctggcacgcactgccatttgctcgctggaaccacttcccgctcttctggcgcagcatcccgaacacctacgcacgcctgctcccctcggcgcgtgcccgcgcaaagaaacagggctacgcaggcgctcgctggggcaagatgatggcgccgctgtcggtggcccccggcgggcccagcgcgccgggcgacattaacgcattgctcatctggcagcagccacacccgctctacttcgccgagacggaatggcgggcgtttcccaaccgcacgacgctggagcgctgggacgaggtcatcacggccaccgccgacttcatggcctcgtacgcctggcggaacgccacgacgggccggtacgacctcggcccgcccatgtaccccgtctcggagaacacggacccgatggccacgcggaacccgacgttcgagctggcgtactggcggttcggcctggacgtggcggcgaggtggaaggagcggcaggggaagccggtgccgggggagtgggtgcgggtgcgcgacggcctggcgccgctgcccatggtcgacgggacgtacgccgtgtacgagggcgtcgagggcatgtggacgtcgaacgcgacgaccaacgaccacccggccatggcgggcatctacgggctcctgccgccgccggcgagcggggagcctctggacatggacgcgctcaacaagacggcggggaagatcagggagctctgggcgctcgactactcgtacggctgggacttctccatgctggcgatgaactcgctgcggctgggcgatcccgaccaggcggtcgagtacctgctgcacccgatcttccagttcgatgatgcaggttatccggttggtggttcacgggtcccaacgccgtacttccccaactcggcctcgttgttgatagccacggccatgatggctggtggctgggacgggagtgaaggcagcacaggacattggtatgtcaattgtctttttttcccccattgtttccttctctattattctattctctttcccattcacatgataggagagagttagagctgacaccacacaattgaataggcccaagtcgtgggagaagcatgtgcgtgtggatgggtttacgccggcgttgtag

SEQ ID NO: 1047 - DNA, 1074 bp, Myriococcum thermophilum
atgaagtggacagaactgtctctggcttcggcctccctcttcggcgtcaccgccgtagctaaattgacgaccaaagtccaagtcggccagcaggtcatctactcgtacccgggcgagacgccgccagaccacctcttcgatctcatccgggcgggtgaggtaggagggatcatcatcttcggcgacaacgtcaacgacgcgctcccctcgaccgtcgagcagttcttcgcagcctaccgcgagagcccggcctacgccgagctcgggtcgcccttcctgatcatgacggaccaggagggcggccaggtccgccgcctgccgggagcgcccgtcgagtcggccaaggaggtcggccagtcggcggacccggccgcggcggcggaggaggccggggccggggcggcggcgacgctgagcgagtacaacatgaacgcgaacctggcgcccgtgctggccgtgtaccgggaggcgggcgacttcacggaccggtacgagcggtcgttcggcaacgacacgaccgtggtgggcgagtgcgccgccggcttcgtcagcggccagcaggcgggcggcgtgctggccacggcgaagcacttccccgggttgggggccgcctcggccgacgagaacacggacgccaggcccgtcaccatcaacgtgtcgctggacgagctccgcgccgtcgacgaggcgccctaccgtgacgccatcgccgccggcgtcgccatggtcatgccctcgtgggccgtctacccggcctacgacgccgactggccggcgggtttgagctcgcgttggatccgcgtcgagctgcgcggccgcctcggctttgacggcgtcatcgtcaccgacgccatcgaggccggctcgctcaagtccttcggcgacgacgccaaccgtgccctgttggccaagcaggccggcgtggatttgatccttgccgccggccggaacgtgacccagggtgagaccatcgttgctgcgctggccgctgcggtggagagcggagagctggcgcagcaagacgtggatgcgtcaagcacgaggatccaaaaggtccgggccaagctcgcataa

SEQ ID NO: 1048 - DNA, 947 bp, Myriococcum thermophilum
atggtcactctcaacagtcttgtcactgccgcgggcatggccctcctggctagccagaaggcctttgctgcgcagctcactagggtcgactaccctaataatgccacgtcccgggcagagatgtgagttttcgagaaagatatcaagagggaaagaaagagacgttgtgtgtccatgtgtgtgtggtattgtgtgatggtgactgacaaggttgggtcgtgatgacgttgcttaggtacatctatgttcccgataacgttgtcgagtcgccgccgctggtggtggttgtccgtaagttatctctctctctcttctttttttttaaacaatctcaaatcaaccaattccctttgcgccctctcttactgctccaaaccccaaccttttctcttctacccctgaaccacccactacccctggtatatatgtatgttataatgagagtatggagaagcggctaaccagacacaaaacatctcccttcctcttcggctgtttttctagactcgtgtcagtcctcagcccagcaatacttccagaacgcggcgatcccgtggaagcaggggtcggacagcaaggggtacatcacgctgtggccgtcgtcgccgaacccggggacgtgctgggacgtgtcgtcgccgcagtcgctgcagcggggcggcgggggcgactcgacggccatcgccaacatggtgcagcacgcgctcgacgagtacggcgccgacccggcccgcgtctacctgacgggcggcagctcgggcgccatgatgggcaacgtcctggccgccacctacccggacctgttccaggccgtcagcatctactcgggcgtgcccgccggctgcttcgtcagctcggccggccaggtcgccgcctggaacaatacctgcagcggcggccagagccgggctagtcctgagcagtggtacgtgctgatttctctctag

SEQ ID NO: 1049 - DNA, 1265 bp, Myriococcum thermophilum
atgctcgctcgctcgttattctggttcgccacctcagcggcgacatgcctcgccgcctctttgcaggaggtcaccaactttggtgataacccgaccaatattcagatgtacatttatgtgcctgatcagctggctgccaaccctccggtgatcgttgcggtaagatatatccagactgcgcttcctccccctctccttcttccctttcgccatgtgctagtcgcagaagtctgacaaagggagccgtaaatcctcacagctccatccctgcggtggtaacgctcaacaatggttcagcgggacgcaactgccgtcgtacgccgactccaatggcttcatcctcatctaccccagcacgccgcatatgagcaactgctgggacatccagaacccggacagcctgacgcacggtcagggcggcgacgcgctgggcgtcattagcatggtcaactacaccctcgacaagtactcgggcgacagctcgcgcgtgttcgctatgggtttctcatccggtggcatgatgaccaacacgcttgctggctcgtatccggacgttttcgaagctggtgctgtgtactcgggagtggcctttggttgtgctgcgggtgagtcctctcgctattctacttcggccaaccctccgtccacattgtccccttctcaactctcacctcccaaaccacaccaataccccactcctcctcctcctcctcctcctcctcctcctcctccccagggaccaaggttacgaggagaacactgtcgtattctgtctgagctggggctttggccgggcaagggggggggggtttgggagacagacttgacaacgtttattagcttcaaattaatacaagggatacggctgaccgaggaaaacacttgatgtaacaggtgccgaatccgctacgcccttcagccccaaccagacgtgcgcccaaggcctgcagaaaacaggggaggagtggggcaactttgtccgcaacgcgtatccgggctacaccgggcggcggccgcggctgcagatcttccacgggctcgacgacacgctcgtccggccgcagtgcgccgaggagtcgctcaagcagtggtccaacgtcctcggggtcgagctgacgcaggaggtgagcgacgtgccgtccgcggggtggacgcagcggatctacggcgacgggacgcagctgcagggcttctttggccgcggaatcggccaccagtcgacggtgaacgagcagctgctgcttgagtggttcggtctgctctaa

SEQ ID NO: 1050 - DNA, 775 bp, Myriococcum thermophilum
atggtctcgttcactgccctcctcacggccgtcgccgccgccgtgtccacgacggctagcccgcttgaggccctcaagcgcggcatccagcccggcaccggcacccacgacgggtacttctactcgttctggactgacggccagggctctgtcgacttcaaccccggcccccgtggctcgtacagcgtcacctggaacaacgtcaacaactgggtcggcggcaagggctggaacccgggccccccgcgcaaggttgcgtacaacggcacctggaacaactacaacgtgaacagctgtatgttgactctcctgtttctccgtcttgttttcttccatgattggaatctagctccggagaagaggggacaagaggaaaatagcagacagctaactctaagctctgacagacctcgccctgtacggctggactcgcaacccgctggtcgagtactacatcgtggaggcgtacggcacgtacaacccgtccactggcgccggccggctgggcaccatcgaggacgacggcggcgtctatgacatctacaagacgactcggtacaacgccccgtccatcgagggcacctccaccttcgaccagtactggtccgtccgccgcgagaagcgcgtcggcggcaccatcgacacgggcaagcacttcgacgagtggcgccgccagggcaacctcgtcctcggcgactggaactacatgatcatggccaccgagggctaccagagctctggttcggccaacatcgaggtccgggaggcttcttaa

SEQ ID NO: 1051 - DNA, 1247 bp, Myriococcum thermophilum
atgagattttcggtcctttccggaattatcaccaatgcgctgtccgtctcggcaggcaccatcctgtgggatggtcgcttcaatgacctgagctcctcaacggaccttgaaaaatggtcgtggggcaaccaggtcggcccttaccgtaagttccgcttcgttgcttcggcagatgaaggtagagagaatagctgaccgcttctcacctaaaagagtggtacatccatggcccttcttcggtgacggcctatgtcaatctgtcgcccgattacaagaacccggcggactctggctccaaacagggagctaagatcactctggacgacacggcctactggaacggtcagaacatgcgccggactgagctgattccgcagacgagcgcacccatcaaccaaggcaaggtgtactaccacttctcgctgatgcgcaaggacaccaaccccccggcgacgacgcgcgagcaccagattgccttcttcgagagccacttcaccgagctcaaatccggcctgttgtcgggcgccccgggcgagtcggactcgctgctgcgatggtgcgtgggcggccagacgcagtggagcaccgagtgggaggccgacgtctggcacaacgttgcctatgagatcgacttcggcgccaacacggtcggcttctggcactcgaccggcagtgatcctctgacgcagaaggtcgcccccgtcagcgcgagcaccagcagcaacggtgccgactggcatgtcggcgtgctcgagcttccgcgctcgggctaccctgacactgtcgaggacatttactggtctggcgtgtacatcgagagtggtagcatcacgactaacattgcgggtcccggtatttttttcgttttttttttttttttttttttttttttttttacccttgaggataggaggatgtggttaatgcgtcatcggaaattttgggatttgcagagagagtaataagcagctgacattgtccttctacttataatgataggtgctccatccgacggtggcaacagcactactagcattactacggctctcccgtcgacaacatttactacttcgacctcctcgactaccacctcctcggcgccagccacttccaccacttcgggctctggtggttgcacagcagcgcagtgggagcagtgtggtggtattaatttcactggctgcacgacgtgtgctgcaccatacacatgcaactttatcaacgactactattcgcagtgctcttaa

SEQ ID NO: 1052 - DNA, 2844 bp, Myriococcum thermophilum
atgaagctcttcagccgcattggggcaaccgccctagcggcgacgttgtgtaagtgtagcccgttttcatttccctcctttctcagtgggattccgggaagatgctaatcgcccccaagctctgcagcaatgtgcagctcagatgacagaggggacctacaccgatgaggctactggtatcaccttcaagacgtggaccgctgccgagggtgctcctttcacttttggcttggccctccccgccgacgcgctggaaaacgatgctaccgagtacattggtcttctggtaggttcggagcggcaccgcaaaaaacgagggctcccggctcacctctctcgcagcgttgccaaatcaccgatccctcctcgcccagctggtgcggtatctcccatggccagtccggccagatgacgcaggccctgctgctggtcgcctgggccagcgaggatgtcgtctacacgtcgttccgctacgccaccggctacacgctccccgccctctacacgggcgacgccaagctgacccagatctcctcctcggtcagcgaggacagcttcgaggtgctgttccgttgcgagaactgcttctcctgggatcaagacggcgccacgggcagcgtctcgaccagcaagggcaacctcgtcctcggccgcgccgccgccaaggacggcgtggagggcgccacgtgcccggacacggccgagttcggcttccacgataatggcttcggacagtggggtgcggcgctcgacggtgctacttcggagtcgtacgaggagtgggctcagctggccacgatcgagcctccaaccacctgcgatgggtaagtgtcatttttttttttcagctccaccgagagagtattgcaatttagctgattcacgttagcgatggccccggcgagaaggtgtgcgttcccgctcccgaggacacgtatgattacatcgttgtcggcgccggtgccggtggtatcaccgtcgccgacaagctcagcgaggctggcctcaaggtcctcctcatcgagaagggtcccccgtcgaccggcctgtggaacggcactatgaagccggagtggctcgagggcaccgacctcacccgcttcgacgttcccggtctgtgcaaccagatctgggtcgactctgccggcatcgcctgcactgataccgaccagatggcgggctgcgtcctcggcggtggcactgctgtcaacgctggtctgtggtggaaggtaggcttcttctttccaaaaagagatctagccaatgtggaaatcttttgcaagcattgctaacatttttatctcacagcctcaccccggtgactgggacgacaacttccccgacggatggaagtcgagcgatctcgctgaggcgaccgagcgtgttttctcgcgcatccctggcacgtggcacccgtcccaggacggcaagctgtaccgccaggagggcttcgaggtcatcagcaccggtctggccaacgacggctggaaggaggttgacgccaacgctgagcccagcgagaagaaccacacctttgctcacagcgtgttcatgttctctggcggcgagcgtggcggtcccctggcgacgtaccttgcctcggctgcccagcgcagcaacttcaacctctgggtcaacacttcggtccggagggccgtccgcagcggcagcaaggtcaccggcgtcgagctcgagtgcctcactgatggcggcttcaacggaaccgtcagcctgaacgagggcggtggtgtcatcttctcggccggcactttcggctctgccaagctgctccttcgcagtaagttttttttttttcgccacatcattttgggtgcaatcacgttaactaacccgatctttttctcaggcggtatcggtcctgaggaccagctggagattgtggccagctccaaggacagcgagactttcactgccaagagtgactggatcaacctccccgtcggctacaacttgatcgaccacctcaacaccgacctcatcatcacccacccggatgtcgttttctatgacttctacgaggcctgggacgagcccatccccgaggacaaggaggcctacctggaggagcgctccggcatcctcgcccaggcggcccccaatatcggccccatggtgagtcttctcaatgcctacattgagaatattggaatcattattctgactgcgttgtcttcagatgtgggatcaagtcaccccgtccgacggcatcccccgccagttccagtggacttgccgtgttgagggcgacagctccaagaccaactcgacccgtaagagccattcccccgtatctagccagctgtggtttttgtttcattactaactctcctctctctctccctcgcagacgccatgacgctcagccagtacctcggccgtggtgttgtctcgcgtggccgcatgggcatcacgaccggtctgaccacgaccgttgcggagcacccgtacctgcacaacgatggcgatctggaggccgtcatccagggcatccagaacgttgtggactcgctcagcaaggtgtccgacctcgagtgggtgctcccgccgcccaactcgacggtcgaggagtacgtcaacagcctgatcgtgtcgccggccaaccgccgcgccaaccactggatgggcacggccaagctgggcaccgacgacggccgcaatggtggcagctcggtcgtcgacctcgacaccaaggtctacggcaccgacaacctgttcgtcgtcgacgcctccatcttccccggcatggtcacgggcaacccgtcggccatgatcgtcatcgtggccgagcaggccgcccagcgcatcctggccctgcggtcgtag

SEQ ID NO: 1053 - DNA, 1001 bp, Myriococcum thermophilum
atgcgtttccggatattttcaccactcctgcgtgcgctcttgttcgcgcatcgcgggcaggctaatattgagagacaggagccctattacacggacatccacacaaatatccgcttctacggccatgccgaacccggcggctatctctttggcttggtgatctccgaacgaccaaccacagacttcattgcacaactcgtcgtacctcttaaccacagcaaggggtggggaggtgtgagccttggggattccatgatcggtccactcctgcttgttacgtggtgagttcatgcccagcacgcttagtgatgatgagcgtgggaagataggcaaaattctgacatgaaaataaaccgacgaggcatgctgatggtattcgcataacactgtattatagggccgatggcagcgacgtgatgacagccgcccgcatagccaatgctcacagcgcagccagcgtagtcccatacacaaccagcccaataaccatatccccaatccgggcaggggctttcgccaacaacacgcacgtcttctccacctttctctgcggaggctgcatcaacaaccactccttcgacccgaacggggatggcgatgtcttcttcggatacgcctattcccgaacagccgtcgcagacccgtcggacatcgacaccactctctcggaccataccggcaaaggcggcgggtacggcgggttcagcgtagcgctgggccgtgccaagtcggccgcgtattatcgctatgcccagatggcagagattggtgactacggcgtcaagcccgaacctccacgcccgccagccacgcctacaacttcaacccctgcaccgatcccaaatcccacgcccacagacgagtggaggagcgggtgcaatgaggacgagtgcggtttggcgacagaaccagactacaaccacgagaaggtatcatggccgctgttgttcggattggtgaccatcgccgtgatatactttctccaaccgttcattagttga

SEQ ID NO: 1054 - DNA, 1398 bp, Myriococcum thermophilum
atgaagtacgtgcagtccgctgccctggcgctcgccgccacggccctcgctgcgccctcgcgcacgactccccagaagcctcgccaggcggctggttgcgagtcggccgtgacgctcgatgccagcaccaacgtcttccagcagtacacgctgcaccccaacaacttctaccgcgctgaggttgaggcggccgtcgaggccatctccgactcctcgctggctgagaaggccgccaaggtcgccgacattggtaccttcctctggctcgacaccatcgagaacattaaccggctggagcccgcgctcgaggacgtcccttgcgagaacatcctgggtctcgtcatctacgaccttcctggccgtgactgcgcggccaaggcctccaacggtgagctcaaggtcggcgagattgacaggtacaagaccgagtacatcgacagtaagtaaaccctttttttgtgggccccttccccggggagacggaaagaggagagagagagaatggggcgagcttgaagactgacgcgttggtacacagagattgtcagcatcctgaaggagcaccccaacaccgccttcgccctcgtcatcgagcccgactcactccccaacctcgtcaccaacatcgacctgcagacgtgccaggacagtgccgcgggctaccgcgagggtgtcgcctacgccctcgagcagctcaacctccccaacgtcgtcatgtacatcgacgctggccacggtggctggctcggctgggacgccaacctcaagcccggtgctgaggagctcgccagcgtctacaaggctgccggctcgccttctcaggtccgtggtatctcgaccaacgtcgccggttggaacgcctggtaagaaaaccccctcccaacacctatttcctcattctggaaatggcgagcgagcggattggcccgaaaaacaaaacaaaagtagctgacctttgtttttttccactgcaatagggacgaggagcccggtgagttctcggacgactcggatgctcagtacaacaagtgccagaacgagaagatctacatcaacaccttcggcgctgagctccaggctgccggcatgcccaaccacgctatcatcgacactggccgcaacggtgtcaccggcctccgtgacgagtggggtgactggtgcaacgtcaacggcgctggcttcggtgtgcgcccgactgccgacactggcgatgacctcgccgacgccttcgtgtgggtcaagcccggtggtgagtctgacggcaccagcgacgagtcggccgagcgctacgacgacttctgcggcaagcccgatgccttcaagcccagccccgaggccggtacctggaaccaggcctacttcgagatgctcgtcaagaacgccaacccgcccctctaa

SEQ ID NO: 1055 - DNA, 1748 bp, Myriococcum thermophilum
atggagctccgatctgtcgtccgtctcttggtcctgtcggcctccattttcgcaccgggggtcctcagtgcattcgggtacacctcgtccggcaacaattatgtcatcgacgccggctctagcaatccgttagtcttttcagtgagcaagtcgagttgtgacatcaactcgatcaagtatcgcggcaccgagctccagtatagcaagaccggaactcacatcggctctgggctcggatcggccaccgtctcggtcagccagattagcggatcgtcccggtacatcaaggtaacatgcgtgacgtcgaccctgacgcactacatggtggtccgggagggtgaaagcatcatctacatggccacctacatcaccgccgagccgtcggttggcgagctgcgcttcatcgcccgtttgctgcctgacaaactaccctacgaatacccgtatggtgaagtttccaccacgagcggctccagcgcaacagtcgaggggtccgatgtcttcatcgtcaacgggcagaccagatccaagttttactcttcgacgcgcttcattgacgaggattcacactgcgtgtacggcggcagcgacctgatccacgtctgcatcatgacgccccaacaggagtcatcttcgggcggcccattcttccgtgacatcaactcgaacaacgcgggggattcgaccaatctgtacaactacatgaacagcggccatgtgcagaccgaggcgttccgcatggggctccatggaccgtacgccatgcagttctcgcgttccggtatccccagcgtgaagaacctagacgtctcgtggtttggcgaggtctcggtcaccggttatgtgccggcctccggtcgcggaaccgtgcagggaaccgcgagcggcgtgcagagcgggatggaaggagtggtacactggtacaacgacaacgcgcagtattgggccaggacgtcgtccaacggcgccttcacctcgccgctcatgaagcccggcacgtacaccatggtgctctaccagaccgagttcaagatcgccacggccacggtcaccgtgtctgcgggccagacgaccaggcaggacattgccggcaacttcaacacgtcccgcaacacgctcttccagatcggcgagtacgacggccaaccgaccgggttccgtaacgctgacaagttcctccgcatgcacccgagcgacagccgcatggacaattggggccctctgacctacacgctgggcagttcgcagttgtccgacttccccatggcagtcttcaaagaggtgaacaacccggtgaccatcaagttcgatctggccagcgctccgggggccgctaccttgcgcatcgccacgaccctcagctttgcgggaagccgtccccaagcaacggtcaacggctggtccggccccatcccagctgctccgaccaagatcgacagccgcggcgtgacgcgtggtgcctaccgtgggtacggcgagatctataccgtcgacatccccgccggcacgctcgtggctggcaccaacaccatcacaatcaattccgtttcaggaagcagtggagatggcttcctgagccccaactttgtaagtgatagaccattccatcctctcttcccccttcttcttcccactcgcaacccctcattataatgtactgcgtccggtaagcggtccctaaccagtctccgttctggggaattcttctctcatagatctttgatgctgttgaactctacactgcttga

SEQ ID NO: 1056 - DNA, 1659 bp, Myriococcum thermophilum
atggttgctccatctgttctcgtcttgctggctggccttgcatggccagcagttgctgcgcccgccacggagtcgtcaagagcaacaaaggccgggttgcgcctcatcaagacatctccggaagaccccggacaatgggtcaccgaggaacagaagattcgagacttcaaatcaaagaggatcggatttatcgacataactgacatcaccgatccggaagtgctcgctgcgctgtcagaacccgactctcctaatggtaacaacaccatctcgacacaagctgtctcgtacccgtccagcgttagccaccagtccgaggccaatccgctggtggcagcagtctcgactacgaatcccaagtcttggctgaagaccttgaccgagtaggtgctctttcccagcggaagagggcgaatgtacgtctttgggggtcgatcttggccatgctgacaacaggaaattacgatgccgattcgacgtggtcaagcttttataaccgctattatagaagctcgtacgggaccgaggctggctcctggctgtttaacacaattaagagcgtcgccgcggccaacccttccattactgtgactcagttcacccactcctttaatcagccgtctctcattgccaaaatcccgggcactacatcagacctaggtattaaaatgcttcttccatctctcccctgtgttcatcgttcaagcccggcactattgtggaagaatgaggaacgcaatcaacactttgcagaaatttccgctgactagaatctgatgcggtacaacaacgaagtcattgtttcggcgcactatgactctaccggcggatcctcgacagcacgcggaccgggtgccgatgacaacgggtccggtgtcgtggtcctcctcgaggcgcttcgggtgttagcctcggctggattcaagcccaagaacactctcgagttccacttttacggcggtgaggaaggcggcctgctgggctcccaggctgtcttctccaactacaagtcggccggaaagagcgtgctcgccgtcgtcaaccaggacatggcaggctactcacccagcgggaaactgtctatttacaccgactacgttgactcgggcctgaccgcatatacccgagtcgttgctaacgcctacatcggatcgactacgagtgacgcttgtggatacgggtgctcggatcatgcttcggccaggtcctatgggttccgtaagtttcaatgtcttcccattaatttcctaccccattttctctctctttctttccttcccttgtagacataatatgtgcagacgcccacgacctgtggcagagacaaaacaggaaataaaaaaaacaaggagttattcaataaaaaccaatgctgaccaattttgacttaacagctgcggcctatgtgtgtgacgagccgatggacacctcgacaccctatatccatactcctaacgacgtaagtttacctttctcacaagccatcctactctctggagtcgctggtcgggagaattaagtgaatggaggagtggaaaaactttggcgaactaattatgcttactttggcgacaggcttactcgactatcatgtgggacgctgtcctccgtcacgccaagttcactgtcgcattcctggtggaggcttcctacctttaa

SEQ ID NO: 1057 - DNA, 412 bp, Myriococcum thermophilum
atgcagcttctccagagtgttgcacgggtggctgccttcctgggcctcggtatgggagcaccccattcattatccctctttcccgaagggatagtaagaggcgacgtttgactaacgtaatgtgtctgatttgccagcccggaggcagttcgagcccgattcgtccccgtatgaggacccggagaccggcctgacgttcgcctcgtacaccagtgacagcggtatcacgtaccgtgtagccattcccgatcccgtccctgaggacaaggtgtacgacacgctccttcaggtcgtcgctcctaaggagctcggctgggttggctgggcctggggcggttccatgacgtacaacccgctcactgtcgtctgggcggacggggacaacgtcgtcctgtcgtcacggattgcctag

SEQ ID NO: 1058 - DNA, 1334 bp, Myriococcum thermophilum
atgcggtggcctcttgcggcgctgcttgtctcggccctcgcggccggacaggcgcttgccaaactgacgttcacggtcgaggccacgcggaacggcgtcccgatcccagcgtccgaaatccggatggagccgttcgagcccggccgtacccgcatgggccccgtcaaggatgccccccggggccggcagcagaagatgcgaaggagcaatccccaggccgacagcgcaaactggtgcggcaccgtcaacagggcgcccttcggcaaggggatccagcttgcccacggcacgttccagcatccgtcttgttacatacggcccgagcatcctttcccccaggcggccgcgagctgggtaggcatcgacggagacacctaccgggacgctttgttgcaatcgggaacagtatgcaaggtacgtgacacaaaaaagtacaagcataatctggcttcaccatctcgcctgttatcattcgttttaaacgtttttttttaaaaaagaaatcggcctccgccgggctcgaggcatgtgaacaaggctaacttatggcagattgaaaattccacgggagtcgtcatgtaaggaaaccactgacggctacatcgttgccatagcactcttggctttgaaagcggccttgtagctaacatgagctctttactcgaattagacacgaggcttggtggcaatgggttcccgaggtagccttcactatcaactctatgccaggtcagtcaactccagctgatactcatggccttttatttttctctctcgattttatcatttttccaccttagttttcatatatgggaagcgtgcctgttctttcgctgacttgacaaattattgaagtggcaccgaatgactggttcgaagtcaccctcaatacaacatccaccacctcagcagaggtgtaagtatctccccagatttcatattgaatttttttttgccctccattttaccccgcctattaattaccacaaccacaaccattctccatgtaaaaatttcgaactcgcactcacccattcactcccaacagaaccatctccaatctctcgcaagggcagacgtattcgatccggatccagagcgggccggtcctggcgcgggtggacgtggactgggtgatcgagcggccctactacggcaccgctctcgccggcttccccaccttcaccgacgtctggttcgacgacgcccgcgccacgctcacggacgtgccgccgtccctgctgggcgtccagggcgctaagcagtaccagatccccggcctgtgcgcgtcccaggagtggcagagctggcaggaggtctcttggtctctatga

SEQ ID NO: 1059 - DNA, 2854 bp, Myriococcum thermophilum
atgcgactccttccagcattgctggctgttgccggcttcgttgagacggtgaagggacattggctcggggaaatatctcgtaagaactattcgattgggctgtaaaatgcaacttcaactgaccgctcgacagatcaaggctttgctccgttcgctggggccaactatcccgtctttcgtaatgtcaaggactacggcgcaagaggtaacctttcccccgatattggtgttggatgctctccaggcatggggttaacatatggcaaggtgatggtgtaacggacgacacggcagctatcaatgctgccatcgaagccgggaacccttgcaacaggggctgtgtaagtgaagcccgagacgaggtggatgaatggtaggcagggcgttgtgctcacgtgcttccgaaggcgtcgacgactcaaacgccagcggtgatctactttcctgccggcacatacctgatctcttcgtccatcaagccggcctacttcacccagctcatcggcgatgcttcgtctcctccgacgctcaaggcaacatccgactttgccgggtttggactcattgacaccaatccctactataccgaggtgctgaactggaagtctcaaaatgtgttcttccgccagatacgtaactttgtcattgacacgactaatattccacccgcaacggctgccaccggtatccactggcccacgtctcaggcgacaagcctccagaacatcgtcttcaacatgcccgcaacatctgacgtcgtccatgtcggcttgttcatggaagagggaagtggaggcttcttgactgacctcgagttcaacggcggtgccaccggcgcgagtatggggaatcagcaattcaccatgcggaatatgaggttcaacaactgcaagacaggtgagtgtgtcatgaattgcacccgtctactactaacaacccccccccccccccgcggccttccttccctcccccaaaccttcctccgtttacagccccgggggagggggaggagggggggggggggggaagggatgtgaacttcggactgggctgacggaacgaagccatcatccaaatttgggactggggttggacatattccggcctatctatcaacaattgccaagtcggcattgacatgtcgaatggcaacacgatgaacgtgggctcggtcaccctgattgacagcaccttcaccaacgtaggggttgccatcctgacctcttggaccgagaacccgaaccctgccaccgtcgagagcctggtgctggagaacgtggtactggataacgttcctatcgccatccagggaccaaacggaaggacgctgctcgccggcgggtcgacaacgatcgatggctggggtatcggccacagctacggctcctctggccctaacccgtttgccggcccgatcactcccaacccgcggccgggaattctgctcaataacgggcgatacttcactcgctctaaaccgcagtacgaggacctgcccgtctcgtcttttctgtcggttcggtcggcgggcgccaagggcgatgccgcgacagatgacactgcggcgctgcagaacgccatcaacacagctgtatccgagaacaagattctcttcctcgactacggcatctaccgagtgaccaataccatcagcatcccgcccggcgccaggatcgtgggcgagacgtacccggtcatcatgtcgtcgggcgccttcttcgacgacatcgacaaccccaagccggtggtccaggtcggcaagccgggcgagcaggggcgggtcgagctgaccgacttcatcgtctcgacacaggggagacaagcgggcgcggtctgcgtcgaatggaacctcgccagcgaccccggcaaccccagcggcatgtgggacgtccatgtgcgcatcggtggcttcacgggcacgcagcaacaggtcgcccaatgccccaagacgccgggcaacccggccgtcaacgacaactgccttgtagcctatctgggtatgcatgtcactaagggggcgagcgggctctacatggaaaatgtgtggatatggtatgtcgccatcaaggggaagaaaaagcggaatatcagattgggagagagctgacgcggaggaacaggatggccgatcacgatatcgatgatgctcagaacacccaaatcaccatctatgccggccgtggtctccgtacgtgtttttcttcccctcattcccctcccctgtcgtatcaaccaagacaccacattgtccccaattttccttcacggagatcctttcttttatgctgtgcactaaacaggaactgactaaccgtgccaccgcaccgtcaaaacagtggtcgaatccgagaacggacccctctggctctggggcacggggtcggagcactttgtgctctaccagtaccagttcgtcaacaccaagaacatctacatgggccagatccagaccgagacgccgtactaccagccgacgccgaacgcgctggtgcccttcccggcggtgtcggcgctgcacgacccggacttcgaggcgcagtgcgcgggcgtggaggggaactgcgcggcggcgtggggcctgcgcgtcgtcgactcgagcgacgtgctggtgtacggcgccgggctgtactcgttcttcagcgactacagcacggcctgctcgaccttcgacgccggccagacgtgccagcagcgcatcacgtccatcgagggcgacgctaccaacgtcaacctgtacaacctcaacacgatcgggacccgcgagatgctgacgaggaacggggctcggatcgcttggttcgcggacaaccagaacacgtttgcgtccaacgttgccgtgtacaagagcaactga

SEQ ID NO: 1060 - DNA, 1185 bp, Myriococcum thermophilum
atgatgatcagatacgtattgctcctcttcctcaccctcgcttggccttgggtctctcaggctttcccggacattgacgaatccctcacagggggtttctcacctaccgacactcagcgcccaacagggagactcttagcagacatcaggaacctcccagacacctctctgtcaccggctggttggatgatcaagaacattctgctcggtaatcgcgccgtcgtatcacctcaggacctgaccgcaatctacacggtcccgggaccgctcaacagcactgaatgtcgccgtgagacctgctgtgtgtggaaacacatcacagaagttatggcggcgtccttccgcgacggcattgggagatgcaacgagcttgcacgccaggccatccgcctgggtttccacgacgctggcacgtggtcgagctcctcaggcgatggcggcgccgacgggtccatcctcttggcacccaaagagctggcacgggacgataaccacggtctcgaggtcgtcggggcacaaatggcagcctggcatggagaatggcgaatccacggcgttggcatggccgacctggtccagatgggtgcggcggtggcagccgcgttgtgtccaatgggaccccgaccacgcgttttcgtagggcgcaacgacagtgccacgcccgcaccccggggccggctccctacggcggacaccagcgacgccgctgcgctggaggcgctgttttctgataagacgatcagcctcagtgagctggttgccctcgtcggcgcccacaccgtcagcgtccaacgtttcttcgacccgctcgccgccgggtcctctcaggactccacgccaggcgtgtgggacaccctctacttcaaccagacggccagatcggatcctccggagggcgtgtttcacttcccaagcgacttagcactctcgcggtaccccgccgtgcgtgagctgtggcaaacgtttgcaaatgagcaggctatgtggaatgatgtgagcttccttttgcctcgtgtagtttcatgttactttttcattttaatgttgaggaacagaaaggaagagacaagtgctaattctgactcacagaactacgcggccgcatacctgcgccttagtctgttgggcgttgagcatatcaatgacctgacagagtgcaccggggtgttgccattgccaagttga

SEQ ID NO: 1061 - DNA, 912 bp, Myriococcum thermophilum
atgctcaataactggaggaccctggctcctcttggagcaatcctcctccctttggcctcggctataactctaccatctacggtcacgacaacgatcccgtacatcgggacttgcaccacaaccactaccctaaacccttgtcatggtcatgtcactgttgtcattcagacgccaattcacgtaccagcttgtacaacgaccaccgtttccacaactacttcatccactgctactcccaccccttccgccggcggagcatgcctactcatcaatcccttctgccgtccagagggcctagacattcattactacccgaacccgttttacggctacagccacaatctctcgtcctcgtactatattactcagggtctcagtcccaaggactcctctctgacaaatagaacttttttccctcaaaccaccccggcagatgaaggcggtcgccctaggatttttcccgatccagctcatcccaatggatactacgtcgtcgggttgacccgtggaactaatggcggcgtggtcgtcgacgcgaataacttcactgtggtctatcagggtttctaccgtgcgccagagaccgggacctacaacatatgttcctcggccgacaacaggaatgaggtcttctttggggatgacaatgccttcgactgcctcagtggcaaaaccccagccgcatcaaaaccgatcatcatcagcacagggggctcataccagaaccgggttgtttgcagaaaagtcgacctacaagcgggattttattatccaatcagaagcgttatgggaaatgcccaagggccatcagcttttaaccttaccattcaggagccagatgtcgcatttggacagcgtaccaataactgggcggggcatgtgtatcctcacaagtgcggcttctttctatga

SEQ ID NO: 1062 - DNA, 1343 bp, Myriococcum thermophilum
atgcgccgcttaacctcgaaacttcttgctgccagcctcttggccgctacttccacggcggctcctcgccgttccgatttcgtgacggtcgagggagggatcttcaaactctcgggaaaagattttcactttgctgggagcaacgcttactacttccccttcaatggggtaagcggtcctttgtttaccttgctaccttcaactcgctaacacaattcttttagaaccaagaagatattgaaaaagggttaacggccgctaaggaagctggactttctgtattccgtacctgggggtttaacgataagaacagtacatacgatcccaatggtttgcctcagtatgggggagaaggggccggtcctactgaagtcgtatttcaaagatggtatcctaacggcacttccatcattgacatcagcggtttcgacaaagttgtggaggctgcggagaagactggcatcaagcttcttgtagctttgaccaacaactgggccgattacggtggcatggatgtctacactgtcaatttgggcggcagataccatgacgatgtgagcctgctcctgactttggccccacacctcgcgctgctaactgaatcttgctagttctataccgtacccgaaatcaaggaggcgttcaagcgctatgtcaacgcggtagtgactcggtacaaagactcgccgaccatctttgcttgggagctcgcaaacgagccccgctgtggcgctgacggggttcgcaatcttccacggagtcccaactgtacgcccgaggttctctcgtcttggatctctgagatgagcgcatacatcaagagcattgatagcaaccatttagttacttggggaggcgagggaggattcaaccgcgaatccgacgactggtcgtacaacggtggggacggcggcgacttcgaccatgaactttcgattgagaccattgattttggtgtctttcactcctatcccgactggtgggataagactgtcgagtggacgcaccagtggatacgcgatcatgctgctgccggccgggaggctggtaagcctgtcgttcatgaagagtacggctggatgacgccagagaagagactggagtacaccggcaaggtcgacaacaggacaagagtcgaggtactcggcggctggcaaaagacgacggtcgaggagaagctggccgggagcatgtactggcagtatgggtattcggattactcctatggtagaaaccacgatgatgggttcaccatttatttggacgatgaggaagcaaggccgcttgtgtacgggcatgcaaaggacatgaattctcttaacgttcgccgtggccggaaatag

SEQ ID NO: 1063 - DNA, 1668 bp, Myriococcum thermophilum
atgaaacacgcctatagtaccttgctcgccggcctgtattggtcttggattgccaaggccctggacaatggggttggcttgacacctcacatgggatggagcagctgggtaagagaattggcgtcatgaggctctgatcaccattttctgtcaattattatccatggaaccgacaaaataatcgattgggttaactccgctaattacctcttgatgttgcagaacgtggcccagtgcaatgctgcctcggccaagtacgcccttgacacggctgagaagttcatttcactcgggctcaaggatctcgggtacgaatgtaagcaaatcctaattacctgcctatttgggccttttcttgaaggccgggaatcagcctggcctcatattaatttggccagctaccgaaaatttcaaaaacccgtatgcatgacacgtgctgacgacctccccccaactccagatatcaacatcgacgactgctggtcgctcccgtatcgcgacgggaacgggaagcttattcccgatccggcaaagtggcccgacggtatcaaaccagtcgtggaccggatccacgagctggggctcaagtttggtctgtatggctgtgcaggcgagaagacttgcgcaggttatcctgggagcgatggggataggtatgcggcctcggatgtcgctcagctggtcgagtggggagtcgatttctggtacgtgatactctccccattccatttttttgattcccgcttggttatggtttcaccattgcggccgttccactaacacgctgtaaaggaagtatgataactgctacaccccttgcttggacaacccaccgcctcagacctgtgggaggccggcaggaaacacccagcagtggtatgcccctatgcgagatgccatcctgagtgttcaagacacgcgcaagatccacttcaacctctgcaactggggacgtgacaacgtctgggagtggggttatgattacggacactcgtggcggtacgtctcttcgggatcatgctatggccccctcccttctccttcaactatatctgatttgtccacaactaacctaacctcaacaattaattgcggatcgacaggatgagcgtcgacaactggggagactgggagagcgtcgagcggatcggcagtgcggcggccggtatttacgaatacagcaagcctggcgggttcaacgacctcgacatgctgtacctggggtcgccgaagctcaacaccaaccaggagcgcctccacttcggcctctgggccatcaccaagtcaccgctcgtgctggggctcgacctcaacaccatctcggactcgaccctcgagatcatccgcaacaagggcctgatcgacatcaaccaggacagcctcggcaaggccgccaccactttcaccccgcccggccagcccggcccggaatacggcaagatctacccgtactgggcgggcccgctcagcgacggcgtcgtcatcggcctctgcgccgccggcggcgcgggtacttacgccgtcgacttcaaggacgttccgggcctcggcgacggcagctactcgtgggaggagatgtacacgggcgaaaccggtactggcaccggcatctcgttcaacatcgaccaatacgacatgcgggtcatcaaggtgaagacggacgggtaa

SEQ ID NO: 1064 - DNA, 1734 bp, Myriococcum thermophilum
atgaggacccccgccgtttccctgctcgccttcgccctcccggcattggccacatttggccacggccatggcggcccaccggtattccggcccctggtgtcgtcgggagctctgcaatccctgatcaagaaggacgacctgctcgccggcgcccaagagctccaggacatcgccgatgcccacggcggcaaccgggccttcggcagcagcggccacaatgctaccgtcgacttcctctactacaccctcaaggcctgggactactacgacgtgaagaagcagccctttaaggagatcttcgcgtccggcactgcttcgctctccgtcgacggcgaggacattaaggccgagacgctgacctacactccggccggtgaggccaaagacacccccatcgtcgaggtggccaacgtgggctgcgaggccgccgacttcccagccgaggtggagggcaacatcgccttgatcaagcgcggcgagtgcacgttcagccagaagtcgatcaacgccaaggccgccggtgctgttgccgccatcatctacaacaacgaggagggcagcctgcagggcaccctgggcgagcccttcctggagtatgccccggtcctgggcatcaccctcgaggccggcaaggccatcctcgccaagctcgccgacggcaccgtcactgccacgctcaagatcgacgccatcgtcgaggagcgtctgacgtacaacgtcattgccgagaccaaggagggcgaccacgacaacgtgctcatcgtcggtggccacagcgactcggtccctgctggcccgggtatcaagtaagtgcgccatcattgcgtgtaaagacctgagagtttgcgaacggggtttgctaatatcatcccaccttgcagcgatgacgggtctggtatcatcggcattctcgccgtcgccaaggctctgaccaagttccgtgtcaagaacgcggtccgcttcgccttctggagcgctgaggagttcggcctgctgggctcgtacgcctacatgaggtcgatcaacagctcagccaccgaaatctccaagatccgtgcctacctcaactttgatatggtaagaaatcaaccaaacaaaagaaagacgggccctttaccgacgtccgttgctttggggcttgtcgaggggtgcctagggaggtaatcggtgcggaaaagtctcgctaacatccgattcccaacacaacaatagattgcgagccccaactacgtctacgccatctacgacggcgacggcagcgccttcaacctgacgggcccgaccggttcggacgtgatcgagcgcaactttgagcgcttcttcaagagcaagcacgcgccgtcggtgccgaccgagttctcgggccgctccgactacgccgccttcatcgaaaacggcatcccgtcgggcggcctgttcacgggcgccgaggtgatcaagacggaggaggaggccaagctgttcggcggccaggccggcgtcgcctacgacgtcaactatcaccagcccggcgacactgtcgagaacctcgacctcgacgccttcctgctcaacaccaaggccatcgccgacgccgtcgccagctactcggtcagcttccgcggcatcccccgcgtagacgccaagaagcgccgctgggacgccttccgcgcccgcatgctcaagcgtagcaccggctcccacggccacgcccacttccactcgggcccttgcggcggcggtgcgaccatctaa

SEQ ID NO: 1065 - DNA, 1071 bp, Myriococcum thermophilum
atggccccgaacaccctttcgtttgctgccgccgccctcgccctggcatcggccgcgcaggctcagtgcggcgccgggtcgccggatgccacggtgacgggctcgggcggctcgtacacggccagcgtgggctcgaaccaggtctactccggatccgactatcgggaggcaatccagtcggcgctcgactcgatcagcagcggccagcgcgtggccgtgatggccgacggctcgattggggccagcaccatcaccattaccagcggcaagaccttcgagggctgcggcaccatcgatgtgggcaacaatgccgggcgtggtgccatcgaagcaaccgacgcgagcgacgtcagcatcccctatctcaccatgacgggcaacccgtacttcggcctgcgattctcgggcatgcgcggcctgaggctcggcaccatcaccatgaacctgagcggcggcctgggcatccgcttcgaccgcgaccgggcgcccagctccgacgtcacaatggacgtcatcaccgtcacgggcgccggcagccacgcggtcgagacgtggaacatcgacggcctcgagatcaacaaggtcatcgcccgcgacgtgggcgagtgcggcctgctgctgcagacgaccaccaacgcccacgtcggcctggtggacggcgagaacgtggcgaccggcaacggctacgccaccttccgcatggccaacaacaacggacagaagtcggacggcagctacgacaccaacgtgtacgtcgacaaggtggtctcgcgcggcggcggccgcggcatcttctgcgtctcgcagtcgggcggcgccgagatcgccgaggtcgacctggccaacaacggcaacaacgccatcctgatcgagaactgctacaacgtcaacatcaagggcggcagggtcaacggcggcggcgaggtccgcatcgccgcccgctccgagttccccaacaccagggacgtttcgattactctccaagtcgatggcacctctgtccgcgagtccccctgcggcgagaacattcactggtccattaccggcaacgcacaacagaacatttgctaa

SEQ ID NO: 1066 - DNA, 1200 bp, Myriococcum thermophilum
atgaaggccaatctcctgttcctcgcgccgctcgccgtctcggctgcgcccgcggtcgagaagcgccaggcagctgagagcatcgacgagctcatcaaggccaagggcaagctctacttcggcacctgcaccgaccagggcctgctgcagcagagccagaatgccgacatcatcaaggccaacttcggccaggtgacgcccgagaacagcatgaagtggcagagcatcgagccacagcagggccagttcacctggggccaggccgactacctcgtcgactgggccaccgagaacaacaagaccatccgcggccacaccctcgtctggcactcgcagctcgccggctacgtccagaatatcggcgaccctaacaccctgacccagacgatccaggaccacatcgccgccgtcatgggccgctacaagggcaagatctacgcctgggtatgctctcccttccccccccccccctttccctctctctctctcttcctttttagtttgtattgatgaagccctctgagatttctttctgacactatgggactgttttttttttttaggatgtcatcaacgagatgttcgacgaggacggctctctccgccagagcgtcttctccaacgtgctcggcgaggactttgttgagatcgccttcaacgccgcgcgcgaggccgacccggacaccaagctgtacatcaacgactacaacctggacgacccgaactacgccaagctgaccaacggcatggtcgcccacgtcaccaagtggcgccaggccggcatccccatcgacggcatcggcacccagggccacctccaggccaaccagggctccagcctcgcccaggccatcaaggctctcgctgccgtcgacgtcgaggaggtcgccgtcaccgagctcgacatccagaaccacagcaccaacgactacactgccgtcgtccagggctgcctggatgagcccaagtgcgtgggtgtcaccgtctggggtgtccgcgattctgtaagtttttttttttcttttcttttcttcctctttcttccctgaagaaggaggtagtaggaaaaagagataagcaagatggctaacctcacctctacaggactcgtggcgtcctcagggcaaccccctgctcttcgacagcaactaccagcccaaggcgagctacgatgccatcgtccagctcctgaagcagtaa

SEQ ID NO: 1067 - DNA, 1167 bp, Myriococcum thermophilum
atgcatcgctacgccttcctcgctctgctgccggcggccctcgccagggttccccatgctgtccgcgccgcagtcactaccacgctgccgcccagcgcaggtgccactgccacgtcggctcctatcaccgtcggcgccggccaaacctttgacggcggaatgaagaactttgatcgctcccgtacgtgtgtacacatcccttggctcctcgttgtgcctcagtggttacgatgaaagaaaagaagggcaagaagaagcaaggcttgtgccgggatggctgacgtctagtagcgcgggtttgtgctgagcagaatgagacgggcgaggatgacgccatgttcgttctcgaggacggtgccactctctccaacgtacgtgatttgttctaaaatcttttccttctttcctatacagaaaagaagtagctaaaccatgcctataggtgatcatcggtcccaaccaggcggaaggtgtccactgcaagggcacttggtaagtcaccactccacaccgaggccagcctccgaccaggttagcaatgattttagcaactaatactcatgtgtaacagcaccctgatcaacgtctggttcgaggatgtctgtgaggatgccatgtatgtgccacccctctcttgtcccttgattggcttccttcctgccacagccaagaacaaagtattattattattattattattattattattattatctcttgcccttaaaaagctgctaacatacctttcttttttcttctttcccttacagcaccctcaagcaatcaagcggcacatcccggatcatcgggggcggcgcgttccacgccgacgacaagatcgtgcagttcaacgggttcggcacggtcgagatcagcgacttcttcgcgagcgactacggcaaggtggcgcgcagctgcggcaactgcgagaacaacggcggggcgcggcacatcgtcatcaacaacgtcgtcgccgtcgacggcggcgtcctctgcggcatcaacaccaactacggcgacacgtgcaccatctccaacagctgccagaacgacggcaagagctgcgaccgcttcaacggcaacaacaacggcgacgagcccgacaagctcggcagcggcccggacggccagttttgcatcgctaccaacctctccgagagctgctag

SEQ ID NO: 1068 - DNA, 1718 bp, Myriococcum thermophilum
atgttcctgctggggcttctcgctgcggcgcctgctgccgttcaggcgcagttcagcaccaccatgctgcggttcggctgctcgcagctgaccgttgaccggatcgacccgtaagtttcctggagctcacgatggcggacaatagggggttattaacagattactcacactgatgctattcagcctcgttgagccgggtaatgttccttcggctcacgtccaccagatcgtcggcggtgtaagtaccctcctcgaccacacgggtggctgtacttgtcgcataagcggactgactaactgactgcgattagaacgccttcaacgcctcgatgcccaccgaggacatctcgaagctcgcttcctgcaccacgtgcactttctcccaggatctgtccaactactggaccgccaacgtctacttccgggcccgcaacggcagcttcaagcgcgtcccgcagatggtcaacgagatgatcggcgacgccaacgccggcatcactgtctactacaccgccccgggcccgaacacggtcaccgcgttcaagccggtacgttactattgcagactcggcccggctcatccccccttcccctttcccataccctgagaaatctcttttcacgttccgcccccactaaccacgcgtccagggcttccgcatgttctcgggtgacgtcaaccgccgcgaatcgaccggcctcggctcccgaatccagagctgcttccgctgctacgacgcccctaacttcggcggcaacatttatgctccatgctccgacccggagcgcgataccgagtctttcccgacaaagccatgccccggcggtatccgctcgagcgtcatcttccctatgtacgtcaatacgaatgccaatccttccccccacctccaaaactccttcccccttggacatcacatacttcctgtagcggctcagaaaacctgtaaaaatgcgaatgacatgggctgaccagctctcttttaattgaacagctgctgggatggccagaacctcgactcgcccaaccacatcgaccacgttgcccacccaatcgacggcccggcgccgttcgccatagttgatggccagtgccccgagtctcacccggtcaagatcccacaggtgcactatgaggtaagccacttccccccatgctggttcagaattagtttttcccgcttacacgcacggcaggttgtctgggatacgaccgcgttcaacgacccggcggagtggcctgaggacggctcgcagccgtttgtcttgtccactggtgatccgtacgtatccccccacgtaatgaactcccttctcaatagaggaaaggagttaaagaatgagggaaaatgttgaacctaagctgaccttttctctctttttttttaaaaaaaaaatatagcaccggttacggccaacacggcgattacgtcttcggctgggagggcgacgctctgcagcacgccatggacaaccgctgcttcggtccgacttgcaacggcctgagcacccagggcttcgaccaggctaacgcctgcaccattcccccggtggtgaacgaggacatggagggctgtgagtttccccctgcttcttgcatttcatcctctcttcccctttatagatatctactacttttctggtggtactggaaatactgacggaattatgcaacaatagggctcgacgagctgcccggcggacaccagatcatgtaa

SEQ ID NO: 1069 - DNA, 1609 bp, Myriococcum thermophilum
atgttcctgtccacgttgctgcttgcggcgcttgccgaggccctgcctcaatttccaggcagtggcaacgggccgaccatgctccggttcggctgctcccagctcgtcatcgaccggatcgaccccttggtgacgccgggacagctgccgtcgccgcacatgcaccaggtcgtcggtggcgacgtcttcaacgtttccatgccggaggacgacatcggcgccttggcctcctgcaccacctgcagctatgccgaggaccgctcgaactactggactgcaaacatgtacttccgcgcgaggaacgggagctacaagcgcgtcccccagattcctaacaggtgcgttccggctacctcctctcccccttgggttcctacctcgatatcctgtgtatacattgttatttatcaacaccacctatacaaccttgtctaacttgatcatggacaatcagactcctcttcggtgatgagttcaccaccaagaccaatggcggtttcgtcgtgtactacgtctctcccggcaaaggcggtgtgacggccttcaagcctgtaagccatttcgctccttgtttcttcctttctcccttcatctctatgataattttggcatggcggctgacttgtgcttttttccttcttacagggcttccgtatgctcactggcgaggcctcccagcgcgaaaagattggcgagggccggaagtcgcagtcgtgcttccgctgctacaccgggccgaactggggcggcgacgaccttgccccctgcgccgaccctaacctcgactcggaggagctgcccaacaagccgtgccacggaatccggtccaacgtcctgtacccaacgtacgcatcaaccttccctatttcaaccctccctttactccttctctctcttttgacaattatgacactgactatgatgatgactattgcagctgctgggatggcaagaacctcgactcgcccgaccacaagtcgcacgttgcctacccgatcgacggcccgcacgcgttcgatggcatgggcgtaggcggacagtgccctgagtcgcaccccgtcaagattccgcagatcatgctcgaggtgcgtccggcctccatcctctcttcattttgatattaaatatgctttgattactaattaataaactatcaaacaaaaacagatcgtctgggacacgacgcaattcaacaacccggaggactggcccgaggatgggtcgcagccgttcgtgctgtcaatgggcgaccacaccggctacggccagcacggcgactacgtcttcggctggcagggcgactcgctgcagcgagccatggacggcggctgcctcggcgccacctgcgcggacctcaagacgcagacggtcgaggaggccaacaagtgcaccgtcccgacgcgcgttaatgaggacgttgatggatgtaagtttatatgctttttatttcatttcccccttgctttattcttggctcgagattcaaatcgatcattcggcccctctccatccacttcagcagccgtggtgtttgtgaactgcggtaacagtgctaacacttgtaatttcagggttcgaccatctgcccggcctgccggttccgaactaa

SEQ ID NO: 1070 - DNA, 1877 bp, Myriococcum thermophilum
atgaggttatctttcaccgccctcgcggcgagcttcgccttcgcgccgttggccgccgcctttggcggccatggtatgagaatggacgtcgggcccgacgacgtctcggatgccgacctgcagaagcgagccgctctccgtggctggggcacgttcgatcagcttattgaccactccaacaagtctctcggcaccttcaagcagcgttactggtacgggactgagcactggaagggccccggctcgcccatctacctgatctctcccggcgagcagtctggtgacggcttcaaccgcacatggctcacgagtcaacgcctgtcgggccttatggccaaagagacaggcggtgctatcgtcattctcgagcaccgctactggggagagtcgtcgccctatacgaatctcacggaggagaacctcaagtacctcacccttgaaaacgcgctcaaggatcacatccactttgccaagacgtttgtcccgccatttgataagagcggcaacagctctgccgataaagcgccgtggatctttgtcggcggctcctattccggcgccctcgctggctggctggcggccaaggagcccggtaccttctgggcctactacagctccagcggtgtcgtcgaggccatcggcgacttctggcaatactttgtgcccgtgcaggaggcgacgccgaagaactgcagctcggacgtcgggctcgtcatcgactacgtggactatgtgctgacccatgggtccaagaagaagaagcaggctttgaaggctaagtttgggctgaaagagttgaacgacgccgactttgctgcgtaagtacctattgcctttctctcctttcctttgacatcaccgtggaattcttttcctgggtctctgagagagggaagaacgaactgacaagaaggacgtcttgatcagcacgctggagtggggtccctggcagtggcagtccggccaattttactcggaatatcaaccattttacctcttctgcgactacgttgagaatgtgtggcccaactcaacccacaaagtgcccggaccacacggcgtcggactgtccaaggcgctggatggctacgccaaatatatcaaagagcaaatcattcccgggggtaggtgctccccattttctcagatattcctttgttatcaggacaacttctaattgatattcaactagcctgtgaggcggccggatatcctgaatggaagggcgagtacaacattgagtgcttcaagaactccgatccggacaacgtggcctacaaggacctcagccttgacaactggattaaccgtcagtggaactggatgctctgcaacgagccgtaagtctccccaagcaatcctctgcactttccgaaacgaacgggctgacacttatcttctttcctgacgacagctttgaatggtggcaagacggcgcccctcgcaaccggtcgactcttgtctcgcgcctagtgactgcagattactggcgcaagcagtgtgccctgcacttccccaacggcgggtacagcctggcggaaggcaagcgggccaaggatgtcaacaaatggacgggcggctggagcgtcaccaacacgacgcgggccatgcacaccaacggccagtacgacccgtggcgtgatgccaccctgtcgagcaagttccgccccggcgggcccgtccagagcactgagcagctgccggtgcgtgtcgtcaagggcggcatgcactgctccgatctgtacggagccaactgggaagtgaacgatggcgtcaagaacctggcactggacgcgaccgaacagatgaccgagtgggtcaaggaatggtatgaggagaagggattgccggtaccttgggatcgttctaggaattag

SEQ ID NO: 1071 - DNA, 1410 bp, Myriococcum thermophilum
atggctcgcggcgttgctttcctgggtctcgcctcgctcctcgctggcgcggccaaggcccagactccgggcgagggtgaggaggtgcaccccaagatcacgacctaccgctgcaccaaggcggacgggtgcaaggagcagaccaactacatcgtgctcgacgccctgtcgcacccggtccaccaggttgacaactcgtacaactgcggcgactggggccagaagcctaacgagacggcctgcccggacctcgagtcgtgcgcccggaactgcatcatggaccccgtctcggactacagccagcacggcgtctcgaccgagggcacgtcgctgcgcctcaagcagctgctcaacggcaacgtcgtcagcccgcgcgtctacctgctcgaagagaacaaggagaactacgagatgctcaagctgaccggcaacgagttcacctttgacgtcgatgccaccaagctgccctgcggcatgaacagcgccctctacctctccgagatggacgctagcggtgcccgtggcgagcttaacccgggtggtgccacctttggcactggctactgcgacgcccagtgctacgtcacccccttcattaacggcctggtacgtttttttctgctccccatttttgggattttttttttatatacgttcagaacaagtcaataggctaacagacgttacaacaaaaaaaaacagggcaacattgacggcaagggtgcttgctgcaacgagatggacatctgggaggccaacgcgcggtctcagcacatcgcgccgcacccgtgcagcgtggccgggccgtacctgtgcgagggcgaggagtgcgagttcgacggggtgtgcgacaagaacgggtgcgcgtggaacccgtaccgggtcggcgtgacggactactacggcgagggcggcgagttccaggtggacacgcggcggccgttctcggtcgtgacgcagttccacgccaacgacgagggcaagctcgagagcatctaccgcctgttcgtgcaggacggccaggtgatcgagtcgtacgtcgtcgagcagcccggcctgccgcagacggaccgcatgacggacgagttctgcgacgccaccggctcgacccgcttcatggacctcggcgccatggaggccatgggcgacgccctctcgcgcggcatggtcctggccatgagcatctggtggagcgagggcgacaacatgaactggctcgactcgggcgaggccggcccctgcgacccggatgagggcaacccgtccaacattgtcgtcgtccagcccgacccggaggtcgtcttcagcaacatccgctggggcgagatcggctccacctacgagtccgccaccggcaacactaccgcttctgcccgcaaggtcaagagcaggcgcttcaggaggttctaa

SEQ ID NO: 1072 - DNA, 884 bp, Myriococcum thermophilum
atgtacatctcgaacctcgtctcggccctcggcctggccggcctcgccctggcaagcccaatggaggtggctaagcgtcaaggtgaaaagttgaggatcagtacgtgagcccgcacgcatgaggttatatgtccccagtcttgatcaaattgctaacggacagcagtgcccctgggcgacagcatcaccgaaatcacctgctggcgcgcctttgtctgggaccagctggctcaggccggcctagctgaccaggtgcagtacgtcggatcgcagaacagcaaccctgtgggctgccaaccccagacggccaactgggaccaacaccacgagggccactccggctggaccgccgtcgacatcgccaacaactggctggccggctggctccagagcacccctgccgatatcgtcatgttcatgctgggcaccaacgatgtcgtgggcgggacctcgacggaccagatcatcgctgcctacaccaagatggtcgagaccatgcgtgcgtcgaaccccaacatcaagatcattgtaagtgtgatctccccatacatgcaccgtctaccacatgtaacggcatggatatgtgtgccacgctagcacagaagagaagctcaccaaccatctacctcactcgccagatcgacctcgtcatcccattgcccttcatgaacgcgccgatcgaggccatcaacgcgcgcattcccgagtgggccgccagcctcaactcgaccgagtcgcccatcgtcatcgccgactgctaccagggcttcaccaactccatgctccgcgatggtatccaccccaacctacagggcgacgagctaatcgcctcgcgcgtcggcccgctgctgctggactacgtcaagcagtcgttgggtcagtaa

SEQ ID NO: 1073 - DNA, 1106 bp, Myriococcum thermophilum
atgcgtgtcgctctagccttgttggctctctactcgtcgctggcctgtgcgacgccagctccggcctaccccggcttcaagctggtatggtcagacaccttcccaggcgctgccggagctacgcccaacaagaagaaatggaacatcatcaccgagtacgtgtctctctctttgtctctctctctctcgtcctttctttctccctgtcctgccctttccttgcttccttacatccttcctctgcctcctttgtcgagaactgccgggtcaaaaccatgaacgcatttgctgactaggacacctttcctaaagcgtccaaaccaacgatgaggtgcagcactactcgacgtcgaacaagaacctgcagatctctggcggtgacacggtgcagctggtgccgttcaagaacagcaagggcaggtggacgtcggcacggatcgagaccaagaaggcctttacgcccaagaagggcaagctgaccatgttcgaggcgacgatccggttcggcgacacgccggcgatccacaagcagggcatgtggccggccttctggctgctcggcgattccatccaccacggcacgccctggccgcgctgcggcgagctcgacatcatggagacggtcaacggcctgccgacggcctacggcaccacgcactgcggcaacggcgagaagggcgggccgtgcaacgagcccttcggccgcggcggcgccgttcccctgctcgactacgactggcacacgtggtccctgcagatcgaccgtaccaacaaggagggcggctggaaggccgagaccatccgctggctgctcgacggcaacgtcttccacgaggtccgcggctccgacattggcgatcaggccatctggggcacccttgcccactcgcccatgttcatcatcctcaacgtcgctgtgggcggtacctggttaagttttttttttttttttttcctatttaccttatttttcacctttccgttcctgtgtacgggaatactgacgaagtgtgacgcacaggccgggtgctcccaacgccttgacggctgatggctatggcagcatgatggaggttgagtacgtggctgtgtacacgtcctcttaa

SEQ ID NO: 1074 - DNA, 2385 bp, Myriococcum thermophilum
  misc_feature (550)..(1389): n is a, c, g, or t
atgaagcttcttggtctcgcagcgctcctccaccttgccctcgcggcaccggtgatcaagccccaggggctccagctgatcccggacgagtacattgtgaagctgaaggatggtgtgtccgagagcatcctcgagaacgccatccggcagctccaggggagcaagaccaagcatgtctaccgcgcaggccggttcaagggcttcgctgccaagctgaaccagcaactggtcgagaagctgagcatgcttcctgaggttcgtccatcccgtccccatatgtataagatgatgctaacgcaaacacctgcacaggtcgaatacatcgagcaggacaccgtcattaccacccagacgatcgtcacccaggaagacgcgccctggggtctggctcgcatctcgcaccgcgagctgggtcccacttcatacgtgtacgatgacagcgccggcgagggcacctgcgcctatgtcatcgacacaggcatctacgtggaccacaatgtaagtctctgtccggactgtttgcacccgcgcggcctcctccctccccccnnnnnnnnnnnnnnnnnnnnnnnnnnnnnnnnnnnnnnnnnnnnnnnnnnnnnnnnnnnnnnnnnnnnnnnnnnnnnnnnnnnnnnnnnnnnnnnnnnnnnnnnnnnnnnnnnnnnnnnnnnnnnnnnnnnnnnnnnnnnnnnnnnnnnnnnnnnnnnnnnnnnnnnnnnnnnnnnnnnnnnnnnnnnnnnnnnnnnnnnnnnnnnnnnnnnnnnnnnnnnnnnnnnnnnnnnnnnnnnnnnnnnnnnnnnnnnnnnnnnnnnnnnnnnnnnnnnnnnnnnnnnnnnnnnnnnnnnnnnnnnnnnnnnnnnnnnnnnnnnnnnnnnnnnnnnnnnnnnnnnnnnnnnnnnnnnnnnnnnnnnnnnnnnnnnnnnnnnnnnnnnnnnnnnnnnnnnnnnnnnnnnnnnnnnnnnnnnnnnnnnnnnnnnnnnnnnnnnnnnnnnnnnnnnnnnnnnnnnnnnnnnnnnnnnnnnnnnnnnnnnnnnnnnnnnnnnnnnnnnnnnnnnnnnnnnnnnnnnnnnnnnnnnnnnnnnnnnnnnnnnnnnnnnnnnnnnnnnnnnnnnnnnnnnnnnnnnnnnnnnnnnnnnnnnnnnnnnnnnnnnnnnnnnnnnnnnnnnnnnnnnnnnnnnnnnnnnnnnnnnnnnnnnnnnnnnnnnnnnnnnnnnnnnnnnnnnnnnnnnnnnnnnnnnnnnnnnnnnnnnnnnnnnnnnnnnnnnnnnnnnnnnnnnnnnnnnnnnnnnnnnnnnnnnnnnnnnnnnnnnnnnnnnnnnnnnnnnnnnnnnnnnnnnnnnnnnnnnnnnnnnnnnnnnnnnnnnnnnnnnnnnnnnnnnnnnnnnnnnnttcccctcttacctttgtgtgaaggcgacaacactgacgctgcaaccccaggagttcgaaggccgcgcgacgtggctgactaacactatcgacagcagcgactccgagtcagtaacatcccggatccccccccccactccctcaaatgagaattagctaacttttaataaacagcggcaatggtcacggcacgcacgtggcgggcacgattggcggcaagacgtacggcgtggccaagaagaccaagctgttcgcggtcaaggtgctcaacgcaggcgggtcgggcacggcgtcgtcggtgattgcggggctcgagttcgtcgcgaatgacgcgccacagcgggtggcctcgggcgagtgccccaacggcacggtgggcaacatgagcctcggcggcggcaggtccgatgccatcaacgccgccgccgccgccgccgtcgacgccggcgtcttccttgctgtcgccgctggcaacaacggcggtgatgtcagcttgatctcccctgccagcgagcccagcgtctgcaccgtcggcgccactgacgatgccgacatccgcgcctacttctccaactacggcagcctggtcgacatctttggtcccggcgtcgacgtcctcagcagctggatcggtggtcctgatgctactgtaagtttatgtttcttaatattcccttctcctttgtgctcgggtacctcacatgctgtttctgttcaattccaataataagcccgatgatgcaaaacgagaaacatcgggacgggaagaacataacatactgaccaggaaaaaaaaaataacagaacaccatctcgggcacttccatggcaaccccgcacgttgctggcctcggcgcctacttcctcgccctgttgggttacaaggatcccgaggcgctgtgcgagtacatcaaggagacggccaccatcggcaccgtcaccgacattcccagtgacaccatcaacgccattgcctacaacggtgccacctcttaa

SEQ ID NO: 1075 - DNA, 2637 bp, Myriococcum thermophilum
atgagagacgcaacagggacagcaagcctgttttacaggctcactactactctcctgctgacattcttgttagccccgggactcgtcagagcgaggccccatctcgtccggcaggcagatgacagtggccgccaacgcatcagcctcaatgagggctggaggttctcccgcttcacgacaaacccggattcgctctcatacgactctctaaaatcgtggatcctgccgtccgccaataactttatcaagggaaacaagcacgagcccccgtccggaaccccccctggcagcaacgtggagtttgttcagccggattttgacgatagcgactgggaggccgtcgacctgccacatgactgggctatcaagggcccattcaacgctcccggagtgagcggtgggatgggccgcctgccttcgaacggcgtgggatggtaccggcggacgctgaccaaggctcccgaggacaacggcaaggccatctacctcgatattgatggcgccatgtcgtatgccgccgtctggctcaacggccgtctgatcggcgggtggccatacgggtacgcctcgttccgcctcgacctcacgccttacttggaggatggcgacaaccagcttgctatccggctagataacgcgctggataactcgcgatggtaccccggcgcaggcatttaccgcaacgtctggctggtcaaggtcaacccgacccacatcgggcagtacgggacatacatcaccacgccggacgtttcggaggaagaagctaccgtccagctcgcggtcgaagtggagaacagcggctcatccgactcgacggtagacgtggtgacggaaatccacgtgcttgacccggccacggggacccctggggaagaggttgtggctgagtttgagaaggcaacggtaaccgtaccggccggagggaaggagtcagtcaacagttctgcggtggtgacgaacccccggctctggggccccctgccggatcagaagccgaacctgtatgttgcgacgaccaagttgaccctgaatggcacggtcatagacacgtacgagacccccttcgggatccgcaccgtcaccttcgaccccaacgagggcgtgtcggtcaacggaaagctggtcaagatctggggcacatgcaaccacggcgatctcggcgcgctcggaacggctttgaacaagcgggcgctggagcggcaactggaggcactccaagagatggggagcaacgcgctccgcacgtcccacaacccgccagcgcccgaattcctcgacatggccgaccggatgggcttcctggtgctggacgagatcttcgacacgtgggcggaccagaagacgaccaatgacttccacatcatcttccctgactggcacgagccggatctgcgggccttcgtccggcgcgaccgcaaccatccgtccatcatcgcctggtcgtacggcaacgagatccccaaccagtccggctcggccgtcggcaacatcgcccgggagctccgcggcatcctccgcgaggaggacccgactcggccgtctacggccgccatgaacagcgctggtcccggcgacccgctgcccgacactctcgacatcatcgggctcaactaccagggcgagggctacggcacgtcgaccgacggctccttcgaccgcttccacgcggcctacccggacaaggtggtgtggagcagcgagagcgcgtcgacgctcagcacgcgcggcacttacctgttccccgtcacgtccgggaaccacgccaacgtgggcgactcgccgggccagggcggtgacggcagcaactaccgcgtaagcgcgtacgagctgtacgccaccagctggggttcctcgcccgacaaggtgttcgccgcgcacgacgcccacccttacgtcgccggcgagttcgtctggaccggctgggactacatcggcgagccgacgccctacgacagcgcccggagctcctatttcggcatcatcgacctcgccggcttcaagaaggaccgcttctacatctaccaggcccgctggcggcccgacctgcccatggcccacctgctgccgcactggacctggcccgaccgggtcggcgaggtcacgcccgtgcacgtcttctcgtcgggcgacgaggccgagctgttcgtcaacggcgagtcggccgggcgccagaagcgcggccagggcgagtaccggttccggtgggacgacgtcgtgtaccagccgggtaacatcagcgtggtcgtatacaagaacggcgaggagtgggcgcgcgatgccaagtggacggtcggggaggccgcggccctgaacctgacggccgaccggactgagatcgggggggacggcctcgacctctcgttcgtcaccgtggccgtcgtcgacgagaacggcgacacggtgccccaggctagcaacgaaatcaccttttccgtctcgggccccggccagatcgtcgcgacggacaacggagacccggccgacatgaccgagttcccatccctgacccggaaagccttcagcggtctcgcgctcgccatcgtccgggcggataagggtgcttctggagagatcaccgtcaccgcttccgcagagggtctcgagtcggcagaggtggtgatacaagctgcttaa

SEQ ID NO: 1076 - DNA, 753 bp, Myriococcum thermophilum
atgaaacttcgtaccttgttcggcgccctccttgcggcacagcctacggtgtgggcaaagcaaatctttaaaaaccagggcactttggatggctggggcgataaacaaaccgagcacaagggcgagatcaaagaagttagcgatgtcttctacgacgagcctccggcattagtcatgacacaaacatacgatgaatcttacacgggccggtaccactcggaggtccgcgtttatgatgcgtacaagcacggcgacacgcgcttttacggctttgccttccgtctccccgcggactggcagtttgaaccagcccaaagttatgatctggcgcaattcatcgccccgttcgaccagtgcgactcgtacatgcccagcaccatgttctgggccgaaggcacaaagctgttcacgcgcctgaaaaccgggagcgtctgcgatcaaaagaccaccaaattgccgctgaacgtgacccttaccgccggcgaatggcacaaagtggtcattgaagcgcactggacaagcgactctactgggcacttccggctatcgtatgatggagaacaggttgttgacgtgcaaaacgtccccaccaccgtctctgaagacgtcccgttccagttccgtgtcggcctgtacgccaatggttggcacgacgataacgggatgaagggtacccaaggattccgccaagtgttttacgacaagattgcaatcgcaaccactaaggaagaagcagatccagattcttggtga

SEQ ID NO: 1077 - DNA, 2049 bp, Myriococcum thermophilum
atggctccgtcgatgcttcggttgggcgctactgccctagcttgtgcctcaagcactctcgctggcgagatttaccagctcaaggagtcatataacccgtccaacttctttgacaaattcaacttctttagctctccggaccccaaccagggttttgtccagtacagaagcagggaggatgccgccaatctcggccttatccagagcactgaggatgaggtaaccatgaaggtcgattcgaccaacgtcgccgagggcggccggagtagcgtcaggatcgagagcgtcaacacctacaactcgggcttgttcattgccgacttctcccacttccctaagcctgcatgcggcgcttggcctgcttactggatggtcggccccaactggccgggggatggcgaggtcgacatctacgagggctggaacttgaatactgccaacaaggttgtgcttcacacggacggccctgatgccgtgggttcttgcaccgtcaatccggaggatttcacggcctcgatgcgctacagcaactgctggtatgaggctccggatcagccgggtaacacgggttgcgcagcggaccaggcagatggaacgtttggcagcgctgacggagcagtctgtaagtactgacgtccgagcggatcgtctttgtcctttgttctgtaagaggccgtttccagctaaccttggttatcagacgccactgaatggagcgagaccggcttcagggtctggtcctggacccacgatgccgttccctcggacgtgaagagtggccagcctgacccgagcacatggggcaagccggtgttcgccgccggaggtaacacttgcgacgtcacaaaggccttcaaagatatgcgcatcatcctgaacatcaacttctgcggcgatgctgccggcggtctctggggcgagacctgccaggcgaagaccggggaggctcagtgcgcccagtatgtgcagaataacccgaaggcttacgaacagacctactggaagattcgcggcatcgacgtgtaccagctcgagacggccgagccgagcacgactaccgtctccagcacctcgaccacgaccagcaagtccagcacctcgaccaccgccgcttcttcctctacgaccactaccgacggcaccacgagcgccacatccaccaagtcgactgctcagacctcgactacggcttcggagacctttacttcagatgccaccacggacagcgccaccgagaccgtgacctcgacctccacgggcggagttgctaccgagactgcgaccgagaccgagagcgaatgctccgacgatgtctccgagacggccactgccggccccaccgacactctcacggagggtaccgtcactgccacgcccactggctcgttcactgaagtgacggctaccgcctctaccacggagttcaccacgtccaccatcttctcgaccgtcacgtccaccatcacctcgtgcgagtccaccgtggtcgactgccctggccgcacagttaccagcgtcgtcgttatcagcaccactgtctgccctgtgacagatgtcaagccgaccgagaccggcgtccccgataccagcgctccgggtgctggcaccccgagcacagacgtccccggaaccggtgtcgttcccacttcgagcgtgaccgcccctggcggttcgttcggaaacgagaccaccttccggacgttgaccaccgcctcccgcacaaccaccgtcgtcgtcccgcgcccgggaaataacacgacgacgagcggcggcagcaccactgccactaccaccaccggcggcgtgcccagcttcgtgaccccgccggtcgcctcgagttcggatgccctcgacgagcccgtgcagccgccgcagccgaccaccgacacggaagcgcccgtaccgcccgtcgagatcgtgaccagccctaccccctcgcccacgactagcggatttccgccaatcgtgactgctggcgccggcagggtggctgccaggagcgcggtgctgatgggtgttggtgctgtggtggccttggccaatctttaa

SEQ ID NO: 1078 - DNA, 833 bp, Myriococcum thermophilum
atgaagctctctctcttctccgtcctggctgctgccctcaccgtcgagggtcactgcatcttccagaaggtctccgtcaacggagcggaccagggctccctcaccggcctccgcgctcccaacaacaacaacccggtccaggatgtcagcagcgaggacatgatctgcggccagccggggacgacgtcggacactatcatcgaggtcaaggccggtgacaggatcggtgcctggtaccaacacgtcatcggcggcgcccagttccccggcgaccccgacaacccgattgccccgtcgcacaagggccccgtcatggcctacctcgccaaggttgacaatgccgcaaccgccgccaagaccggccttcagtggtatgtattcccgccgccgccgccgccatttgggggccatcagccgggtggagcaaatcgacactgacgctgcttgtctcgctggtatataggttcaagatcttcgaggatacctttgatcccagcagcaaggtctggggtgtcgacaacctcatcaacaacgacggctgggtgtacttcaacatcccggagtgcgtcgccgacggcaactacctcctccgcgtcgaggtcctcgctctgcactcggcctacacacccggcggggctcagttctaccagtcctgcgcccagatcaacgtgtccggcggcggctccttcacgccgtctcagaccgttagcttcccgggtgcctacgacgccaacgaccccggcatcaccatcaacatctacggcgctgccggcgagcccgacaacaacggccagccgtacaccgcccctggtcccgcgcccatctcctgctga

SEQ ID NO: 1079 - DNA, 1260 bp, Myriococcum thermophilum
atggccgtcgtcatcgtagtggcaatctatttgctcgtatcacagctcttcccttcttattctgcgtctttacgcgctgtacgcgcctccagagccaaaacgccgcttctctcagtcgacttccccgacccgtgcatcgtacaggatgagcatacgggaacgtggtacgcttttgccacgggcggctggtggacgccgacgacgacgacaacaacaacaatgacagtcaagagcaacagcagcaggaacagaagcatcggtagtgctgacggtacgacggctgcggtttacaggaacattcaggctgcgtcggcgcctcatccggagggcccgtggacctatctcgcctcggccgacccgctgccctcggccggagcgtgggcgctctccgggcccgaggcacaggtttgggcgccttcagtcgcccgcctcaacgggtccgcctacgtgctgtactacgccgccctattagccccgggttacgccgcggggaggagggggaacggggcgggcacagacgggaacaaccacaacaataacaacgcctcctcgtcctcctcttcatcgtcatcaccgcgggtgcattgcatcggggcagcgacgtcgacgacggcatcgccgctgggaccgtaccggccacagccggagccgctcatctgcccgacggcagacggcggggccatcgacccggccgccttcacggatccggcgacggggcgccgctacgtcgtctataaggtggacggcaacgcgctcggacacggcggcgagtgcaacaacggcgtgagcccctcccgtcggacgcccctcatgttgcaggagatcgaggaagagaaaggggtgatccgcccggtcggtccggccgttgagatgctcgatcgcgatgctgacgtcgacggcccgcttgttgaggcgcctgacctgctgtattgggatggagacgggggatcggggaagtacgtgctcttctacagcaaccactgctgggacgggccgggttacagcgtcaactacgccgtggccgagggtaacattaccgggccgtacacgcggatggcgggagggaatgacaacagcggcagcggcagcggcacggccttgatcgggaccggggacccgttcagcgttacggcccccggcggtgcggccaccgtaccgggtggggactggctgctgtttcacgcaaactgtccgcaagggaggtgtttgtttggggccgagatggaggtggtggacggtcgtataaccatcatcaagtga

SEQ ID NO: 1080 - DNA, 1099 bp, Myriococcum thermophilum
atgcgtctctcctgggttcttgttggcgcttggatcgccctggctaagtcgcacaaaggccacaatttcaagacgttggtcactttcggtgacagctacaccgacaacggccggttgggctattacatcaaccatggtgggaaggcgcctccgccggggacgatgcacgatgagacgaccacgacggcatctggcggcttatcatgggcccagttcgctgccagggatgccggggcgacgctgatggattacgccgtcggcggtgccgtctgctccaacaaggtcgtttcacggtacttcgacgccatcaaccggaccttcccggccatctttgacgacgaacttccgtccttcgaggccgacgtgtttttcaggtcgctctatcctcatcggacggccgagaacacggtatacgctgtgtggatcggcaccaatgaccttggctggggcgctttcctgtcggactcgcagactcccggcaagaccatcagtgactttgtcagctgcgtcttctccgtattcgatcgtgtctataagacaggcggacggcgcttcgtcatcctcaacgcggctcccctggagctggccccgctgtacgcgccgcccgagaacggcggcacgctcgactcacagttctgggacactaagagcaagtacaacatgactgagtacagccagaagatccgtgagtattcgacgagcgtcaacaccatgctagagtacggcgtccctgtcatggcatccctgaagaatcgctggccaagagcgacggtcgacatcttcgatgtccacagcctgttcagcgacatctataatgagcccaccaagtacttggatgagccgcacaatgtcaatggttactaccaccaatgcgaaccggctggcagcccatgcgtcgaccagcctgggcctctgaatgggtatatgtggtttgatgagctacatccctccaacaagaccagtaagtttttgttttatttgactagtaggtcctgggatagatatggggagactgatttgtcatacaggctccatcatcgcgcagaacttcatcgacgtggtagctggaaagtcgaaatatggaagacgcttccgttaa

SEQ ID NO: 1081 - DNA, 1215 bp, Myriococcum thermophilum
atgcttttcaccaaggctgtttcaggcctcgccctcctcgcgggcctcgttgccgcccacccggggcacgatgctagtaaggaggctgccgagcgccgggcttacctgcaaaacgccaagcggacctcgctcgcccactgcgccgacaagctgagggcccgcggcaccgaggctcgcaacattgcccgtcgcaaggcggtcgttgagaatgcccgtcagaagcgcggcatcaccaagcgcgactttggcgacgtcctggacaccaaccacaacaagaccactgagggttacacccccgagaccgatcctgccaccttgttcgctggctacaactcgtgcctcctgacgcccgaggtcacccagggcccgtactgtaagttcagcaaaagctttggcctgttacatacatggccgtctttctctggctggattcaatctgacaaaggtttctctccctcctcctaagatgtcgctggcgagtacgtccgcgagaacgtggttgaggaccaggccggtctgcccctgctcgtggaataccaggtggtcgacgtggccacgtgtgagccggtgccggaggtgtacctcgagatctggcactgcaacgccacgggcgtgtacggcggcgtggtggccgggggcaacggcgactcgtcggaccagagcaacctcgacaatacgtggctgcgcggcatccagcctaccgacagcgagggcgtagcccagttcgagaccatcttcccgggccactacatcggccggacgacgcacatccacgtcatggtgcacaccaacgcgaccctgcaagccaaccagacgctcggccacgagaactacgccagccacgtcggccaggccttcttcgaccaggcgctgatcgacgaggtggagaagctggagccgtacacgagcaaccagcagccgctgaccaccaacgagggcgacttcatcatggcccaggagtcggccaccgacggtgtcgaccccgtcatggagtacacccttctcggcgacgacctctcggacggcctgttcgcctggctcgcctttggcatcgacaccacccgctccgagcccgtcaacccggccgtctaccttgaggagggcggcggcaggcccaaccccaacgccggcggccccggtggtccgttccctaccggcttcccgaccggtggtttccccgtccccactggcaacgcccgccgcgcccagaactaa

SEQ ID NO: 1082 - DNA, 2530 bp, Myriococcum thermophilum
atgctgctaaaccgccgtctcctcgtagctggcgtggctggcctctgggccgccaccggcgttcaagctgattgctcgtccgatctagtaattgacgacttcacggaatggctaaccggcctcaacaacctcggttctgaaaacggcggtaaggcttaggttccccctttgaaacgcattctcaggtcggtttggaaataacggctgactctggttgtcttagacgatgcgaccatgacagccatcgcagcgtcccccggacgggtcgtcttcattccaaaagacgatgactcgtacttttatgagtcgttcccgtgccagcaggccgccagcgagggatataccgccattgagttccccgtcctggggccggagggcggctccttcgcctttgagctgcagaccacgttcaactgcgaccaagaagggtcttacaacagctcttggactgaagtggccgacctgactggcgagtggcagaccatcactctccccttagaagggtgggacaacgagcccaactacgacggcatcgtcggcttggtctggtctaccttctcggagaacggaattgagtggtctgttggcaacgtcactctcgtatgtggaggcggaggagatggaggaggtgatgatgacgatgaaggggaacagagctcaagtaggcatctccgagccagacctcagtgactcggacggacggaataggtagttaacacagagaacagcggttgacacccagccgaccgcaacaagtgcgactccaaccgaggacccaacttcctcgcccacctctccgccggacacgtgctccaacctgctgattgacgactgggcgtcccagtcccgtctgaccttcctcggctacaacgccctgctgcagacctcgagcgacgacgcgtccatgtcgtcggtcgtcgtcagtgacaacagactcaccctgacgcctggtgaagaatactcgtacttctacagccagttcggctgcctcgacgtcagcgagcagtatggcggcatatctttctccgtcaaggcggagaggagaactagtttctccgtgacattagcgtacgtgacggagtgcggatcccagagagaggagagcatcacaaagtcgacagacgagctggactggacctttgacggcaccgagaagctctactcggtccccttctccgtcttcgaagacgtcgacactagcaagctcaccatgatttactttgacgacttctccggccccgtcacgttcggtcccatgtccttctactgcggctcgaagccgtccgagtacgagctgccgtccgagacgccgacggctcccgacgtcacggtcacgacgacggcggcgccggccccgaccaagacgatggtgatcgacacgtttggcgatccggagaccaacgacctggggcagtggcacggcgccgacgaggagggcatcacgaccgactttggcaacaacgtcatggtcatccgcaccaacgactcggacctggcctggtacacgcagctgaccgaggactgcctggacctcggcgcctacgcgggcggctacctccacatcgcctactcgggcagcaacaagttcagcatcgccctgcagcagcacaacgccgactgcgacccggacatcaagccgtacccggagacgtgggactcgctcgaggcggcgcgctacgccagcgacgaagacatctacatccccatcaaccactttaacgtcgacctctcgcgcgtcatcggcttcgccctgaagggcttctacagcgccgagccgaccgagctgacccggatcgagatcgtcgacgagctgcccgggaactggccggacatcccgcccaagctggcctcgggccggctggtcttttcgtgcacgcggccgaactcgttcgccttcgccatcgacgacggcgacccgtcgctggccgaccgcgtcatggagatcgtccagcaggccgacatccccgtcaccttcttcaccgtcggcctgccgctgctcgacacgagcaacggcctggccgacatctacaagaccatggccgcccgcgggcaccagatcgccatccactcgtacacgcacccgccgctcgagggcctgcccagcgacgcggccatcgactgggagtacgtcaacgacctgggggcggtgcgccaggtcttccaggagtccaacacgcccgtcaccacccggtacttccgcccgcccttcggcaccgagggggcgcgcatgcgccagcggctggccgccaacctggacgacgccgacccttacctggtccagtggagcgtcgacgtcgaggactggctctgggccgagtcggacacgcccgagaagcagctcgacgccttcaagcgcgacgtcgccgccggcggcaacctcgtcgtcatgcactacctctacaactccaccgtcgacctcctgcccgagttcatcgaggtcgcaaaggccacgggcaagcgtctcatgcgtgtcgaccagtgcatggaggaccccaacgcgccgcctttggatgatgaagaggaagagtga

SEQ ID NO: 1083 - DNA, 832 bp, Myriococcum thermophilum
atggctactggtccggcaacgggtacgaggtcaacaacaacaactggggcaaagactcggcctcgagcggcagccagtgcacctgggtcgacagcagcagctccggcggcgtctcctggcacaccacctgggacctggcagggcggcgagaacaatgtcaagagcttcgccaactgcggcctgcaggtgccccagggcaggaccatctcgtccatcaacaacctgcagacgtccatctcgtggtcctatagcaacaccaacatccgcgccaacgtcgcctacgacctctttaccgccgccgacccgaaccacgaccacagcagcggtgactacgagctcatgatctggttcgtccttcgtcattccttcctctcctctatccttacctacaacacagcctttactgacccgctctcctcttttgtgttgctgtgaatgatacaggctggcaaagtacggcgacgtctacccgatcggctcgtccgcgggctacgtcaacgtggccggccaggactgggagctgtggacgggatacaacggtgccatgcgggtctacagcttcatcgcgcccagcccgcgcaacagcttcagcgccaacgtcaaggagttcttcaactacctcgagtccgcccagggcttcccagccagcagccaataccttctgagtaaggacacaagacctcgaacaacctcccgtatttgtgtgagagagaatataagaacacgctaacattactgttccctatccttagtcttccaggccggtaccgagcccttcactggcggcgagaccaccttcaccgtcaacaacttctctgcgagcgttgcataa

SEQ ID NO: 1084 - DNA, 2568 bp, Myriococcum thermophilum
atgaaggcatcggtcgcgtggtgcctcgccggcatgattgccgtggccagcggccagaacgagccgtttcagagctatcccgactgcaccaaaccgcccctttccgagatcaaggtgtgcgaccggagtctgtcggatgcggagcgggcgacggcgctcgtggaggccttgacggaggaggagaaactgcagaatctggtgaggtacgttgatctctctctctctctctcctcctctctcttccatccctctcatacacatacctattatataattaataatattactgtatttaatacttatgccatgggttgtttttttaatattagcaagtcactcggagcgccacgaatcggcctgccagcatacaactggtggagcgaggcgttgcacggggtggcctacgccccggggacgcagttccggaatggccccggggacttcaactcgtcgacgtcgttcccgatgccgctgttgatggcagcggcctttgacgacgcgctggtcgaggccatcgggcacgtcatcggcaccgaggcgcgcgccttcggcaacgccggctggtccgggctcgactactggacgcccaacgtcaacccgttccgggaccctcgctggggccgtgggtccgagacacccggcgaggacgtgctccggctcaagcggtacgccgcctccatcatcaacgggctcgagggccgggcgccgtcctcgtctcccttcccgggagaaggaggtggtgaacaacaacaacaacaacaaccgccgaggatcatctcgacgtgcaagcactacgcggccaacgacttcgaggactggggcggacacacgcggcacgacttcgacgccgtcatcggggcgcaggacctggccgagtactacctggcgcccttccagcagtgcgcgcgcgactcccgggtcgggtccatcatgtgcgcctacaacgcggtcaacggggtgccggcgtgcgccaactcgtacctgatggagacggtgctgcgcgagcattggaactggaccgagcacgacaactacatcaccagcgactgcgaggccgtctacgacgtctcggcccaccaccactacgccgagaccaacgccgagggcaccggcctgtgcttcgaggccggcatggacacgagctgcgagtacgagggctcgtccgacatcccgggcgccgtcgccggcggcttcctgacctggccgaccgtcgaccgcgccctgacccgcctgtaccggaacctggtgcgcgtgggctacttcgacgggcccgagtcgccctacgcctcgctgagctgggccgacgtgaaccagcccgagtcgcaggagctggccctgcgtgctgccgtcgagggcatcgtgctgctcaagaacgccgacgacacgctgccgctgcccaccgaggaggacgaggatggcaatgccgtccttgccgggaacgtcgccatgatcggcttctgggccgacgccccccagaagctgtttggcggctacagcggcactcctgcctttgcccactcgcccgtctacgccgccaagcaactgggctggaacgtcacggttgccgacggtcccattctggaaggggatgatgccgaggacacgtggacggggccggcgctcgaggcggccgccgatgccgactacatcgtctactttggcggtctcgacacgtctgctgcgggcgagaccaaggaccggacgacggtgtcctggccggcggcgcagctggcgctgatcaaggagctggcggggctcggcaagcccgtggtggttgtccagatgggcgaccaggtggacgacacgcccctgttcgagctcgagggggtgggcgccatcctgtgggccaactggccgggccaggacggcggcacggccgtggtccgcctgctcgccggcgtcgagagccccgccggccgcctgcccgtgacgcagtacccggccaactacaccgacgccgtgcccctgaccgacatgacgctccgcccgtccgagaccaacccgggccggacctaccgctggtacccgacgcccgtccgccccttcggcttcggcctccactacaccaccttcaaggccgagttcggcccgcaccccttcttccccggcggaaacggcaacgagaccacggcgagcaggatcaaggcccggacgcggcaggcggcggcctcgacgccgatcgaggacctgctgagcgggtgcgaccggacgtaccgggacacgtgcccgctgccgccgctgacggtgcgggtgacgaacgaaggggagcggacgtccgactttgtcgcgctggtcttcgcgtcgggcgagtacgggccggagccgtacccgatcaagacgctggtctcgtacgcgcgggcgcgcgccgtcgagggccggggcggcgacgccaccctctcgctcgactggaccgttggcaacctcgcccgccacgacgagaacggcaacacggtcctgtacccgggcacctacaccctcaccctggacgagcccacccaggcgagcgtgcagttcaccctcgagggcgagcccgtcgtgctcgacgagtggccggcgctccccgagtga

SEQ ID NO: 1085 - DNA, 2398 bp, Myriococcum thermophilum
atgaggttcctcgcctcgacattattccttgcgtcagctgccctggctgccgaccacgggcgatcgagtttggaggatgctgtgtacaagaaccccaaggcctcgatcgaagatcgtgtagccgaccttctctcccggatgacgatcgaggagaaggcatctcagcttctccaaggcgatatccgcaactggatgaacgaggcaaccaacgagctcaaccagacaggcctggaatggagcacgagggttcggggaagtgccttttacgtaggcgtgccagttgcaaacgagtggctgtcaaaacacatcaaggctgcccaggattacatccaggaggagaccgacctcggcatcccagcctttgtgcagaccgagggccttcacggtcttcttgctcgtgagttcccgacatctccctctcctcaaggggatgaccgctattaactgtcttgtatcttcagacaatgccactatttttaactcgcccataggactgggctgctcatggaacccatccctgattgaggagatggcagctgccattgccaaagaggcgcgggccctcggtgtcaaccagctttttgctccagtcgccgacctagcgcgggaactccgccacggccgagtagaggagatgttcagcgaggacggctatctcgccggggagttcgcccatgcctatgtgaaaggcgctcagtcggccggcgtcagtgccatggtcaagcactttgctgcatttggtgtggcggagcagggcttgaacaccggccccgtccacggcggcgaacgagagttgcgcacgatctatctcccgccgtacaagcgcgccatcatcgacgggggcgtctattcgatcatgaccgcctaccacagttacgacggcatccccgccgtgtctgatccgcacctgctcactgacattctccgggatgaatggggttacaagtactttaccatgacggatgccggcgcctcggaccgcctttgcgtggacttcaagatgtgcgcttcgagccccatcgataaggaagccatcgtcaagtacatcctcccgtccggtggcgacgtggagatgggaggcggatcgtactcgttcgagaagattccagagctcgtgaccagcggcacaatcaaggaggagctcgtcgatatcgctgtcgcccgtgtcctgagagccaagtttgagctcggtcttttcgaggacccttttccgggtctccctatcgaagaggcgaataaagtgatccacgcgcccgagcacgtctcccttgccaggaagatagacgaggaatccatcgtcctcctggaaaaccacaacaacgtcctgccgctgagcaagaacgcgtccgtggctgtcattggacccatggcgcacgggtacatgaactacggcgactacgtcatcgtcaattcttcgactcgtgggattacgcccctcgacggtatcaaggcggccagccgaggcaaggtcacgtacgcgaaaggctgtgagcgctggtccaattcgcaggacgggttctctgaggccatcgctgccgctgaggccgcagatgtcgccgtcgtcgtagtcggaacctggtctcgggaccagaacgagctctggcagggcctgaacgccactacgggagagcacgtcgatgtgaatagcctcgacctggtcggcgcccaggaggccctcgtccgcgccatcattgagacgggcaagccgaccgtggtggtcttctcgtctggaaagcccgttacagcgccctggatctcggagcacgccgccgccctcatccagcaattctacccttcggaacagggaggggccgccctcgcttccatcctcttcggcgacgtgaacccgagtggcaggctgagcgttagcttccctcacagcgttggtgacctgccggtttactacgaccattggaactcgggacgcagtacctcgccggatgccggcatcgcttacgagaacgggactcttgtttttgggcatcagtacgtcctgggagacccgaggcctctctatgagttcgggtacgggctgagctactccaagttcgagtatagcgatgtcagcgtcgacaagaccaccgtgggacccgaggacaccgtcacagtcactgttagcgtcaagaatgtgtcgaatcgagacggccaggaagttgtccaagtttacgtcaaggacctggtcgccagcgtcgttgtgccaaacattcgtctgaggggatttcaaaaagtgaaactgagagctggggagagcaaacaagtgagtatcgaggtcaaggtccaggatctgggtgtctgggacgcgaggatgcgatatgttgttgagcccggcgactttctgtttcttgttggtgcgtccagcaatgactttaggggaaatgttaccgttactctgaagtag

SEQ ID NO: 1086 - DNA, 2788 bp, Myriococcum thermophilum
atgttagccacggccatcctactaattgtgagctacggggcggccgaggctgccgcgaaatgggatgcgtctcgctttgcctggtatacgaccgacgcgggagatgacttcaagagcgcgctgcctatcggaaacggaaggctggcggccgccgtgtacgggacgggcactgagaagctggccctgaacgagaactcggtctggagcggaccgtggctggaccgggtcaacccgaactccaaggacgccttccccaggattcgagagatgctgatcgccgggaatattaccggtgctggccaggaggcgctagacaacatggcaggcattcccacctcgccgagggcataccaaccaacggcgaacctgacgatcgactttggccacaactccggaacctcggactacgtccgctggctagacaccttccagggcacggcaggggttaactacacgtacaacgggatcagctacaggtgagcacgcagcctacgacggcttacctaccttaccttaccttgctcggctgtttcagtttgccccgatatctgcatgagccaaccggagccttgggctgacagtgattattttgcatgtcccagccgcgagtacgtcgccagctatccacacggcgtcctggctttccgcctgagcgccgaccaaccgggcaagctcaatgccagcttctccctctcccggagccagtgggttctctcacagagtgctagcgtcgacgacggtgagggatggcacacaatcaccctgagtgctgatagcgggcaggcgtcggaagccattactttttggtccgaggccaggatcgtaaacgcaggtggtgagtacgggacatatccgcacccggtcacctctttaacccttaatactctctctgaccctgttctgtgatatgacagccagctagagctgaccttgccttgcaggcactgttgccacagatggcagtatcatctccgtcgtgggagcggacacggtcgacgtcttctttgacgccgagacgacgtaccggcatcaggacgcagaggcggccgggacagagctgaagcagaaactagacgcagcggtggcggccgggtatgcggcggtacgcgaggccgccatcgaggactttagcgggctgatgggacgtgtgagcctggatctcgggtcgtcgccgccgtcggtaggggagcagccggtgcccatccgcctgaacaacttccggcaaaacccggacgctgacccggagctaatgactctcgtgttcaactttggccggcatctgctggcggcgtcgtcgcgcgacacgggccctcgctcactgccggctaacctacagggtatctggaacgaccggtacgacccgccgtggcagagcaaatacaccatcaacatcaacatccagatgaactactggcccgccctggtaaccaacctggccgagacgcacgagccgctgtttgacctgctgatgggcgccgccatcccgcgcggccgggccgtggcctccgccatgtatggatgcgagcagggcttcgtgctgcaccacaacacggacctctggggcgacgcggcacccgtcgaccgcggcacgccttacacggtttggccgatgggcggggcgtggctggcgatgcacgccatggagcactaccgcttcacgcgcgaccgcgacttcttggccgaggtggcctggccgatcctgcgggaggcggcgcacttctaccattgctacttgttcgagtgggactcgtactggaccaccggcccgtccctctcacccgaacacgagttcatcgtgccccctagcatggctaccgccggcgccgacgagggtctcgacatcagcccggagatggacaaccaactactgtaccagctgttcaccgacgtgaccgaggcctgcgccctcctcggcctcgtctccaactcctcttcctctgacgacgccgagacgtgtactacgacagccaagacctacctaccgcggatccacccgccaaggatacacccgaccacggggcggatccaggagtggcgctcccccgaatacagtgacacggagcccgggcaccggcacttctcaccgttgtggggactgtacccggggcggcagctgacgacaagcacagacctgctcgaggcggctgctgcgctgctggaccaccggattgagagcggatccgggtcgacggggtggtcgcgcgcctgggcggccgcgctgtatgcgcgattgccgggaagggagggcgacgcgtggcggcacgcacagcagctcgtcgccacctacctgctggataacctgtggaactctgacagcggccccggctccgtcttccaaatcgacggtaacttcggcttcgtcgccaccctggccgagatgctgctgcagagccacgagacggttcccgccccgtccttggcgcgcggtccaccggctcaaagcagcggtggtgatggtagcgatgatgtcggcagagggagaggtctgcgagaagagcaagagagagaggaggtatatgtggtgcatctgctgccggcgctaccgggtgacgaggtgccggatgggcaggttgacgggctggtcgccagggggggcttcgtggtgcaggagcttctctggagaggcggcaagtttgcaagggcgagcgtggtgtcgcagacaggcggcatgctcaaactcaaggtgcaggggagagagagcgggttcgccgtagacggtgtaagctatgacgcggagaagggaatcgagacgacagttggcggcgtgtatgagatcactcctttctga

SEQ ID NO: 1087 - DNA, 1077 bp, Myriococcum thermophilum
atgaacagactccggtccatgatgccgtctgccacgcaaacctggacgtttgcgccgttgagccggccttacactcctagtccccaaaggcggaggctagagggtattgtgtttgacgttgacgggactctatggtaagtttttttaaggctgctttggggcgcacatcgaactacttggtcttcccaaggcgagtgttgcggggcatcatatcaaaaggtcttcaacggaaactggtctttgagcggtgggagcgtggtgtggctgctacatacgctctacccatcgagtataatattcgtgctcaacacttgaaataaataactacttggaatgatagatatccgcatgctgaccccttcccgtagcgagccacagacatacatgtttgccgagatgcgctccgtcctcggcattcccaagtccgtcgatatcctcgaacacatctacaacctcccaaccgaggaagagcaacatcgcgcaatggagcagatccgtaacatcgagcggcgcgccatggagcaccaggtggcgcagccggggctaaccgagctcatggcctacctggactctcggggcattcgcaagggaatctgcacgcgcaactttgaaacgccggtccagaatctgctcagcaagtttctctccgggaccgtcttcgcgcccattgtgacgcgggatttccggccacccaaacccgatccggcggggattcttcatattgcccgtagctggggattggtgcggcggagcaccggcgaggccgggatcccctccgatcctgcagcggaggaagagcgtcggtcggctgcggaggagggcactcgcgcccgcagtggggaggccgatcatccaaatctggtacagacccaagtgggagaagaggttgctgacgcaagcgggttgattatggtgggcgacagcattgatgatatcacggcaggccggagagcgggggcaaagacggtgctgctggtgaacgatgtgaatcgccatctggctgaccatgagcatactgatctgacaataacacggctagatgagctgatcgacatccttgaaaatggattgctctga

SEQ ID NO: 1088 - DNA, 903 bp, Myriococcum thermophilum
atgaagtcagctgtgttcgtcgctagtctcctggcctcccttgctgccgcgcagcctcacggccatggccatggccatgcccaccatcaccgcaggagggagcacagccacaacaagcgtggtgtgatcacgacttgggtaaccgagacggtttatgagacggtcaccgcctacgttgatgacaccacgactcaacttatcatgccgagcaccaaggtgaccagcaccacgatctcgactgagactacgcccgagcccagcccaggagtcttcatcccggagcctgagaccagctcgacgagctcgtcgaccacgacgactacgacggtgcaagctccccctacgtccaaggtggtgccgcctccgccgccgccgcctccggagtccccgacacccaagccccccaaaccgagcccgaccaccctcagcgtggtggtaccgcccctgcccacgtcgtcactcgcaccgcccacttatggagacggtgatgacagcgatgatggctatggtgacagcgatgatggctatggcgacggcgacggcgacggcgacggcggcgatgacggatctggtggatccggcggtcaggtcatccgcactggcgagatcacttacttcgctctcggcttgggctcctgtggcttcgacgatagcggcaaggaccacagcgaaaacattgtcgccgtctcctcgtccttgatgggtgcccagtccaacggcaaccccctgtgcggcaaaaccattaccgtcaaggccaacgggaacacggcccaggctgtcgtccacgacaagtgcccgagctgcagcgtcaacgatattgatgcttccgagcatctcttcctcgaccttttcggctcgctcgatattggccggggtgagattgagtggtatttcaacgaataa

SEQ ID NO: 1089 - DNA, 1776 bp, Myriococcum thermophilum
atgcgtctaatccaaatcgccgcaagcgcagcggcgctgctattcacaggttggtcaacacgtactgacagctatggagtgcttggcgcgggcacaagtctccataagctccgtgaggtccagaaaggaggaccagcagtgctaacgatggttcggatgagcaggtgccaatgccgacatcccacagctcccggtgccgcagtcctgcagcggcgtcaccaactcccggttccagtacacaacggcgtcgggctggtcggccttcaagattgccgggggtctgaagcaagtccggaccatcgtatgggacaccgagggcaacatgctggtcgccgagtccggcaggggcatctcggtgcactccttcggcgaagacggatgcatcaacagcactagcatgctcatccaggccaaccagctcaaccacggcttggccctgtcgccggacggcaagaccatgtatgcaagcggtgaaacgggagtctacagctggagctacgacccggtcacccggtccattagcaaccagaagaccctcattaccggcatctccacgggcatccactgtaagccacagttccacatcaccacggctacgtcatagtcgtccctcccacagttgtctcggcagatgtagtggtgcgaaaaccctgcgtgctccgtgacagcaggaggggcactattttaataagcgcgggaacaaccatatgactgactgctactgtttgatacataatagtcacccgtactatcgctgcggtccccgactccgacctgattcttgtccaagtcggtagcaactccaaccttgacatggccacgcaggacccttctgccggcagggcgatcatcaaggttttcgacgccgccgccgcacccgccaacgggtacaactacaacacggacggtgaagtctttgcctacggtctgcgcaacacgatcggtttcgttcccgaccccagcggcgtctactggggtgtcgagaacagcggtgacgtaagttatctcctgtttgatgtctctcggcgatgcggagaaggaagcgaggggagttcgtgggttggtgggtttgcgagcagggccccggctgacagtgtctcaacaggacttcgcccggactgagaacgggcagcgaatcgacatccaccaggacaatccggcagaggagctcaataaccgtaagtccacctcctttgcgcttacttcaatcgtgactgacgtctcccgccccaatcagttggcaaccccctggaccccgagaggcgcaatgtctggtacggctacccgacctgctttaccgtctgggatccctcgccgttcagcggcctcaagactggcgaccagttcgttctttcccccagcgccacattcaacgatgcctcatgtgtcgaaaacggttccgtcccgccgcgcctctcgttccaggctcactccgcacccatctggaacaccttcaacgccgacggaacaaaaatgtacgtttcatttcatggttcatgggacagacagccacctactggcttcaaagttgtcgaaattccgttccagaaactcgacgatgggagctatgagcctgtcgcggcggcggacagccaggacgggtacaccgagattttcggtgcaccgaacccggaaagctgcacggccaatggtctcacaatgagcaactgcctccggctgacagcagctgcctgggacccgagtggccgtggcctctttgttggtagtgacaatagtgctgagggtgagattttcatcctaactccctcggcctag

SEQ ID NO: 1090 - DNA, 1780 bp, Myriococcum thermophilum
atggccaagaaacttttcatcaacgccgcgcttgcggccgccgtgttggccgcccccgtcattgaggagcgccagaactgcgccagtgcttggtaagatagcctcggttctgagcatcccataaccggctgatcatgacattgatcgtgggaaccaattgaatcagggctcaatgcggcggtagtgggtggcagggccctacgtgctgtgcctcgggctcgacctgcgttgcgcagaacgagtggtactctcagtgcattcccgacagccaggtgacgtcgacctcgaccactcaaggcaccaccagcaccaccagcaccatcaccactcccactaccaccactaccccgcccatcacgacctcctggagcagcatccccggtggtgcgacctccacggcgagctactctggcaaccccttctcgggcgttcagctttgggccaacgactattacaggtctgaggtccacaacatcgccattcccagcatgactgggtctctggccgtcaaggcttctgctgttgccgaagtccctagcttccaatggctcgaccggaatgtcaccgtcgacaccttgatggttcaaaccctgtctgagatccgggaagccaacgcggccggcgccaaccctccctatgctggtgagttacatgccaaactgttaccatttgcgccaagacctctttgttattctttcacaggattggttacctgacctagcatgcaaaacgaacagctcaacttgtcgtctatgatctccccgaccgtgactgtgccgcagccgcgtccaatggtgaatgggcgatcgcagatggcggtgcggataattacaggggctatatcaacaggatccgtgagatcctcatcgagtactcagatatccggaccattctggttatcgagcccgactcgatggccaatatggttaccaacatggacgtggccaagtgcagcaacgccgcgtcaacctaccatgagttgaccgtgtacgctctcaagcagctaaacctgccccacgtcgccatgtatctcgatgccggccatgctggctggctcggctggcccgccaatatccagccggccgccgacttgtttgcaggcatttacaatgacgccggcaaaccagctgcagtccgtggtcttgccaccaacgtcgccaattacaacgcctggagcatcgactccgctccggcgtacacgtcgccgaaccccaattacgacgagaagcactatgttgaggccttcagcccgctcctgaattcggccggcttcccggcacgcttcattgtcgacaccggccgcaacggcaagcagcctaccggtatgttgttgcttttctcttcctcctgtctctctctccactccggctggtctcatcattatcgattttgctctccaaccaaaccttgccacccttcttccttaccccagaagtccagcctctcagcccctatcattcgcagtcttttgaatttcctcttgtgacgtcgaagcgccaatactgactatttcacaggccaagaagaatggggccactggtgcaacgtcagggacaccggctttggcgtgcgcccgacgactaacacgggccacgacttggtcgatgcctttgtctggatcaagcccggcggcgagtccgacggcaccagcgacaccagcgccgcccgctacgactaccactgcggcctgagcgatgccttgaagcccgctcctgaggccggccagtggttccaggcctacttcgagcagctgctcgtcaatgccaacccgccgttctaa

SEQ ID NO: 1091 - DNA, 1443 bp, Myriococcum thermophilum
atggtatttccaactcgcgcttcatctctgctcatactcctcggcgctgccagtgtccaggctcagcagcgccaaagtctctgggggcaatgtggtggggaaggctggaccggaccaacactatgcgtggagggggcatactgctatgagcaaaacccatggtaccaccagtgcatccctggaacagggccttcgacaacatcgtcgctcccatctcagccgtcgactacccaatcccaaccttcagctacgctcagcacttccacggtgacatctagccctcctaccagcacaacgtctgctccgggcggtggcaccacttgcccgagcattcccagtggtcttggaacccctgtatctaacgcacttaatgacccttttactttccatggaggtggcaaggtatccacaaaagcggactggacctgccggcaatctgagatcagtgagctcttgcagagatacgagctcggcacgctgccaccaaagccgtcgtccgtaactgccagcttttcgggcagcacgctgagcatcacagtctctgagaacggaaagaccatctcgttttcggttaccatcaacaaccgaccgtctggcagcgggcctcatcctgccatcatcaacttcggtctctttggagggttacccgtcccctcgggcgttgctactataatgttcaacaatgatgagatcgcccagcagcaaggccagtcttctcgcggccagggaaaattctacgatctctatggcagcggtcactctgctggggctttgacagcctgggcgtggggtgtctcgcgcatcatcgatgcattggagctcacccaggcgcaaaccaacattgatcccatccggattggcgtcacgggctgctctagaaatggcaagggcgccatggttgcaggcgctctcgagccacgtatcgccctgaccctccctgaggagtctggagcgggcggctcgggatgctggaggatcgccaactatcaaaagagccagggacagaacgtccaaacctcgacacagattgtgcaggagaacgtctggttttcgccaaacttcaacaattatgttaataacgttgatgctctgcccttcgaccaccacctacttgccggcctcattgccccacgggcgatttatatcatggagaacagcgacatggaatggctcggcaaagtctcaacctacggttgtatgggcattgcccggaagcagtgggaagctctgggtgcacttgaccattttggctactcgcaggttggcggtaactcgcactgcagtttccctagctctcagcaaggaagcgagctcaacgccttcattggcaagttcctgctcaataaccccaatgccggtaacaccaatatattccgctcgaccggaaatccgaacttcaacatcgactcttggagcccttggagcgttcctactctatcgtga

SEQ ID NO: 1092 - DNA, 915 bp, Myriococcum thermophilum
atgtcgcgtatgttgctccaacttctcctcttcctcccatcccttgttcttgggcatggtggcatctggaactattccatcgcaaacgaatggcgtcctgggtaggtaaccagcctcccgcttctctttggttttccccgactatcaacaatcgctgtgaattatttagaatgcgctcagggtgttaaactaactttgacttgttcaaggttcttcccatactaccccgctgagggccagtcatcaatccagcgtcactggattgacttcagccccatcaaggatctgaaagccccttggttggtctgcaacaacccaggcgactacgccgaggaatacgcaactattgatgcgggcaccgaaatcggggcctactacaaaggatggccgcatgatattgggcccatcgttgtgtggatggcgtactgtggctcggaaccagcttcttgttcgtctttcaacggcacgggcaatcactggtttaagattgctgaggctggcttactctccggtacgatccacgagggcgtgtgggcgcaaaaggaaatgatctcgaacaattacacttggaccgtgacaatccccgagcaactcaagagtggtgcatatttgatccggcacgagctcatcgccttgcatgttcctttcgagccagagttttaccctgagtgtgcacacctgtatgttcagggttctggcgacgctcttcctggagaggagtacttggcctccatccctggcgtctggaaggaaggcggtaagaagagcgcttggttgaccctgatacaaagcagaaatgtaatgatactaatgacctgtgataaagagccggagcttcatctcagcgtttacgaggagccgactgcaagtcggaccgaatggacaattcctgggccaccggtgtggaggggatga

SEQ ID NO: 1093 - DNA, 918 bp, Myriococcum thermophilum
atgaggtccatctatctcagactggcggcggcggcggccttgtgctggactggcgcgctcagcgccaaaccggcggtggcgaacgacgacgccgagttggcggccgccctggccagacggcgcattccgagatccaatgacaggaaccgcctcgcgagcagcaatctgtcggcgctgggtgtgcgccaggaggccagccagtgcggccctgaatacgggagatgccccggcgatctctgctgctccgagtacggctggtgcggagactcgatcgaccactgccatccgctcttccgctgccagcccgactacggctattgcggatggcccagggaccctccgcagacgtcgacgacgactccgccagatagcagcaccaccagcagctcgagcacgaccgagccaccgtcgtcgtctacgacctcgagcggctctggcccgactccgaccggcgacttggaggtgacgccggacggcacgtgcggcggcaactacagctgcatcggcaacccggacttcggcccctgctgctcccagttcggctggtgcggatccaccaacgagttctgcggccccggctgccagcccgacttcggtgcctgcatcggcggcggcctcccggcggacccgcccggcaacatcaccaccaccaccacgcccccttcgtccaccaccacgagcaccagcaccaccacttcctccagcagcaccaccacatcgtccgatcccgccgtcacgctgcctcccggtcagacgcccagcacggacggcaggtgcggcggtactcagaactgcctcggatccgagtttggccgctgctgcagccagttcggctggtgcggtgagggcgatacttactgtggctacatcgctggctgtcaacctgatttcgggtactgcgatcccgccccgtcttaa

SEQ ID NO: 1094 - DNA, 727 bp, Myriococcum thermophilum
atgaagttcttcactgctgccctctctctcgccgccgccgcctgcgccgctcccacgagcaccaggagctacacgggcgagttcggcatcatcgccctccggtccgcctcgcccatccacttcgcgacgctcagcgcgaccgggaactcgctgaggttgaacctgccccaggataaggtcgactctcagtgcgtcgacggcgagacccacgtccctgctaccctctacatcgaggacgaagagctgtatctctacggcccggaggacaagccgaagcagatcgtctatctcgaccgcagcggcatgggtaagtactccttttgcctgatgtcgctgattctccctttctcactcttccctgccttcgtaggcttgaggaaggggcggggggggggggctgttgtgaccaatagtggaagcgttcatgtttaggggccatgtcgctgacagatataccgcaggccagggagttatccagtataccaccaagaccgacgatcccctgggcggcaggctggaaaccaagggctggagagtggacgaggtcgggaacctctttttcaaggacaacggcctgctcgcctgtccgctcgaggccgaccagggctacgtcgtccggctcgacgtcggcatctctaacccccatggctacaaggattgcctcggcttcacagctcgcacagtttcccttgaggaacccgtcccgtgctggtacagcagccactga

SEQ ID NO: 1095 - DNA, 2721 bp, Myriococcum thermophilum
atgtgggtgaaaagggcggctattgccctgttcctagcttggcctaccctaacgcgggccgtgcctctcgtctctcatccgggagaaacagccgcgattccatggtgggatctgcagtcttctgcagaggttggcactgacatcgaaggcctttcacaaactgggatcgagacaaagccatggcaccatgtcaagacatcgaggtgtacgctgatgggctgcctggtcgaggccggcgtctacaatgaagacgagctcttttactcggagaccctgcgcgacgttgacgagacgcagttcctggtgccatggatttatcgcaacgagttttctctgcatcccggaccgggcaagcacttcttcctgcagacacacggcatctcttcgcgagccgacatctttctgaacggcaaacaagtagccaattcttcggagcaggcaggttcctacgttggccggatttacgacatcaccaaattagttcacagagagaacgcgttggcgattcaggtgtatccgacaaattactattatgacttggcgcttgggtgggtggattggaacccatggccggctgacaacggcaccggtgtctggcgggacgtggagatcaagcagaccgggccggtcatgctggagccgttgcgggttgtgacgcacttggggccggcactcggagacgaaccagcaaatgtgactctcaaggccaaggcacacaaccttgagaaccacccggtcaccatcacggccaccggccatatcgagctcgacccccactccgatatccgagaagagcgcctccaccaccctattaccaggcaccgaaagtacacgctaccaccccgatccactaccgagatcgccctctccgtaaccatcgccaaaccacagatctggtggccacgccaatggggcgatcaaccgctgtacactgccaccctgaccgtcaccacgcacaacagcatcgcgccgtcagaccgatccacggccaccttcggcctgcgcaccgtcgaggcaaggctggacccgacctacgaagacaccaccttctacgtcaactcgcgccccttccaagtcctgggcgccggctacgctcccaacatcttcctccggtcgccgccacagaccgccgcggccgactacacgaccatgctcgagtacgtgctcgacctgggccacaacacgatccggctcgagggcaaggacgagcacgcggagctgtacgcggcggcggaccggctgggcgtcatggtgctggccgggtgggagtgctgcgacaagtgggaggcgtggagctacaacggcgacctggccgtcgaccccgtgcccgtgtgggacgacgccgaccacgccgtcgcccgcgcctccatggcccacgaggcccgcctgctccagccccacccctgcgtgctcggcttcctcatcggcagcgacttctggcccgacgaccgcgccaccgccggctaccttgacgccctcgaggctgccgactgggctgcccccgtcctcgcctctgcctcgaagcgtggataccccgagcagactggccccggagggctcaagatggatgggccgtatgactgggttccgccggtgtactggtgggacacggagccgtccgaggagaggctcggggcggcattcggattcgggtctgagctgggcgctggtgtgggcacgccagagctcggatcattgcgcagattcttgagtgaggaggacctggaggacctgtggaagaagccgaacaagagcctgttccatatgtcgagggagacgtcccagtttaccacgagggaaatttacaacgccgggctctggaaccggtggggggcccccacgaacctagaggactatctgatgaaggcgcagctgatggactacgaggctacgcgggctcaattcgatgcctacacggccatgtggagcgccgagagaccggctacaggcctgatatactggatgctcaacaatgcctggccgagcctgcactggaatctgtgggattactacatgcgccccgctggtagctactttggggcaaaggccggcagcagggtggagaatgtcgtgtttgactatgttcggaaagccgtctggctggtcaaccggtccctggataagggcggaaagaggaaagtgcaggtggatgtcatggacgctcatggcaaagtcttacacaaggacacgatagtcgacaaaaccgtcccaaacacgagcaagaatatcctgtctctggcgggacctctgggcaacgtcaccgatgtggtgtttttgcggttaactctccatgatgaagaagagccagggcatgcgctaagtcggaacgtgtattggattgcgaaggagctagatgtgctggactgggacggatcagattggtacttcacaccagtcaccagttattcagactacactgcactgaacaacatgacccaagcagacgttgctgttcgcaatgtctggcaccgaactggcgttgacgtgatcctggaaaacaaatccaaggtgccagcattttttgtcggcttgacactggtggatgcacacgggaatgaggtgctgccggtgacatgggatgacaactatgttaccctatggccgggcgagaaattgagactccggggaaggccgctgagttcacatgccaaaccatgggaggtcattgtgaaaggaaagaacgtcgaagaaaagaaagtccgccaccgatcgcatgcatga

SEQ ID NO: 1096 - DNA, 246 bp, Myriococcum thermophilum
atgaagtggtccacgcttgtcccctctgtcctcgttccccttgcctttgccgcttccaaggagcggaggcaggtacccgacaccttctcacagcgagttatcttcacgccgcccgaagactacactgacccgcgtgtgctgtacgcccgcaccgcccagttccaggacggcaccctgctcgccacttgggagaactacagccccgagcctcctccggtctaccttccccatttaccgctctactga

SEQ ID NO: 1097 - DNA, 1296 bp, Myriococcum thermophilum
atggtccttctcctgcgcagtctcacagctaccctcgtcgtcgccgccgtgacggcgacggcagcagcagcagcagcaacagcggccactctcccggcgttaccgctccattcgtccagccgctggatcctggacgccaacaacaagcgggtcaagctccgctgcgtcaactgggccgggcacatggagaccaacatccccgaggggctacagcaccggtccatggacgccatcgccgactggatcgccggccaggggttcaactgcgtccggctcacgtacagcatcgaccacgcgctggacccgaccgtgcccgtgtcgacgtccttcgccaaggcggcctcggcggcgggggtgccggccgacgagatggcggccctgttcgagcgcgtggcggccaacaacccgtggatccgggcgggggagacgacgacgcgggacgtgctggcggcggcggtcgacgggctctacgagcgcggcgtgctgacggtgctggacaaccacgtctcgcgcgcgtcgtggtgctgcagcctgaccgacggcaacggctggtgggacgaggcggcggggtacaacgactggaacagccgcttcttcgacacggccgcctgggtggccgggctcgaggccatggccacctgggcgcgcgaccaccccggggtagcagccatgtcgctgcgcaacgagctgcgcgagttccccctcctgcagaacctcgacccggcccggccggactggtacaccttcgtgggccgggccggcgccgccgtgcacgccgccaacccggacgtgctcgtcatcgtgggcggcgtgcagagctcgaccgacctctcgcacctccgcctcgtggggggcccgctcgacacgagcgcctggcccggcaagcacgtctgggagatgcacgcctacagcttcaccgtcaccttccccgacgtgttcaacagctgcgacgtcgtccgggtcgagtacggcgccctctcgggcttcgtgctcgagcaggacaaaccttatacgggcccgctcttcctcagcgagttcggcgtcggcatggagggcggcgacaaggacggcctgagcgaggaggacgaccgctacctccgctgcctcgtttcgtacatggagaacaacgacgccgactgggccgtctgggccctccaggggagctattatgtgcgagacgcccaggtggaccgtgatgagacttggggtctgctgaaccacgactggaccgactggaggaatccggcatttcccgccatgctgggtaaaatgtggaacatgacacaagagccgtga

SEQ ID NO: 1098 - DNA, 1746 bp, Myriococcum thermophilum
atgttgatcctcgccgcacagttgtctttatttgcagtttttcttgtcatctgccttgcttacttcgctttcctcgtgccgccaagacacccaaccaacatcccggctgttcccttttgggtggctctcatacccttcttcaaagacgtcgaccaatcagacatcttccgcaagtacattgagagaccgctccggacgcatggcgctgttaagctgtttttcggagcgcagtggaatatcctggtgcacaaaccctcctatctcgcgatgatcttcaaagaagaggacatctaccaaaagagcggcaatcaaaaaaagatccctcacagtgtcctcgctcacttcctcggggacaatataatatctagccacggggaggtatggagaaaataccggtccgtggtacagcctgggctgcaaagagactttgacgccagagtaatcgcccgcaacgctgagcgcctctgcggcttattgagagatgctcaattccgcgcgagagacgggggcgtgcccgtccaggagctactgcaacggtactcggtggccaactgttccgaggtagtactgcagatcaagcttactgtaagttgaaaccctaattatacggatggaacatgttgaatgtatggacatacacgttactgacgtattattgtgagaccctgacttctgccagcgcgcctatccaccttttgcagaccgaggtgaagagggagatcttcaagccaatcttcatgaacttccccgttctcgaccgttttccgttcccaagccgaacaagggcccgccgaatcgttgacgggttcaagcatgaacttaggcgtgccctcgtcgaaagccacgcgaaaggcgctgcgcctgtttcctcggcatcttctgatggcctgggccaacggatgctggacgccagggagtctggactgtggaacgagaaacagcttctggacaacctaacagttactttcgtggcgggtcaagaaaacccgcaactctgcatgatatctacattatacctcatggccaaacaccctgtatgcccaattgtttcccttgaagcaatcaagggtatcatatcagcagcagcagcagctaactgttgtttaggaatcccaagctaagctctatactgaggtccagagcaaagggctgctggagagcgcggacccagacccagaagtcttgcaagacatgccgtacctgacttcgctgatatacgagagcctgcggctctttcccccgattggtcagctggtcaatcggaaggcaagcgaggatatcgtactgggcaacaacattttcatacccaaggggacctatctaggctacaattgctactcaaccaacagagaccctgctgtctgggggccaagggctgacgagttcgacccggctcggtggggagactcgacatcagccattcagaaacagtatcggctgcggagagccagggcagagttcatcagtttccacggcggacgccgcgcatgtctgggggagaagtttgccatgctggagatgcgagtcactctcgttgctctcgttcgggagtttcgctggaagcttgatccgtcatgggtcgatagaatgacaccggtgagtatattatcccgacttatctttagatgagaatcctggttttctaaccacggttgataataggccgggcctctctaccctcgtgcgctaaggctcgtatttttcgacaggagaaaggactttggtgaagctacctactctaggtag

SEQ ID NO: 1099 - DNA, 700 bp, Myriococcum thermophilum
atgatgctgttcagagcgaccattgccggattccttctcggctctctcgcccagggctcacctgtgcccactgagcgcaataacattggcggtgtaagtgccttctctcaataccctcatggcgcttatcttagtcgtctctttcctcatggggggagaaggtgggaggtgggaggacaacaagacaggcaacaaaaaaaaaagagaggaaaaggaaacagaaaacgaagtataacagactttgctcacaccacataatgcgttaggtcttgatctgtaacggtcccaatggcaaagggaactgcaaatatgccgtctatgagctcgagaagtgctacaacctgccaccggagttcgcgaaaggagcagccaccttcgcacctgacaacgcgcccttctactgctatccctacatgtgagtgtcaagtccccgatgcagcgccagtccctgcagaatttatacatgacaatccgtgctgcttctggtcgtgagctggaccgatgctgaccatggtcgatttgatacgacgaatatagcatggaatgcggcggtatctgcatgtcgcccacgggctgcaccatgggagccgtctcgtccgactacgagcacaagtacaacttgactgaagtcgggtggaacaagtacatcacgtcgtttgagtgccacctcaacaagactagcgatgcctactcgcaatga

SEQ ID NO: 1100 - DNA, 2148 bp, Myriococcum thermophilum
atgtggcctgccggattgattcttgctcttgccggtctggcggcgggcgagtcccttaaaaaccttgacaccagcctgaccatactgaccaagaatgatctccagggtgcgtattgtatattacatttgccctcacttaccatgctaactccttccaaggaccttccagccctgacgcggataccgccgtgatcctaaccgacgcccacccatatcggcatgtctctgacgtgtgcaacaagctgggcgagcagttgtggcgtccagggagggacacgggggaaaagaacgaaactggcgccccggtcgtaccatttgcggagtacctggcgtatgagagcgcggctgatgcgtcatccaaggtctgggtcaatggctctgatttcgcagccgtagacctctccggccgccgcctgtccgtggactcggtctcgcacttgaggctcccgggtttgtgcacaaatacggcgccattttcgaatccgagcacccaggatacgagtcccaggtggcagatcagcctggaggtcaacaaccagacccttaccgggtaagttgggggacagcaggcgtagtcaagtacgaggcctaacaacgctgctctgcaggttccgcgaccgtctcgctttccgcttcctcggaatccgctatgcgccgcagccgcagcgattcgcctattctaccttgttccaggggtccggcgaggaagtgtctgcgctttcgtatggcccgcagtgtgcccagtcgggcggcggcagcgaggactgtttgttcctgaacatctggaccccctaccttcccaatcccaacactgcgccccagaaggacaagaagctccgtccggtcggcgtgtggattcacggaggcggcttcgtcggtggcaccgccaatgatcccacttttgatggcgccaatatcgtttccagaggtgacatggtactggtggccatcaattatcgggtcttggctttcgggttcctggccctcaaggacggaaagtcgaacgggaattacggcctggccgaccagatcacggccctggactgggtgcgcaacaacatccaccacttcggcggagacaaggaccgtattaccatctttggtcagtcggcgggtgccggttcggtgcgggcgctgatggcttcccccgaggccgctggcaagttctcgggggctatcatgttgtccaacctcggcggtatcagctacgggaattcgttctcggagtactacaccattgacgaagagatcgaaatctccgctaagtccatcctcgctgcgaccaactgcaccaatgcggcatctcaagttgattgcctccgctcggtcccggcatcaaagctggccgcgtttgacgaagcccgctacatcgtcatcgatggcacctatctcaagacccgctccctgccagtgaccgggccccggctccccatcaggctgatgatgggcatcacccgcgacgacggcgcacccttcatctcgttccccacgacggctaatgaatcaacctacttcgacaggatcggcttgccacgcccctcccgggagctcttcccgattacctcgacaggcaacgccacccttgatctctacacaactgcatctcgggtcgcaaccgacggcatgttacgatgcgtagaccaagcgacggcctcctctctcctcacccacggccgactcgaccacatctactactacgagttcgatcggacctaccaattgcagagctggccgggccgtgacgtgtgtgagccgccccgtacaccctcccacccggccggcgacccgtccaagccgtacttgcgctgccattcgggagagctgtactacgtctttggaaacctgcatcgggagggtctgccgatgcgggacgaaggggacctggagtttgagcagagcgtcttggacagcttcgcgtcgtttatccggacgggagacccgaacccggacgatgcctggttgagggccagaggttactaccagcaacaacgacgacacggccggaagggggatcggtgggaaccgagcaccaagaggggcgggttgaagttgagagtactggattggcccgcttcgaggatgagcgggttccgtgacgagaagcagtgcgaaagtctcggtttgggcctggactattacgaggaataa

SEQ ID NO: 1101 - DNA, 1746 bp, Myriococcum thermophilum
atgattttcacagttatcgtcgcaactgtgctgtcggtcctgttcggcatccgggtttcccacgtcatattgtcacggcgggaagagaaacgacgacgcaatctagaagcagcccggcgaggatgtagtcctgcaccaacaatgcccaagaaaggcattctgggcttcggtcgactactcgagggtctcagggcaacacacaacgacagaggacctcagtatgtgattgaggcgatagacggcgagatgggcaaggacgtgcacacagtggttgtacccatccatgattacgaactcctcgtctctcgtgatccccttaatattcaaactgtgctcgtgacacaggctgccgactgggatgtcagtgaacaccgtactgctagctgggagcccatggttggccacggcatctttacatcgcgtggggagaactggaagcattcgcgcgcactcatccggccacagtttgccatggagcaaatcaatgacttcgacatgtacgagcgtcatgtgcagcaattattcatcgctatcgacaagcatcacggcgggtcgaggagtcaaggatggacggaagcttttgatctacaaccgctgttctacaacctcgccctcgacgttatgactgagatgctctacggctactccgtccactcgcagaatccgtctgaacgtgtagaactgcccgtgatagatggctacgagaccccggaccgggagcacatcggaatacacatggatgctggcaaagcctgggtcgagacgcgtggtgcgatgtggaagtatcgatggctgctaccatcgtcgcagttccgcaggcactgtgctgccattcacaaatacgctgcatggttcgttcaactaagactccagcagggcgaccaatacctggacaatctcctgcaacaaggtggactgcccaaccgtgatcgctacgttcttctccatgagctgtccaaggcaacccaggaccccgtcgagctacgcagccaaacactcaatgtcctgacagctggccgggacacaactgccgcgctcctcggctggattgtctactttcttgctcgccatccctctgttacgaagaagctgcgggaggaggttctccgcctgtttgggccgtatgttccgggacagtcgagtgggatcgaattcaagaaggtccgcgacgcaatgccatacatgaacgctgtcatcaacgagacgctgcgcatggcgccagttgtgccattgaatgatcggatttcgcttcgtgacaccgtgctgccgcgcggtggtggacccaaacgggatcaacccgtgtttgtcccagtggggactcaggtcctgatcccggtttacgccctcgcgcagcggccggatctttgggggcccgatgtcaccatcttcaggcccgaaagatggacggaggatggtgggtgcaaaccagggttcgagtacatccccttcggaggggggccacggcagtgtcttggtcgtaagtagaaatgatgtgcttaccaacatgtatgtagactcacacagtggacagaacaacttgcaagactcaaatctgcttatataatcacccggttgctgcagcggtacgacgacatcgcgaacgcagaggtaccaccggatgccgccgtgaaattccaccacacaatcgaaaacaggagcggtaccggtgtccaggtcaggttgcatgtctcgaactggggtgttactacaggaggcgtggcgcccaatccggctaaccgggaataa

SEQ ID NO: 1102 - DNA, 2030 bp, Myriococcum thermophilum
atgttgggcatcctggcactgagtatagggctggccgcaaccgtcgcgtatctggtgctggaatttccccgggtaagattctccgctgtggtttaatatgcttgaccacctggcctctctctctggagccgtgatggtcaacttcgcggattgaagactgagtatagttgacacacacaaaacagctccaacagagttggcggctgtggtcgcaccgctcacagttgccaccgggacccaagacgatcaagaccgggatccgcaagccatggctctggtttcgggagctgcacaaggagtatggtgacgtggtctttctccagatggggcccacgcctactgtcgtcttgggctccgcgcaagccgcctgggacctgctcgagaagcgcggggcaatctactcgtcccggccgcgcttcatcatgggcggggagctgctctctaatggcctgcgcggcctgatggccccctactcggcattctggcgccgctggcgcaagctgctacacagcggctttatgcagcgccagagcgagtcgtaccgacccatccagagcctcgagtccaaggtgcttatgcacgatctcctgaccaaccccaaggactaccgcacccacctggagcggtatgccgcctccgtcatcgtcaccgtcgtttacggtcgcagggtcgaggacgtccggacggatgctgtagttcgcatgaatgccgaggctatggaacggcttacttcggtaaagtacgcaccttggatgtcattgatggaactggtcgaacgaagttccaccgaaaaacaatttttctattaattcattctccgaacctcgtggacctttttgtcatgctcgtttccatcagtctcatgacctaacaattgcttgatagtattcccggcaggtatgcagtcgagcggtatcccgcgctcaaatacatcccttccctctttgcaccctggaaggcacaggtgttggaacaacggaagaaggacatcaagacatacacgggactcatggacgacgtcaagaagaggatggcagcaggtacactgccggactgctttgccaagcatattctagaggagcaggggaaactcggcatgactgatcttgaggcggcttacacggccggaagtccgttcagtgccggtgttgaaaccgtacgttttctcattgccctgtgtcatctcttccgctctcagtgaaaggctgagtaagcaattaacactgagtagtctgccggttcgctcgccagctttctgctcgcctgtgtcaagttcggcgacaactttgttccgaaagcccaggcggaactcgacagggtcgtgggcagtgacaggctacccacgttcgatgacctactatcgctagagtatgtaagggcagtcatgtccgagactctacgctggcgtcccgtggctgtcttgggcggcaccccgcatgcaagcacagccgacgacgtgtacaagggaatgttcatcccaaagggtagcaccattatcgccccgctgtggagcagtaagttgaccgagcagtgccactttgtgttaaagagcgcgaactaaactagggctctaccttagtccatctaaacgaggccgacttcccagatccacacaacttccaaccagagcgcttcctcggacagcgcggttatcccggtaaccttggccacagcgcgtttggctggggtcgccgcatctgtcctggaatgcatctcgcatcggcatctgttgcgatcaacatcgctcgaatactatgggcattcgatgtcaagccagccaagaatgagaaaggagagatgattgatgtcgacatgtatgtttcccgcaatctggtcgacgtatttggttatggctactaacggcctttctttgtagctttgcattctcagatggattcaactcaaccccgctaccctttgagtgttccatcaccccccgctcggagaagcatgccagggtggtcgaggacgaataccagagggcccttggcgagctgcagcagtactcggctgccgtaaacggggcgtga

SEQ ID NO: 1103 - DNA, 1337 bp, Myriococcum thermophilum
atgcagggacttgtcaagaccgctctcgcggcagctctcgttgcgagtgctgctgcccagcctcatcaccatggccatcgccatctccacgccaagaagcatgaccaccagcagctggggaagcgtgacaccgtggttgtcaccaaagtggtcgagggcccgactgttacggagtatgtcgacaaggccgggaacaagatcgatgctgccgaggcgaagagcgaactcgagaagggcgaatggatcgtcgtgggcgagaccgagcccaccttcagcgcgccgcccctcatcgtctcgacctcgatcgctaaaccccctcacggaggccagttctatgaaaagaccagctcggccgccccgaccacctcctcgtctgtcgctcccaagccttccgcttcgtcctcaccgtcgccaaaaccgaacggaccaaccggcctcaatgcggagtttccgagcggcaaggttccgtgcgacaaggtcccgaccgagtatggtgcgatcgaagttccctggctcgacactaacggctggacgacgctggccaagttcggcaaatggatcaaaggagtcgcaattaacaacatcgagactcctaccgacggcaagtgtgggccgggaatcatgtgctcctatgcttgcccccccggttacgagaagactcaatggcccgaggagcagggtgccactggccagtcggttggcgggttgtggtgcaacgaagatggcttcttggagctcacgcggcccaacgccaccagactctgccagcccggtgccggcggcgtttacgttgtgaacaagctcccgggcgacgcctgcgtctgccgcaccgactaccctggcaacgaggccatggtcatccccctggtcacctcccccggcggaaagtatccactgacgaaccccgactccgcaacatcctattggtgggacgggaagcccactactgcccagtactacgtcaacaacctcgacgtcgaggttgaggaggcttgcacgtggaggagcaagaagttccccaactcggccggcaactgggcgcctgtcaacatcggtgtcggcaagagcctgacgggagagaccttcatttcgattttccctaacaagccgaccagcgacgctgtccttgacttcaacatcaagattgagggcgaagggctctcgggagattgctggctcaaggatggcaaatattctgatggccccaatggttgcacggtacgttttctctcttactcttttgggatatgctattgtactgtataaccgttcgctaactgaagagacaggtcggcatgaagtcgggcggtacggcgaacatcgtgttctacaagtag

SEQ ID NO: 1104 - DNA, 1593 bp, Myriococcum thermophilum
atgaggatctcatccttccaggccgccatcggctcggcctcggttctgctctccgcccaaccaacttccgctagcattcgtcacagacacgcacatgtcgaatttgcgaggaggcatctccacgggcatgggcacattgctgatacccgccaggtggaggaggccgtcaatgccactgaggtcgtcgcgaggaaggctacctgcacgctgccagaccatcccgatcttgtctacatcccgggcaaggataacaatggattcgccatgagccctgatcagtcctgcaacgatggagactactgcccgattgcctgcgtacccggcaaggtgatggcccagtggaagccaggcacgacttacacgtatcccgagtccatggtaggtctcacgcgcttctctcataaatcggggcaggagacaaaggggctgacggggcctgctcttagtacggaggactctattgcaacggtgggaaggcagagaagcccttcgagaaccggccgtactgcgtggatggcactggcacggtgaaggccgtgaacgaagccggcaagatcgtgtcgttttgccagacggtactgccgggtaatgaggccatgatcatacctaccgatgtcacagacacagaaacacttgccgtcccggggccggattattgggacggaactgctgcacagtaggtcgttccggcttcacgtgcgctcccgaatgaacggcactaacttggttgccagctactacgtcaatccgcccgggatatcttccgctgttggctgtgtctggggtgtcatcacgaaagcaatcggcaactggaccccatatgttgccggcgcgaacacaatggccaatggtgaaacctatgtgaagattgcgtggaacccggagtaccttaagacacctttgaccaagatcgtaccgaactacggtctcaagattgagtgccccgatggcggctgcaagggcctgccctgcacgattgacccctccaagggcggaatcaatgccctcgagagccccgtcggcaccagcggcgtcgacgacgccaacttctgcgtcgtgactgtgcccaagggcaagaccgccaacattgtggtctttaatacggacagttcttcaggcggcgacgatgacgatgatgatgagaatgatgacagtgatgacgagaacgacagcgatgatgaacctgagtctgaatcctcacccgaaccattgccctctccttcaaagactcccgagccgcccaagactactcgcgacgctgacgtcccgactacgacggccgagccatcttcgtcgcgccctgagtcttcgttcacgacctccgttttgtcgccgtcaacgacgacgaggtcgttctccacttccacctcggaagccttctatggtggcatgttccacgagcaggaggtgcacggcagcactgtgtcgcacgggacgaccctgaccacggcacccgtcaaggctccaacaacatccgacccagcgaaggatcccgtgttggccacgtcgaagaacgagggcgctgctgccgagggtggctcggccattgccgggctcgtggtcgcgcttgttgccgccgcagcccttctctag

SEQ ID NO: 1105 - DNA, 1474 bp, Myriococcum thermophilum
atgaagcctaccgcgctgctgggagcagccctcgcggctgcggcaattcccgcgggtgtccatgctcattgttcttcagccacgcagcagcctatccctgttgtcgacgacctcacggagcccaaggagctgacggacctgttcgaaacggccaagaaggccatcatcgagcacctccgggtggaagagaaggccgcgcgagcccgcggagagacacctcgttgcactgccgataagctcatttttcgacgcgagtagtacgtatatgatgcctgttcctcgtgctgaaatccacaaacatccaatgttccctctctctttgtttttgagtcatgctcttcgttctctctccaaccaatcaccccagtgttataatactcccacatcatgagtggtacccccacgaagtgagaggctaggtaatatactgaccggccgtctttgttccaccgttatcacccacagcggatctctgtccaaagaagagcggctcgcgtacatcaatgcggtcaagtgcctacagagcaagccgccccggacgccagcgagcgtagcaccgggggcgcggtcgcggtttgacgacttcgtggtgacgcacatccagcagacgctcgacatccactactcgggcatcttccagccgtggcaccgctggttcgtgtaccagtacgagcgggcgctgcgggacgagtgcggctacgaggggtaccagccgtactgggactggcccaagtacgcgagcgcgccgcaggactcgcccctgttcaacggcgacccgtacagcctgggcggcaacggcgagtacgtgccgcacgacgggcccgtcatcgtcccgcccgaaggggtcagcggcggcaacatctccctccccgccggcgagggtggtggctacgtccgaacgggacccttcgccaacatgacggtcaaccttggtcccgtcggcggcctggccgacactgccccgggcccccagggcgggctcggctacaacccacgcgggctcaaacgcgatctgggcggagccatgaacatgcgctacgccaactacaccacggtcctgaagctactcgcccagccggacatcgacgccttccgcaccgtgtcggagggcgtgccctacacgatcgagatcggcccgcacggcgggattcactacacgatcggcggcgacccgggcggcgacctgttcacctcacccggggacccggccttctgggtgcaccacgcgcagatggaccgcgtctgggccgtgtggcaggctctcggcctcgtcttcccggatgtcgacgacccggcccgccgctacaccgacctcggcaagggagaatacgcccaccgcacctggcagaataacccgccatccccctttgccgagctctccgacgtcattgatatgggttatgcggccccttcgaccgccatcggcgaggtcatgtccaccactcagggcgagctgtgctacttttatctctaa

SEQ ID NO: 1106 - DNA, 828 bp, Myriococcum thermophilum
atgaagttcttcagcactctcgccgccgccttcatggctggctctgctctcgccgctccggctgttccggttgactgcgactgcggggatggctatgacattcccgtcccgacccacgtcaccaagaccctgacggccaccgccactggctaccccatcccgatcaacacctcgttgcctggctcccagatccctggccacaacgcccccgttgaccccgatgtcgtcgtggtcgtcaagaccgtcgtcgccaccgccgtcgacgtcgaggccaaggtcaaggctcacctcaagctgatcagtgagtggcatcttcccgatttgaaaaacgggaaagtccgatactgactactttcaacagccgacctctgcgccgatgtcaatgccaacatcgatgcccaggccctcctcaaggtcatcattgatctcaaggctgacatcaatgtcctcgtcggcctccttcccgagttgaagggtctccttgtccacgccgatgctcttgttgccgccgatgtcaagctcatcctcgacctcctcgtccgcgttgaggctctcgtcgctgaggtccaggccgtcctgggccttgtcgccaagctcaaggctgaggttctcgctgttgtcggtgttgagctgcgcgctgtcctcgacctcgttgtcggcctcgttggcggcattgtcgccttcgccaccgacctcgttgccaagatcggcgccattgttgacctcaaggtcctcgttggcgagatcacctccgtctgcgccaagctcaacgcccacgttggcgtcattgtcaagatccttggcctcgttctcaagctcatcctctaa

SEQ ID NO: 1107 - DNA, 1376 bp, Myriococcum thermophilum
atgaggctcaccaggtgtgcgccggcgctgttggcggccgtgtcggcaagagcgctctccatccctgcgcccggaaatctcgccattaccaaggatctggctcacgacacgaagaaggacatggactcgttcacggtgctcacatggagcgagctcgatgctattatgtcgggcgattccgataccggcaagaacagcggaagtcatggtgactcggacaatgacagggtcgggcttctcgacgggccagcagcgacgccctgcgagaatcccaaggtccgggtggagtgggacaggctgaaagaatcgaagaaggaagagtttctcaaggcggttaggtgcttgatgaacaagaaggagccgttcgacggcgtacccgagttgccgagcatctggcacacgttggcatgggtgcacaacgagggcaaggctctgattcacggtaccgaccagttcctaccttggcatcgctactacatctacatgctcgagaccctcctcaaggatcaatgctcctacgggggccccattccctggtggtacgagcccgattacgctggcgacctggccgatgccagcctgttttcgcccgagtacttcggcacgctgcacccgaaaataaacggaagaactacatgcgtcaccgatggggtaagtaaacctacctaacctaccttattttcgtgtaactacttggaatctgccaaattaattcggtatcgcgctaaacaaatgtcttgaaaagtggtttgccaacaccacggtcattgttggcacctctaagacttgcctctcacggggtgaggacaaagcatacagcaatctagtgacgacgaactacgaggagaggtgccacggtgacaagaacaccagctacgagagccaccgctcttgcgtcgagggcacgatccacgccgccacgcacaatgccattggcggcgccatggcaagcctcagcgcctcgccacacgaccctattttcttcctccatcacggttacgttgactggcagtgggcacgctggcagaacgttgactccgaccgcaagagaacgagtaagttttggcttcccgcttcgcaccgaagcctttggatcagtaaaagggagaatatggaagacaaaagaggtggaccgaaaggaagggaggaagcgtgtatacataccagtgtacgaaggggaccatcctggctaacgctttctgttctaaacagtttccgggtgcgccgtcccgcgtgacgaactcacccgagtttgcaacgagtatctcaccctagatacggtacttaaggggtatggcgtgatacctgacatgaaggtcagggacgtgctcgacaccaaaaaccagatcatgtgttatacctatgacaaggcttga

SEQ ID NO: 1108 - DNA, 1793 bp, Myriococcum thermophilum
atggcatcccccttgttcatcctcttcgccaccaccataggttatgtcctcttccgactcagcaaggtcggacgaagacccaaaggaataccccctgggccccctacggtgcccatccttgggaacttgcacttgatgccaaaagatgaccctcccacccagttcaagaaatgggctgatgagtacggcccgatttactcattgatcttgggtaccaacgtgaccatcgttctctcgtccgatgttgtggttaaagagctgttggacaagaggagcagcatctactcgtcacgacctgagtcgtacctcagctcgttgtcgagcgatttccgccgcatggttctcatggttcgtgcccactctgtccgaagaggatgctttccagaatcccgtcatgagccattcttcctctctgtccgaattgaggactgaccgatcggacggggagcaggagtacggaagtcaatggcgccggattcgcaagttcttccacgccttcctgcagctaaagtcggtcaaggcgtacgtgccctacatcgagcttgagagcacgtcggttatggtcgatctcttggacaaaccgcagattatttttgagcacgtccgacgctattcgacctcgatagcctcccagctggtatacggattccggatgcccaaggtcgatgatcccaggctcctccatgtgtacgaaatcatggagggtttcagcgagattaccggcccgggagctgcagcactgctcgacatctttcccatcctgcgttatctgccgccggccctccagccgctccgtggctttgccatctacctccggaagatctccatcgatcttgccattaagctctggctggaagtcaagcagcaaatgcaggacaaaactgcgaaggtgagacaaaacccctttttgtgttcatctccgtgtgcgatgactttaactgattctttcgcctttttctttttcatttcagccctgtttctgcgtcggtcttgccgatgcccaggccaaggagggccttgacgacctggacctcggatttgcagcaagcacagggttggaagccgccgctgacacgacggcgaacagcctgagcggcctcgtcctggccttggtcatccatcgcgacgttcaaaagaaagcgcaggaggcgattgaccgggcgtgcggtgataggctcccaactattgccgacatggagaaccccgatgcgcaatacatcaaggcttgcgtgaaggaagttttgcggtggttccccacggcacctctgggcgtgcctcatgccgtcacccaggacgacgagtacatgggctaccggatcccgaagggcgccaccgtcgtcatcaacgcctggggcatccacatggatgagaagagatacaagaacccgcgcgtgtttgacccggaccggtacatggacgacaccacgacgtcgagcgagtcggcaatgggaccggatccgacgaagcgggaccatttcagcttcggagccggccgtcgcatctgtgagggtatgcacttggtcgatcgaaccatgtttctcttcatctcccgtctcgtgtgggcctttgacctgttgccagccaaggatgccaaggggaacgatgtcatcccggatcagaacgatttgctcggtaactttttgaggcgcccgaggccgttcccgctcgaggtcaaaccgcggagcgaggcacgtgccgctgcgctgcgtcaggcatggaaggaagcccaggaactcctcgacaaagatcagcagtggaaggtcattcccgaaggaatgccgtttaccttgtga

SEQ ID NO: 1109 - DNA, 30 bp, Myriococcum thermophilum; identical to SEQ ID NO: 258
  misc_feature (1)..(30): n is a, c, g, or t

SEQ ID NO: 1110 - DNA, 30 bp, Myriococcum thermophilum; identical to SEQ ID NO: 258
  misc_feature (1)..(30): n is a, c, g, or t

SEQ ID NO: 1111 - DNA, 1649 bp, Myriococcum thermophilum; identical to SEQ ID NO: 992

SEQ ID NO: 1112 - DNA, 1614 bp, Myriococcum thermophilum; identical to SEQ ID NO: 932

SEQ ID NO: 1113 - DNA, 2445 bp, Myriococcum thermophilum; identical to SEQ ID NO: 893
  misc_feature (1813)..(2109): n is a, c, g, or t

SEQ ID NO: 1114 - DNA, 30 bp, Myriococcum thermophilum; identical to SEQ ID NO: 258
  misc_feature (1)..(30): n is a, c, g, or t

SEQ ID NO: 1115 - DNA, 30 bp, Myriococcum thermophilum; identical to SEQ ID NO: 258
  misc_feature (1)..(30): n is a, c, g, or t

SEQ ID NO: 1116 - DNA, 2544 bp, Myriococcum thermophilum
atgtccacctgggcggcctcggctgctctgatttcgttgttttcttcacggtttgggctctgcacggctgcgtcctcgtccgacccgagtccaattctcgacaatgggctccaggacgagatccagtgggaccaccgcagcatcatcatcgggggcgaacgcctgttcttgttcgggggggagatgcaccccttccggctgccggttcccgagatgtgggaagacgtcctgcagaaaatcaaggccatgggcttgaggatggtgtcaatctacgtacactggggattccacgcgccaactccggacactgtagacttcagcaccggcccgcgcaacatcacccgcttccttgagatggcccgggacgtgggcttgtacgtgatcgtccggccggggccgtacatcaacggagagttgaacgccggcgggctggcgctgtgggcgacgacgggcgagcacgggtcgttgcggctgaacgactcggcgttcacggaggcgtggacgccctatcaggacggaatagcccaggttacgcggccgttccagctcacagaggaggggacggtcatcatgtaccagatcgagaacgagtacgggaaccaatggctggacccggaagccaaagtgcccaaccccgaagctatctcgtacatggaggcgttggaggacaatgcgaggaggaacggcatcgtcgtgcccctcatccacaactcgccgaatctgaactcgcccgtgtggtcaaaggactacgacacggtcggtgccggcggcaatgtggacatctacggggtagacaactacgtgagtacaatgacgtgattatactccccgcggtcctcagaaaggaaataaagtcaaagaataaacccagctaacaacaggaaccttctcaccttcccgcagccgcaatgttggtcctgtgtcctggaggaatgcggtaacgtaacaccatgggcggtccgcgactactttggccacttcgagaaagtctctcccacgcaaccgtcccttatgcccgagttccagggaggcgccatgaacccgtgggccgggccggcgggaggctgcaaggagcgcaccggggcggactttgtcaacttctactaccgcgacaacattgggcagaaggtcagcatcctcaacctctacatgatttacggcggcaccaactggggctggctggcggcgccgttcatcgggagcagctacgactacggggctgccatctctgaggaccggagcatcgacgacaagtattacgagatcaagagcctcggcttgttcaccagagccgccaacgagctggcctcgactgatcgagtggggacggggctcgagtacacgaataacagcaacctgttcacggccgagctccggaacccggagaccggcgcggggttctatgtcatccggcatgacgacaccgcctcggattcggaggagtggttcgttctgcgggtcaataccagcattggcgagttcttcgtgcccaaggtgtcgagcgctgttgtgctgagcggacacgaggccaagatcctggtagccgacttccattttggcaaccatacactgtactactcgactgccgaggtactcacgtattccatcatcgacggcgaaaggacagtgttggtcctgtggacgcccacgggccggtcgggcgagttcttcctcaagggcgccaaggaagggaaaatctcctcgggtccgtcggtaacactggacgctcaggaagagggcataatcgtcgcgtggtacgagcaaaaggaggagaggaccattctcgagttcgacaacggggtgacggtagtgcttgtagacagggcaactgcctataaaacctgggttccggcgctcaccaaagatcctaaggttcccgtggaccagactggtaagtatctgggggtcgaagaggattggttgccccagaaatcagaaatcagaaataataattaatcatgaggcgctaacattcacgaactttgttagtcattgttatcggcccctatctggtccggtccgccagcctgaccgacgacaccatctccatccagggcgacgtcaagacggctacgccaatcgaggtcttcacctcctcccgcatccagagcatccgctggaacggccgcgacatgcagacgaccccgtctaactattctactctcacaaccaccataccggcacccaagcccgttcaaaacccggtcgggattggcacctggagagtgcacgacgccctcccggagcgcttcctcaactacaccgacaccgggccggcgtgggtcctggcgaaccgaaccacaaccccgaacccggtcgccggcccggacacggccacccggccattcctcttcgcagacgagtacggcttccacacgggcatccgcctgtggcgcggccacttcttcgtacctccttccaacaccaccaccaccagtacctcgtcctcttcaacagctaatagcagcgaagacgagccccgcccgacgggcgtgttcctcaacgtgcagggcggcacggcgcacgggtggtcggcgtacctga

SEQ ID NO: 1117 - DNA, 815 bp, Myriococcum thermophilum
atgcggctcacgggcggcttcttctccgccgtgacggccatcgcggcatggctggcggcccctgcggttgttgcttcaccagcagtgagctaccacaacacgctcatcgagcagcgtgccgacccgcacatcaacaagcacacggacgggtggtactactttacggcgacggtacccgagtatgaccgcatcgtcctacggcgggcgcagtcgatccaggcgttgcaggatgcggccgaaacgaccatctggcggcgcaaaccgtacggggttggcagcggccaggtttgggcgcccgagctacactatatcgacggcaagtggtacatctacgtggcgctgggcgtggccaacgagtggcgtatccgagcggccgtgctggagggcacgggcgacaacccgctgacggcgagctgggtggaaaaagggctgatcaggaccaactgggacaccttctcactggacgcatccacctttgtggccaacggcacccgctacctgatctgggcgcagcaggagccgtctcggccggacgagaactcgagcattatgattgcgcctctcgagaacccgtggacgatccgcggcacggccgttgccatctcccggcctaccctggcatgggagaggatcgggtacaaggtcaacgagggcccgtacgtgatccaacgcaatggcaagatcttcctgacctactcggccagcgcgaccgacgccaactactgcatgggcctgctgacggcggaggagggatcggacctgttggacccggcctcgtggagcaagtcacaggagcccatcctcaccagcaatga

SEQ ID NO: 1118 - DNA, 1829 bp, Myriococcum thermophilum
atggtcttcctcttcttgcccttcttcattttctcagtcttcccatgaggtatgctcagacaaggaggtggcggtggatgctaaacaatatctgcaccaacagattccgtacacgtacggatacacgcccagcgagttgaccagcaaggaggttgttcaggcaggcatttcccggacgctcgcgggcatctttgagagcaagtttgttccttggaagctgcacaagcccgggtccaagtgggagcccgatctgtccgagagtcagcagtggatcgagacgctggagatcgtccagacgggcaaggataagcccagtgccttcaagcctcttgccggccaggtggacgagtcgtacaatctgacggtgagtgccgagggcgaagccaagctcacggccgtctcgtccatcggtgtgctccgcggcctcgagaccttctcgcagctcttctaccagcactcggccggcacgttctggtacacgccgttcgcgcccgtgtcggtgcaggatgcgcccaagttcccccaccgcggcgtcttgatcgacacggcgcgcaacttcctccccgttcccgacatcctgcgcaccatcgacgccctggcctggagcaagctgaaccggctgcacgtccacgtgaccgactcccagtcgtggccgctcgtgatcccttctctgcccgaggtctcggagaagggcgcctaccacccgagccagacgtattcgcccgaggacattgagaggatccagaagtatggtgccgagcggggcgtcgaggtgtacttcgagatcgacatgccgggccacatcggagtggtgtcgctgtcgcacccggagctgatcgtggcctacaacctgcagccgtaccagtggtggtgccaggagccgccgtgcggcgccttcaagctcaacaacacggcggtcgatgagttcctggagaagctgttcgacgacctgctcccgcgggtggagccgtactcggcctacttccacctgggtggcgacgagctcaaccggaacgactcgatgctggacgagggcgtccggtccaacgacaccgaggtgctgcggccgctgctgcaaaagttcatcgacgcccagcacgggcgcgtccgcgcggccggcctgaccccgatcacctgggaagagatcccgctcgagtgggaaatcgagctggccaaggacacgctcgtgcaggcgtggctgggcggcgactcggtcaagacgctgaccagcaagggtttcccagtgattgacagcaactataacttctgggtaagtaattcttaaccccttatcttcatctctcgaaactcaagccaagaaaacactgcttgcaaaccttcacttcctcccctccccgcaactacttctcctactctcttgggctaacattcaatagtacttggattgcggccgaggtcagtggctctcgtgggggaacggggaggcgttcgcccagggctatccgttcaacgactggtgcggtccgaccaagtcatggcagctggtctaccagcacgacccgacggccgggctgacggccgaggaggccaagctggtgctcggcggcgaggtggcgctctgggccgagaccatcgacgcagtcaacctggacacgatcgcctggccgcgcgccagcgtcgccggcgaggtcctctggtccggccggatcgacccagccacgggccagaaccggagcgccgtcgacgccgccccgcggctcaacgagttccgcgagaggctcgtcgccaagggagtccgggcctcgcccatccagatgaccttctgcactcaaggaaaggcggaggagtgcgagttcattgttgcttga

SEQ ID NO: 1119 - DNA, 884 bp, Myriococcum thermophilum; identical to SEQ ID NO: 1072

SEQ ID NO: 1120 - DNA, 1817 bp, Myriococcum thermophilum; identical to SEQ ID NO: 937

SEQ ID NO: 1121 - DNA, 3029 bp, Myriococcum thermophilum; identical to SEQ ID NO: 966

SEQ ID NO: 1122 - DNA, 1255 bp, Myriococcum thermophilum; identical to SEQ ID NO: 1028

SEQ ID NO: 1123 - DNA, 929 bp, Myriococcum thermophilum
atgcagccgtctctgctcttgttcctctcgtccctcgtggcggcgagccccctgactgcgctcgacaagcggcagcaggccacgctgtgcgaacagtatggctactggtccggcaacgggtacgaggtcaacaacaacaactggggcaaagactcggcctcgagcggcagccagtgcacctgggtcgacagcagcagctccggcggcgtctcctggcacaccacctgggacctggcagggcggcgagaacaatgtcaagagcttcgccaactgcggcctgcaggtgccccagggcaggaccatctcgtccatcaacaacctgcagacgtccatctcgtggtcctatagcaacaccaacatccgcgccaacgtcgcctacgacctctttaccgccgccgacccgaaccacgaccacagcagcggtgactacgagctcatgatctggttcgtccttcgtcattccttcctctcctctatccttacctacaacacagcctttactgacccgctctcctcttttgtgttgctgtgaatgatacaggctggcaaagtacggcgacgtctacccgatcggctcgtccgcgggctacgtcaacgtggccggccaggactgggagctgtggacgggatacaacggtgccatgcgggtctacagcttcatcgcgcccagcccgcgcaacagcttcagcgccaacgtcaaggagttcttcaactacctcgagtccgcccagggcttcccagccagcagccaataccttctgagtaaggacacaagacctcgaacaacctcccgtatttgtgtgagagagaatataagaacacgctaacattactgttccctatccttagtcttccaggccggtaccgagcccttcactggcggcgagaccaccttcaccgtcaacaacttctctgcgagcgttgcataa

SEQ ID NO: 1124 - DNA, 3143 bp, Myriococcum thermophilum; identical to SEQ ID NO: 1036

SEQ ID NO: 1125 - DNA, 1290 bp, Myriococcum thermophilum
atggccaaagactcaacccgtcgtcgtctcgccgccgttttcactgcggccgccgccctagtcgcggtgacccgaggcgatgatgatctggtggcggtgacggacgccgagtgccaatgctacaagaccaacggcacggcagcgagctacttcaaacaccacctgttctatgactttggctcgctctcgcgctacgtcaacgtcacggaccccatcgacaccttccggggcaataaggaggccccgccgacgagctcgtacttcttgcggcccgagttcgtcgatgtatgggacatccagaactgggacaacacggccctcatggcgctgcacgacccggacatcaacgacgccaccgtcaggatggtcaacagccccaacaacatctacatcgagtacgacgacgacgacgacgacgacgacgacgacgacgacgacagtgaagagcgggaccaccgcccgacacacctgactctgcgcacggtgcggcacgaggccgggttccagtcggcggccgagatcgagtcgctcagcaaagacttccactacctttccatgcggatgcgggcgcgcacgttgggttctcgcggtgccgtgaccgccatgttcacgtaccgcgacccgcccgaaggggaggaggaggtcctatcagcgatgcaggaggccgacctggagatcctcacgcgggaagaagggagggaggggaccccgagatgggtgcagtacacgaaccagccgtcgtggaacgacgacggggacgtgcccgagtccacgcgcaacgtgtcgctcccggcggggaagcggtggaccgactggatcaactaccgcatggactggacgcccgaccggggcagcacgtggtacgtcgacggcgagcaggccgcccacatcgccttccaggccccgcgcgacccgctgcaggtcatcttcaactcgtggagcgacggcggcagctggtccggccgcatgcccaagggcgggcaggcatacttgcagatcaagtggatcgagattgtctacaacaccactcgtgaccattcccgccaccatcatcatcacgaggatgaccgccgtcgccgcagcatcggtagcattaaggccagggaaaatgataatgatgatgatgatgatgatggggaggagaaaggatgccacaaggtttgcagtatcgacgagaccaacaagatcggcacgccggtgctgttgtcgaccggtgccagggcggcggttgctgtttcgacgctgccctggctgtccatcttcctgacagtgtgcctggctatgctgtaa

SEQ ID NO: 1126 - DNA, 30 bp, Myriococcum thermophilum; identical to SEQ ID NO: 258
  misc_feature (1)..(30): n is a, c, g, or t

SEQ ID NO: 1127 - DNA, 1321 bp, Myriococcum thermophilum
atggcggtattgcggatgttctggttgtttctctgcttcttctcgcttaccatggctgacaagccaaagccaaagcgggagctgcgatgcctcatgtattataccgggtagggactcaacccctcacacactatgctcccggcaacagactgaccccttcgtcatcgaaacagtcagcacccggtggcgccctccattgacgagctccgacatgtaacgcacgtcgccgttgcttttatgagccctggcatcttcaacgagcccgggcggacggaatggccattgtttacaaccgtcgatgaagctcgtgccaagttcccggaagagaccaaagttatagtggccattggtggctggggggacacggtcggcttctctgaggctgcgctgaatgatgaaacacggaaaacatttgccgagaatgtggctcgcatggtagaagccacgggtgcggatggcgttgacattgactgggaatatccggggtaagatctgcgtcggtccacagaatgctcgccgtgtactaactcgcggcgacagtggtaatggcgaggattataagcaggtccccaacgaagccaaggcttgggagattgctgcctaccctcttctcctcgcagagctgcgcgccgcccttggacctcacaaaatcatctcggccgcagtgcccggtctgaagcgggacatgctcgctttcactcccgagacggtgccccgaatcatgcgctacatagacttcctaaacgtcatgacatatgatctcatgaaccgccgcgacgtggtgaccaagcatcacaccggagtggaactaagcctagaggctgttgatgcctatatctctgccggcgccgagccccagagaattaatttgggatttccattttatgtcaggtacttcaagacggaacacgacgcctgcgcgctcgcctccccgataggctgcccgaccctgctacttgaagacccggagacgggtgaggatctcggccgtagcggggcgtttgcgtggcacgatccggtgcctgaaggaatggcagaatcttttgccagggcgctggaagatggtgtctacgacgaagagggcggtggatactactattgggacgccagggaagatctctggtggacatttgacactcctgactccatcaagcgcaagttccctcgggtactagacaagcggcagttggggggagtctttgcgtggggactcggcgaagacgcacctctgtacgaacacttcgctgcactcaatgacgggctggagagatacttagaaggcaaggaaccagactgtgaggaaaaggaagtttcgacctaa

SEQ ID NO: 1128 - DNA, 1306 bp, Myriococcum thermophilum
atgttctggttgtttctctgcttcttctcgcttaccatggctgacaagccaaagccaaagcgggagctgcgatgcctcatgtattataccgggtagggactcaacccctcacacactatgctcccggcaacagactgaccccttcgtcatcgaaacagtcagcacccggtggcgccctccattgacgagctccgacatgtaacgcacgtcgccgttgcttttatgagccctggcatcttcaacgagcccgggcggacggaatggccattgtttacaaccgtcgatgaagctcgtgccaagttcccggaagagaccaaagttatagtggccattggtggctggggggacacggtcggcttctctgaggctgcgctgaatgatgaaacacggaaaacatttgccgagaatgtggctcgcatggtagaagccacgggtgcggatggcgttgacattgactgggaatatccggggtaagatctgcgtcggtccacagaatgctcgccgtgtactaactcgcggcgacagtggtaatggcgaggattataagcaggtccccaacgaagccaaggcttgggagattgctgcctaccctcttctcctcgcagagctgcgcgccgcccttggacctcacaaaatcatctcggccgcagtgcccggtctgaagcgggacatgctcgctttcactcccgagacggtgccccgaatcatgcgctacatagacttcctaaacgtcatgacatatgatctcatgaaccgccgcgacgtggtgaccaagcatcacaccggagtggaactaagcctagaggctgttgatgcctatatctctgccggcgccgagccccagagaattaatttgggatttccattttatgtcaggtacttcaagacggaacacgacgcctgcgcgctcgcctccccgataggctgcccgaccctgctacttgaagacccggagacgggtgaggatctcggccgtagcggggcgtttgcgtggcacgatccggtgcctgaaggaatggcagaatcttttgccagggcgctggaagatggtgtctacgacgaagagggcggtggatactactattgggacgccagggaagatctctggtggacatttgacactcctgactccatcaagcgcaagttccctcgggtactagacaagcggcagttggggggagtctttgcgtggggactcggcgaagacgcacctctgtacgaacacttcgctgcactcaatgacgggctggagagatacttagaaggcaaggaaccagactgtgaggaaaaggaagtttcgacctaa

SEQ ID NO: 1129 - DNA, 30 bp, Myriococcum thermophilum; identical to SEQ ID NO: 258
  misc_feature (1)..(30): n is a, c, g, or t

SEQ ID NO: 1130 - DNA, 30 bp, Myriococcum thermophilum; identical to SEQ ID NO: 258
  misc_feature (1)..(30): n is a, c, g, or t

SEQ ID NO: 1131 - DNA, 30 bp, Myriococcum thermophilum; identical to SEQ ID NO: 258
  misc_feature (1)..(30): n is a, c, g, or t

SEQ ID NO: 1132 - DNA, 2398 bp, Myriococcum thermophilum; identical to SEQ ID NO: 1085

SEQ ID NO: 1133 - DNA, 30 bp, Myriococcum thermophilum; identical to SEQ ID NO: 258
  misc_feature (1)..(30): n is a, c, g, or t

SEQ ID NO: 1134 - DNA, 1410 bp, Myriococcum thermophilum; identical to SEQ ID NO: 1071

SEQ ID NO: 1135 - DNA, 1218 bp, Myriococcum thermophilum; identical to SEQ ID NO: 974

SEQ ID NO: 1136 - DNA, 30 bp, Myriococcum thermophilum; identical to SEQ ID NO: 258
  misc_feature (1)..(30): n is a, c, g, or t

SEQ ID NO: 1137 - DNA, 30 bp, Myriococcum thermophilum; identical to SEQ ID NO: 258
  misc_feature (1)..(30): n is a, c, g, or t

SEQ ID NO: 1138 - DNA, 1343 bp, Myriococcum thermophilum; identical to SEQ ID NO: 1062

SEQ ID NO: 1139 - DNA, 1839 bp, Myriococcum thermophilum
atggccaaagactcaacccgtcgtcgtctcgccgccgttttcactgcggccgccgccctagtcgcggtgacccgaggcgatgatgatctggtggcggtgacggacgccgagtgccaatgctacaagaccaacggcacggcagcgagctacttcaaacaccacctgttctatgactttggctcgctctcgcgctacgtcaacgtcacggaccccatcgacaccttccggggcaataaggaggccccgccgacgagctcgtacttcttgcggcccgagttcgtcgatgtatgggacatccagaactgggacaacacggccctcatggcgctgcacgacccggacatcaacgacgccaccgtcaggatggtcaacagccccaacaacatctacatcgagtacgacgacgacgacgacgacgacgacgacgacgacgacgacagtgaagagcgggaccaccgcccgacacacctgactctgcgcacggtgcggcacgaggccgggttccagtcggcggccgagatcgagtcgctcagcaaagacttccactacctttccatgcggatgcgggcgcgcacgttgggttctcgcggtgccgtgaccgccatgttcacgtaccgcgacccgcccgaaggggaggaggaggtcctatcagcgatgcaggaggccgacctggagatcctcacgcgggaagaagggagggaggggaccccgagatgggtgcagtacacgaaccagccgtcgtggaacgacgacggggacgtgcccgagtccacgcgcaacgtgtcgctcccggcggggaagcggtggaccgactggatcaactaccgcatggactggacgcccgaccggggcagcacgtggtacgtcgacggcgagcaggccgcccacatcgccttccaggccccgcgcgacccgctgcaggtcatcttcaactcgtggagcgacggcggcagctggtccggccgcatgcccaagggcgggcaggcatacttgcagatcaagtggatcgagattgtctacaacaccactcgtgaccattcccgccaccatcatcatcacgaggatgaccgccgtcgccgcagcatcggtagcattaaggccagggaaaatgataatgatgatgatgatgatgatggggaggagaaaggatgccacaaggtttgcagtatcgacgagaccaacaagatcggcacgccggtgctgttgtcgaccggtgccagggcggcggttgctgtttcgacgctgccctggctgtccatcttcctgacagtgtgcctggctatgctgtaattactgatggaattaaaaaggcgagagtacgaaacacaccgatcaggctggtttgcgagtcggcagctctgttgacaactattaactctatttctttggctgcacctgtggaatgatgaaagtcgtgatgttatgaattgggccgttcttcaccagatgtacgttgggatccgtgtcgatcgtgatgctgtcagcagtccttggaccaggcaagtcgtatttcacgacctttgatactggaaattcgaaaaagatcgcggaaaatagggaggaataatgaatacacgacatgttttggtggcttcaacctccctttctattgtccgttatcaggccagtatccccagtggcttataattatcagagaccggcaggatgaatttcaaatggcatgatattattcgcctactcctctgcatcatctggctagctgtatgattttatttccccatttcggtcaagattcttttgaagactattcagagtcaataatcggtccatgactgactcacactccaagatgcacaggcaacctcatttgagcactag

SEQ ID NO: 1140 - DNA, 1614 bp, Myriococcum thermophilum; identical to SEQ ID NO: 932

SEQ ID NO: 1141 - DNA, 1101 bp, Myriococcum thermophilum; identical to SEQ ID NO: 950

SEQ ID NO: 1142 - DNA, 1293 bp, Myriococcum thermophilum; identical to SEQ ID NO: 1040

SEQ ID NO: 1143 - DNA, 1208 bp, Myriococcum thermophilum
atggcccttcagctcttggcgagcttggccctcctctcagtgccggccgttgcccacggtggcttggccaactacacagtcggtgacacatggtacagagggtgcgtacactacaacgctttgagaagatgcctttcctcgcatcacgatgacgagggaaggcacatcgtccaccaggaggcattcccgccaacaagccaagccgaacctccaatctctttatactgcttccctttccttgtctttctcctcaactgctttacacgaggggattactacgctcactaaaggggacccaagcatcatcagactgtaacaggacactgacacaatgcctactcccctcctagctacgaccctgacctgccgcccgaggtccagctcaaccagacctggatgatccagcggcaatgggcgaccatcgaccccatcttcaccgtgtcggagccgtacctggcgtgcaacaacccgggcacggcgccgccctcgtacattcccatccgcgccggtgagaacatcacggccgtgtactggtactggctgcacgccatcgggcccatgagcgtctggctggcgcggtgcggcgacgccccggacgccgactgccgcgccgtcgacgtcaaccagctcggctggttcaagatctgggaggccggcctgctcgaggggcccaacctggccgagggcctctggtaccagaaggacttccagcgctgggacggctccccgtccctctggcccgtcaccatccccgagaagctcaagagcggcacttacatcatccgccacgagatcctctcgctccacgtcgccctcaagccccagttttacccggagtgcgcccacctgaatatcaccggtggcggagacttactgccgcccgaagaggctctggtgcgcttcccgggagtttacaaagaagatggtgagtaatgcaacggagctgttattgttcgcttcttcgagtgggggaatacgagcatataataaaagtggtagagtgatgtaatgaatgaaacggaggctgacggagaaatagatccttctatcttcattgatgtttactcggaggagaatgcgaaccggacggtaagtgtgttattcttcatcccaaccggagtcaggagattgttgccgaaaaggaaggcgtttctctaacgaatgggcaggattacacggttccgggaggaccaatctgggaagggtaa

SEQ ID NO: 1144 - DNA, 30 bp, Myriococcum thermophilum; identical to SEQ ID NO: 258
  misc_feature (1)..(30): n is a, c, g, or t

SEQ ID NO: 1145 - DNA, 1107 bp, Myriococcum thermophilum; identical to SEQ ID NO: 1023

SEQ ID NO: 1146 - DNA, 30 bp, Myriococcum thermophilum; identical to SEQ ID NO: 258
  misc_feature (1)..(30): n is a, c, g, or t

SEQ ID NO: 1147 - DNA, 929 bp, Myriococcum thermophilum; identical to SEQ ID NO: 1123

SEQ ID NO: 1148 - DNA, 2075 bp, Myriococcum thermophilum
atgatgctcaggtggttgttgatcgggctcggggtcctgacacacaagggttgtgcagacagcaatagcgacaaggaatatgattacatcgtcgtgggcagcggacctggaggaggacctctcgcaagcaacctagcacgggctgggtattccgtcctgctgctcgaggcgggaagcgaccaaagcaacaacacaaattccgagattgtatcactgtttacggttgcttacaccgatcccgctttgcgctgggacttcttcgtcttcaactttgcaaacgagacgcggaacttgcagcacaactatctgacttggcgccgtcccgatggctcattttatgtcggtcgagatccgcctcctaattcgaccctattggggatccattaccctcgcggaggtactctaggggggagttctgccgtcaacgccatgtcgacgatctaccctagcgagagtgattggcaaaacattgttgacctgactggtgacacttcatgggggtatggagagaacacattaacaaatatacgggtcttccgtagtttttttctacccacttttccttgcttgccgctaaccagcgttgcagcccagaacatatgcgagagatttttgagcgcatagagaggaatcattacctcaaacccgacacgccgggtcacggattcaacggctacctcgacacgtttatgagcaatgagacctcttggactggtcaggacgatctcctaacagctctcggagccgtctctgggcaccttggccagaatccgagcgacatcgctatcaatttgctcgcggaccccaacgctctacttccggagcgcgaccagatcgagggcatttttggtggcccactgcacgcaaccccggtgttacgtcgcttcagctcgcgcgactatatcctcgagactgctagggcggtggatcctgatggacagaagcggtatcaactcacggttcagctcgaaacgttggccacgagggtgctcttcactgatctagacgacaaagagaagaaacctcgggccaacggcgtcgagtatcttcaaggccagagtgtgtatagggcggacccccgccacacagattctaatagtagtcagggaaccatcgggcgcgcgtatgctcgcaaagaggtgatcatttccggtggcactttcaactcacctcagctgcttaagctctctggcatcgggcccgcttctgaacttgccaagttcgacattgacgtggtagttgacctgcccggagtcggcacgaacttgcaggataattacgaggtgcctgttgtgggacacgctgcccgggacttccagcaaccagcacctgatccggacgccccgacgtgcacttacggggcgccggatgacccctgtgtggagctctggaagcagggccgagggccctacacggtaggacccgtcttgaatagcatcttccgcaagagcgctcatgctgcctacgacgagcgcgacttttacttggttggcggaaactttgccctacgtgggttctggccgcccactgactcgatacctgtcgatcctcccaacatgtttgggctgtccacggtcaagatcaatccccagagccgattgggtactgttttgctgaagagcgccgaccctcgagacacgcctgagatcaacttccacttgttcgaagaagaagacgctggcacggagctcgacctaagcgccgagcttgacactgtgaagtgggctcgccgcgcatttgcggacgtccctgctccgcttgggcctatcgtccccgtcgaaccgccctgcccgggaacgccagccgcagacggcacttgcgacgacgagtccgaccgggagtggatcaagaatcagatctttggacaccatcccaccagcacatgtgccattggcgccgacagcgacccaatggccgtgttggactccaaatttagagtgcgtggcgtccgaggtcttcgagtcgtcgacgcaagcgcgttcccgcgcgttcccggcccgtttccggttctcccgacatttatgctcagcgagaaggcaaccgagagcgttttggaggacgcggaacaatggtag

SEQ ID NO: 1149 - DNA, 1882 bp, Myriococcum thermophilum
atgaagttgcagcgctatctcggcgctaccctgctttgcctcggggtggcggacgcgaggccgcgtgtgttcgataggaaacaccagatatcttaccatggtcttgaccgcaatgggatcgaagtcttccttggaatccagtacggtcaggatacgagcggcgccaaccgtttcaagccacccaagaagcatgttcctgcccccggaaccgagatcgaagcgatctcgtacggtcccagttgcccccagcagttcgggcaatgggcgccgccagtttcgttgggagacacaactgaaatctcagaggactgtttgagactgaatgtggcgagaccgcggggcacgcgcccgtgggatcggctaccagtcatggtgtacatccatggcggcagcttctgggcggggagcaacaacgatcccaccatcttgccagacgggctcgtcctcgagtcggagcggaatgggtaccccgtcatccacgttgccatgaattatcgtctcggctgtgagtgattttattgtcccgctccacatcccgcccattgcaatgtgtcattgtctgataccactttccttcaatatagtcttcggatttgctcagtcgcgcgcgctcgagtctgagggctccgagaatgctggcctcagggaccagagactcgcaatcgagtgggttagggacaacatcgaggagtttggaggcgatccggataatattaccatcttcggacagtcttcaggaggtatgtcacgctcccattaacaaggagagcctaacactttgggaatggctgttttctgattcctcatatttgcaggcctcgcggttggtttgcacattatggcatacggaggcaccaaaccagtcccatttcagcaaggcatctgccagagccaggcactcgagcccggcatcacgaaaaactttaccatcaacgccatgcaggccgtggtcgactatgtcagctgtaacaagacggatcttcattctcaggagactattgcctgcttaagggcactcgacaccgaaactctcctcaacgccagtctcgctacctatcgcgacgacctcaacgtcggcgacatttggctgcccgtggttgacaacggctttctcccggccgcgccctcgactctgatccgagagggccgcttcgctaacgtgacaactatgatgggttggtgcgagaacgatctcaccttctttactgatccggagatccagactcccgacgacactcgcgacttcatctccagctacgctgtcggcctgacgagcgagaacgtggacaagctcctatctttgtatcccgtgtccgagttcgagggcgcagcaaccgataccctgtcggccgagttcttccgcgcctcccggatcttccgagacatcctcatggcctgcgagccgctgttctacgccgagcacattgcccgtgccggcaacaccgtgtacttgtacgactggaaccagaccatcctcgagcccatcctcgagcagatgacgggccgggcgggatggggccccatccacacggccgaatttgcctacatcttcggcaacctatcgcattacgacctcgacggtttccccttcaacccgaccagggtcgactaccagctggaagcccggggatcccgctcgtggtcggctttcgccgccaccggccagccgggcaacctgcgtggtcatcacaccttcaagggattcgggccggccttcccccgcggagacaacagcacctacatctttgtcgccggcgggccgtcggaaggcctctcggccattgatgggccgcattcggcgccagcggtgcgcgtgcagaagctgagggagcgctgtgcctttatcaattccccagaaatcattgaacaacttggcttttag

SEQ ID NO: 1150 - DNA, 2403 bp, Myriococcum thermophilum
atgcgacaacttttctctctctgcgtcgcagccgtgttggcctcggccattgagcccgcccggttccctcacccgccgaggggccatggccacaaacggctgacatacaacatcacgacggccaaccctggcgagctcacgccctcaagaaggtcggtcacatgggtccagtcggacaaggacggcgacttcatcacaactgatgaggacgggtctctcgttttcgagaacgtcgagtccggagaccggaccaccttcctggcggccgacaatatcccggccgactactgggactaccagatctcccccgacggctcacgcgtcctctgggccgtcaactacaccaagcagtatcgccactcgtactttgccgactacctcgtccaggatgtcgccacgggcgagactgagcccctcgtcgcggactcgacgggtgacatccagtacgccacctggaacccggcctcgtcgtcccagatcgcctttgtgcgcggcaacgacctcttcctctggaacgacggcgacatcggcagaatcacggacgacggcgggccagacctgttccatgcggtgccggactgggtctacgaggaggaaatcttcggcaccaactatgcgctgtggtactcgcccgatggcgagtatatcgccttcctgacttttaacgagacgggcgtgcagaccttcacggtgccctactacatggatggccaggacgtcgccccgtcctacccgcgcgagctcgagctgcggtaccctaaggtgggcaccaagaacccgaccgtggccctgagcctgctggacgtcaagacccagagcgtcacgcccgtaccggtggacagcacctggccggccgacgacctcatcatcggcgagatcgcctgggttacggacgaccacgacaagctcctctaccgcgccttcaaccgggtgcaggaccacgagaaggtcgtcctcgtcgatacagagacaggcgggtcgaccatcacccgggagcgcgacgggtccgacggttggctggacaacaacgcggccgtgacgtacgtcggctcccgcgggaagaaaaaggatgagggggagcggtactacctcgacttatctgacgcgtctgggtggaaccacctgtacctattctcgctggacggacggaccaacgtgacgctcacgtcgggtgagtgggaggttgcgtcgatcctcaaggtcgaccgggagcgggggctggtatactactcgtcgacggagcggcacccaacggaacggcacctctactccgtctcgattgaaacgggggagaagacacccctggtcgacccggacgtaccagccgtctggactgcctccttttcgactggcggcggctactacatcctgacctactccggcccggacgtgccctatcaggagctctactcggtcaagcaggggccgaacaagccgatccgcacgatcgaggccaactcgcgcgtgcacgaggctctgaaggagtaccgcctcccgcatattatctacttcgacctgccccacccgtccggcgtcaacctgagcgccatgctccggctgcccgtgagcctgggcgacgacgtcgaggggaggcggaaccggaagcacaagaagtacccagtcctgctaacaccctacggtggccccggcgcgcaggaagtgagcaaagcattccagccgcttgactggaactcgtacatcgcctcggacccggagctcgagtacgccacgctgacggtggacaaccggggcacgggctaccgcggtcgggcattccgggcagccgttgccgggcggctgggcgagctggaagcgcaagaccaaatctgggctgcccggtggctggcggagcggtaccggtcgtgggtcgacgcggaccgcatcggcatctgggggtggagctacggcgggtacctgacggctaaggtggtcgaggccggcggcggcaaggacgggcggcgggggccgatcgcgttcgggctatccacggcgcccgtggccgactggcggctgtacgacagcatgtacacggagcgctacatgaagacgcccgagctgaacccggacggctacaaccgctcggccgtctggctcctcgacggcttccgctccctgcacggcaccttcctcatccagcacggcaccggcgacgacaacgtgcacttccagaacacggccgccctcggcgaccgcctcatcggcggcggcctcggcccggacaagctcgagctctccttcttcaccgactcggaccactcgatccgctaccacggccagaacgccttcctctacaagcagctgaccacacgcctgtgggaggagaagcggaggggcaagaaggccgagaagcaccagtggagcaagaaggccctcggagagggagcgtggggatggagggcgtga

SEQ ID NO: 1151 - DNA, 2436 bp, Myriococcum thermophilum
atggagctggttcgggcctccgtcgccgttgttgcgcttttcccattcttgtgtggcgttgcaaccgcccacccaaccgcccgctctattgcccgctctacgattctggatagagccgacgacctgcttccggaatatgactacatcattatcggaggcggcaccgccgggttgactgtcgccgacaggcttacagagaatgaaaggcgtaagaatccccatttcctctcgcaacatcgcccgcccgaccgacacaagcgcggcggcaaggtcctgtgttgtaaaaagaaaaagaatcaaaaaggaacaattatatgcttacttgtttgcagattctattcttgtcctcgaaaggggccctttccgtaaggatgcacagaccgacatgttggcttcccggttcataaaaggctaatctggagagacagagaactctagcgcagtgaccactatctctctgggcggccgagcctatactgaccctagcttgaccttcaacatcagctccgttccacaagctgggctgaacaaccggacgattggcgttactggcgggttgattctaggcggtagctccggtgttaacggactacaagtcctccgtgggcagaaagaagactatgaccgctggggattatattttggaccggagtctgagtggagttgggagggtcttctgccatatttcaagaaggtatgtatggccgaccatttcacgatgttcaatcagcctggaaatggcatcctcacaaaatcttctcctatttattacctaggcatggaatttccatccacccaggccggagctggtcagccagttcggcatcaagtacgaccagagctactggggcaacacgtcagacctgcacgcttccttcccaaccactttctggccggtgctcagtatgtttcaagtattccgataccacagcgttctgtgtgcgccggctagttgacaccttcatctagaacttgagatggaagcatttggcgaccttccagggatcgaatatccttccgactccggctccggggagaccggggcgtattggcacccggcgtcagttgaccccgcgactgttctccgttcttttgcccggaccgcgcattgggacgacatcgaggcgacacgccccaattaccacaccctgaccgggcaacgcgtcctgaaggtcgcatttgatggcgatcgagcgaccagcgtcgtgttcgtgccggcggacgcgacagatcagagcaatgctaggtctgtgaaggctaagaaggagatcattttggccgctggcgccattcacacgccccagatcctgcaggcgagcggagtaggaccgaagcaactcttggaggaggcaggcgtgccgcttgtcgtggacgcacctggtgtcggcagcaattttcaagatcagccattcgtggttgctcccaccttcaactgtgagtccagttgaccttgcggccctctggaataacacacacggaaatagtacaacaagcacagagggattgtttggtactaatcaagcattacaactacagttagccattatcccttccacccggacttctacgatctaattctgaatgagacctttattgctgaggctcaggcccagtttgaaaaggaccgaaccggacctctcacaatcgcagccggctattgcggcagctggcttcctctccaagtcattgctccgaactcgtgggaagatatcgctaagcggtacgaatcccaagacccagccgcctacctcccacccgacaccgataagacggtcatcgatgggtacagggcgcagcagaaagcactggcgaaggccatgaagagtaagcaatcggcaacgtacaacttcttcctacggggcggctttcaagaaagttcctgcgtctacctgcacccgaccagccggggtaccgtccgtatcaatcgggatgaccctttcttctcgccacctgaagttgactatcgggcgctgagcaaccctaccgatctggaggtcctgcttgagttcactcctttcacccgcaagtacttcttggagacaaggttgaagacgctcgagcctgtcgagctgtcacccggtgccaacgtcaccgcacccgccgatatcgaggcctggctccgcagcgtcatgatcccgtcctccttccaccccgtcggcacggccgctatgttgccccggcacctcggcggtgtagttgacgagaagcttctagtgtatggggtcaaagggttgagtgttgtcgacgccagcgttatgcccgatttgcccggctcatacacgcagcagacagtgtatgctattgctgaaaaggtaagcttccttgctgtttcgttgaacatatcaatttgtctcctggcttccagacaccctcgattggctcttgcgacgctaacgttaaaggcaggctgcggacctcattaagagcagagcttga

SEQ ID NO: 1152 - DNA, 2258 bp, Myriococcum thermophilum
atgagagggattgcttacctcttgcctgcttttggccagctggccattgccggcagcctcaagcgccacgcctccgatctcctcgacagttatgactttgtcattgcgggcggtggcaccagtggcttgacagtcgcagatcgtctcacagaggcgttcccggagagtttgttgccccggcgctcttcactgcattttgatcgggatggaaaagctaaccaaaagaaacgaatttgttcggcgacagaaaatgtccttgtgatagaatatggagaagtcgaatatgcccgcggcatctttgaccctccaatgattgtctggggaggtaacagcaacacggcaagtacctgggcgctcttttccaccccaagccctgagctcaacaacaattcggccatcgtcatggtcggaaaggtagtcggaggaagcagcgccgtcaacggtcagttcttcgaccgaggctcgcgcttcgactacgacgcctggaacaagctccaggagagcggtcgaggctcggggaagagtggcattgactggagctgggaaggaatttatcctttctttcggaagagtgtgaccttcaccccacctgctcctgaggttgtcgagaaatacaactatacgtgggacctgtccgcgtttgaaaacacgacgccaatccacgccagcttgccgccctttctctggggagaccactttgtcggccgagaagcatggaaagagatgggcatctgggtttccgaggaatgcgccaacgggaataaggagggcctctgttggattccgatttcgcagcaccccgtcacggcaagacgttcgtactccgggattggccattacgctgatgtggtggatagcaggccgaattatcacctcctggtcaaacatcaggttgcacgtgtgctgtatccggagggtgatgcgaagtctggacctccgaccgtggaagtgcgccccctcgatggcagcccctttttcaatatttcggtgaagaacgaagtaattctctcagctggtgtgttcgggacgccgacaatccttcagaggagcggcattggaccggcttcattcttgcgcaaagccgagatcccggtggtgctcgacctacctggtgttggctcgaacttgcacgatcattccggtcctcgggtcgcctggaactgtaagtaatattaattgaccaagactactccccctccccccttctaggggaataagggaaagaggaggttgcaaggacgagtcatctgacccagtcttctcaaagataccaaaccgcttccgttctctcccctcccgtcggacatgttcaacagaacgttcgcctctcaagccgccgcggctttcaaccagactcccgctcaaggcccgtacacgctcgccatgtctaacagcgcgatctgggtgccgctccccaacataacggccaactacacggccatcgtcaaccagatccgcgccctcgccaactcttccgacccctcagcgctccggctgccgcccgcctacgaaggagacgagtctctcgtggcaggttaccgggcccagctccaccagctggccgacttgtatgcgaacccgcgctgcccgagcctcgagagcaccttcgcgacgggcggctctgtcgcggcgatcctgctgcaccccctgagccgcggcacggcccggctcaacctgacggacccgttcgagccgccggtgctggactaccggtcggcgtccaacccggtcgacatggccgtgcacgtcgcgcacacgcgctacctccgccgcatggtgggcacgcgcacgctccgggagctgggcgccgtcgaggtggccccgggccccgccgtcgcctcggacgacgagatcgaggccttcgtgcgccgcgccgccacccagtcgtacatgcacccctgctgcacctccgccatgctgccgcgcgagctgggcggcgtcatcggctcggacctcaaggtccacggcgccgaaggtttgagggtcgtggacatgagcgcgctgccgatgctcccggcggcacatttgagcgcgacggcgtatgccgttggtgagaaggtgagctcttatttttttctttttactttttttcttacctaccatcctcacagaattgaacgctccgtggcgacctatttcttcctctcttcgagggggagggggtagaatgcgtgaaatgtgaccaaggggaatgtgctaatacgatttcacaggccgccgatatcatcatcaaacagtggtctgaggaagacgcctga

SEQ ID NO: 1153 - DNA, 2437 bp, Myriococcum thermophilum
atgaaggtttcagctaggacgatcctggcgttcgcgccttggatcggggccaatgcggccgtcatccggagcatgcccgacggcagtccgctgaccccgtctgcccgggccgtgattgaccttgccggccctgctgcgacttgcgagtggttcacccaacccattgaccacaagaacgagagctctcggacgtgggagcagatctactgcgtcgacccccagtggtggacgccaggggctccggtaaccagcagccccccctttttttttgtttctgttttcattcttctctctcccctttcattccgcacacacttggagagcgccgtccttccgttgtattactgaagccgtttttggatatcctactaggtcgtggtcatgactcccggaggcgagcctatcacttggaacgtcaactcagcgcgcggattctcgtttttgaaaaacaccaccctgccgggcaagtacgctcaggagctcggtgccgccgctgtcgtggttgagcgtgcgtattcattcctacctacctacttaccttatgtcctttgagtgccttttcattcttttgctctttcctcttcactcacctgcccatccaattacctatctgactggtcctggccccttttgctttcctactcgtgtctgtaccagttattgctatgataaaagccaaaaacaaggaaggtggcccgctaagctcctaattgtatgttgtacagatcgttacttcggcggatcctctccgtatgatggctttgacgcgaggacactccaatggctcaccctggagcagtccgccgccgatctggtcaactttgcgcagaatgtcaagttcccgtttgacaaggagcaaaccagcgtggcttccaaagtggtaagttcacatcgacccatgggttgattgattgattgatcacacacacacacacacacactcgtgtctattctctttgaaccgggtgttgtggtgccgtattctcgaggactgactgttttgtttctcttccccctatcttccgcgagtgaacagccttggatatactttggcgccgcgtactccgcaacgctagggagctggatcgagcacctgcacccgggcgtcttccacgcctaccacctcagtagcgccaccgtccaggccaaccaggagaactggtactactatgataccatccgcaagggcatcgacgcccttcgtggcgacaggctgtgcaccaaggccttgcagactgtcgtcgagtttgttgaccgtttcgtgctcgcttcacccgtcaacgagaccgagatggacgcactcaaggagttttttggggctgtcttccccattgaaaacgacgactttgcctagtgggttgcacgctatcataatcttgctgattcatcacaccactaatgtttgttgtggatgtgctgacctcttctcactctctcaccttctcctttccagtgccctcgccacaccgtttaggtactgggaagagcgcggaggataccaacgcgtcctcgacatgtgcgatgacatcgtcagcacgaacaagactgagaagcacgagatcctggggactatcccgtccgcggccgtcgccttctccgcacactttcaagaacactttcgcgacaacagtgagtgtctaggaacctttcaactcttatttattcatcgatgatgaactgcccggctcacatattaatacgccacagcatgcacgtacctggacgtctggggccaaaaggacccgctgtggtgcctggacacgcacgacccgctgaaccccttcatcgaggcgcgcacgctgggcaacccgtggcggacgcgcatctggttcctgtgcaacgagccgctggcgtcgtgggccacgggcgcgccgctcgacgacccctccatcgtctcgcgccgcatcaactcggactactaccaggcccagtgcgagatccacttccccgccgtcggcgacaacaagtacggcagcgccgacggcgtccgcaccccggacatgctcaacgaggtcacgggcggctggacgcgcgagtccaagcgggtcatctggactgtcgggtatgtttagcacacccccccccctcccccctcaccttgcgtatgtgcctgtgtgcgcatgtactaatacctggtgatgatagcgagttcgacccctggcgcgccaccagcatggccagcgagctgcgtcccggcggcccgctcgagtcgtcgggcgacgtgcacgtcttcatcatcaagaacgccatgacggccgacgacgccctcaccgaggccggcttgaccaacctcggcctgcccatcaacccggacgtgctcaaggtgcaggagcagaccatagagatcatcaaggagtgggtcgcccacttcgagcctggagacggtggtgatgatggtggtgatgatgaagaggaggatgggggctcggaggagtaa

SEQ ID NO: 1154 - DNA, 2154 bp, Myriococcum thermophilum
atgggtttcctcgccgccacccttgtatcctgcgcagctctcgcgagcggagtcagcatcccgcgttctcatgccaagcgcgaggtctcccagcttcgtgaagattatgatttcgtggtcgtcggtggtgggacgagcggcctcactgtcgccgaccggttgacagaggcctttccagccagtacgtcgcccgacatgatggcccttctgctctgctcaagcccaagctcactcgcgcagagaatgttcttgtcatcgagtacggagatgtccagtacgctcccggcaccttcgatccgccgacggactggatcacgccccagcctgatgccccgccctcctgggacttcatttccctgcccaacccagacatggcaaacacgactgcgttcgtgcgggcgggccaagtggtgggcggaagcagtgccgtgaacggcatgttcttcgaccgcgcatccaaacatgattatgatacgtggccagcggttggcggctctgagttcgaacagtcgagccataagtgggattgggaggggctttttccttttttccaaaaggtgagttcgcagactttcccggtgttgttcacgaacttcgtctcactcgagacaaataaactagagcgtcacgttcacggaaccgacagccgaaatggtccagaagtaccactacacttgggacttgtccgcctacgggaatggctcaaccccgatccacagcagctattcagtcttccagtggggcgaccaaccgttgctcaaccagacatggcaggagatgggaatcaatccggtgacggaatgtgcgggtggcgataaggagggcatctgctgggttccctcgtcgcagcaccctattacagcaaggaggtcgcatgccgggctcggtcactatgccgacgttctcccgcgggccaactacgacctactcattcgacaccaagctgttagggtagtgtttcctgacgggccaagccacggaccgccgctcgttgagacgcgttccctagccgacgaccagctgttcaacgtaacggtgaaaagcgaggttatcatctcggcgggcgccctacacaccccgactgtccttcaacggagcggtatcggcccggcagccttcctgaacgacgctggaattccggtgacgcttgacctacccggcgtaggggccaacctccaggaccactgcgggcctccggtttcgtggaactacaccgagccatacaccggcttcttcccgctgccctcggagatggtgaacaatgcgaccttcaaagccgatgccatcgctggcttcaacgagacgccggcccgcggtccctacacgctcacggggggaaacagcgccatcttcgtgtcgctaccgcaccttaccaccgactacagcaccatcacggccaagatccgggccatggttgccgaggggaccgcggcgtcttatctcccggccggccagcgcaccatcccggcgatggtggcgggctatgaggcccagctgctcgtgctcgccgacctgctggacaactcggaggcgccgagcctggagacgccgtgggcgacgagcgaggcgccggcagcgtcgtcggccctagccttcctgctgcacccgctcagccgcggcagcgtgcggctcaacctcagcgacccgctcgcccagcccgtgctcgactaccgctccgggtccaacccggccgacatcgacctgcacatcgcccacgtgcgcttcctgcgccgcctgctggacacccccaccatgcaggccaggggcgccctcgagacggcgcccggccgggacgtggccgagagtgacgaggcgctcgccgactacgtgcgctccaacagcatcctctccttcatgcacccttgctgcacggccgccatgctgcccgaggaccgcggtggtgtcgtcgggccggacctcaaggtgcacggggccaaggggctgagggtcgtggacatgagcgtgatgccgctgttgccggggacgcacctgagtgctactgcttatgcggtgggggagaaggtgagttacctatcctatttagtctcggattaattgtcaaaaagatcgtgtgtgcttgtgctgacggatcgggaactgtaataataggctgcggatatcattatccaggagtggagagacaaggagcagtaa

SEQ ID NO: 1155 - DNA, 840 bp, Myriococcum thermophilum
atgttttctctcaagtccctgctctttgccgctgggcttgctgtcctcactgaggctcacatcaagctagtgtcgcccgccccttttaccagccctgatcagagctccagcccgctctcggcagatggtagcgattatccctgccatggtgggagcggttaccaggggaccccgactcagatggcgaagggttcaaagcagcagcttgccttccagggctccgccgtgcatggaggcggctcctgccaggtgtccatcacctacgacgagaaccccaccgctcagagctccttcaaggtcattcactcgattcagggtggctgccctgccagggctcagtcaatcccggactgcagcgagagcaacatcgaggcatgcaatatcaagcccgacgatgccgcgatggacaccccggacaagtacgagttcatgattcccgaggatcttcccagcggtaaggcgaccatcgcttggacgtggctgaacacgatcggcaaccgcgagttctacatggcctgcgccccggttgagatcaccggcgagggtggaagcgagtcggctctggacgcgctgcccgacatggttgttgccaacatcccgtccatcggcggcgactgcgcgaccgagccgggccagtactacgagttccccaaccccggtgcgtcggtcgagacaaacgagggctggaccatgctgggtcccctgacgggtcagtgcggtgctgcctccggctcgggcggctcttcgggctctggtggaagtgccggcagccctaccgctgccgctggtgccgccatgactcctgcagtccgcggccgccgccctacctggcgtgcttaa

SEQ ID NO: 1156 - DNA, 1516 bp, Myriococcum thermophilum
atgatgtccctcgctcgctgggcagcagcggctgcctcattcctcctgctctgccctagtaccctcgccgtccctacgcaaggaaatggcaagccgaaccaggacaccgtcttgccgaggcaagacgacgactggcactgggtagccacgtggacatccatgccgcagctggtcgaaccgaacaacatgcctccggcaccctttgtatgcctctcagctcatctgcccccctgaagcgagtacactggcagaacagcgtgactaaacaaaacaacacagaccggaggcggcgccgtgttcagggacgccacgctgcgccagacgctccatgtgtccatcggagctgagcgcctgcgcctgcagatcagcaacaccttcggcggcagcgacctgcccatcactgcggccaccatcgccttgccccagggcggcagggccggcgtggcgggcatcgattcggccaccgtcaagccgctgacattcaacaacggctcgtcctccatcaccatcccgcagggcgaggtcgcctacacggacccgatcgactttaccgtcgaaccgcaggccaacatcgccgtctcgatctactcccagcagggccagtcgggaagcagcattacgggacaccccggcagccgcacgacgtcgtggatgcagtcgggcaaccaggtcgaagcggccagtctttccggttccaacacgaagcattgtgagtgagacctggctctccatcattatcagcctctttttctttattttatttttcaaagtaaataaagtaaaggatgatgttggttaacattaccaccctccccccccccttcccactttcctaacagggtacttcctctcggccgtggaagcctgggcgccgccgacgacgagcgccttcgtgatcctgggcgacagcatcacggacgggcggggcagcacggacgacggcaacgaccggtggccggacctgctcctggcgcgcatgcaggccgaggggggcaacctgagcgagatcgccgtgaacaaccaggcggcgggcggcaacgcggtgctgtccgggggcctggggccgacgctgctctcgcggtaccggcgcgacgcgctgcaggtggccggggccaagtacgtcatgatcttcgagggcgtcaacgacatcggcggcgggccgaccgacgccgggtcccaggccggcatcggcagcgggctgcaggacgccttcgcgcagatcgtcgccgactgcaaggccgccggcatcaagaccatcggcggcaccatcacgcccttcagcggaaacggccagccgtactcggacccgacccgggagcagacgcgcgtccaggtgaacgattggatcctgaacagcggcacgttcgacgcgaccgttgactttgcctccatcgtggcagacccgggcatctcgagccagctggcgccgcagtatgacgggggtgatcatctgcacccgaacgtggcgggttaccaggcgatggctgatgggttccccttggacatcttcgactga

SEQ ID NO: 1157 - DNA, 1122 bp, Myriococcum thermophilum
atgcgtttcactcccattgccctcgccgcggctgcggtccacggcgtcgtcgctgccccccagcgcgaggttcggccggcgcccggtgagcaggtcttctcctgcggtgcccccgagccagacgcggagcacatcaagatctcgcagcagttcgctgcccaggaggccgagctcctggcctcgggtaacctgaccacccaagctaccatcaacgtcgacctctacttccatgtcgtggccacgtcgactgacctgagcggcggctacattcccgtacgcctgtctttccttattcttcttcccttgggcagaatggagagaaaagaaaatttaaagaaacagaactgacaattttcaacccgagtaacaggacagccagctgagcgctcagttgcaagtgctcaaccaggcgtacgccccgtacgggttccagttcgtgcacaaggggacgacgcggacggtcaacgccaactgggcgtatgacagccggggctacgagatggagatgaagcggtcgctgcggaagggcagctactcggcgctcaacctctacttcctgtacgaaatgggcagcaacctcgggtactgctacttccccgagtcgggcggcgccaattcgggctcgacggtgcacatccgtgacggctgcaccatcctctacagcaccgtccccggcggcagcgccaccaactacaacctcggccacaccgccacccacgagaccggccactggttcggtctctaccacaccttccagggaggctgcaccggcaccggcgacgccgtctccgacaccccggcccaggccagcgccagcagtggctgccccatcggccgtgactcgtgccccagccagccgggtctcgaccccatccacaactacatggactattcgatcgagtcagtaacccccctccttgtctcttgtttaattagcatccaattatcccccccctctccccttctctctactccctttgctccaaaggcatttaacataccacatgttgcgcattgatacgtgtgctaactctcccttccagctcgtgctatgaggagttcactgccgggcagcaggcccgcatgctcagcttctggaacaactaccgcgctggcaaataa

SEQ ID NO: 1158 - DNA, 1132 bp, Myriococcum thermophilum
atggcgttcccgtacaagaaggttctcctgatcggcgctacaagcggcatcggccttgaggcggcgaagcagcttgttgctaagggcgtgaatgtcattgcggtcggccggcggcaagatcgcttggactccttcgtctcctccagcgcaggcgcccctggcaaggcttggggagagcctctcgacatcgctgagattgaccagatcccagcttttgctaagcggtgagtagcatagagatgccttcatactagtccttctcgattttttgtgttctttaattttctcgcagtctctgagcacaatgctgcgcccgaggacccttggctaacttcacggtttctcaataccacagcatcaccgatgcccacccagaccttgactgcgtcttcctgaacgcgggcatccagtacgtgatggactttagcaagccgtggacagtggacatctccaagatccagcgggaaatcacggtcaactacattagcatggttgctttgacccatgcctttgttcccttcttccaggagaaagctgcgaagcaggagaaagtagcttttattttgtatgtcaacgcctgcctttttttttcgttggatgcggcttgagccgctatccttcccctcgaataaccgtatcttgttcaggcttaccggctgactcctctctacagcaccaccacaagcctcatgagtcttccgtacccgatggtgctcaactactcggcgtccaaggcggctttgcacgccttcattctcagtattcgggagcaattcaagctcgccggccaggacattggcaccctcgagctcgtgacgcccctcgtgcaaagtaagtcctccttcttgttcaaatacctaaataaatgaggcacggaagctgacaaatctatccaattttagccgagctacacgacggccagcccggttggggcccggacttcaacccgggcatgccggtggacgtgttcgtcaaggaagccttggctggtttcgaggccggcgaggagacggtggcggtcgggccagccaaagccgtctttgacgaattcgaggccgagaagggccggcgcgtcggtcccgtgtgggccaacatccgcaaggccatgggcaaggcccacacattcgactaa

SEQ ID NO: 1159 - DNA, 1806 bp, Myriococcum thermophilum
atgaagggcttcacaaccttggtcatcgccgcccttctgggcagggtggttgcagcgcccccagaaccaccctcgaggaccgttgagaagagagctgcccctacagtcaccatcgcttcaggctccatcgtcggcgtgagccgcctggctaccgaggccttcaacggcatcccctttgcggaaccaccggtcggccccctgagactgaaaccaccagtcaggctcaactcatctctgggcgtctttgatgccacggggattgccccagcttgcccgcagttctttgccgatacggactcgaacgagttcctggccagggtcattgactttgtcaccgacttgccattcttccagaaggctctcaaagtcagtgaggattgtctgacagtcaatgtcatccggcccaagggtaccaaggcgggcgacaacttgcctgttttgttctggatctacggaggagggttcgaggtgagtttctgtgtgatgttgccaacgtcgctcgacacaccttcgggagggagggaccgctaactcccataccagcttggctggagttccatgtatgacggcggccctcttgtcaccaatgcaatcgacatggggaagccgttcatcttcgtggcagtcaactaccgtgtcggaggcttcggcttcatgccgggcaaagagattctcgcggatggctcggcaaacctaggccacctcgaccagcgcatgggtctcgagtgggttgccgacaacattgcggcgtttggcggcgaccccaacaaggtgaccatctggggcgaatcggcaggcgccatctccgtcttcaaccagatggcgctctacgacggcgacaacacgtacaacggcaagcccctcttccgcggtgccatcatgaactcgggcagcatcgttcctgccgccccggtcgactgccccaagggtcaggccgtctacgaccaggtggtggccaaggccggctgcgctggagccagcgacaccctggcctgcctccgcgagctgccttacgacaagttcctcgaggccgccaactccgttccagccattttgtcgtaccactcggttgcgctttcctaccttccccgtcccgacggcaaggtgatcactcagagccccgacatcctggtcaaggagcgcaagtacgcggccgtgcccatgatcattggtgatcaggaggatgagggcaccctcttcgcactgttccagcccaatatcacaaacaccaacaagctcgtcgactatctcgggagtctctttttccacgaggccaccaccaaccagatcgagggcctcgtgaacacctattcaacctcgatcctggacggttcgccgttccgtagcggcatcctcaacgagatctacccaggcttcaagcgactcgccgccatcctgggtgacctcgtcttcactctgacccgccgcgtctttctcgagaccgccacggcggtgaaccccgacgtcccggcgtggtcgtacctggccagctacgacgaaggcaccccgatcttgggcacattccacggcagcgacatcctgcaggtcttctacggcatcctgccaaactacgcaagcagaagcatccagagttactatgccaactttgtctataacctggaccccaacgacgccagcggcggcaccagcgccaaaagcaaggtccgcgaggactggccccgttggaccgcaacggagcgcaagcttatcaacttcttctctaaccggagcggttatctcaaggatgactttcggtccaagtcggccgggtacattagcgagaacgtgggagcgctatacttttga

SEQ ID NO: 1160 - DNA, 1260 bp, Myriococcum thermophilum
atgtcttcttcgactgtcatccttggggcgggtatcatcggcgtttcgacggcttattacctgtcccagcatcaggatccgacaagcattcaactggtcgagccgtcgccggagctcttttcctctgcatctggttatgctggcggtttcctcgccaaggactggtttgggccgtcggtgacagctctcggcgccctcagcttcaatgagcatcgccggcttgcagaagaacacaacggacgcgagaagtggggttactcgctgtctacatccgtcagctacacagcatccgcctcggcgcgaaactcgagttcacgaggcgacgactggctacgtcacggaaccagccgcgccgatgcggctcctgtgacccaggactccctatacgaaaacacgccggggtggctgcggaggcttgaaggcgatcacatcgaactcatcagcgaagaaggttcgacggcgcagctcgatcccctcttgctctgccagttcctcttgcaggaatgtctccggcggggcgtgaagcttcatcacccggccacgccggtctctgtgaacacggatgcgaagggtgagctcactgctatccacatcaagaataccgacccgtcggccacggagacaaccgagttgccctgtacaagattgatcatcacggctggtgcgtggacgggccaggtgtttcagtcgttgttccccaagtcagacctgcgggtgccgatccagagcctggccgggcactcgctggtgctcaagtcgccgcgctggcacgccgggctggagagcaagggctgccacgccgtcttcaccacgcacaggcaggggttctgcccggagatattctcgagactgggcgggcacatctacatctcgggcctgaactcgtccaccctgccgcttccggacgcggcggccggcaaggcggcgccgtaccgagccgacctggcgcagttgcggcaggcggcaagggagattctcggaaccggggcggaagatgacaacgacgacgacctggaggtcgtgcgggaagggctgtgcttccgcccggtgacgccgtggggagcacccatcatctcgcggatacgggatgaacacctcggtgctggtgtggcgacgagacccggggttgagggcggcgtctatattgccgctggacacgggccgtggggtatcactatgagtctcggcacgggtatcgtgctggctgaaatggttcaggggcgggagctcagtgtggacgtgagcgggctggctctttga

SEQ ID NO: 1161 - DNA, 1622 bp, Myriococcum thermophilum
atgcatccgctcgggtccctccggctcgccagcctcctggggttgctggcgacggccgccccagccgccgtacaggcctctcctttccgccacgggatccgcgccaacaaccagacggacccgttgatcgagtgcctgaccgaggccggggtgccggtggacgaggcggggacggaggactaccggctggacgtgtcgacgttcaacctgcggctcaactacactccggcggcggtggtgggggccagcacggccgagcacgtgcgggacgcggtggcgtgcgcggcgcggacgggcgtcaagacgacggccaagtgcggcgggcacagctacgcctcgttcggcctcggcggcgaggacggccacctcgtcatcgagatgagccgcatgaacgaggtcgtgctcgacaccgagaccggcatcgccaccgtccagggtggcacccgcctcggccacctcgccgtcgagctctgggaccagggcaaacgggccatcagccacggcacgtgcccgggcgtcggagtcggtgggcacgccctgcacggcggctacggcatgagctcccacacgcacggtctcgcgctcgactggatcgtgggcgccacggtggtgctggccaacgggaccgtggtcgaggcgtccgagacggagaacccggacctcttctgggctctgcggggggccggctcgtccatgggcgtcgtgaccgagttccgcttcaacacgttccagccgcccgagaacctgacctacttcgtcgtctcggtccagtggacaaccgaggagcgcgccctgtccggcctcgccgccgtgcaggagttcgccaagaccatgccggccgagctcaacatgcgcgtctacatcaccagccgcttcgtcaacctcgagggcctctattacggcgacaaggccggcctcgaggagaccctcgccccgctcatcgaacaggtcaacggcgtgctcgccctggcccagacgggcagctggcttgaccagctcaagcactatggcggctccaacctcgatcagggctacggccacgaggaggtaaaacttatttccccctccccttctcttccaccctggaatgcctctcatatactaacttactccccccccccctcctccctaccttcttccagcacgagaacttccactcgacaagcctatacacccacgagctgagcgaggcccagctgcagtccttcgtggggtactggttcaattccgccaagaacaacacgcgcaactggcacgtgcagatcgaccttcacggcggcgagaactccggggtggcggtgggcgacagggacatcagcggggttccgtcggcgtacgcgcaccgcgatttcttgctcatgttcctgctctacgaccgctccgaccgcggcgccttccccgacgacggcaccgcctccatggacgacttcgccgccgccatcaccgacggcctcgagcccgaccagtggggcatgtacatcaactaccccaaccccctcctcgaccaggccgccgcccagcagagctactgggggcccaacctcgctcgtctgcaggccatcaagaaggaggtcgacccggatgacctgttccactacccgcagggcgtcttgcctgcgtaa

SEQ ID NO: 1162 - DNA, 1707 bp, Myriococcum thermophilum; identical to SEQ ID NO: 856

SEQ ID NO: 1163 - DNA, 678 bp, Myriococcum thermophilum
atgttgacgaccaccctcgccctcctgacggccgcccttggcgccagcgcccattatacccttcccagggtcgggtctggttctgactggcagcacgtgcgccaggccgacaactggcaaaacaacggcttcgtcggcgacgtcaactcgcaacagatcaggtgcttccagagcagcccttccggcgccccggaagtctactccgttcaggcgggctcgaccgtgacttaccatgccaatcccaacatctaccaccccggtcccatgcagttctacctcgcccgcgtcccggacggacaagacgtcaagtcgtggaccggtgatggcgctgtgtggttcaaggtgtacgaggagcagcccaacttcggcgcccaactgacctggccgagcaacggcaagagctcgttcgaggttcccatccccagctgcatcccggcgggcaactaccttctccgcgctgagcacattgccctgcacgtcgcccaaagcgagggcggtgcccagttctacatctcgtgcgcccagctcgaggttaccggcggcggcagcaccgagccgtctcagaaggttgctttcccgggtgcttacagttccaccgaccccggtattctcatcaacatcaactaccccgtcccgacctcttaccagaacccgggcccggctgtcttcagctgctaa

SEQ ID NO: 1164 - DNA, 1737 bp, Myriococcum thermophilum
atgcaaactgcttcgaaattagcagccgccgctggtggtgctctggcgctctggctacaaccagcggcagcacaggcaggatgtgtcaacatctcgtccactgagacatatgattacattgtcgtgggctccggcgctggcggtatccccgtggcggaccgcctgagcgaagctggccacaaggttctcctgatagagaagggcccgccgtcgacggggagatggggtggtgtaatgaaaccggagtggttgtttggtacggacctgacccgcttcgacgtcccaggcctctgcaaccagatctgggcggacccaaccggggccatttgcaccgacgtcgaccagatggccgggtgcatgctaggtggagggacagctgtcaacgccggactgtggtggaagccgcaccctgccgactgggacgttaacttccctgacggctggcacagcgaggacttggtggaggccacagaacgcgtattcgagcggattcccggcactatcaccccctcgatggacggcaagcggtacctctctgagggcttcgacatgctgggcggcagtctcgaggctgccgggtgggagtatctcgtccccaacgagcacccggataagaagaatcgcacttacgggcacagcacctttatgtactcgggcggagagaggggcggaccgttagccacatatctcgtctcggcggttgagcgcgagggctttacgctgtggatgaacacgactgtgaaacgcattatccgggaaggcggccatgctacgggcgtcgaggtggagtgcagcaacgacaagggaggtcacgccggcatcgtcccgctcactcccaagaccggccgtgttattctctccgcgggcgcgtttggctctgcgaagctgctcttccgaagcggtattggaccgaaggaccagctcaatattgtcaagaactctgccgatggcccgaccatgatttcggaggacgagtggattgaattgccggtcggctataacctcaatgatcacgttggcacggacattgaaatctcgcacccggacgttgtcttctacgactactatgctgcctgggatgagcccattgttgaggacaccgaaagatatttggacaacaggaccggtccgctggcacaagctgcaccaaatattggcccgattttctgggaaatcattgagggaagcgacggtgtctctcgtcacctgcaatggcaagccagagtcgaggggaaaaccaacacatccatgacgattacccagtatcttggcacaggctccaaatctcgaggcagaatgaccattacgaggcagctgaatacgctggtttctaccccgccgtatctccgagatgagtatgacagggaggccgtcatcaagggcatcgccaacctgcgagagtcattgaaaggggtggccaacctgacatggatcaccccaccgttaaacgtgacggtggaggatttcgtagactcgattccggctactccggcgcgccgttgctccaaccactggatcggcacggccaagatcgggcctgacgacgggcgggatgggggcacgtcggtggtggacctcaacacaaaggtgtacgggaccgacaatatcttcgtcgtcgacgcatctatcttccccggccatatcacgggcaatccttcggcagccattgtgatcgcggcagagcatgcggcgaccaagatccttgcgctgccggccccagaggatgcggaatcgtga

SEQ ID NO: 1165 - DNA, 1227 bp, Myriococcum thermophilum
atggtgacggtgacgcagcttctggtggcgtccttcctggctggactgagcgttggctcggctctgccgcctagaatcggtacaaccagtgttgataaagacaacagcgccaacgcccgtagcgggagggtgacgctccatcaagtcccacgacgcaactaccgcttcaacggcgctcggtcagtgtacagaacgtacctcaagtacggcgtcccagtgcccgagtacatcgtgaaggcagtgacctacacggacgcgctcaatgccgccgcaggaaagcgtgacacgggcagtgcacccgcggtcccgatcgacccgagatacgacgtcgcgtacgtcacgccagtcagcataggcacgcctcctcagaccctcaaccttgacttcgatacgggctcgtccgatctttgggttttctcgaccaatacgccgcccgaacagatgaacggccaagacatatacgatccggacaagtcgaccacggccgagctgctcgagggtcacacgtggagcatcaggtacggtgacgggtcggcctcccgtggcaacgtctacacggacaacgtgaccataggcggtctcacggtggaacgccaagcagtccaatgcgccgagcaggtatcgacaagcttcaccgtcaagagcgagatggacgggcttgccggcctgggtttcagtagcttgaacacagtcagccccaagggccaattgaccttcttcgacaacgccaagccgcacctggatagtccggtattcacggccgatctgaaggcacacaaagctttccgcaacgcgcgggcgcgcgcagccggctcctatgactttggcttcatcgacgaggccaagtacaccggtaacatcacctacggcatcgcggatacgggtacctcccttttgtatctgcctacggccattgtcacggcctactacagccaggtgcagggcgccaccaacagcttcatatatggcggatacgttgtcccctgcagcgcgacgctgccgtccttcacgttcggcatcggtgaggtcaggctgaccatccccccttcgtacatgagctacgggccggtggcggaaggctcgtccacgtgcttcggcgggttgcagagcagcagcgggctcggcgtgaacatctggggagacgtggccctcaaagcggccttcgtagtattcaacggcgaggacccgccgagcattgggtgggctaccaagcctttggacgagtga

SEQ ID NO: 1166 - DNA, 987 bp, Myriococcum thermophilum
atgcatcactggacttctctcgccgcggcggctgcgctgctggccaacggcgccgttgcgcagttcaacatgctgcgcttcgcctgctctcagctgatcgtcggcggcaactcgttcaaccttaccatgacgcctgtcgagtacgacctggctgagcggtcgacctgcacgtcctgcagcttcaagcaggacaagtccaactactggaccgccgtcatgttcttcaagcacaagaacggctcctaccaccgtgttcctcagatcggcaacggcggtcctcagggccagctgatcaacaacggtggcctcgacgtctactacatccccagtggcaaggtcactgccttcgctcctggtttccgtatgcttgcgggcgaggcgaccaacaccgatgacagcaaggtttcctccggcaacatctgccaccgctgctggaaccagccggatgagaaccagttcgtgggcggcgctccctgcactggcaccgacaccgttgctattccccaggatccatcctgctacatgatccgccagaccatcatcttccctgcatgctgggacggccaaaaccttgacacccctgaccacaagtcgcacgtcgcctacagcggcaccggcgccaccggcggcggcccctgccctgctagccaccccgttaagctgcctcaggtcatgtacgagatcatgtgggacgtcagccaattcagggaccagagcatgtggcccgaggacggccctgccttcatctacagcatgaaccttggtggctctgctgcccacggtgactacctcttcggttgggagggcgacactctgcagagggccatggacaacggctgcaacctcaacctcgactgcccgtctgctggcctcactgctcagccgcccgaggagtacaacgcctgcaccatcccgcagcaggctcccgagcccgtcgatggctggcttgcctccatgcccatgggcgagatggccgtgcgcgcctaa

SEQ ID NO: 1167 - DNA, 1347 bp, Myriococcum thermophilum
atgaagcagtacctccagttcctcgcggcgacccttgtcggcttcgccgccgcccagcaggccggtgacttgcagaccgagactcaccccaagttcacctggaccaagtgcaccgcccccgggtcctgccaacaggtcaacgccgaggttgtcattgacgccaactggcgctgggtgcacgactcctccggcacgaactgctacgatggcaaccagtggaccagtgcttgcagcagcgccgacgactgcgccgagaactgctacctcgagggtgctgactactcgggcacctatggcgcctcgaccagcggcgatgccctgacgctcaccttcgtcaccgagcacgagtacggcaccaacgtcggctctcgtctctacctcatggacggctcggacaagtaccagatgttcacccttgccggtaacgagctggccttcgacgtcgatctctcgactatcgagtgcggtctcaacagcgccctctacttcgtcgccatggatgaggatggtggtattgcgaactaccctcccaacactgccggtgctaagtacggcactgggtactgcgatgcccaatgcgcccgtgacctgaagttcgtcggtggcaagggcaacatcgacggctgggagccgtccaccaacgaccccaacgctggtgtcggtccccttggcggctgctgcgccgagatcgacgtctgggagtcgaacaagtgggctttcgctttcaccccccacggctgcgaggaccccggctaccacgtctgcgagaccaccaactgcggtggcacctactctgaggatcgcttcgctggtgactgcgatgccaacggctgcgactacaacccctaccgcatgggcaaccaggacttctacggtcccggcctgacggtcgacaccgagcgggtgttcactgtcgtcagccagttccaggagaacaagctcacccagttcttcgtccaggatggcaagaagattgagatccctggccccaaggttgagggtatcacccaggagactgccgacatcactcctgaactctgcaccgccctgttccaggccttcgatgaccgtgaccgcttcgcggaggttggtggcttcgatgccgtcaacaccgccctcaacactcccatggtccttgtcatgtctatctgggatgaccactacgccaacatgctctggctcgacgggagctacccgcctgagaaggctggccagcccggcggtgaccgtggcccgtgcgctccggactctggtgtcccggctgatgttgagtctcagtaccctaacgccaaggtcacctggtccaacatccgcttcggccccatcggctcgaccgtcgatgtctaa

SEQ ID NO: 1168 - DNA, 894 bp, Myriococcum thermophilum
atgcgtctcagtgctcttgttgtcctcctgccggcactctgcgtccaaggcatccgcattatccagtccaacgatgatggctgggccgagcagtatgcacgatcttttcacaatgccttgatagccgccggccacgacgcggttctatccgcccctgccgagaacaagtcaggatctggctcaagtgatgctgagccttctcccaggaaggatccctgccagtatgacagctgcccggccgacagtggtcccatagggcgcaacgagacctcgccgcggctcaactgggttaactcgtaccccgccacatcgatgcggtacggcattgacaccatcgcccccccactatgggatggtgaggcgcccgagctggccgtcacgggacccaacgtcggtagcaacttgtatctagccgtccacatctccggcaccgttggtgccgctgtctacgcggctaaggaggcaaagatccccgctatcgccttctcgggtgcatctgacggtactctcgcctgggacagcccggaggagccacgtagccgtgtgtacgctgagctggccgccacactcaccaacgccatcatcgagagcggcaagccatacctccccgaggacgtcttcctcaacgtgaacttccccaaggtcgaagacgagtgcaccgacccgagccagttcaagtgggtgctgtcccgcatcaatgttggcctcgtctccgacccggatgcggagcactgcggttctacccgtttgccgcacgaactttctgttctcaacaccgacggctgctacatctcggtcagcccgggcgatgccaacgacaagacgaccgccccggcagaaaagcaggccgtggtgcgggataaattgaagagcttgtggacctgcttaccttga

SEQ ID NO: 1169 - DNA, 732 bp, Myriococcum thermophilum; identical to SEQ ID NO: 863

SEQ ID NO: 1170 - DNA, 1611 bp, Myriococcum thermophilum
atgaggcatctgaacgatttcgccctcctcttcacgctgttgagcggcagtgccacctcggccgccgtgagaggcagcacatatcatcaagctcgagcggatgaattcaacaatccggtgctgtgggaggactatccggacctggacgtgttccggatcgggtcgacctactactactcttcctcgacgttcgcctactccccgggagcgccggtgctcaagtcgtacgacctggtcaactggacgcccgtcacgcactcgggcatctgggcgtcgacgctgcggtaccggccgtccaacgacaagttctactggtacggctgcatcgagttcggccagacgtacatctggaccagctcgggcacgcgggcgggcgacaaggacggcgaggtcgacccggccgactgggcctgggagccgcacccgcccatcaacaagtgctactacgacagcggcctgctgatcgacgacgacgacaagatgtacatcgcctacggcaaccccaacatcgaggtcgccgagctgtccgacgacgggctcagcgaggtctcgtcgcgcgtcgtctactccccgccgtccggcaccaccatcgagggcgcccgcatgtacaaggtcggcggcgcctactacatcctggtgacgcgcccggccgacgccgagtgggtgctcaagtcgacgtccgggccgttcgggccgtacgagatgcgcgagctcgtgacgcgcatcagcgggccgctctccaacgccggcttcgcccaccagggcggcatggtcgacacgcccgacgggaacaactggtactacgtcgccttcatggacgcgtacccgggcgggcgcatccccgtggtcgccccgctgcgctggaccgacgacggctggcccgagctggtgacggacgaccgcggcggctgggccaccagctacccggtgcccgtgcaggcggccaagacggtgccggacgacggcctggacctggacgagttcacgggcggccagctgagccaccactgggagtggaaccacaacccggacacggcccgcttctcgctcggaggcgaaggcgagggcggactgactctgcagacggcgacggtgacggaggacctgttcgcggcgaggaacacgctcacgcgcagggtcaggggccccaagtcgagcggcacgttccggctggacgtcagcaagatgcgcgacggcgaccgggccggagccgtgctgttccgcgatacggcggcgtacatcggcgtgtggaagcaaggggatcaggcttctatcgtcgtggtcgatggtctcgagctgtctcagggctcctggaacaccgtctcgaccgggaggttggccgagacgggcccgaccctgagcaacacggaggatgtctggctccggatcgaggccgatatcacgcccgcgtttgggaccaacacggccaggaccacgaccttctcgtacagcgttgacggcgggcagacgtttgtccctcttggcccggcgttctcgatgagtaacacttggcagtactttacgggctacaggttcggagtctttaactttgctaccagggagcttggaggagaagtgaaggtcaagagcttccagatgcagcctctgtga

SEQ ID NO: 1171 - DNA, 771 bp, Myriococcum thermophilum
atgcgtccatcaacggcaacatcactgctcctctcctgccttgtcggggcagcatgcgggctcaccattgatgccaaatggtggtggggccatcatcatcatcatcatcatcatcatccgaagtcaacctgtctacaccctgatgcgttgcaaaccgctagctcttacacgggactggaagagggtacaccgggcatcaggccgggcctgagcgagtcggcaacagacaatgccaacttcatcaacttctgcgcaggccaaacgctcaccaacggccagcagaacacggccggctcgtgcaacggcatccccatgggtcgcatccccgccaccagcaacatgatctcttccatcatcacgtacccgcagcccggcgaccgcatcaagcccaacacgactttcaacgtgaccgtccagacccgccatctccgcgccggctacctcgtgaacccctccgtcagctactacacggcgccccaggacctggacgagaacggcgacatcatcggccactgccacatctcgatccagaacatcggcagcttgaggacggttgaggtgcccgaccccaccacctttgccttcttcaagggtgtggacgacgaaggcgatggcaagggacgcctgaccaccgaagtcaccggcggtctgcccgagggagtgtaccgggtctgcaccatgatcgctgcaaggaaccatcagccggtggccatgcccgttgcccagcggggcgcccaagatgactgcaccaagttcgaggtcggggagtga

SEQ ID NO: 1172 - DNA, 744 bp, Myriococcum thermophilum
atgcatcgtttctcattgtttgctgccttccttgggttgaccaagggggtcttgggtgaaaccgagacctgtggtgaggtaccatatgacccctcgaagcatgtctgctgggacaatgagttcctatgccctatcaccgcaggcgagccgctgtcctactgcgcgggtgcatgctacagcaagttcatgtacacgtgcgaaaataacatcctgacgctcctcccgcctgccgaaaccccgtttacactcacggccgacaacccggatgttcctgcgatccacggcaagcctgtcaccgccgccagccagcactgggtggtcaacggcgaaaccaagagctactgccccgaccaggtcggcgagaactgcccgcccggcaacgagaccgtcattgtttccaggggtggaactgtctccatgagcgtcatggtccccggcgggcagcaggcctacctcgaccagtactggaacatgggctacacccaggcccactcggcctacatccccccgggaagcatcacgaccgggtttggcgcgtacgagggcggaggcttcgtgaacctcaatggaaacggctggggctgggctgcttgcccgcccagggcttccggcggtggcggtcccgcctggaacctggccgcaaggaacgattcgaacgcagaccggtacaaggattgcacgcccatcaacctcaggattcactcgcttccaagaggcacctatggcgcttggcagtacacgtga

SEQ ID NO: 1173 - DNA, 780 bp, Myriococcum thermophilum; identical to SEQ ID NO: 867

SEQ ID NO: 1174 - DNA, 1470 bp, Myriococcum thermophilum
atggcaatcccctctctattcttagcatcggcgttgctcgtagccttgcttttctgccatgccaccgccgcttctcaacagctcgcccacgacgtgggttgcgttcaccttcctatcattcactctactaaagtcgaccacttctcagataagcgaggcatccaggtacagctagcgaaccgatccgatgttgcctactatgctcagctcagcatcggcacgccgccgcagcccgtgtatgtacaggtggataccgggtccttcgagctgtgggtgaatccggactgcaccacggtgtcaggctcggacgccgtcttctgcgaacgggccgggagatatgacgccagcgaatcctcgacggcaacctcgctcggaacaagcaggacactccgctatggaatcggggctgccaacatctcctacttcaccgacaacatatcgcttgccggaagcgccatggccctgcaggatgtccagtttggcgtcgccacctcgtcggaggacgccttttcgggcatcctgggcatagggtatgggaagggcatcggcactgggtaccccaactttgtagaccagctgtgggagcagaatgtgacccgggtcaaagcgtatacccttgcgctggggaacaaggactcggaagaaggggtcatcgtgttcggcggcgtcgacacgtccaagttcgcgggcaggttagccaggctacccgttattccccgggcgcagtctccagacggcgtcccgaggttctgggtcgagatgaagtccctgtccctcacgcgcccgaacggcctcaacacggcttacgatggcgcctctatccccgttttcctcgacagcggttcgaccatgactctgctgcccgccaatctgactacggctattgctagagactttggtgcgcaggcccccgacgcgagcggcttctacaggatcgactgcgccctggcggcgctgaacggtaccctcgactttgttttcgacggggttacagtcaaggtcccctacaaggagctcacgcgcgaggtagccagcgacccaccttcttgttttctcggcatcgtggccagcgaccggtttaccctactcggggacaccttcttgcggtcggcttacacggtgtttgacctcgaaaccgattctatttggatggcacaggcggccaactgcggctcgtcacccgcggccctcagtaacgtgcgggacctgtcagccgtaatcggcgagtgtggaataagcgagacagcagagagcacgagctcaacgcaggttcctagcactggagctgatgataccgaagccgggcctcctcacaccagtactactacagttgcatcccagccgtcggagacaaccacgcagatcgggggaagctcttctcgtggtagtgcggggaaccgtctaggagctcaccggctggccagcttcttggcgataatggccgcattgcatttgttcactggaatataa

SEQ ID NO: 1175 - DNA, 1347 bp, Myriococcum thermophilum
atggtcctcgctctcttttccctgcttgcctgcacagcccttgttggtgccactccctcccgacacaggatagtcgactcgttggatggacaggccacaggagcggctcaacggcgtgacaacaaccttgctcgggtgttctctcatgtccagatcaagacatcagatgggaaatgcctctttgttggtgaacatccggacaacgtccgagccacttcggctccagttcaagtcgccgattgcgggtcgactggcggacaatactgggatatcatcactgctggaaggcatgtcaagggcgacaacgtcttgctcgttgttaacacccttacccagacctgcttggagtttgacccccgtcaacagccagggagtcaggttcggctgtctccatgtggtgagggagaggtgactgattctcagctattcgcttccagcagcggtgctggcccccttccccttcaaccacggaaccaagtggaatcctgtgtcatcgccaagaacggagttatcggaatttcgaggtgcgatagcagtgatgctggtcaagtctttactttcggcgaagcaacaggaataagcgaggacagcaacaacaatatcaagatcaacagcaggggccgccgtaacaagaaggttcactcaacttcgacctgcgcaaggcctacacggactgtgactgtgcttccgacgcagagcgggggaagcacggcaactccgacgacaacgcccgccccgacagcaggcagcggcggtggcgaagggagttccggggccgggactattctgacagtgaaccccacagaaccggtaccggtgtcgcgggctggcggcgtcctgcaaccaacggcggcggcagaagcgcaccaacgagacgagacggcggaacgagccttcagcggcgtgtcgatccgcgcgccgaacggtcagtgtctcttcgtcgaccccacggcgggcgacttccgccagaacttgatccctgtttcgctggtggactgcactggggcccctaacgagaaatgggatgtcatcactgagggcaagcacaacaagccgaatccggaccggccggccgccttgatcgtgagcgcattgacgcaaggctgcattagcttcgatggaaggcgacaaccgggcgataccgtaaccatattttcgtgcggcggtcgcgctgatggtggcggcgaaacggatggcaaccaattgttcccatttatcggccagacgagtttcgcgtttgcgccagtgaacgaggacggaaagacctgtatcctgcccggcgatggtaggctcgattcggggccctgccctacagacggttcccagcttttttccatatttgagtga

SEQ ID NO: 1176 - DNA, 1212 bp, Myriococcum thermophilum; identical to SEQ ID NO: 870

SEQ ID NO: 1177 - DNA, 1944 bp, Myriococcum thermophilum
atgttctcgaagaggcggaaggcgggagcagagaacacttcggccggtctggtcaccgcccggctgctggtgtccttcctcgctctctcaacgtgtccggttgcggctgcgggacatgccacatcagacacgcagctccccattgaagccggtcctgtagcgccgctaataccggaagcaccagcacctgctgaacacaccttcacgctccgacacattttccaccacggaacgtacaaacacccgcatctccatcgcagaaaggatgtcacgcagccaaaggcggaggtgtggctgccggccgaggacgggttcgaagcccagcgattcggtcctctgagagcccggagcagcccccttcggatcgagcggctggtggatcggaggcccagtgtggtagatccaattgtggcccagtcaaggaagcaagggtttgtctcggtgctctcgccatccgcgtggacgatcgacgatgttcccgggccgaacgtgaccgacaaggataccatcttgacgctcgccctgatggcggcggacgcttacgtggagacgccgggcgaagcggattgggaagacgtcggtgcgccgttcaacaggagtctagatttcggctgggagggtgatgggctgcggggccacgtatttgccgacgagacaaactcgactatcgtcatcgggctgaaggggacctcggttgccgtatttgacggagatggcacgaccaccaacgataagataaacgataacctattcttcagttgctgctgcgcccagcaaggaccttggacctggcatcaggtgtgcgactgcgcaaccggcacctacacgtgtaataatacttgcgtcgtccaagccctccgcgacgagaacaggtattattatgcggcacgcgagctgtacgccaacgtcaccgagatctaccccaattctaacgtctggattaccggccattcactgggtggggctgtcagctcttttctcggcctcacgtacggtgtgccggtggtgacattccaagcggtgcccgaggcgctaccggcgaagcggcttggtctgcccgtccccccaggagccgacccggacacgcctcaggagagggagtacaccggcgcattccactttggacatacggccgaccccgtctacatcggggcatgcaacggagcgacggcgtcgtgctcattagccggttacgcatttgaggcggcgtgccacacgggccatgaatgtgtctatgacacagtgggcgacctgggctggcgtgtcggtatcggaacacacaggatcaagtcggtgattcgggacgttatcctcaaatacgacacggtcccggaatgtaaattaaccccagagtgccgggagtgcggtaactggaagatgtatgagagtaacggcacggagccgaccactacctcgagcgtcccgacggccaccaccaccaagacccggacccggactgaaacatgcaagacaccgggctggtggggttgcttggacgaaaccactacaactactggtacggaaacgtctgaggtcacgacaacgacctcgaccacgacatgtcatactccgggctggtttggctgcaaggacaagaccacgactaccgaaacgaccaccgacgacagcacttcgacaacatcaaccacaactagtacaacgtgcaagactcctggcaggttctggggctgctatgacaaaacgacaacaacgtcgacgacggtgacgacgactacgacgacgacgaccagcagcagcagcactgcatccgaggaccaaagcactatcacgcctcccccaagcatgcccagccccacatcggcgccaacatcgactcccgcggaggagggttcgcctcggaagaggcgttgcgtcgaccgggcctggtacggtctttgcaggaagtgggagggcgacgaccatgaaaccatcgatgacatctag

SEQ ID NO: 1178 - DNA, 1455 bp, Myriococcum thermophilum
atgtacttcaccggaaccttcctcacggtggcggtggccatgagcggcgccgccgcagcgccaagtgagaggtctatcgaagcacgccaagcaaacactatcacggtcgacctctcccagacgtaccagcgtatggatggcttcggattcagcttggccttccagagggcgaacttgatcacgaatatgtctgacaagaccaagcagaaggagctgctcgacctgctctttaaccggacgacgggggcgggcttcagcatcctgcgcaacggcatcgggtcgtcgcctaacagcaactccgatttcatgaacactatcgcgcccaacaaccctggaagccccgatgcggagcccgagtacatttgggacggcaaggacagcgggcagctatgggtgtcgcagcaagcggtgaacttgtacggggtgaagactatctatgctgacgcctggagcgccccggggtacatgaagaccaacgggcgcgacaccaacggtggtacactctgtggtgtgccgggagcgcagtgtgcgtccggcgactggcggcaggcgtacgccaactatctggcggcttacattggcttctacgcgcaggagggtgttaacatcacccacctggggttcctcaacgaaccggactacagcgccagctacgcgtcgatgcagtccaacggaaaccaggcggccgacttcatcaagatcctgcatccgactctcgaggaggccgggctggcggaccgggttaagatcacatgctgtgactcgatgggctggaacaaccaggtgggcatggtatcgcagatcaggtcggccggtgccgaggacatgctggggacagtgacctcgcacacatatgccgggggtccgggcgggcccatgaattcgcgggcgcccgtctggctgtcggagcagtgcgacctcaacggggcctggaccacggcctggtacgcctttggcggcgccggcgaggggctaacgtgggccaacaacatctacaacgccgtcgtcaacgccaacatctcgggctacctgtactgggagggcgtccagtggcccaacccgaacaccaacgagaaaatcatccgcgtggacaacacgaccaacacgtacgaggtatcgagcaggctgtgggccttcgccaactggtcccgctacgtgcggcccggggccgtgcgggttggcaccagcggcggctccggtgggctgcgcacggcggccttcagatatgaagacggaacaattgcggtcatcgccatcagttccggggggtcggatgtgaatttgaacattaacttcactggagggccagggccggcagcagtgcaagcgttcgtgtctgataacacgagaaaatgcgagtcaacaccggcaacagtggaggatgatggaaccatttcaggatcggtcgcagccaggtcaatcacgactttctttatcttgccggagacctcctga

SEQ ID NO: 1179 - DNA, 786 bp, Myriococcum thermophilum
atgaagacggttgcgcttcttgcagcccttgcggcctcggttgagggcgccatcctctgggatggccggttcaacgacctgaccagcgccgaggacctcaacaagtggtcgtggagtaaccaggtcgggccataccaatactacatccacgggccgggcacggtgacgcagtacatcaacctctcgcccgactacaaaaacccggccgactctgggtcccggcagggcgcccggttcacgctcgacagcacggccttctggaacgggcagaacatgcggcggaccgagctcatcccgcagacgaacgcgcccatcaaccagggcaaggtgtactaccacttcagcatgatgcgcaaggacaccaacccgcccagccccaaccgcgagcaccagatctgcttcttcgagagccacttcaccgagatgaagtacggctggatcagcggcgagcagggcgagagcaacgtcaacctgcaatggatgaccaaccagcagagccactggaagaccgagtggaagcctgacgtgtggcacaatattgcctacgagattgacttcagcgcaaacactgtcggtttctggcattcagagggtgacgcaccactcgagcaggtcgtcgcccccgtctccgtctcgacctcgtccaacggggcggactggcacttgggcgtgctggagctgccgcgtaacggctacgccgacaccgacgaggacatttacttctcgggcgtctacatcgagagcggcaccatcaccaccgacgtcagcggccctggtaagttctga

SEQ ID NO: 1180 - DNA, 1665 bp, Myriococcum thermophilum
atgaggatcgcagcctccacagtgctgctcggcgcggcctctgccgcctcgttccagcagcaagcccagcatgtgctctccgacggccttgggaaggcccaggaggccgtgaagcccttttcggatgctctcgctgatgctgctggtcgccctatcgagagcttcgaggaggccttctcgggcatgaccgacgaggcaaaggctctctgggaggaaatcaagctgctcgttcccgatagcgccttcaagactccttcgtggttcagcaagcctaagcctcaccgccgccgcgacgactgggaccacgtcgtcaagggtgccgatgtccagaagatctgggtgcaggacgccaacggcgagagccaccgccaagttggcggccgcattgaggactacaaccttcgtgtcaaggcggtcgacccgtccaagcttggggtcgattcggtcaagcaattcagcggctaccttgatgatgaggccaacgacaagcacctcttctactggttcttcgagtcgcgcaatgaccccgagaacgacccggtcatcctctggctcaatggcggcccgggctgctcgtcccttaccggcctctttctggagctcggtccttcctcaatcgacaagaacctgaaggtcgtcaacaatgagttcagctggaacaacaatgccagcgttatcttcctcgaccagcccgtcaatgtcggctattcctattccggctcctcggtgagcaatactattgccgccggcaaggatgtttacgctctcttgactctcttcttccatcaattcccggagtacgcgaagcaagacttccacatcgccggcgagtcgtacgctggccactacattcccgttttcgcctctgagatcctgtcccacaagaatcgcaacatcaacctcaagtcgatcctgatcggcaacggcctgaccgacggcctcactcagtacgagtacttccgccctatggcttgcggagagggtggttatcccgcggtcctcagcgagtctgagtgccggagcatggacaacgccctgccgcggtgccagtccctcatccggagctgctacgagagcggcagcgtctggagctgcgtccctgcctccatctactgcaataacgccctaattggtccctaccagcgcaccggccagaatgtctatgatatccgcggcaagtgcgaggacagcggcaatctctgctacagcgcactcggttacatcagcgactatctcaaccagcagtcggtcatggatgcccttggggtcgaggtctctagctatgagagctgcaactttgacattaaccgcaacttcttgttccagggcgattggatgcaaccgttccatcgccttgtgccgaacattctcaaggagatccccgtcctcatctatgctggtgatgccgacttcatttgcaactggcttggcaaccgagcttggacggagaggctcgagtggcccggccgtcaggccttcaacgaagccaaggttcatgatctgaagttgccgggtgccgaggaggagtacggcaaggtcaaggcctcgggcaacttcaccttcatgcaaatctaccaggccggccacatggtgcctatggatcagcccgagaattcgcttgatttcctgaacaggtggctgagcggcgaatggtttgccgagtaa

SEQ ID NO: 1181 - DNA, 1476 bp, Myriococcum thermophilum
atgagaacaagttcggcattggtcgccgtggcgactcttaaccagatcacgcatgggctggcattgccagaaagacgccatgggccgaaggtgctgggtctggagatgcagcggcgagctccacggaacttgatccatagggacaggaagctgaggaagagaggaactttggagatcggcttggataatgaggaaacattgtacttcatcaacgggacagtgggcacgcctccaaatcccgtgaggctgcacctcgacacgggcagcagcgacctatgggtcaacacgccgagctccgagctctgctcgtcgagtgacaacccgtgtgcctttgccggcacatattcggccaactcgtcctcgacctacgagtacatctcgagcaacttcaacatctcgtacgtcgacggcagcggggcgagcggagactacgtctcggacacggtcaccatcggcagccagaagatcgaccggctccagttcggcatcggctactcgagtaccaacagccagggcatcctcggcatcggctacccgctcaacgaagtccaggtgggccgcgccggcctgccgccttacaacaacctccccgcccagctggttgccgacggcgtcatccggtccatggcctactccatctggctcaacgacctcgacgccaacacgggcaacatcctctttggcggcgtcgacaccgagaaatacacgccgccgctcctctccgtccccgtcgagtccgcctcagacgccgtctccgaattcatgatcaccctcaccggcctgaagctgggctcccagaccatcgggcccccggagctcgccatcgccgtcctcctcgacacgggttcctccctcacctacctgcccgacgctctcgtgtccgagatctacgcggccgtcggggccgtcttcgacggcggcgccaacgccgcctacgtgccctgctccctcgcccgcaacgagtcggccccgccgctcgtcttcaccttcagcgagccggccatcgccgtcggcatggacgagctcgtcctcgacctggccgtcaccggctccggaggaggaggagacggcggcagcagcagcaatggccggccgaccttcgacaacggcgcgcccgcctgcctgttcggcatcggccccgccggcgccggcaccttcgtcctcggcgacaccttcctccgctccgcctacgtcgtctacgacatggagaacgaccaggtcgccctggccccggcccgcttcaacgcgtctgcctcttcgcgtgtcgtcgagatcggctccggcccggacgccatcccgggcgccacccgcgtcagtaaccctgtcaagcccaccgacggcctgcgaggtgtgaacgtaaggacggaaactgccgccgccgcccgtgctggtctcggtggcggcggcggtggcacaatgcggctcatggcggcgtgtgcgactcttgtgcttgtcgtgttgggtggcttgatttag

SEQ ID NO: 1182 - DNA, 2487 bp, Myriococcum thermophilum
atgaggacctcctctcgtttaatcggagcccttgcggcggcacttttgccgtctgcccttgcccagaacaatgtcccgaatacttttaccgaccctgactcgggcatcaccttcaacacgtggggtctcgacgaggattctccccagactcagggcggtttcaccttcggcgttgccctgccctctgatgccctcacaaccgacgcctcggaatttatcggttacttgaaatgcgcaaggaatgatgagagcggttggtgtggcatttcccttggcgggcctatgaccaactcgctcctcatcacagcctggccgcacgaggacacggtctacaccagtcttcggttcgcgaccggttacgccatgccggatgtctacgagggggacgccgagattacccaggtctcttcctctgttaattcgacgcacttcagtctcatcttcaggtgcaagaactgcctgcaatggagccacggcggctcctccggcggcgcctctacctcgggcggcgtgttggtactcggctgggttcaggcattcgacgatcccggcaatccaacctgccccgagcagatcacactccagcagcacgacaacggcatgggtatctggggtgcccagctcaacacggatgctgccagcccgtcctacactgactgggccgcccaggctaccaagaccgtcaccggtgactgcgagggccccaccgagacttctgtcgtcggcgtccccgttccgacgggtgtctcgttcgattatattgttgtcggcggcggcgccgggggcatccccgcagctgacaagctcagcgaggccggcaagagtgtgttgctcatcgagaagggctttgcttcgaccgcaaacaccggaggtactctcggccctgaatggcttgagggccatgatctgacccgcttcgacgtgccgggtctgtgcaaccagatctgggtcgattccaaggggatcgcttgcgaggataccgaccagatggctggctgtgttctcggcggcggcaccgccgtgaatgctggcctgtggttcaagccctactcgctcgactgggactacctcttccccgatggttggaagtacaatgacgtccagcctgccatcaaccgcgccctctcgcgcatcccaggcaccgacgccccttctaccgacggaaagcgctactaccaggagggttttgaggtcctctccaagggcctggccgccggcggctggacctcagtcacggccaataatgcgcccgacaagaagaaccgcaccttcgcccatgctcccttcatgtttgccggcggcgagcgcaatggccctctgggtacctacttccagactgccaagaagcgcaacaatttcgatgtctggctcaacacgtcggtcaagcgcgtcatccgtgagggtggccacatcaccggcgtcgaggtcgagccgttccgtgacggtggttacgagggcattgtccccgtcaccaaggttaccggccgcgttatcctgtctgccggcaccttcggcagtgcaaagattctgttaaggagcggtattggcccggaagatcagctagaagttgtcgcggcctccgagaaggacggccctaccatgatcggcaactcgtcctggatcaacctgcctgtcgggtacaacctcgatgaccatctcaacaccgacacagtcatctcccaccccgatgtcgtgttctacgacttttacgaggcgtgggatgatcccatcgagtctgacaagaatagctatctcgaatcgcgtacgggcatcctcgcccaagccgctcccaacattggccctatgttctgggaagagatcgtgggcgcggacggcatcgttcgccagctccagtggactgcccgtgtcgagggtagcctgggcgctcccaacggccacactatgaccatgtcgcagtaccttggccgtggtgccacctcacgcggccgcatgaccatcaccccgtctctgacgactatcgtctcagacgtgccttacctcaaagaccccaacgacaaggaggctgtcatccaaggcatcatcaacctgcagaacgcccttcagaacgtcgccaacctgacttggctcttccccaactctaccattacgccgcgcgaatacgttgagagcatggtcgtctccccgagcaaccggcggtccaaccactggatgggcaccaacaagctcggtaccgacgacgggcggaagggtggctccgctgtcgtcgacctcgacaccagggtctacggtactgacaacctcttcgtcatcgacgcctccatcttccccggcgtgcccaccacgaatcctacttcgtacatcgtggtagcggcagagcacgcttcgtcccgcatcctcgccctgcccgacctcgagcccgtccccaagtacggccagtgtggcggtcgcgaatggaccggtagcttcgtctgcgccgatggttccacgtgcgagtaccagaatgagtggtactcgcagtgcttgtga

SEQ ID NO: 1183 - DNA, 747 bp, Myriococcum thermophilum
atgaagctcatagaagtcttgttactcacctcctccatctcgatggcctcggccaagcacatcatgatcccctccacctcgtttaattcgcagtccgatttcgacaccgactggaactacctctacccatggggcagcgaccacaacggtgccgcccgcatgagggagtcccaggtcagcctctcgaacggggtgctcacgctaacggcgacgcgagtggacggcgagccgcccgcccaccacggcggccaggatatcgccatccgctacctctcgggcgccatacacgccaaggagcacttcagcgtggctcctggcggcggttacgactttgcgggagagttccgcgccccagtgggacgcggcacgtggccggccttttggttgacgggggtcgacagctggccgcccgagatcgatatggccgagtggaagggcagcggcaagatctcgttcaacaccttcaacacatcgtccgaggtccgcgctttggacgtggactacccggacccggatgctttccacaagatcctgtgcgaggtgagggatgtgaacgggcaggatgtgagcgtgcgcttcgtcatggacggccaggaagtcgagacgcagtatgggaggggtttcgtggagaagccgttgtacttgatcatcaacttgcagatggagggctcctcgggttctcccggcccggaatcagacacgttattccaggccagaaacgttgaaatctggagttacaacgagtaa

SEQ ID NO: 1184 - DNA, 990 bp, Myriococcum thermophilum
atgaaaacgctctcagctgccctggcgctggtggcgcctgtccacgccggcctgcgcttcccatgctcgactctgaccgtccagcggctcgatcccgtcgtcgagccgggcaagatcccatctgcccatgtccaccacatcgttggcggcaacgccttcaacgccaccatggaaggcgacattggcgagcaggctacgtgcacgacgtgccagatgtctgaggacttctcgaactactggaccgcccagctgtacttcaagcatcccaatggctcttaccatcgcgtgcccgtcgtccccgtccagccccttctgggtggctcggagggtgccaggggcggcctgaccgtctactacacccagcacgacttgatgagggacaacctcggacagcaaaagatcacagccttcaagccgggtttccgaatgaccgtcggcgacccgactgttgagggcaagcctcaagtcggcctccgttatcagtgcctgcagggccagttcagaggccccgagctggaccacttcccggaggagaagtgctccggcggcatcttcaccacccaccacttcccagcctgctgggacggcaagaacctggacagcccagaccaccagtcgcacatgtacaacacgatccagtacgacggcttcatgccggcggggccgtgcccggcctcgcaccctgtgcgcatgccacaggtgacgtacgagaccgtgtgggacacgaccaagttcaacgacatgtggcccgacggcacgcccaaccccttcgtctggagctttgagggcaccgccggcggcacccacgccgactacatgttcggctggaagggcgactcgctccagcgcgctatggacacgcccgagtgcttctacgacggctgcggttccatcaccaagcagtctatggaagtggccaaccagtgcaccatccaggagaccgtccaggaagacgtcgagggctggatggataagctcccgggtcgttaa

SEQ ID NO: 1185 - DNA, 783 bp, Myriococcum thermophilum
atgaagtccttcaccctcaccactttggctgctctggccggcaatgccgccgcccacgccaccttccaggccctctgggttgatggcgtcgactacggctcggagtgtgctcgtctccctgcgtccaactccccgatcacggacgtgagctccacggcgatccgctgcaatgccaacccctctcccgctcagagcaagtgccctgtcgaggccggctcgactgtcaccatcgagatgcaccagcaacccggtgaccgctcatgcagcagtgaggccatcggcggtgcccaccacggccccgtcattgtgtacatgtcgaaggtgtcggatgcggcgtcggcggacggctcgtccggctggttcaaggtgttcgaggacggctgggccaagaacccgtcgggcgggtcgggcgacgacgacttctgggggaccaaggacctcaacgagtgctgcggcaagatgaacgtcaagatccccgacgacctgccctcgggcgactacctgctccgtgccgaggccatcgccctgcacacggccggcagctccggcggcgcccagttttacgtgacgtgctaccagctctccgtcacgggctccggcagcgccaacccggagaccgtctccttcccgggtgcctacagcgcgtccgaccccggcatcctcgtcaatatccacgccactatggacggctacaccgtccccggcccggccgtctactcgggcggcaccaccaagcaggccggcagtggctgctctggctgcgaggccacctgctccctctaa

SEQ ID NO: 1186 - DNA, 2616 bp, Myriococcum thermophilum
atgaaggctgctgcgctttcctgcctcttcggcagtacgcttgccgttgcaggcaccgttcaatcgagagagacttacgacaagcccctcgcgagatctgaaccttcttacccatcgccatggatgaaccctgatgccgagggctgggcggaggcctacgcccaagccaaggcctttgtctctcaattgactctgctagagaaggtcaacttgaccacgggcgttggatgggaggctgagcagtgtgtcggccaagtgggcgcgatccctcgcctgggacttcgcagcctgtgcatgcatgacgcccctctcggcatccgagggactgactacaactcggcctttccctctggccagaccgtcgctgccacctgggatcggggtctgatgtaccgtcgcggctacgcgatgggcgtggaggccaagggcaagggcgtcaatgtccttctcgggcccgtcgccgggccccttggccgcatgcccgcagccggtcgtaactgggaaggtttcgctccggatcccgtccttacgggcatcggcatgtccgagaccatcaagggcatccaggatgcgggcgtcattgcctgtgcgaagcacctgatcggtaacgagcaggagcacttcaggcaggtgggagaagcccagggttatggctacaacatcagtgaaacgctctcttccaacatcgacgacaagaccatgcatgagctctacctctggccgtttgccgatgctgtccgggccggggtcggctctgtcatgtgctcgtaccagcaggtcaacaactcgtacggctgccaaaactcgaagttgatgaacggcctcctcaagaacgagctcgggttccagggtttcgtcatgagtgattggcaggcacagcacaccggcgcagcaagcgccgtggctggtctcgatatgtccatgcccggtgacactgtgtttaactctggtctcagtttctggggcgccaatcttactctcgccgttctcaacggtacggtccctgcttaccgcgttgacgacatggctatgcggatcatggcagccctcttcaaggtgaccaagaccatcgacctggaaccgattaacttctccttctggaccgacgatacttatggtccgatccactgggccgccaaggaaggctaccaggagattaattctcatgttgatgtccgtgccccccaccacggaaacctcatccgggagattgccgccaagggtactgtactgctgaagaacaccggctctctacccctgaacaagccgaagttcctggccgtcatcggagaggatgccggcccgagtcccgacgggcctaacggctgcagcgaccgcggctgtaacaagggcacgctcgccatgggctgggggtccggctcagccaactatccgtacctcgtcacccccgatgccgctcttcaggcccaggcgatccaggatggcacgagatacgagagcgtcctgtccaactatgctgaggaaaggacaaaggctctggtctcgcaagcccatgctaccgccatcgtcttcgtcaatgccgactcgggcgagggctacatctctgtggacggtaatgagggcgaccggaagaacctgactctctggaacaacggtgatactctggtcaagaacgtctcgagctggtgtaacaacaccattgtcgtcatccactcggtcggccctgtcctcctgaccgagtggtacgacaaccccaacatcacggccattctctgggctggtcttccgggccaggagtcgggcaacgccatcaccgatgtgctttacggcaaagtcaaccccgccggccgctcaccattcacctggggcaagacccgggaaagctacggcgccgatgtcctttacgagccgaataacggcaacggtgcgccccagcaggacttcaccgagggcgtcttcatcgactaccgctacttcgacaaggttgacgatgactctgtcatctacgagttcggtcacggcctgagctataccacgttcgaatacagcaacattcgcgtcgaaaagtctaacgccggggagtacaagccgacgacgggcaccacagccaaggctcccacttttggcaacttctccaccgacctcgaggattacctcttccccaaggacgagttcccgtacatctaccagtatatctacccgtacctcaacacgaccgatcccaaggaggcttcggccgatccctactacggtcagacagccgaggagttcctcccgccgcacgctaccgatgacgacccgcaacctctcctccggtcctcgggcggcaactcccccggcggcaaccgccagctgtacgacatcctctacacgatcacggtcgacatcaccaacacgggctccgtcgtgggcgaggaggtgccgcagctgtacgtctcgctgggcggcccggacgaccccaaggtgcagctgcgcgactttgaccggatccggatcgagcccggcgagacgcgccagttcaccggccgcctcacgcgcagggacctgagcaactgggacgtcgtgctgcaggactgggtcatcagcgagtaccccaagacggcgtatgtcgggaggagcagcaggaagttggatctcaagattgagcttccttga

SEQ ID NO: 1187 - DNA, 915 bp, Myriococcum thermophilum
atgcgattcgccattccagtcctcaccgtcgctctcttgcggattcgacgagcctttgcggactccggaggaaggctctatgtcccaaatgcatggaacgcagatggtaaagggttttcgtgcattgcgatccgagactcgccgccgtcctttgatgcgacttggaagtggtcttcggaccccgagtctgtccactcatacccccacgtcaagttttcagatcccgctctccccgtgcccttgtccaacctctccgccctgaccctctcagctcagtgggccatggggccggggtcgaagccacgacctgtaccgagtctcgacttgcctggtttggcatatctgaacgtgtcagcgaatgtagcttttgatattttcgccgatcgcaacccggacaacgcccagcaggagaccgaagctgagacagagatcatgatctggctcgccaagattggcaagtcccagccgttgggatatcgcgagaccgagtctgatcatcgtacgacgcttagagttggccacgtcgacttcgatctgtatcggggcaggaaccaaagagggacatcggttttcacatgggtggcccgatcgcgggagacgagcttttcagctgacatatcgcttctccttcaatatctctggcgtaacggcttcatgtctcctggatcgcatgtgggcttggtttcgttcggaaccgaggggaatcatgccgacgggaatgtcactttctcatccttgaggtacgatctccatatgctgatcggtcccgctccaactctcgatgtctcgccgattccgacggcttgttctccttctgcctccccgtcatcagctgcgggacatcccgagatgccatggttgttcggcatgatatcgatcagtggcgtttttggcactgtgctagccctcctctga

SEQ ID NO: 1188 - DNA, 975 bp, Myriococcum thermophilum; identical to SEQ ID NO: 882

SEQ ID NO: 1189 - DNA, 1053 bp, Myriococcum thermophilum
atgaagcttcagcaacggagcgttctcgctgccgccctggcgttggctggggcgccgagcgccaacgccatccttcgtttctcatgctctgagctcgttaccgagcgcctcgaccctctcgttttccccgggtctcccgagtcccctcacctgcaccaggtggtgggtggcaacatgttcaacatcaccatggaccctaatcagcacaacatcggcgaggaggcgacgtgcacaacctgcaccttctcggaggacttctccaactactggacggcggtgctgtacttccgggcgcgcaacggcagctacatgcgggtgccccagcggcccaatgtcggttttgagggggcgcgcggcggcggcatgacggtctactacacggcttcgttccagccgggaggcggcaaggtgacggccttccagccgggcttccgcatgatcgtgggcgacccgtcgatccggacggagcaggaggcggccaagtaccggcagctgaccttcacctgcctcgagaacatgtacacgcgcgacggcgagaccaagtcgctgccgaaccggccctgcccggagggcatcatggccaacatccgcttcccgacctgctgggacggcaagaacctcgactcgcccaaccacgccgagcacgtggcctacccggccagcggcaccttcgagagcggcggcccctgcccggagagccacccagtcaagctcccgcagctcttctacgaggtcatctgggacacgcgccagttcaacgacccgagcctgtggcccgaggacggcagccagccgttcgtctggtcctacggcgacttcaccggctacggcacccacggcgactacgtcttcggctggaagggcgacgccctccagcgcgccatggacgccaactgcgacgtcttctgccccaccctccagacccagagcatctcgcagggcaaccagtgctccgtccagcccgtcgtcaacgagcagatcgacggctggctcgacagcctgcccggcaacgtccagatcaccgggccccagccgcgcactagctctgcttag

SEQ ID NO: 1190 - DNA, 2334 bp, Myriococcum thermophilum; identical to SEQ ID NO: 884

SEQ ID NO: 1191 - DNA, 663 bp, Myriococcum thermophilum
atgaagtctgctgttgttgtaatagcaatcgccgcttcggcttgggcacacagcatcttccagaaagtctcggtgaacggggccgaccaaggcctcctcgtcggcctccgcgccccccaatccgactacccggtctacgatgtgaacgaccaacagctcacttgcggccttcccgggacccggtcggacaaggtgatcgatgtcaaggcgggcgaccgcatcggggcgtggtggggacacgtcatcggcggcgagcagtaccccagcgatcccgaccatccgatcgcggcttcgcacaagggacccatctcgacttacatggcccgagtggacaacgcggcaacggcgtcggacgcagggctgcagtggttcaaaatccacgaggacacgttcgaccctgccactggcctctggggcgtcgacaacatgatcgccaatagcggctggtccttcccgcatggcgcccagttttatcagtcgtgcgcccagctcaacgtctccggctccggcacctacctgccctccgagatggtcagcatccccggtgcctacaaccaagacgatcccggcatcctgatccagatctgggtcaacggtatacccgataatggggggaagccctacactgcccccggaccgaggcccatgatgtgtctcgcctga

SEQ ID NO: 1192 - DNA, 1092 bp, Myriococcum thermophilum
atgcggttttctgcttctgttgccttggccctcagcggcctggtggctgctaagccacttcatatggacaaagtcacgaagttcatcgagcgacagactcagacgctcaatgaggccatggtagcctcgggtcgcgagtacatcggcacgtccctcactctccgtggtgactataccgaggagcagatcatccggaccgagttcggctccatcactcccgagaatgccatgaagtgggatgccaccgagcccaaccgcggccagttcacctttagtgcggcggaccagcacgccaactgggccaggcagaacgggaagcaggtccgctgccacaccctggtctggtactcgcagctccccggctgggtatcaaacagcggctttgacaacgccaccttgatcgacgtcatggccaaccacatcaacacggtcatggggcgttacaagggcgtctgcacccactgggacgtcgtcaacgaagccctgaatgaggacggcacgtaccgtgacaacgtcttcctccgcgtcatcggcgaggcctacatccccatcgccttccggatcgcctccgaggcggaccctgatgcgaagctgtactacaacgactacaacctcgagtacctcggccccaagctggagggcgccgcccgcatcgtcaagctggtccagcagtacggcgtccgcatcgacggcgtcggctaccagggccacctggtgaccgagtcgacgccgacccaggggacgcccacgccgtccgaggaggacctcaccgccgccctccgcaccaccgccgacctgggcgtcgacgtcgcctacaccgagatcgacatccgcatgaacaccccggccaccgagcagaagctgcaggacctcgccgacgcctacaaccgcgtcgcccgttcctgcctcaacgtcgagcgctgcgtcggtatcactatctggggtgtctccgataggtactcgtgggtccccggcaccttcccgggtgagggcgaggccctgctctgggacagcaacttccagaagaaggccgcctacgacgccttcctggagggcatctcctcccctccctccaactctaccaagttctga

SEQ ID NO: 1193 - DNA, 1026 bp, Myriococcum thermophilum
atgcaaccgaagggttggattgctgccctcgcggcggcccaagttgctaagggccaggagttgatgcggttcggctgctcgcagctgaccatcgaccgcatcgaccctctggtcaacccgggcagcatcccgtctcctcacatgcaccagatcgtcggcggtaactcgctcaacgcttccatgccaccggtcgagtacgaccctccgacgcagtcgacttgcaccagctgcacttactctgaggacttctccaactactggacggccaacgtctacttcaaggcccgcaacgggtcctacaagcgcgtcccgcagtttgcgaaccttggcctgaacgtcgacggtggtgtgaccgtctactacatccgtggctaccagcccagtgctaccgtcacggccttcaagccgggattccgtatgctcgttggcgaccccaacaaccgtgatgagagcaaggtgccgccgggtctctgcttccggtgcgaggagaacatgcagcagaacccgttcggtggaccgccctgcacgggcgccgacaccaaggccttccccagccggacgtgcggcggcggctggcgcgtgacggtgacgttcccgacctgctgggacgggcagaacgtcgacacccctgaccacaagagccacgtcacgtacccggccagcggcacgttcgagagcggcggcccctgcccggccagccacccggtcaagatcccgcaggtcatgtacgaggtcatgtacgacacgagagagttcaacaaccaggccgagtggcccgaggacggcagctcgcccttctactggagccacggcgacaacacgggctacggcatccacggcgactacgtcttcggctggaagggcgacgccctgcagagggccatggacaacaagtgcgccggcgaccggtgcgctccgcttcagaggcagtccgatgccgaggccattgcctgcaccaaggaacagagcgccaaggaggatatcggcgacaactggcttcctcacatccctggccaagagttgtaa

SEQ ID NO: 1194 - DNA, 942 bp, Myriococcum thermophilum
atgaagttcctcagccagctctcggcggcactcgccctcgccggcagcaagctggctgccgcgcacccggtcttcgacgagctgatgcggccaacggcgccgctgttgcagccgcgggcgtctctgcagcaggtgtacaactttggcgataacccgtccaacacgaagatgttcatctatgtgcctgacaatctggccgagaacccgcccatcatcgtggccatccactactgcaccggcaccgcccaggcctacttcacgggctccccctatgcccgcctcgccgaccagaagggcttcatcgtcatctacccggagtccccctacagcggcacctgctgggacgtctcgtcgcgcgaagctcttacccacaacggtggcggcgacagcaactcgatcgccaacatggtcacctacaccatcgagcagtacggcgccgatcccagcaaggtcttcgtcaccggttcttcctctggtgccatgatgacgaacgtcatggctgccgcgtacccggaaatgttcgcggcaggcatcgtctactcgggcgtgccggccggctgcttctacagccagacgggagcggtcaacgcgtggaacagcacgtgcgccaacgggcagatcaactcgacgcccgaggtgtgggccaagatggtgttcgacatgtacccggggtacgagggcccgcgccccaagatgcagatctaccacggctcggtcgacttcaccctctcggccaacaactacaacgagaccatcaagcagtggaccggcgtcttcggctacgactacaaccgccccgactccacccaggccaacaccccacaggccggctacaccacttacacctggggcgacggccagctcgtcggcgtctacgctcagggcgtcgggcatagtgtccccatccgcggtgacgacgatatgaccttcttcgggctgtga

SEQ ID NO: 1195 - DNA, 693 bp, Myriococcum thermophilum
atggtctccttcaaggccctcgttctcggtgccgtcggcgccctctccttccccttcaacgtcaccgagctgcgcgaggcgcacgctcgcggtgagaacgtgaccgagctgttgatggctcgcgacggcactccgagccagaccggctaccacggaggctactactactccttctggaccgacaacggcggctacgtcaactactggaacggtgacaatggcagatacggcgtcgagtggcagaactgcggcaacttcgtcggcggcaagggatggaaccccggcgcggcgcggaccatcaacttcagcggctcgttcaacccgttgggcaacggctacctggccatttacggctggacgcagaacccgctgatcgagtactacatcgttgagtcgttcggcacgtacgacccgtcgtcgcaggcccaggtgctcggcagcttctaccaggacggcagcaactacaagatcgccaagacgactcgctacaacgccccgtccatcgagggcaccagcaccttcgaccagttctggtccgtccgcgagaaccaccgcaccagcggcagcgtcgacgtcggcgcccacttcgcccagtggcagcaggccggtctccagctcggcaaccacaactaccagatcgtggccaccgagggttaccagagcagtggctcctctgacatcaccgtctggtaa

SEQ ID NO: 1196 - DNA, 1281 bp, Myriococcum thermophilum
atggtgactccctctctgaagaaggcggctctggctgccttgtccctccttccactcatgtcctccgcatcaccagtgccggtattcaatgaaactagcgtggaggcccgacaggcatcgggatacaagaacattgtgtacttcaccaactggggtatctatggccgcaactaccagccggaccagctgcccgcgtctcagctcacccatgtgctctatgcgttcgccaatctcaggtctgacggcgaggtcttcctttccgacacctatgcggacctagagaagcactatcctggcgactcatgggatgagaccgggaccaatgtctacggctgtgttaagcagctcttcctgctcaagaaggcgaaccgccaactcaagaccctcctgtccatcggcggctggacctactcatccaccttccccgcggcggctagcacagaagccggccgggccctcttcgcgtcctcggcggtccggctcttggctgacctgggcttcgacggcctcgacgtcgactgggagtacccggccaacgaggaggaggcggccaacttcgtcgccctcttgaaggcggtccgctcggctctggacgagtatgccgcccagcacgcgcccggctaccacttcctcctcaccatcgcctcgcccgccggcccgaccaactacgcccacctgccgctgggcgagatcgccggcgtgatcgacttcttcaacttcatgggctacgactacgccggctcctggagcaccgcggccggacaccaggccaacctgtacccgacctcggaccagaacaagacgcccttctcgaccgacaaggccctgtccgactacgtcgccgccggcgtcgacccgtccaagatcgtgctcggcatgcccatctacggccgctcgttccagaacacggacgggctgggccagccctacagcggcgtcggcgagggcagctgggagaacggcgtgtgggactacaaggtgctgcccaagtccggcgccaccgtcgagttcgacgaggaggccggcgccacctacagctacgacccggccacgcgcgagctcatcagcttcgacacggtcgacatggtcaagaagaaggtcgactacgtcaaggagaagggcttcatcggcagcatgttctgggaggcctcggccgaccgcaccggcgacgagagcctcatcggcgccagcttcaacgccctcggcggcatcgaccagtccgagaacctgctgtccttcccggacagcaagtatgacaacctcaaggccggcttcgagtaa

SEQ ID NO: 1197 - DNA, 1356 bp, Myriococcum thermophilum
atgcgcatctcatcgaccactctcacggcggcgctcgccggcgttgcctcggcgtctctccaggtcgtccccggaggcacatggacaacaccggacggcgagcacctgcaggcccatggcgcgggtttcatcgagatcaacgggacatactacatgattggcgaggacaagagcggcggccattccttctctaacgtcaactgctactcgtcgaccgatcttgtccagtggacctacgtcggcgccctcctctctcgaaccgactccggtgatctgggaccgaaccgcgtggtagagcggcccaaggtcatctataacgacaagactggcaagtacgtgctctggatgcacatggacagcagcgactatggcgaggcgagggttgccgtcgcaacgggcgacgaagtatgcggcaaatacgaatacatcgggagcttccgaccactcgggaggcagagccgggatatggggcttttcaaggatgacgacggcaaggcctacttgttgactgaagaccgagaatacggcctccgcattgtcgcgctttcggatgattatttgacccccaccaccgacgtctactcatggagactcgaaggagggaaccgggtcgaggcgccagccatggtcaagctaggcgatacttacttcttgttcgcgtccatgatgaccggatgggaccccaacgacaaccagtacacaacgtccaagagcctcagctccggttggtctgagtggcgaaagtttgccgatcagggaacgaatacgtacaactcacaaacgacgtacatcctcaaaacgagcgagagcagcgctatttacatgggtgataggtgggtcaaggacaaccttatggcgagcacatacgtgtggctgcccctggacatcagcggcaccagcgtcaccatgaagaactttgtcagctgggtgccgacgtccaacttcgcctcgtggcagaacccgccggccgagacgagctacgaagctgaggcggccacgtacggcggccaggcgcgcaacatcgactgctcacagtgctcgggcggggtggcggccggctacatcggcggcccggacggcggcagcgtcaccttctcgggcatccgcagcgacatcgacggcctgaccaccatccgcatcaagttccgcaacggcgacagcagcccgcgctacgccaacgtccgcgtcaacggcgacgccggcaggaagcttgccttcctcaccgcccgcggcgatcccgcctccagcaccttgcacgccgagctcaagaagggatcagacaacaccatcgttatcgagggcatcgacggcggctggggccccgatatcgaccgcctgatggtgccggtgcagtga

SEQ ID NO: 1198 - DNA, 1980 bp, Myriococcum thermophilum; identical to SEQ ID NO: 892

SEQ ID NO: 1199 - DNA, 2445 bp, Myriococcum thermophilum; identical to SEQ ID NO: 893
  misc_feature (1813)..(2109): n is a, c, g, or t

SEQ ID NO: 1200 - DNA, 2244 bp, Myriococcum thermophilum
atgcatgaccctatggccttcgtttcctccttagcctttgccgccctcggggcactcatcgtccctgcgaggggcggagtaacttacccggactgcgccaacggaccgctcagatcaaacacggtatgcgatacgtcggcgtccccggcagctcgagcggctgctctcgtggaggcgatgaacacgaacgagaagctcgcaaatctgatcaacaactctccgggtgtctcgcgactcggcctgagtgcgtaccaatggtggaacgaagccctccacggagtagctcataaccggggcattacctggggtggcgagttcagcgcggctacccagttcccgcaggctatcacgacttccgccacgttcgatgacgctttgatcgagctgatgggcaccattatcagcaccgaggcccgtgcttttgctaacaatgggcgtgctcatcttgacttctggacgccaaatgtcaacccgtttcgagacccgcggtggggacgtggacacgagacgccgggagaggatgctttcaggaacaagaagtgggctgaggccttcatcaagggcatgcaagggcccggaccgacacaccgagtcatcgccacgtgcaagcactacgcagcttacgacctcgagaactccgggagcacgacgcgattcaacttcgatgcgaaggtgtcaactcaggatctcgccgagtactatctccctccgttccaacaatgcgcccgggactctaaggtgggctccatcatgtgcagctacaatgcggtcaacggcgtccccgcctgcgcgaattcttacttgatggacaccatcctgcggaagcattggaactggaccgaccagaatcaatatattgtgagcgactgcgatgctgtgtactatctcggtaacgcaaacggcggtcaccgataccagccgagctacgcggcagcgatcggagcttccctcaaggccggttgcgacaacatgtgctgggcgaccggcggcactgccccggatcccacgtcggcttttattccgggcctcgtcctggcagggtactttgacggtccggacggcatgtaccgcaacctgagcgcgtcggacttgaacacgcaagccgcccaagatgctgcgctcaaggccgccgaagaaggcatcgtgctcctcaagaacgacggaatccttccgctctcggtcaatggttccaattcccagctcgctatgatcggcttctgggcgaacgcagccgacaagatgcttggaggttacagcgggaccccaccgttcaaccatgatcccgtgacggctgcaagatcgatgggcatctcggtcaactatgttaacggacccttgacgcaaccttacggggatacgtcggcagcagtgaatgccgcccaaaggtctgatgcggtgatattctttggcggaatcgacaataccgtggagaaggagagtcaggacaggacatccatcgagtggccatctggacaactggccatgattcgggcgctcgctgaaactgggaaaccaattattgtcgtgaggctcgggacacacgtcgatgacacccctctcctcagcattccgaatgtgagggccatcttgtgggcaggataccctggccaggatggcggtacagctgtcatgaacatcattaccggcctcgccagtccggcggggaggctgtcggccaccgtgtatccggcttcgtacaccaaccaggcaccctatacaaacatggccctacggccgtcttcctcctatcccggccgaacataccgctggtacaaggacgccgtatttcccttcggccacggcctgcattacaccaatttcagcgtctctgtgcaggatttcccggaaagcttcgagattgccgacctcttggattcctgcggggactctgtgccgtatcttgacctttgcccgttcccgtccgtgccgctcaacgtgacgaacactggctctcgtgcgtccgattacgttgcgcttggcttcttatcgggagaatttggtccaagtccatatcccatcaagacactggcaacgtataagcgcctgtttaatatcgagcctgggcaatcgcaggaggtcgagctcgagtggaagctggagagcctagcccgagtggacgagaatggtaacagggtgctctacccgggaacttatacgcttttggtggatcagccaaccttggcaaatatcacctttaccttaacaggtgaagaagcagtattggatagctggccgcagccatga

SEQ ID NO: 1201 - DNA, 687 bp, Myriococcum thermophilum
atgaaggttgttgctgttgctgtccccgtcctggccggcattgccggagccaaccccatcgacgttgaggcccgccagtcgtgccccgaggtccacgtcttcggcgcccgggaaaccacagcgccccctggctatggcacctctcaaggcctcgtcaacatggttgttcaggcgtaccccggagcaacaagcgaggccatcgactaccccgcttgtggcggtcagccgcagtgtggcggaatcgactacgattcttccgcgaatcagggcactcaggcggttgtttccgctgtgactagctttaaccagcgttgccctgacactaagatcgtcctgattggctattcgcagggtggccaaatcatggacaacgcctactgcggcggcgccggcgccaccctcagcggaagcgccctcgacgccgttaaagctgctatcttcttgggagatccgcacttctcccaaggccagagcataaacgttggaacgtgccaggctcaaggcttcgctgcccgccctccgggatatcaatgcacgcccggcaatccagacaacgccaagtcctactgcgacgctcaagatccctactgctgcaacggaaacgacgcaaaccaccaccagcagtatgtcaacatctacggccaagaggcgctcgcgttcatccagtcgaagctcaacgctgcttag

SEQ ID NO: 1202 - DNA, 1074 bp, Myriococcum thermophilum
atgcagtggaaagcgcttgctctcacgctccttgttggccgcggcttgggccagtccgtgtctcccacgcagccatggttcccgaacccgaccgatataccggcgatgctccgattccaatgttcacagctcgtcatcgaccgccttgaccctctcggcagcccggggttgatcccatcaccccatcttcaccaaatcgtcggcggtaattccttcaatgcgaccatggaccccgagacccacgacctcgtggccggctcgacatgcaccacctgcaccttctcggaggacttctccaactactggaccgccgtcatgtacttccgagcccgcaacggcagctacaagcgcgttcctcaacgtccgaacatgggtttgtctggaaacggtggtgtcacagtctactacatcccgccgcacgacaagagtgttggcgttactgcatttaagccgggattccggatgttggttggagatgctgcaagccacgagcctggccaggatcccaaggtgtgccatcgctgtatgccgaaggaaggcgagctccctcacctgaattgtgctccgccggactcgcaggagttccccaaggaaccctgtgagggcggcatccgttcggtcattactttccctacttgctgggatggtgtgaatctggatactccggatcacaagagtcacgtggcctatccggtctctggaaacaccgacatgaccccggatgctggaacctgccccgacactcatccagtcaagatcccgcaggttatgctggagacgatttgggatacaactccgttcaacgacaaggagttgtggcctgaagacggctcgcagccgttcgtctggagcactaatgacaaggatggctatacccagcatggcgattacgtgtttggctggaaagacgattctctccagcgggcgatggatgcgcgctgcacgggagacgtttgtgacgtactggagcgacagagtgtcgaagagtctgtcaagtgcacaatcgagcaaactgtgaaagacgacgttgatggctgggtcgctagcattccgggtcagaagcccttggcctga

SEQ ID NO: 1203 - DNA, 675 bp, Myriococcum thermophilum
atgaagggattcctcggtgctgctgccctcgcgctggccgttggcgaagcctcggctcactacatctttcagcagctgacgacgggcggcaccaagcatgatgtgtaccagtacatccgcaagaacaccaactacaactcgcccgtgaccgatctgtcgtccaacgacctccgctgcaatgtgggtgccacgggcgccggcactgacaccgtcgaggttcgcgctggcgattcgttcaccttcaccaccgatacccctgtgtatcaccagggcccaacctcgatctacatgtccaaggcccccggcagcgcgtccgactacgacggaagcggcccttggttcaagatcaaggactggggtgccgacttcagcagcggccaggcaacctggaccctgacgtctgactacactgctacaattccttcgtgcatccctccaggagactacctgctccgcatccagcagctcggcatccacaacccttggccggcgggtatcccccagttctacatctcctgcgcccagatcaccgtcaccggcggcggcaacgtcaaccccagcccgaccgtctctattccgggcgctttcaaggagaccgacccgggctacaccgtcaacatctacgataacttccacaactacaccgttcctggccccgaggtcttcacctgctag

SEQ ID NO: 1204 - DNA, 1848 bp, Myriococcum thermophilum
atgtatctctcgcgacttgctctggcgtcgctcggcctgcttctggcgggtgccgaggcggctgaaccatatcgtcttcgcactccgcccctcgacacgcagtggaccaaggaagtgggcacgaacccttggcctcaacaccctcgccccttgctccgccgcgatgagtggaagaatctcaacggcatctggacataccaacctaccgaaggcgagcccgacgccggctcccttccggagctgcctttggagaaggaagtcctcattccgtcgtgcatcgagagtggcatctcgggcattatggacatgagctttcaagtcacccggatgttctttggcaccaccttcagcgtaccctcggactggaccaaatccggccgccgcgtcttgctcaactttgaatcggtcgattacgaggccactgtctacgtcaatggcgccaaggttggctttaaccgcggcggttatgctcgcttcacctttgatattacggatcacattgctgaagatggtgacaatgagctccacgtctttgtctttgatccgacggatgaccagagcatccctcagggcaagcagaccaagcggccgtcacacatcttctacacaccctgcacgggcatttggggaaccgtgtggctcgagagcgtcccggagaactacatctcggggctcgaccttgccggtgacatgcacggcgagctgaccgtcaccgtccacagcggagccaaggaagagacccccgtcgaaatctcggtcgtggatccgcagggcgacgtggtggccacgcacaagagtgtctcggaccgccagttcgccttccgagtgcccaatcccaagctctggtcgcccgacgagcccaccctgtacaacgtcaccgtcaagttgggcgaagacgaggtctcgagctacacgggcttccggaccatctcctccggtgtcgtcaagggggtcaagcgtaccctgcttaacggcgagttcgttttcctattcggccctcttgatcagggttattggcccgacggcatctacaccccgccgacactggaagcaatggtttacgacttgagagtaattaagagcctcgggatgaacatgctccgaaagcacatcaagatcgagccagacctgttctatgaggcatgcgatcgtcttggcatcatggttttccaggacatgccctcgatgagggttttcaccaatgcgccacccacggacgaagaccaaagggagttcgagcgtcagctggagatcatggttaacgagcacaagagccacccgtccatcatcacctgggtcatctacaacgagggctggggccagagaaccgactacttccccgagttcgagctgaccgaccgcgtccgcgagctggacccgaccaggctcatcgacgcaacctcgggctggatagatcacggcgcgggcgacttctcggacaatcataaatatgccgagccgcagtgtggcacgccatggcactcccagccgtcggcacccttcgaccccaaccgaatcggtctccagggagagtttggtggcatcggtcatcgaccagccgacgagaacctctggcccatcgaaggggcggtcaggaccatcaaccagacgtacgagatccacggcgggctcgagtcataccactatcgcgcccacgtgctcctcggccagctgcgcgaccaggtcgaacgctactcctgcagcggcgccatctacactcagactaccgacgtcgagggcgaggtcaacggcctcctgaccatggaccgccgcgtcattcgcatcgacgtcgaccaatggcgcgaggacatcgaagccttgtataaggccgcccgtgcgagggcctga

SEQ ID NO: 1205 - DNA, 1686 bp, Myriococcum thermophilum
atgctccgtggaacgatcgcggtgggcgtggcgtgcctcgcgcaactcgtcgcgggcttcaatgggccaccattccggacttccttgacgctccgggactttagggaacagctggaacgccgccagacgcgagatgctacttccctggaagcccggaagaccgacctggaggatctctatccggcgcacgccctccaggtccccgtggatcatttccacaatgatagcctctacgagccgcactcgtccgataccttcccactgcgctactggttcgacgccagttactacaggaagggcggccccatcattgtgctgcagagcggcgagacgagtggtgtcgaccggcttcctttcctccagaagggcatcgtggccaagctcgcccaggccactcacgggctcggcgtcattcttgagcatcgctattacggcgagagtattcccaccccggatttcagcaccgagaacctgcgcttcttgactacggaacaagctctggccgacatggcttattttgcccagcatgtcgtcttcgagggattcgagcacctggacctgacgtcggccaagaacccctatatcgcctacggcggctcctacgccggcgctttcgtggcttttttgcggaagatttatcccgatgtctactggggtgccatctcttcctcgggtgtccccgaggccatctacgactactggcagtactacgaggccgcgcgcatctatgcacctcacgattgcgtggtggccacccagaagctgacacatatcgtggacaacatcctcctcaacaatgaggctgattccgactacgtcacgcgcctcaaggctggcttcggcctcggcggcgtaacgcgcaacgacgactttgccaacgccatctcatggggtatcggcggcctgcagggcctgaactgggacccggcggagaacagcactaatttcggcgagtactgcaacaacctgactgccacggagactctctacccgacttcccccagccttgagcaagacgcccgcgagctcgtcaaggtcggtggatatagcaaggaagccgatacccttactacccaactccttaattacatgggctatgtgaacgccacgacggttcagacctgccgcaaggacacccaggacgagtgcttcaccaactacaactccaccttctaccagcaagacgacaagacgcaggattggcgcctctggtcgtatcagtactgctttgaatggggatacttgcagaccggttcgggtgtgcccgccgaccagctgccactcatctcgcgtcttatcgacctcgacttcctctcggtcatttgtcgcgaggctttcaacatcacgactccatcacaagtcgaacgaatcaacaaatatggcggggtcaatatcagctatccgcgcctggctttcgtcgacggggagcgcgacccctggcggtacgcctcgccccaccgcatcgggctgcccgaacgcaagaataccatcagcgagcccttcattctgatcgaggacggcgtgcaccactgggatgaaaacggagttttccctaacgagactcggccgggtgtgccgcccaagccggtggccgatgcgcagcgggcggaagtcaagtttgtcaaggcgtggctgagagagtggaaggagaaggagaagtatccgtacgacggggatgatctctga

SEQ ID NO: 1206 - DNA, 813 bp, Myriococcum thermophilum; identical to SEQ ID NO: 900

SEQ ID NO: 1207 - DNA, 1107 bp, Myriococcum thermophilum
atggccctcaaactcctgtgtcagtccctactcgtcctcggggcgctgggttctgtcctccctcctcgggcggatcagtgtcctgccctgccaaccaactactcgcccaggcccaacccaaagcttcccgatccgttcctgcagctcgacgggacaaggatcaccaagaaggacgaatggacatgccagagagactacctcagccagctgatccagaagtacgagctcggcgattacccggcaccgcccgagtccgtgacggccagcctgtcgggcagcacactctccatcacggtccgggacaaggagaagagcatctccttctccgtgtcgatccgggcgccgtcgtcgggaggaagcggtccgttcccggccatcatcgcgtacggcgggccgagcatcccgatcccgagcgggatcgcgaccatcatcttcaacaacgacgagatcgcgcagcagatcaacacgggcagccgcggcaagggcaagttctacgacctgtacggcagcggcgccacggccagcgcgatgctcgcctgggcgtgggggggcgcgctggtggcgggcgccttcgtcgaccgcatcgccctcaccctcccgcaggagtcgggctcgggcggggcggcctgctggcggctctcggacgagatgaagcggcgggggatcaacgtgcagacggcgagccagatcatcaccgagaacgtgtggctcagccggtcgttcgagcaattcgccaggaacaacaacgtgcccggcctgcccatcgaccaccacgagctcgccggcatggtggccccgcgcgccctgctcgtcatcgagaacacgtcccaggtctggctcggcaacatggccacctacggctgcatgaagacggcccacaagatctgggaggccctcggcgtccccgagaacatgggcttcacccagaccggcgaccacagccactgtcagtggtccagctcccagagcgccgagctcaccgccttcatcgacaagttcctcaggggaaccggaacagccaacaccaacatcatcaagaccgacaaccccaacctgggctttgtcgacagcgattgggtcgactggtatgttccgactttggtatga

SEQ ID NO: 1208 - DNA, 1053 bp, Myriococcum thermophilum
atgatgctcaagcgtttcgtggctagcctcatcggcatctccgccgcggacgctgcccttacctacaaaggtgtagattggtcgtcagtgttagtggaagaacgggccggggtctcgtataagaacatcgacggtagtgctcagccgcttgaaaatatcctggctgccaacggcgtcaatacggtgcggcagcgagtctgggtcaacccctcggacggcaactacaacctcgattacaacatcgagattgcgaagagggcaaaggctgccggacttgacgtgtacatcgacttccactacagcgacacctgggccgatcctgcccaccagaccacgcctgctggatggccgagcgacattgacaacctctcctggatgctctacaattacactctggacgtcgccaacaagctccaggaagcgggtatccagccaaacatcgtctctattggtaacgagatccgggcaggttttctatggcccacgggtagaaccgaaaattggggcaacatcgcccgcttgttgcactccgccgcttggggtatcaaggactcgtcgctcagcccgcagccgaagatcatgatccacctcgacaacggatgggactggggtacccagaattggtggtactcaaatgtcttgggccagggcgcactggagatgtccgactttgacatgatgggtgtctcgttctacccattttactcctcatcagcgaccttgagcgccctgaaatcgagtttggacaacatggccaggacctggggcaaggaaattgccgtggtcgagaccgattggcctatctcctgcccagccccaatgtatgaattccctgcggacgtcaggggtatcccattctcgcccgagggacagacgaccttcatcacccaggtggccgaagtcgtggcctcggtgagcggcggcgtgggcttgttctactgggaacccgcttggattcacaatgcgaacctgggctcgtcgtgcgccgacaacacaatgttttcgcagtctgggcaggcgctgtctagtattgccgttttcaaaaatatttaa

SEQ ID NO: 1209 - DNA, 1497 bp, Myriococcum thermophilum
atgaggaaggcagctgtgatggccgcggccgcggccgttctcgccaatggcgcgacggcccgggttcacgggcaccgccatgcccacgccctcttccagaagaggagcgatgccggtgatgtgtgcacaccgagctgcaccaccatctactcgaccatcactggcgaaccgacccttctcccgcctgcacctgcgccgacaccctctactagcacgcccgttgccgagcctaccacgtctacgtcgagcgggcctgtcctcgttccgacgccgatcgagcagactttgccgactccgggcacctacaccatccccgcgacgaccgtcgtcctgaccaagacgaccaccgtctgcggtgcgtcctcgtccgaggtcccggccggcacccacacgctcggcggtgtcaccaccgtggtcgagacggccaccacggttgtctgcccggtggccaccaccgagacccaggacaatggcgttgttaccagcgtcatcaagaccacgacttacgtctgcccgtcggctggtacctacaccattgcccccattactaccgaggttcccgaggccaccaccgtcaccatcccggtcgtcgagacttatcccccgggtacctacactgctccggaggtcgtcaccaccgtcaccgagaccagcgtgatcgttacctgccccttcacttcggccacccctgctgagcccacttcggccccgtcccccaccgagccggctcctgcccctccgtccacgtccaaggacgccccggcccctccttcgtcatccaaggtggccccatcaccgtccccatccccgtccaagggccccaatcccgacgaccacggcaagcggtgggccattacctacactccgtacactcctgagggcaactgcaagggccccgccgaggtgaatgaggatgtcgctgccattgccaaggcaggtttcaaggctctccgcgtctactcgaccgactgcgacaccttgcccaacgtcggtgacgctgctcgcaaccacggcctccgcttgattgttggcatcttcatcggccaattcggctgcgagaacggcagccccaccgtcaacgagcagatcaacgctctcaagaagtggagccagtgggatcttgtcgacctgtgcgtcgtcggcaacgaggccctgttcaacggcttctgcaccgtttccgagctcgccagcctcattaaccgcgtcaagtcggagctcggctcggtcggctacaacggcgccttcaccaccaccgacgtcgtctccgcttggatcaacaatgacgtctcggccatctgcgacgccattgacgtcactgcctgcaacgcccacgcctacttcaaccccgagaccaaacccgctgatgccggcaggttcgtcgccggccagctgtccatcgtcgagaaggtctgcggcaagcccggctacgtcatggagaccggctggccttcggccgccctgcccgattccttccacgctcgtaggcagttcatttaa

SEQ ID NO: 1210 - DNA, 1185 bp, Myriococcum thermophilum; identical to SEQ ID NO: 904

SEQ ID NO: 1211 - DNA, 678 bp, Myriococcum thermophilum
atgcatctttccaccaccgccggcctcctcgccctcccggccctcgccctggcccaggcctcgggcaacggcgagacgacccggtactgggactgctgcaagccgagctgcgcctggcccggcaagggctcgtcggcgccggtgcagacgtgcgacaagagcgacaacccgctcaacgacggcggctcgacccagtcgggctgcgagcccggcggcggcgcctacatgtgctccaaccagagcccgtgggccgtcgacgaccagctctcgtacggctgggccgccgtccgcatcgccggccagaccgaggagcagtggtgctgcgcctgctacgagctcaccttcaccagcgggcccgtccagggcaagaagatgatcgtgcaggcgagcaacacgggcggcgacctcggccagaaccactttgatttggctatccccggtggcggtgttggtatcttcaatgcctgcaccgaccagtacggcgctcccccgaacggctggggcgaccgctacggcggcatccacagcagggaagagtgcgattccttcccggaggccctcaaggatggctgctactggcgcttcgactggttccaaaacgccgacaacccgaccgtcagcttccaggaggttgcctgcccgtccgagctcacgtccaggagcggctgctctcgttaa

SEQ ID NO: 1212 - DNA, 2007 bp, Myriococcum thermophilum; identical to SEQ ID NO: 906

SEQ ID NO: 1213 - DNA, 1368 bp, Myriococcum thermophilum
atgaagttcgccgtcttcgccctcgcggcgtctctcgtcgcggctgcgccccgcgtcgtcaaggtcgacccctccgacatcaagcctcgccggctcggaggaaccaagttcaaactgccccagattcacaatgacttcttccgccagcatggcagaggccccagggccctggccaaggcctacgagaagtacaacatcgagctgcccccggacctcttgcacgttatccggggcattctcagagacctgggcatcgagccgaaggctaagaagatccccggactccactcgtctcacggcgatggcgcgccctacaccaacgagacggatgattcgggtgaggtttctgccatccctcagctctttgatatcgagtatctggctccggtccagattggcactcctccccagaccctgatgctcaacttcgacacgggttcttcggatctgtgggtgttcagctccgagacgcccaagcggatgcagaaaggccagaccatctacaagatcgaggagagcgtgaccgcccggcggctcaaaaaccacacgtggtcgatccagtacggcgacggcagccgctcgtcgggcaatgtctacctcgacacggtcagcgtcggcggcgtgaacgtgttcaaccaggcgatcgagtcggccaccttcgtttcttcgtcctttgtcaccgatgccgcctcctccggcctgctcggcttgggttttgactccatcaacacggtcaagccgatcaagcagaagacttttatttccaacgcgctggagtcgctggagatgggcctctttagtgccaacctcaagaaggctgaacccggtaactacaactttggcttcatcgacgagaccgagttcgtcggccccctgcacttcgtcgacgtcgactcgtccgacggcttctggcagttcgaagcctcgggctactcgatccagcccaacgacgacccgaccgggaacagcacgggcacgcccttccggccggtcgcgcacacggccatcgccgacacgggcaccaccctgctcctgctgccccccggcatcgcgcaggcctactactggcaggtccagggcgcccgccaggcgcccgaggtcggcggctgggtggtgccctgcaacgcgaccatgcccgacatgacgctgcacatcggcacctacaaggccgtcgtcccgggcgagctcatgatctacgcccccgtcgacaccgacgacatggacacggccaccatctgctacggcggcatccagagcgccagcggcatgcccttctccatctacggcgacgtcttcttcaaggcccagttcaccgtctttgatgtcgagaacaagaggctgggcttcgctccgaagccggagctttaa

SEQ ID NO: 1214 - DNA, 1170 bp, Myriococcum thermophilum
atgaagtcctccgtcctcgccagcgtcttcgccacgggcgccgtggctcaaagcggtgcgtggcagcaatgtggcggcgcgggatggcaagggtcgaccgactgtgtgccgggctaccactgcgtctaccagaacgagtggtatagccagtgcgtgcctgacacagcgtcgaccacgctgcagacatcgaccacgtcgaggcccagcaccaccagcaccgcccctccgtcgtccactacgtcgcctagcaaggggaagctcaagtggctcggcagcaacgagtcgggcgccgagttcggggagggcacctaccccggcctctggggcaaacatttcatcttcccgtcaacttcggcgattcagacacttatcaatgatggatacaacattttccggatcgacttctctatggagcgtctggtacctgaccagatgacctcggccttcgacgatggctacctccgcaatctgaccgaggtggtcaatttcgtgacgaacgcaggcaagtgggcggttttggatccgcacaactacggccgctactacggcaacatcatcacggacacgaacgccttccagactttctggaccaacctggccaagcagttcgcctccaactcgctcgtcatcttcgacaccaacaacgagtacaataccatggaccaaacgctggtgctcaacctcaaccaggcggctatcgacggcatccgggccgccggcgcgacgtcgcagtacatcttcgtcgagggcaacgcctggagcggcgcctggagctggaacacgaccaacaccaacctggccgcgctgacggatccgcaggacaagatcgtgtacgagatgcatcagtacctggactcggacagctcgggcacacacgccgagtgcgtcagcagcgacatcggcgcccagcgcgtcgtcggcgctactaactggctccgcgccaacggcaagctcggcgtcatcggcgagttcgccggcggcgccaatgccgtctgccagcaggccgtaaccggcctcctcgaccacctccaggacaacagcgacgtctggctgggcgccctctggtgggctgcgggtccctggtggggggattacatgtactcgttcgagcctccttcgggtaccggctatgtcaattacaactcgatcctgaagaagtacttgccgtag

SEQ ID NO: 1215 - DNA, 867 bp, Myriococcum thermophilum
atgtggtccaccttccgctcgctactatcgctcgcctcgctgatatcgtcggcttgcatcgccacggccgaactgagcatcgtggcgagcgtcaagcagcatggaaagcacgtcgacgcgtccagcctgagcctcatccggaccccgccgcaggagcatcgctggcatgcgccttggccccgccgatggcgcaaccacaacaacaagacggtcgagagggatgccgtcagctacagcgccaattggtgcggtgcgtcgcagcacgcgactgactcggacggcatcaagaacgtgctcggatacttcaccgctccggacctgacgttgcgacccggcacgccggcgccacagttcgccgcggcatgggttggaatcgatggggctgagtgcaacactaccctgctgcaggcaggtgtgacgacaattgtcaacgcggatgggggccagagctcttcggcatggtggcaatggtacccggaagcttcgttcaccatcgaaaccctcaaggtcaagccgggagagtgggtgtcggtcaatatcaccaccaaggatgattctagcgccatcctgaccatggagaacacggataccggcctgtcggtcaccctggagctgaacaacgggccgcagctgtgtcgccgggatgccgagtggatcttggaagattttttcgatgctggcaagcaggtcgcattggcgcattttgcagatttgtggttcgtcgactccggagcgacaacgaagaaaggaaagaaagtgggctttgacggggcgaccatggtgcacctccaagacgaaaatggcaaggtactctgctcgccggagccatacgacgactccaactttgtagtcgtctcaaatccctaa

SEQ ID NO: 1216 - DNA, 1446 bp, Myriococcum thermophilum
atggcgagaacgctgcagtatcttctgtgtggtatcctcgcattggcggcgggcacaaccaatgccgctcctgcagcccatggttcgacccgggtagcggccgcggcagagcccagtgccactacgtacgaggccgaagacgctgttctgagcggaactactgtcgaaaccgaacaggaggggtatacggggaccggctacgtaaccggttttgatgaggccagcgacaagatcacgttcgaggtcgagagcgagacgacgaagctctatgacctcagcatccgcatcgccgccatctacggcgagaagcacaccaccgtggtgctgaacggtggggcgaacagcgacgtgtccatcccggccagcgacacatgggccgacattccggccggccaagtcctcctgaacgagggcgccaacacgatcgagatcgtcagcaactggggatggtacctggtcgactccatcacgctcacgccatcgacgccgcggccggagcaccagatcaacgcggagctgaacaacccgtcggcggacgagagcgccaaggtgctgtacgactacctccggtccatctacggcaagaagatcctctcgggccagcaggacctgacctgggccgactacgtgacggagcagacgggcaagacgccggcgctcgtgtcggtcgacctgatggactactcgccctcgcgggtcgagcggggaacgcagggcacggcggtcgaggaggccatcacgcacgcggagcggggcggcatcatctcggtgctctggcactggaacgcgccgacgggcctgtacgacacggaggagcagccgtggtggcgtggcttctacacggaggcgaccgacttcgacgtcgaggcggcgctgagctcgaccgacaacgccaactacacgctcctggtgcgcgacatcgacgccatcgccgtccagctcggccgcttgcgcgacgctggcgtgcccgtcctctggcggcctctccacgaggctgagggtggctggttttggtggggagctaaaggcccggagccggccaagaagctctgggccctgctctatgaccgccttgtcaaccaccacggcctcaacaacctcatctgggtttggaactcccttgaggccgactggtaccccggtgacgacacggttgacatcctcagcgcggacgtctacgctcagggcaacgggcccatgtctactcagtacaaccagctcattgagctcggcaaggacaagaaattgatcgccgccgccgaagtcggcgccgcgccgctcccggatctgctgcaggcctacgaggcccattggctgtggttcgccgtctggggtgacacattcatcaacaatgccgagtggaactcgcccgaggttttgcagacgatctacaccagcgattatgtcctcaccctggacgagattcaggggtggcaggactcgtaa

SEQ ID NO: 1217 - DNA, 2982 bp, Myriococcum thermophilum
atgatcttgctaacctcggcatcccttttctttcttgctggattctacctgcgtacgtcgtcgagtgctcgaatctcggaagtgcctagccagacctctggtcatgcccctgtattcacggtgcctgcttcggctgactggggccaacatgtcctccccaatataaaggatcctcaggccaccgaccctcagagagtatgcccgggttacaaagcatccaacgtgcaagacaccaaagacggctttaccgcggatctttaccttgccggtccggcatgcaatgtttacggaactgatgtcgagcacttggtgttgtccgtcgggtttcagggtgctgatcgggttcatgtcgaaatccgaccacgttatattgcctccgagaacgcgacttggtttcttcttccagaggagttgattccaaggccgtcagtggggcaggaacacgggtctgagcctaacgacttgaccgtttcgtggtctaacgacccaagtttctccttcactgtaaaacgcagagaaaccggcgacattctcttttccacggaaggaaagaagctcgtatacgaggaccagttcattgaattcatctccacactccccgaagactacaacctatatggcctcggtgaagtcattcacggcttccgcttgggcaacaatctcacaaggactctctatgccgctgacgttgctgatacgatcgatgccaacatctacgggagccacccggtctaccttgacactagatactttgcaaccgacgaatcaggaaagctcacttatatcgccaatgcaacggacacgacggcaaagtatgtgtcgtacacgcatggcgtgttcctccggaatgctcatgcccaggagatccttttgcaatcgtccggtctcacatggaggacgatgggagggagcattgacctgtacttttatagcggcccaaaggcagaggatgtgatcaagtcgtaccaacagacgacgattgggctgccagccatgcagcagtactggacgcttggttatcatcagtgtcgttggggctacgagagttgggcggtgctccaggacgtggtcgacaactttgccaagtttgagattcccctggaaaccatctgggccgacatcgactacatgaaaaaataccgcgatttcgaaaacgatcccgtacggttcagctacgaggaaggggcccagttcctagccaaacttcacgccaatcaccaacactttgtccccatagtggactccgccatatacgctcccaatcctgaggatcctgaagatgcgtatccaccgtatgatcgcggagttgaagcaaacgccttcctgatgaatcccgatggatcgatctattacggtgccgtgtggcccggctataccgtgttccctgactgggtgggtgctgttctaaacggcagcggggctattgactggtggatcgacgaactctcccggtggtctgagaaggttgcttttgatggattatggatcgacatgtccgaagttgcttcattttgtgctggcagctgcggcgctggcaacttgacgctaaacccggttcacccgccgttcttacttccgggagaacccggaaatctcatcttggaataccctgaaggcttcgagctcaccaattcatccgaagcttcctcggcgtcgtctgctctcagcacacaatacccttcttcctcgacgacggctagcacgacgactgcatacgtccgcaccacgcccactccgggtgtgcgcaatgtggactggccgccctatgtcatcaacaatatccacggcgaccttgcggtccacgctgtgagcccaaacgcgacgcaccatggcggatacctcgagtacgacttccataacatcttcgggcaccagattctcaacgccacctatcaggccctgctcaaaatttacgagggaaaacggccattcatcatcggccgcagcacctttgccgggtccggtaaatgggccggacactggggaggtgacaacgcggcgctgtgggcatacatgtactttagcatcccacaggcgctgtccttctcgatcttcggcgtgcccatgtttggcgtcgacacgtgcgggttcggcggcaacagcgactacgagctgtgcgcccgctggatgcagctcagcgccttcttccccttctaccgcaaccacaacatcctgggcgccatcccgcaggagccctacgtctgggccagcgtcatcgacgccaccaagaccgccatgcgcatccgctacgccctgctgccgtacctgtacacgctcatggcccgcgccagcacggacgggagcaccgtcatgcgcgcgctcgcctgggagttccccgacgagccgtggctggccggcgccgaccgccagtttatgctcggccgggccatcatggtgacgccctgcctggaacagggcgccaccaccgtcgggggcgtgtttccgggcgtcggggacaagaacaccgtctggtacgactggtacacggggaagtcggtgacgaacgggatcaggccgggccaaaacgtcaccatcgaggcgccgttgggccacatccctgtctacttacgtggtggcagcgtggttcccgtccaggagcccggaatgacgacgacggagagccggaggaacccgtggggtctgctcgtggcgcttgaccgggagggcttcgcggagggtgagctctaccttgacgatggtgagagcttagagcctgcgggggtgacttgggtacaattcactgccacaagtacatccatcaaagccgttcctcaaggcaattacgtcgacacgaacacatttgccaacgccaccgtcatggggttggctaagagccccaagcaggtgtggctggacaagtacgtgcttgaccgtgcaaactggaagtatgaccatgacagggctgtgctttcgttgcatggattgaatcatctgtttccccggggtgcgtgggcggaagagtgggagattagctgggaatag

SEQ ID NO: 1218 - DNA, 1245 bp, Myriococcum thermophilum
atgaaagcctttggtttccccctgctagcagctgttttgctcgccactgctccggcagcgagtacgccggtgtcacattgccccaatggcgacagcggaccgtgctacagcgtcgccgtgcccgactcatcggcggaggccgggtccggcaacatctatttccagatccgggcgccgacttcgttccaatgggtggcgttgggtaccggttcgggcatggcgggtgccaacatcttcctgatgtaccaggacggcaacgggaacgtgaccctgtctccgcgccgaggcgttgggcacaccgagcccaagctcgacacaagcagcagtgccgcccggctgactctcctcgccggcagtggcgtcgacggctcggtcatgaccgccaacgtcgcttgcgccaactgcgagtcctgggacgggggcgagatgtctctccagagcaccagctccaactggatcggcgcctggagagagggcccgtcgctggacaccacggacctggacgccaccatccagcaacacgacgataacacccggttccggatcgacctgacccaggcgaccgtcagcgaagacagcaaccctttcgtctcggccgacggtgacgaggacggcaacgggtccgagtccggtacgggccaggacggcggttctggcagcggttccggctctagcggcggcgttatcgagagcggggggtcttcgaagcccgccattctcgtggcccacggcataatcatggcactcgtcatgggcctgttctaccctctcggttcgaccatcatgccgctcgttgggaagtggtgggtgcacgctacgtggcagatcattgccttctgtctcatgtgggctggtttcggactgggtgtcgtttcaggtcgcaggttattgagcacagagatgtgggacaagacgcataccgtcttcggcgccgttgtcgtctccctgttgggtctccagcccgtattcggctacctacaccatttgcattacctgaaattccatcgccgcggcctgatcagttatgtgcacatctggtggggtcgcatcctgatggtgttgggcgtgatcaacggcggactcggcctgcagcttgcgaacgaggaggatggtcccatcatcgcgtacagcgtcatctctggtgtcgtcttcctgggttacctggcctacaagctctgccagtttttccgtcgtgggacgtccgacaaccacaagatggcaagcgactcccccgctgcagcttga

SEQ ID NO: 1219 - DNA, 6798 bp, Myriococcum thermophilum
atgatgcgggaccaccgtcgtcgcagtccggaaagcacacgccggcggcgcgctgagcgacggcggtcgagggaacagctcgccgccgccgccgccgccgcccttgccgaacgcgccatgcaatcatcatcgcattcgcagcggcgcgcccgttccgattcgagttcgtcatcgacgtcgtcgtcatcatcatcatcgtcgtcgacttcgtcctccttgctgaacatttcgcggaaaagccgattcggcatccgctctttctttgcctcttcgtcggtgaagaaggtcaagaaacgccggtccttccggagaaagaacacatcgtcgtcttcgttcgacagcgatctggcctatggcccgggttacgtctccagatcctccttcgagaggcaagaggccgagtacctgcagcgccacccacagaaaccccagcaccaacaccaacatcaacaccagcaccagtaccagcaacagtaccagcagtaccagcaccaccagcaccaccagcccccctaccatcctcagcaacatccatatccctacccgccctcccagcattcgtattcccatcccccccaacatccgcaacacccccagcacggccagtacccctcgcagcacggaccatcaccaccatcccaccaacatccccaccatcccccagagcaggatcagttgttcggacccgatggtcggccagcgctgcaccgagccgagacagacgaggagattctcgccttgggccggaagctctcggacctggcgcgggcccagaacatccgagatctcgagcgtgtcggcaagaagcgcccgtcacgcttggtagctgccgccaccgctctctccgagttccaccacgaacggaaatcccgccacggccacacttccaagggccatggctcctccaagctgcattctcgccgagatgagtccgatacggagtgggagtccacgtccgactcagactcggactcggactcctactcggaatcctcgagcgatgccgattccagtctggcctacgggcccacgcccaagttctcggaccccaccctccccatcgacgaccggtcgcaacaccggccacttcccgagcccgtccgccctccgcatcacaagagctccgccgtcgacccggccggctcccgtcgcggccacaccgactctccgcacggtttccgtcctggtgactcccctcgttcttcgcacagagagacggatccccgggcttccacctacgagatccctccgccagagagtgcatctatcgaggccaggccgatgcggagggtgtaccccgtcccggctgccgatgacgctgctcggtttgaagcggctcctggttcttcgggcgcgcccgctccggtagctaccagtgagggttcctccacgccaactggccgggagaaagcccgggagcgagataacgatggtggtggtgctttgtactccagccggcccgaacctgttccgatccaggctcccaggccaaggacgctcgtgtcaccccgtgtgctggaggattcccgacagccggtggagcgggagcagctggccgagcaggcgggtagtcctcccgagcgccggtcgaagaagtcccgtgactcggaccggaggaacgccgtggaggccgtggtttccggcgccctgcctgctgtcgccggtgcggctgccggagcggcgctggccagtgtcatcgaggagaggagggagaagaagcgggaggagcaccgctttgagaggcgggaggaaagacgcagctatgaggatcggcatgagcgccaggaggctgctgactggaggagctctgccgacgcggctgccaacgcggtccctccgtcgtccgccgcctcggacgccatcgctcggcgtgagctcgaagagctccgtgccaaggaggccagtgtgcgtgaagaacgtctgcgttatgagcgagaggtacagcgccttcgtgaggctcgtgagctcgaggagagagagagtcgccgtgaggaggaggaggaggaggaggaggaagagaagtaccgccgtcgtcgccgccgggaggaggaggaggcagagaggcgccgtctagaggaagaggagttggacccgcgccgcatccgtgataatcccgagcttgccgaggtgtatgaacgtcgagtgcgtgaggtccgcgagatccgttacaaggaggagcgccggagccgggaagagcagcgcatcgtccggacggagcgtgagaggatgtctaggagcgccgagaagaagcttgagcgcgaggagaagcggaagctcgagtcctctgaggaccagggggaacgtagccgcgagcgtgaggaacgtcgtcgcctgaaaggcaaggacgttgctcccgtggtcgtcgacgacgaacgtggccgtagccgcaggcctgaccgagaggaggtgcctacccccggcccagaggagaacaagtcgggcgggttggagcccgaggaatccaaatctagccgtgaaaagagacgagcgaagcgcgaggagaccctccgcaagctccgggagatccaggagcagatcgagctcgagaggaaacggctcgctgagttggacgccggcaaagagccgccgccgcccccggcggccgagaagccagttgaagctggcccttcgactagccggaaggatgccgttgacccgttcaaataccaggtgccggacgatgccttccctacgcctgcacacagtcccccccagaggccgctcactcccgtaatctacacggtcgaaagcgaaccagactgggcacgtgaggaggcgaggaagtccgacgacgagcccgaggagcggctgagccggcgctgctcgtacgagcgagagcagaaagctgcccaagccagcaccggtcaaaccctccactccacgattcaggatgagaaggacagtgaggcacggcgggctcggtcccgctcccgcgaacccccgcggcccagggattcggagcctgtcagggaccccgtacaggaggaggccaaccgactctaccgcgagagcaggatggcccagaggaaggccgaggaggagatacgctcccgcacaccctcgccgaccaggtccgtcgtcgataagtacgaagacgatgatgatctcaacgaggaccccatcggccgcatcgtcactccacccgagatgaagcgggcttcgacaaagagcaagtatgacggcccgaacgccgacgtccgcatcgacaacatcattacgccgcacgaccttcacaggttccaacccccgcctcccgatgcctccgggctcgtcatggtgcccatcttcaaatcccgggacccgtcctgcgagcgcgagcggccgatgctcaacctcgtcctccccacacccaggacttcgccgtcgctggaaaagatgaaggctaggcaggcggctgcccaggctgccgctgacgaagccacgtctgaggacgagaagaagacgcaggagaagaagccggcgcaggaccgcaagcccaacttcatcatcgaccgccacggccaggtagtggaagcccccgaggactacgccaccggacgggtcgccgagtcggacagccgcgattcgtctcgggagcgccccgcgatcaagttgaggttctctggagccaggaagaagaatgcctggagtaacctgattgccgccgccgtcgcggatgccagcgccaagtcgaagggcgagaagaagtcggaaagcatcaaggaggccatcgagaagaagaagggaggcagtgcttggcgtagcctggttgctgccgccgtcgcgaatgcaggttccaagtcgaagggtgagaagtcgggtgatgccaagaaggaggagcgggaggaggaggccgtcaaggacaacaacaacaacaacaacaacaacaacaagggtgactacaccgctggagcggatcaagataataaaccgcgggatgcgccccagcccgtgtccgagggaaagcccgagaagaccgctgctccggaggtccgcccgtcgtcaatcgaagcggtaccggaaccagcagccttcccggctatggtcctgattgctaccccagagcaagcactagaagcagtacctgacgaagccttgccggacacgcaacccgatgcggcggcccctaccaaggtctcggaggaaccgtcgacccctcctcgctggtcacgggtcccctacgaatttgacgacgaaccccctcaggtcggccccaagccgtcttttagccctgagtcttcgtccaaagtgccgggttcctacgaagaggatgccgagtttaccgccaccctcgctgccggcctacagagctcggggttcaaccctgatatcgtgatccaggatcccacctaccgcaagcgagactcccctcccgggtcggacgagcccaagtacgtgcctccgtcctgcgagacggtgacagatctcggcgtcgagaccttgcaccaggagagcacctctggcaagggccatgacgcacccctcctcgaacgcgtggcccctgtagaggagggctcttctgctaccgccgaacagggcgagaaatctgggaacaccggggacgacagcaacacggcactcacgaccgaggttgtcgagccgagtgtggagccatccgtggctgaagctgatgatgagtggtctatgaggagcctcacggattcgaggaagcaggagagcgagcatcccggttctttcgattcgacgacgtactctaacccgccgtccgaggtgtcggtggcgagctcgagcagcaggaagaagaagaaaaaccggcgcaggagcagcacgaaggacacgtacgatataccagaaaaggacgagccgccggatcgacccggcgattcttttcagtggatcgaccgtgaggtgagctcggtcgcctccgacccgactggtaagaccaacggcacctccggccaccatgacgccaactctgtcgtgtcgcttcatacaaatgggtccggcgagcaccgcgagcaactgaccaagaacaacggccatagcgaggaggattcttttttaggtaatgccggcacctttggcgcaggtgccggctatgcgggagccgtagcagtggccgccgctgctgctcagctcttccgcccaaatgccacccaggattccgttgaggaagcgcagccgtttcgccgcccgcgtagcttcagctacagctcgcagatcgtcgacccggaagttgtccagcgcgagatcaagcccgccattgacccccaatacagggatctcctccctttgcctcccagcgagcctggttcacctaagtttctcaacaacctagatgaagaagaagagcatttcttacctccccttccagacagtgacgaggagccaccactggtggcaccagctcattccccccagcaaaagcgtcctcgccgggccactgtcgcccatccccacgctcgccgtcgcagcatcattgaaatccccaaaacgcccagcagcagcacggccgtccctgttcagtttcgcataggccgtacttccctcccttcctcccccgtcttcttccgcttctcacccacgcattcacctgtcgggtccgacaagaagaagcccgagtctccagatagcgcctcgccccgcaggggccgcttcagccggccgacctcgtgggacagtacgcgagatttcaagcctctctacctgctcgagaagacggccggccgtgccgaacccgaggtgtatcccgagctgccgcctagcgaaccgtcttcgagggaaagccccgggccgtccgagtccgagtccgagtccgagtccaacaccgacaaagacggccaggatgatgggctggattacctcgacgtcggcctcagggtcgctgccggcatgggggcgtccgcggagctgttgcaagccttgcacattgatacgactgtcggaaaaggcctcgatcacggcgccggcgagtccgccttcggggagcccctcggctccggggacacgacgcccagggcggccgttccgccttcgcccccgcattcgcttgacgctcctctaaaggagctgtcggctcaaggcgaggaggtacgccccgagcaacaacaacaacaacaacaacaacaacttgtagaggagctcgagacgttgcctcccctgccggatagcccagctgattcgccaacttgggccccgtcatctccggctgctctcgctgctgttacctccgatgtcgccccggctcccccgcccatttttgagagcctggagagcttaccgccgtttcctgatagcccgccggcgtcgcctcacgttcaagattcgccctcggctctggcttctgctccggttcccgctcctacccctttcatggacgatgacaaggcgttggaacagcttcccccgcttcccgagagcttgccgacctcgcctccgctggcaccatcttcgccccctacatcagcatggccgccggtcgatgaagaactggaggagctgccggcccttcctcagagctcgccagcctcgcctcccttggcgccctctcccccggtatctgcgcagctgctgcccgatgaaaatttggaagggctgccggctcttcctgagagcttgccaggcacgccccgtgtacacgagctgtcctcggttgatacgtatttacctactgccgaagaactggaggaccttcccccgcttcctgagagcttgccaacatcgcctcccttggcacctccctcgcctcctacatcagcatggctgccggccgatgaagacctggaggagctgccggcccttcccgagagcttgccaggcacaccctgtgtacaggagctgcgagctgccttcgactga

SEQ ID NO: 1220 - DNA, 1371 bp, Myriococcum thermophilum
atgtaccggcaggtcgcgaccgctctctccttcgccagcctcgtgctcggccagcaagcgggaaccgtcaccgaggaggtccacccctcgctccccattgaagtgtgcacggctccgggctcgtgcactaaggaggataccaccgttgtcctggacgccaactggcgctggacacacaccgtcgatggctacgacaactgctacgagggcaactcctgggacgagtcggtttgcccggatggcgcgacgtgcgcggctaactgcgccatcgatggcgccgactacgaggccacgtacggcatctcgaccccgtccgagggcgctctcaggctcaacttcgtcactaaaaacgagaacggccagaacgtcggctcgcgagtctacctgatgaaggatgacgagacgtaccgcctgttcaacctgcttaacaaggagttcacctttgacgttgacgtgtccaacctgccctgcggcctgaacggcgctgtctacttcagcgagatggacgaggatggcggtctgtcccgtttcgagggcaaccaggccggtgccaagtacggtaccggctactgcgacagccagtgcccgcaggatatcaagttcattaacggcgaggccaacgtcgagggctggggcggcactgacggcaactcgggcaccggcaagtacggcacctgctgcgccgagatggatatctgggaggccaactcggacgccacggcctacactccgcacccgtgcaaggttaccgagcagacccggtgcgagagcgaggaggagtgcggcgcgggcgacaaccggtacgccggcctctgtgacaaggatggctgcgacttcaacagcttccgcctcggcaaccaggagttctacggccccggcatgacggtcgacacgaacaagcccttcacgatcgtgacgcagttcatcaccgaggacaacaccgacacgggtgccctcaaggagatccgccgtttctatgttcaggacggcaccgtgatcccgaactcggagaccgtcgtcgagggcgtcgaccccaccaactccatctcggatgagttctgcgagcagcagaagacggcctttggcgacaccaactacttcaagacggtcggtggcatggccgctatgggcaagtcgctcgagaagatggtgctggttctcagcatttgggatgaccatgctgcctccatgaactggttggacagcaactaccccgtcgatggtgacccgtccgtgcccggtgtcgcccgtggccgttgcgaccccgaggccgggctgcccgagaatgtcgaggcggcgcatcccgacgcctacgtcatttactccaacatcaagatcggtgccatcaactcgaccttcaccgccgcttaa

SEQ ID NO: 1221 - DNA, 3996 bp, Myriococcum thermophilum
atgagcggcgagtctcccctggcagtcgtcgctgccgtcatccgatctctcgcgaccgacccgacaacgaccccacccgccgtcgccaatgcatgtccgagcgtgaggttaccgggtccagtcacgcccgagaagctcgagcttgagcgcgagcttgccgccctcgttgccagggtgcaggaccttgaggcgagggcgaacgctgctgccaccggtgccctccccgacacgccaaacgagacgtccgactctttctcggcagatgataggggccgcccaagaccgaggtttccgagccatctctcgcgaaatggctttatcgacgaggccctcgaggggttgcgggagcatgtcgatgaccagtcgaaactgctcgacagccagcgccaggaactggacggcgtcaatgcccagctgctcgagcagaagcagttacaggagaaggctttggccatcatcgagcaggagcgcgttgccaccctcgaacgcgagctctggaaacaccaaaaggcaaatgaggccttccagaaggctctgcgagagattggcgagatcattacagccgtcgcccgcggtgatctctccaagaaggtccgcatgaacaacgtcgaaatggacccagaaatcaccaccttcaagcgcaccatcaacaccatgatggaccaactgcagatcttctccagcgaggtgtctcgcgtcgcccgcgaagtcgggaccgagggaatactcggcggccaggcccagattgaaggggtcgatggtacatggaaagaactgacggacaatgtgaacgtaatggcgcaaaatctcactgatcaagtgcgcgaaatcgcatcagtgacgacggccgtcgctcacggtgacctgacgaagaagattgaacgccccgccaagggcgagatccttcaactccagcagaccatcaacaccatggtggaccagctgcggacttttgcctctgaagtcacgcgcgtcgccagagacgtcggaaccgagggtatcctcggtggtcaagccgatgttgagggggtgcagggcatgtggaacgagttgacggtcaacgtgaacgccatggccaacaacctcaccacccaagtgcgggacattatcaaggtcacaacggccgtcgccaagggcgacctcactcagaaggtgcaggccgagtgcagaggggagatcttcgagcttaagaaaaccatcaattccatggtggaccagctccagcaattcgctcgggaagtcaccaagattgctagggaagtcggaaccgagggaaggctcggtggccaggcgaccgttcacgacgtacagggcacctggcgagacctcactgagaacgtcaacggcatggctatgaacctcactacacaggtgcgcgagatcgcaaaggtcacaaccgccgtcgctaaaggcgatctcaccaaaaagattggggtcgaggtccagggcgaaatcctggatctcaagaacaccatcaataccatggtcgaccgcctcggcaccttcgccttcgaggtcagcaaggtcgccagggaggtcggcaccgacggcacccttggcggccaggcccaggtcgacaacgtcgagggcaagtggaaggatctcaccgagaacgttaacaccatggccagaaaccttacttcacaggtgagagggatctcgaccgtcacccaggccattgccaatggcgacatgagccgcaagatcgacgtcgaagccaagggcgagatactagtattgaaggagactatcaacaacatggttgaccggctgtccatcttctgtaacgaggtgcagagagtggccaaggacgtcggcgtcgacggtatcatgggcggtcaggcagacgtggccggcttgaagggcaggtggaaggagatcaccaccgatgtcaacaccatggccaacaacctgacggcacaagtgcgggcgttcggggacattacaaacgccgcgaccgacggtgatttcaccaagctggtggaagtcgaggcttctggcgagatggacgagctgaaaaagaagatcaaccaaatggtttacaacctcagggacagtatccagaggaacacccaggctagagaggccgctgaactggccaacaagaccaagtctgagttcctcgccaacatgtcccacgagatacggacccccatgaacggcatcatcggcatgacgcagctcacgctcgatacggatctgacgcagtatcagagagagatgctcaacattgtaaactcgctggccaacagcttgttgaccatcattgacgacatactggatctgtccaagatcgaggcgaggaggatggtcatcgaggagatcccttacacccttcgtgggaccgtcttcaacgcgctcaagacgctggccgtcaaggcgaacgagaagttcctggaccttacctaccgggtcgacagctccgtgccggaccacgtcgttggtgactcgttcaggttgcgtcagatcatcttgaacctggtaggcaacgccatcaagttcaccgagcatggtgaggtcagcctcaccatccaaaaggcgacaaccatgtctccccccaatccgggagagtacgccatcgagttcaccgtggccgacacaggtatcgggatcccggaggacaagctcgacctgatcttcgacaccttccaacaggccgacggctccatgacgcgcaagtttggcggcaccggcctgggtctgtccatctcgaagcggctggtcaacctgatgggtggtgacgtctgggtcaagagcgagtacggcaagggcagcaagttcttcttcacctgcgtcgtccgcctcgccgaggaggatatctcattcatctcgaagcagctcaacccttacaagggccaccaggtcctgttcctcgacaagggccggaccgggcatggcgccgagatcgcccggatgctcaaggagctgggtctggtccccgtcgttgtcgattccgagaagagtccggccctagacaagattcgtggccgaggatcggctccgtacgacgtcatcatcgtcgactccattgaggatgcccggaggttacgctcggtcgacgacttcaagtacctcccgatcgtgctcctggcacctgtcgtccacgtctcgctcaagtcatgccttgatctcggcatcacttcgtacatgacgacgccgtgtaagctgatcgaccttggcaatggaatggtacctgctctcgagaacagggctacgccatcacttgcggataatacccgctcgtttgagattttgctggccgaagacaatactgtaaatcagcggcttgccgtcaagattctcgagaagtaccaccacgtcgtcaccgtggtcgggaacggcgaggaggcggtcgaggcggttaagcgcaagaagttcgacgtcatcctgatggatgtccagatgccaatcatgggtggtttcgaagccacaggcaagatccgcgagtacgagcgcagcctcggcacccaacgcactcctattattgccctgacggcgcacgccatgatgggcgatagggaaaagtgcattcaggcgcaaatggacgaatacttgtccaagccactacaacaaaaccaccttatccagactatcctcaaatgtgcgaccctcggcgggcagctgctggagaagaaccgcgagcgggaactcgcgcgcgctgccgatgccgtcacgggaggccgccgtgacaatcacgcgctcgcagctgcttaccagaccgccgctgccgcaagcacgaccgggagagggagtagctgcaacgccccaaccacagccctcaaacccgcgagcagcagcagcagcagcagcagcagcagtagcagtagcagcgacaatggcatcagccgaccttcgctctcgactcgctccgtcaccgcggacgaatcccataccagcggggccgatagtccgacgctggtaacggcggaccaggacgacccgatggataggacacacagcagcctctctgagccaagcatgtctacaacggaatga

SEQ ID NO: 1222 - DNA, 1392 bp, Myriococcum thermophilum; identical to SEQ ID NO: 916

SEQ ID NO: 1223 - DNA, 2043 bp, Myriococcum thermophilum
atgtacgcaaccagcctgcgctacgccgcgcgcaatccgggcggcaatggcgccaagtgcgcaccgacgaccacggcggcattgccattattgatctcatcattatcgtcatcgtcatcgtcatcgtcgtcgtcatcgtcgtcgtcatcgtcatatttaccgccccaatcaaggagtcaacaacggcggcactatgccgtgggcaacatatatcacccgccgcagaccattgccgtgctcggcggtggcctgaccggtctcaccacggcgtggtacttgacgcggttccttcccgaggcaaaaatcaccatctacgaggccaacaagcggctgggaggctggatagagacggaaaaggccgaggttaagacgcctgacggccaggtcggcaccgtgcattttgagcgggctgcccgcatggtgaagccgctgtctgctccggggcgtgtacccagatgggacgacctggtattttacgatctggtcaccaagctcaacctgacggaccagctcgtgtgggcgaagcaggacgaggaggccgtctccggtttcgtctactaccccgaccacctagtcccgcttcccaaggtcaccatacggctttccgaccccctcggttctctccggcagctggccggcctcgtctcgctcctcttcgaacccctctttcgcgatctgatccccgccatccccaacatcttccgcaccaggaatgaccccctcaggaaggacctgttccacggccgccgggacatgtcggtcggggagtactacgcgcaccggctggggggccccgccgtggtggacaagctcatgtcggccatggtgcacggcatcacgggcggggacgtgtggaagctgagcatggggagcggctttctggcggaccagctggtgcccaccgacgacgagcccatcaccaacgtccccgtgcgcagcgtcgactacgagatgatgctgcagctggcccgtgacaaggccgtcttcgacctggcctcgcagcacctcgacacgaacgccctctggttccgcggcggcttcagcaccctgaccgacgccctggcggacgcgctcaagaagaaccccaacgtctctctcgtgacgggcgagtccgtcgttcgtgtcgagtacatggaaaacaaagataagattggggttctctcaacgaactccaccgaggggaaacccgtcttgtacgacaaggtcgtctcgaccatccctgccaagaagctacacaagatcaccgacgggaagcttccttcgctcaaaaaatctcccgccgtcagtatcatgctcgtcaacatctggtaccccgtcccgcgtgccaacttcccgtacaacggcttcggttatctcatccctcaggccctcccgttcgagcagaacccggaatgcgttctcggtgtcattttcgactcggaccgcgagttccccctcccgactccgtccgacctggatccaatcccgcgtgggtccgacacgatccaaggcaccaagctcaccgtcatgatgggcggccactactacaccgactggccgccgcacgccatggcgcacacgtaccgggccaagaaggcggccctcgccgccgtcgagcgccacctgcgtctgtcgcccgagctcacggaacaggcgcacgcatcggccaagctctgccgcgactgcatcccccagcacgtcgtcggccacgccaagcgcatgcgggccgcccacacggagctcgagctggccttccggggccgcctcgccgtcgccggccagagctaccagaacccgggcgtgctcaacatgctgcgcgccgccagggacgtggccgcccagatcgccggccacgaggaggagcacggcaccgccgccgccgacgactggcccgtcggcgacaccggcctcgagcgcttcacccgccagcccaggtacctgtccctgcagaggctcatgctgcccctgcgctacggcagcgacgcctttgtcgacgagtccggcaaggtcaggatgggggacggtggcggcggccccttgggcggcgctgggggcgatagttag

SEQ ID NO: 1224 - DNA, 1752 bp, Myriococcum thermophilum
atgtggtcgccgtcgctctcttcgttttctgttttgttggctgcggctttgcaacccgtcgcggcaatctggccagcaccccaaagtttgtccacgggcagcgaggttctgtacttgcatcagaacatcaagatcacatataatggagaatccattccgtacacgtacggatacacgcccagcgagttgaccagcaaggaggttgttcaggcaggcatttcccggacgctcgcgggcatctttgagagcaagtttgttccttggaagctgcacaagcccgggtccaagtgggagcccgatctgtccgagagtcagcagtggatcgagacgctggagatcgtccagacgggcaaggataagcccagtgccttcaagcctcttgccggccaggtggacgagtcgtacaatctgacggtgagtgccgagggcgaagccaagctcacggccgtctcgtccatcggtgtgctccgcggcctcgagaccttctcgcagctcttctaccagcactcggccggcacgttctggtacacgccgttcgcgcccgtgtcggtgcaggatgcgcccaagttcccccaccgcggcgtcttgatcgacacggcgcgcaacttcctccccgttcccgacatcctgcgcaccatcgacgccctggcctggagcaagctgaaccggctgcacgtccacgtgaccgactcccagtcgtggccgctcgtgatcccttctctgcccgaggtctcggagaagggcgcctaccacccgagccagacgtattcgcccgaggacattgagaggatccagaagtatggtgccgagcggggcgtcgaggtgtacttcgagatcgacatgccgggccacatcggagtggtgtcgctgtcgcacccggagctgatcgtggcctacaacctgcagccgtaccagtggtggtgccaggagccgccgtgcggcgccttcaagctcaacaacacggcggtcgatgagttcctggagaagctgttcgacgacctgctcccgcgggtggagccgtactcggcctacttccacctgggtggcgacgagctcaaccggaacgactcgatgctggacgagggcgtccggtccaacgacaccgaggtgctgcggccgctgctgcaaaagttcatcgacgcccagcacgggcgcgtccgcgcggccggcctgaccccgatcacctgggaagagatcccgctcgagtgggaaatcgagctggccaaggacacgctcgtgcaggcgtggctgggcggcgactcggtcaagacgctgaccagcaagggtttcccagtgattgacagcaactataacttctggtacttggattgcggccgaggtcagtggctctcgtgggggaacggggaggcgttcgcccagggctatccgttcaacgactggtgcggtccgaccaagtcatggcagctggtctaccagcacgacccgacggccgggctgacggccgaggaggccaagctggtgctcggcggcgaggtggcgctctgggccgagaccatcgacgcagtcaacctggacacgatcgcctggccgcgcgccagcgtcgccggcgaggtcctctggtccggccggatcgacccagccacgggccagaaccggagcgccgtcgacgccgccccgcggctcaacgagttccgcgagaggctcgtcgccaagggagtccgggcctcgcccatccagatgaccttctgcactcaaggaaaggcggaggagtgcgagttcattgttgcttga

SEQ ID NO: 1225 - DNA, 1113 bp, Myriococcum thermophilum
atgttatccttaaaccagggatggagaagggcagcagccacagcgctggctctgctaagcagtccaacattcgcccagacttggtcggcatgcaacccgttaacatcaacaaattgcccgccagacacggcgctgggcatgaccataaatgtcgacttcaccgagggcgaggtcaactccttcgtccctagcgggggggagccgacctacggtgaggacggcgtcagcttcaccgtcgcctcctccggtgacgcgccgcagctgacgagcatcttctacatcatgttcggccgcgtcgagttcaccatgaaggcggcccccggcgccggcatcgtcagttccctcgtgctgctctccgacgccctcgacgagatcgacatggagtggctcggcgccgactcgagcgaggtccagaccaactacttccgaaagggggagaccactacctacaaccgcggccagttcaacccggccccgaacaaccaagccgagttcatcacctacaccgtcgactggaccgccgaccgcatcgcctggtacgtcggcggcaccctcgtgcgcaccctgaccttcgacgaagccaacggcgagtacccgcagacgccgatgcaggtcaagttcggcgcctggtccggcggcgacccgtccaacgcgccggggaccatcgagtgggcgcgcgggccgaccgactactcgcaggggcccttcaccatggtggtccggtccatctcggtgaccgactactcgaccggcaagcactacgtctacggcgaccagtcgggcacctggcagtccatccgctccgagggcggcgagatcaacggcaaccagggcgccgccggctccgtctccgtcaccgccagcgcccccgccccgaccgactcggcctcgcccaccatcccgcccggcggcatcatcggcggcggcaccgctgccgacgggagtcctgcccccacccgcaccgtcggatccatcccggacggctgggtcatgacgtccgagggcaaggtcgtacccgttggctccagcactgtaaacaccccccggctcacaaccctcctcctcccgctcgccggggctctctacttcgccctcaacggctggccccggtga

SEQ ID NO: 1226 - DNA, 885 bp, Myriococcum thermophilum
atgtccctcaggccggtcttcctcatcacgggcgcctcgtcgggcttcggcgaggccatcgcgcacgaggctctcttgcgagggcaccacgtcatcgccacggctcgcaaggccgccaagttgggcgccctgcggtcggcgggggcagccgtgctcgacctggacgtgacgagcgacgaggcagcgctggcggacgtctttgccaaggcacacgccttccacgggcgcatcacgcacgttgtcaactgcgccgggtatctcctagagggagctgttgaggaggctagcgccaaggaagcattcgatatcttcaacaccaacgtgctggggacatgcaacatcgcccggactgcggcaccgtacctgcgtgaggcggccaagacgcccgggcagacggcggcactggcgactttcggatccctaggaagttggcggtcggtgccggcagcagcctattactgcagtaccaagtatgccgtgagcgggttaaccgagggccttgcaaaagagctgcaaccgtttggggtggacgtctactgctttgagcccggatacacacgcacggggttcttgaagaacggggcggcggatggaggggaccaccgggtcaagacggcacgccagatggatgtatatcgggggactgacgtggagaaggcgcgggccgccttggacgtctacaacggaaagcagcccggcgatgttgtgaaatgcgcccgggtcatcgtcgacgtcttgaccaaggagggcgttgccaagggaaaggatgtgccagtaagggtcgtcctcgggtctgacacggttgagacggtgcggaccaagtgcaccgagacgctgaagcaggttgaggcgtggggggacattgccgcgtcagttatgcactga

SEQ ID NO: 1227 - DNA, 789 bp, Myriococcum thermophilum
atggcattcaactacaaatgcatccttttgatcggtgccacctctggcatcggcgcggccatggccgataagttggttctcgagggtgctaaagtcattgccgttggtcgtcggcaggagaggttagatgcctttgtgcagaaacacggcagcgaaaaggcaagcggaatccgttacgatatcaacgacagggccggtatggacgcttttgttgaaagtgtcgtcacccagtatcccgacatcgactgtgtctttttgaactcggggttccaacaacagatcaggctgtcaagacccgaggaggtcgatctggatgctttccaccaggagatgagcaccaacttcagccggctggtcgacttgtccatcaagttccttcctcacctcaagcggaagcgagatccgaccgccctggtgtttaccggtagcctgcttgctactatacccgccgtcacggtcccggcgtactcggcctccaaggccgccctgaacgcgtacatcatgtgcctccgccgccaaaacagggggtcgtccacaaagattattgagatatggcctccttctgtacagaccgagcttcatgattacatgggcccggaagtcgggaggaagatgggcatgcccgtacaggagttcgtcaacaaggcgtgggagcagctggcggcgggatccgagctcgtcgctgttggtcctctcgcagcccaggcaagtttcaaggacatgctggagactcggcacacaactttcgagaacatatcgagcatcatgttgatgcactatgagttgtga

SEQ ID NO: 1228 - DNA, 1305 bp, Myriococcum thermophilum
atgagacacctcttcttcacttccctcgtcctctcggccctcaccgccacccaggcctacaccccactatccgacgcctccctgcgccgcttgccccggctgttctcttcgtcatcatcatcaccatcatcatcatcatcatcatcatcatcatcatcatcatcagagaaccagccagacggcttcgacccggacttcgaccctacgcgcggggccctgctagcaccgattttacggccgcgcgtgccgggcacggaggggcacgcggccgtgcaggagcactttgccgccttcgtacgcgaccggctgcacggcgggggcggtgacgggggtgatggtgatggtgatggtgatggtgatggggatggtggtggggggtgggcggccgagtggcacaacacgacgtcgaccacgccggcgacgggggaccggcccgtgcccttccgcaacctgatcctgcgacgggacccgccgtggacgacggggtcggggtcggggtcggggtcagggtcgcgggagggcgacgtggcgcggctgaccctggcggcgcactacgacagcctctaccgcccggagggcttcgtgggcgccatcgacagcgccgtgccctgcgccctgctgctctttgtcgcccgcgccgtcgacccggccctggcccggcgatgggaggctatcgagcggtccggagaggccgggctagagagtgaggagaagggcctacagatcttgctgctggatggggaggaggcatgggtccagtggagcgagcaggatagtctgtacggttcgagggccctggccgagtcatgggagaagacgcggtacgatgatggcagcagcttttccacaccgttggaggccatcagtctatttgttctgctcgacctgctgggtacggccgagccaaacattccctcatacttccccaaaacgcactgggcgtaccagaacttggccaagatcgaagagaggctaaggaagctggacttgctcgagacgaagccgaggaaaccttttttagccgagagtcagaaggaagcaacgcggttcagaggcttcgtgcaggatgatcacatcccgttcatgcgtcggggtgtcgatgttctgcatatcattcccacgccatttccttcggtgtggcataccatggatgacgacgcggcccatcttgatctaccaaccatcagggactgggccaagataatgacagtgtttgtggccgagtggatggacttggaaggttactttcctgaggtggaaccatctgacgcgggagacgagtctacggaaaaggaagagctgtaa

SEQ ID NO: 1229 - DNA, 1656 bp, Myriococcum thermophilum
atgaagcaagctgccttcctgtgtgcccttgccggcctggcgctggccgcacccgagtatgccgtccccaactcggtcgagagtaacgacgtgttcgacggttatgtgagctacagcatcgagtttgcgagctttccggactttgcaggaaacaagtcgaacccaaacacctactcggatatcctcttggataaccttggaaagcttcaggggcacaagccctacatacgtgtcggcggaaacacccaggattatgcactttataacgagtccctgccctacgccttgaacgggacaatcgacccgaaccgggccgtagattatcctaccacagtgttcattggtccctcatacttcgagtcctacgacacctggaaggacgtcaagttttcccacggctttaacctcggcctaggcgggaacaggtcaagtggatggcaaactttgctggataccgtgccattggcttgcaaggccctgggcactggcaagttctacgtcttggaatatgggaacgaaccggacttgttctctacctcggctcagggaccagtgagacctgccaactggaccgagacgacatacgtatcccagtggtataacggtaccaggcagatcaaggccctggttcaggagcattgtcccgagatgctggagtcgggcaattatggctacatggcaccatcttttgccggtgttaacaatcacctgaaggagcctgcagcctgggcggctgggctcgacggagatgaggacatcaagctattttccacccacaactacattagcggcgctacgtctccgggcgtgactcttcagggcacattgatgaatcacgccgtgaccaaacgctcagtcgacgcccatattgtggagtataacaaaatcatctcgcaatcttccgccccggtacctcccctgatctttggtgagaccaactcgctgtttaaccaaggccgtcctggcctgtccaatacattcggcgccgctctctggggcgtagacttcaacctctactctgcctctgtcgggttcaagcgtgtgcacatgcacatgggcacgaatttccggtacgtcgcctggcaacccatcgaaaccgacaaagcgaccataggtaccaaagcaccctactatggttccatcgccgtagctgccgccctgggcccccgtcctgccactgttcacgaaattcctctatctagccagatctctggtgaagagctccagccggaatccgcatacgcaatctacactgagaacggcacggtgctctcccgcctgatggtcctcaacctccggtcgtacaacacgacggtggacggcgcgggcttggagccgctgccggagccgccggcgcgcggggcggtcgagtacgcgttccggctcgagggcgtgccggcgggcgcggccgtccccgtgcggcgcctggccgccaacggcagcgacgccatcacgggcatcacctgggacgggtggagctacagccacgacctggacggcggccgccccgtgcgcctgcccaacgtgaccgacacgtccgagacggagcgcgtcgttgtcggcgaagacggcctcgtctccgtcaccgtcccggactcgagcgccgcgctgctggatatcgaggatgcaaaggcgatcaatgcccatctttgctga

SEQ ID NO: 1230 - DNA, 420 bp, Myriococcum thermophilum; identical to SEQ ID NO: 924

SEQ ID NO: 1231 - DNA, 1185 bp, Myriococcum thermophilum
atgtcaccagccaagcatctgttggccgccacggcggcgctggccccgggcgcgctgggcgccaacttgctcgtgtctcacttctcgggcaccgtctacagcctgtccttcaccaactccaaccagacgggcacgctgtccgtcacctccgagacggatggctgtggcaccacgcccgcttggctgcagctctattccgacattggcaaggtctactgctttgacgagtcgtggtttggtttcggcacgagcgccgagtacgagatcggcgaagacggcagcctcactcttaccggcaccctgcggaccggcggcaactcggtccacggcgccctgtacggcggtgccgacggcaagggcttcatcgccacggtcgagtacaccccctcgacgctgacgacttacaagacgccctccaacggtggtgagcagcttgcgctggagaagttcaccctggaacagccggggccgcacccacgtcaggacgcgccacacccgcacgaggcgtacgtcgacccgacgggcaagtacatcctcgtgccggacctgggcgccgacctggtgcgcgtgttccggatcaacgccgagacgggcgagttgacgggctgctccgagggccaggccgacccgggcgacgggccgcgccacatcaagttctggaagaacgccgagggcctgcagaaggcctacgtggtcaacgagctgggcaactcggtctcagcctgggacgtcgagtaccccaccgacgaggtatccgcggacggctgcctggtgctcaacaagacgcagacggtgtcgacgtacgcgcccggcacgagcggcgggccgaacaccaaggcggccgagatccgcatcgtcgacaacttcctgtacgccagcaaccgggccgacgagaccttcggctcggagcaggactcgatcgccatctacaccattgacgaggccaccggcgagatcgcctggctcggggctgccaactcgtactcgtactacccgcgcaccttcgagttcaacaccgacggcaccctcgtcgccgtcggcggccagacctcgtccaacgtcgccatcatcgcccgtgacccggagacgggcaagctgggcgagctggttgctaacatcgaggtcggtcagaagggcagagccggcgaggaggacggtctgagcgctgtcgtttgggtgcagtga

SEQ ID NO: 1232 - DNA, 1044 bp, Myriococcum thermophilum
atgaaggttcaaaccgtcgtttcggcggctgcgctctgcgcccaccaagccgccgcccagttcgcccaagccgccatgatgcggttccagtgttctcagctcgtcatcgaacgtctcgaccctctggtcaaccccggccttattggatctccccatatgcaccagattgtcggcggtaactcgtttaatgcttctatgacccctgtcgagtatgatccgtccgagagatccacttgtaccacctgctcgttctccgaagacttcagcaactactggacagccaacatgtacttccgcgcaaagaacgggagctacaagcgcgttccgcagatggttaacttaggattgtctggagagggtggtgtgacagtgtactatatcccgagttatgacgggaagaccaaagtcacggccttcaaacctgggttcagaatgttggttggcgacgcggctctccggacgcaagacggcatgcagaaacagatctgccaccgctgcgagcacaatatcgagcagaatccattcggcggtgcgccctgcacgggtaacgatacagctgggttcccaacccaaatgtgccccggcggcatccggtcgaccattaccttcccaacatgctgggacggcaagaatgtcgacactccggaccacaagagccacgtggcgtacccggaaaccggcagctttgagacgaccggcccgtgcccggcaagtcaccccgtcaggttgccccagctcatgtacgaagtcatgtgggacacgcgccagttcaacgatccggagctgtggccggaggagggccagccgttcgtgtactcgatgggtgatgcgactgggtatggtcaacacggtgactacatcttcggttggaagggtgatgcgctccaacgcgctctcgacgcccgctgtaccggcgatagatgctcggaactcaagacacagagcgtagaggaggctttggcgtgtgtgaaggaacagacagtcaaggaagaggtcgacaaatggctcgattctctccctggcggagtgcaccctgatatgtga

SEQ ID NO: 1233 - DNA, 1035 bp, Myriococcum thermophilum
atgaagtattccactctgtttctcgggctcctggcccagggagccgcggcgcagcagatgatccgcttcggctgctcgcagctcgtcgtcggccgcatggaccccctggtcaacccgggcgtgccgcagtcgcctcacgtgcaccagatcgccggcggcaactcgttcaacatctccatggacccggagacgcacgacctcgtccgcgactcgacctgtaccacctgcaccttctccgaggacttctccaactactggaccgccgtcctctacttccgcgcccgcaacggcacctacaagcgcgtgcgccagttccccaacgtcggtttgcgcactgacggaggcctcacagtgtactatatcccgccgtatgacggcaagagcaaggtgacggccttcaagccgggcttccgcatgctggtgggcgatgcgtcgctgcgcaaggaggaggggatgcaaaagcagctgtgccaccgctgcctcggggccggctacgaccagggcggcgccccctgcacgggctccgactccaagacgctgccggaccacttctgcgagggcggtatccgcaccaccgtcactttcccgacttgctgggacggccagaacatcgacagcccggaccacaagagccacgtcgcctacccggagaccggctccttcgagactaacggcccttgcccggccagccaccccgtcaagctgcctcagctcatgtacgaggtcatgtgggataccacggagttcaacgaccccgagctctggcctgaggatggctcccagccgtttgtctggagcactgacgacccggtcggctactctcagcacggtgactacatgttcggctggaagggcgactccctgcagcgggctctcgacgcccgttgcggcaatgccgtctgcaaggagctcaagacccagacgtccgaggaggccatgcgctgcacgctgccgcagtacgtccccgaggacgtggatggatggctggatcacattcctggtgtgattatcgatgacggaaagaagaacaactaa

SEQ ID NO: 1234 - DNA, 2553 bp, Myriococcum thermophilum; identical to SEQ ID NO: 928

SEQ ID NO: 1235 - DNA, 732 bp, Myriococcum thermophilum
atgaagtcatttaccccggccgtgttcgccgctgggctccttgctcagcaggctgcagcccactccatcttccaacaggcgggcagcggttcgaccgacttcgacactctgtgcacccggatgccgcccagcaacagccctgtcactagcgtgaccagcgccgacatggcttgcaacgtcggcggcacctcgccggcgtcgggcttctgtgaggtgaacgctggcgacgagttcattgtcgagatgcacgcgcaacccggcgaccgctcgtgcgccaacgaggccatcggcgggaaccacttcggcccggtcctcatctacatgagcaaggtcgacgacgcctctacggccgacggcgcctctgccgaatggttcaaggtgtccgagttcggctatgactcgagcacccagacctggggcaccgacaagctcaacgagaactgcggcaagtacagcttccagatcccgagccacatccccgcgggcgattacctcgtccgggccgaggctattgctctgcacactgccagccagcctggcggcgctcagttctacatgagctgctatcaagtcaaggttgccggcggcgaaggcggccagctccctgctggcgtcaagatcccgggtgcctacagcgccaacgaccccggcatcctcgtcgacatctggggcaacggcttcagcgagtacgtcattcccggcccgccggtcatcgacagcagctacttctaa

SEQ ID NO: 1236 - DNA, 1587 bp, Myriococcum thermophilum
atgtacgccaagttcgcgaccctcgccgcccttgtggccggcgccgctgctcagagcgcttgcaccctgacgactgagaaccacccttcactgacgtggtccaagtgcacgtctggcggcagctgcaccaccgttcagggttccatcaccatcgacgccaactggcggtggactcaccagatcgatagcgcgaccaactgctacgagggcaatgagtgggacacttcgtactgcgatgatggcccctcttgcgccgccaagtgctgcgtcgacggggctgactacagcggcacctacggcatcaccacgagcggtgacaccctgagcctcaagttcgtcaccaagggccagtactcgaccaacgtcggctcgcgcacctacctgatggagagcgagaccaagtaccagacattcgagctcctcggcaacgagttcaccttcgatgtcgatgtctcgaacatcggctgcggcctcaacggcgctctctatttcgtgtccatggatgccgatggcggtatgtctcggtactcgggcaacaaggcgggtgccaagtacggtaccggctactgtgatgcccagtgcccccgtgacctcaagttcatcaacggcgaggcgaacgtggagaactggcagagctcgaccaacgatgccaacgccggcacgggcaggtatggcagctgctgctctgagatggacgtctgggaggccaacaacatggccaccgccttcacgccccacccctgcactatcatcggccagtcgcgctgcgagggtgagacgtgcggcggcacctacagctcggaccgctatgccggcgtctgcgatcccgacgggtgcgacttcaacgcgtaccgccagggcaacaagaccttctacggcaagggcatgacggtcgacacgactaagaagatgacggtcgtcacccagttccacaagaactcggccggcgagctctccgagatcaagcggttctacgttcaggacggccaggtgatccccaactccgagtcgaccatccccggcgtcgagggcaacaccatcacgcaggactggtgcgaccgccagaaggccgccttcggcgacgtgaccgacttccaggacaagggcggcatggtccagatgggcaaggccctggcccagcccatggtgctcgtcatgtccatctgggacgaccacgccgtcaacatgctctggctcgactccacctggcccatcgacggcgccggccagccgggcgctgagcgcggtgactgccccaccacctcgggcgtccccgccgagatcgaggccgaggcgcccgactccaacgtcgtcttctccaacatccgcttcggccccatcggctccaccgttgccggcctgcccgacggcggcgacggaggcaacccgcccgtgagctcctccaccacctcggtgccttcgtccaccaccaccactacctcctccgctaccaccaccccgaccggcggcgctggcacggcgccgcactacggccagtgcggtggcaatggctggactggtcctacccagtgcgagtccccttacacttgcaccaaggtgaacgactggtactcccagtgcctgtag

SEQ ID NO: 1237 - DNA, 1062 bp, Myriococcum thermophilum
atgcttcgccatctcaacagcctcctaatcttcttccgcctccgccgcgccgacccctgggatccccgaacgccgctcgactggttgctcgcctcacccctccaatggctcacctcgctgctctaccaccacatcctgctccccctccgtggccggcccttccatcctccgcctcgtcgcagcagcagcagtagggggagaagggggaggggcccgatccgggtggtctgcgtctcagacacgcacaacctcgtgccgggtcccggcgggcgctccggagccatcccggacggcgacctgctgatccactgcggcgacctgacgatgggcggcacgccggccgagatccagcgccaggtcgactggctgcgcgggctgggccaccgctggaaggtggtcgtcggcggcaaccacgactcgtggctggacgagcgggtgaggaagcagatgagccagggagggcaggtggaggagggtaaggaggaagtcgtcatcgactggtcggggatcgagtacctctgtgatagggcggtcgagctcgagtttgacggcgggaggcgcctcaatgtgtatgggtttggggcggtgccgtattgtggtgaagggtttgcatatcaatatgacagggacaagcatccatggcagggaaggatcccggaggagacggatgtcctagtgacgcacacgccaccggctcaccacctcgacctcggcctcggctgcgccgggctgctggacgaggtctggcgcgtcaagcccaagctgcacgtcttcgggcacgtccaccacggccacggcaaggaggccatctactacgacgagtgccagcgggcatacgagtcgctcatggcccagccggcccgggggcccctggtggacctcgtctcggtcgcccgctggagggacgcgttcaacgtgctccggtacggcgtcgctagcatcctgtggaagtggatcatgctcggcccggggaccaacaacggcgccctgatggtcaacgcatcgctgatgtatgggaacacggggcgtctggggaatcctgccatcgtggttgatctgtaa

SEQ ID NO: 1238 - DNA, 1473 bp, Myriococcum thermophilum
atgatccggctaagtgtatgtgtctctgcactcctggccggcctctcggcagccaagtatatcgtcccggggggaagatggcgggatacggacggtaatctcgtcaatgcccacgcaggctgcgtaacagtggacaaggataccagcaaattctggctttttggcgagtacaaggtcgaaggccaaaccgaaggtggtggtgtctccgtatacagctcggatgacctagcgacgtgggaataccacggccttgccttagcacccattgagggccaccaatacatctcgccctctcatatcatccaacggccaaaggtggtctacagcgaggtctctaaggagtatcacatgtggtggcacgcagataactctacctatggactgctgctccaggggtttgctcggtcgccaaacatttcggggccttatacctttgtgagcgccacggcccctctaggcaactggtcccaggatttcggcatctttaccgactacaaggacgggaggtcctacgcactttactcaaacggcgacagcgcggaaggtcgagacgtctatattacagcctacaacgaagatgtgtcggagctcgacaaggtcatccaccgcttcgacaaatatgatctcgaagctccgacaatcgtccagacggacaagagttactacgccctcatgagccataaaacgggctaccggcccaacaacgtcgtcgccttccgggccgactcgctggccggtccgtggtcgcagccattcatggttgcgccgcccaatacgcggaccttcaattcccagtcgggctacacattgaccatccggggcaagaacaggacgacgtacctctacctcggtgaccagtgggattctaactcgctttgggagagccgatacatttggcttccgatcgagattgacgaccgcaagaagacgctcagcctcgtgtggcatgacgtgtatgacctggacgttcggacgggcgagtggtcccccgtccaaggcaagacgtactacgcagccgacgccaagacggccggcaacgcgttcaaacaggaggccaacttcgccagcaagggcgtcatcgtcaccggcatctacgacaaccacagcaccgttacgtttgaagggatcgaaggcaccgggaagccgcagtgggtgtcgttctactaccagaacacggacgacatgggcttcggcgaccagccgggcggcacgccggaccgcatcggcggcacgtggcagctgcgccggatcgcgagcgtcgtggtgaatggtaactgggagaaggtcgagacgttgtaccagcgggacacgcacaagggcatcatcctctcgacgcccctgcagctgacgttgaacaaggggaagaacaacaccatcacggttggcgggttgtacaatgggtttgattacaagggggccgatctggaccgaattgtcgtgtatcccccggaaccggaccacgagaggcaatga

SEQ ID NO: 1239 - DNA, 687 bp, Myriococcum thermophilum
atggtctcgctcaagtctctcttcctcaccgccgcggcggccgtgacggccgtgacggcccgccccttcgacttcgacgacggcaactcgactgagctgctgggcaagcgtcaggtcactcctaacgccgagggctaccacgagggctacttctactcgtggtggtccgacggcggcggccaggccaccttcaccctgctcgagggcagccactaccaggtcaactggaggaacacgggcaactttgtcggcggcaagggctggaacccgggtaccggccggaccatcaactacggcggctccttcaaccccagcggcaacggctacctggccgtctacggctggactcgcaacccgctggtcgagtactacgtggttgagtcgtacggcacctacaaccccggcagcggtggccagtacaagggcaccttccagagcgacggcggcacctacgacatctacgtctcgacccgctacaacgccccctcgatcgacggcacccagaccttccagcagtactggtctgtccgcacctccaagcgcgtcggcggctccgtcaccatgcagaaccacttcaacgcctgggcccagcacggcatgtacctgggcaaccactactaccagatcgtcgccaccgagggctaccagagcagcggctcctccgatatctacgtccagactcactaa

SEQ ID NO: 1240 - DNA, 1203 bp, Myriococcum thermophilum
atgcggacttcctacagtgccgctatcgcgctctcggccggcttccggttggcaacagccgccccgacccatggttgcggctccaattcacctcttctctttgtcaccacctatcccgcgggtgatggtgagggcaaactcctcaccctcaagcagaccgggtccaatctggaggtcgttggccagtccgacgcttgtgggccctatccttcgtggctgacccaggatggcgacgttctctactgcgtcgacgaagcttggggcggcgagagcggcaccctgttctcgctcaagatcaatgccaaccataccttcacgaagttgagtgacaaggaaacgattgtgggcccggtgagcaccgtcatctacggcgagaatggcgacggattggcagtggctgattatgccggaggcggtatcaacttgttcaacatcgccgatcctgcctcgattcaggagattgacaccattgtgtacccgcccccgggcgacgagcttcccgacccgcagaactcggcccggcctcacgaggccatcttggaccctaccggcgagtttctcgtcttccccgacctgggcgccgatcagattcgcgtcttgaaggtgaacaaggagacgctggaatacgaggagaagccgagctacaccgatttcgaccgtggcactggtcctcggcacggcgctttcttcaagtctggcgacaagaccttcttctacctcgttggcgagcttgcgaacgtgctccagggcttctccgtcacttacaatgatgacgacagcctcaccttcacccggatctacaacgccaccacgcacggtgacgaccagccgctcccggatgaaacggctgccgctgagctttggatcgcccccgggagcaacttccttaccctctcgtctcgcttcgagagatcgctcgagtatacgatttccaacggcaccaaggtgccctcggaccctctcatcaccttctccatcgacgaggagacgggcgaccttactcacgtgcagacggccccagcgggcggcgtcaacccgcgccacttctccttcaacagtgacggcacccgcgttatctctgcgctgcagtctgacggccgcgtcgtcgtctttgagcgcgaccctgctaccggcaagatcggcaagaccattgcctccggcaatgtcgagggatcgcccaactttgccatctataagcagtag

SEQ ID NO: 1241 - DNA, 678 bp, Myriococcum thermophilum
atgaagtaccaactccagctcgccgcggctgcagcgtttgccgtgaacagtgcggccggtcactacatcttccagcagctcgcagtcggcgggaccacgtaccagccctggcagtacgtccgccgcaatagcaacccggactggctgcagaacggcccggtgacggacctgtcgtcgactgacctccgttgcaacgtgggcgggcaggtcagcaacgggaccgagaccgtcacggtgaacgctggcgacgagttcaccttcatcctcgacacgcccgtctatcatgctggccccacctcgatctacatgtccaaggcgcccggcgctgcggccgactacgacggcagcgggccctggttcaagatcaaggactggggtccgcaaggaacgagctggacgctgagtgaccggtacagcgggaatattcccaagtgcatccctgacggcgagtacctcctccgcatccaacagatcggactccacaaccccggcgccgagccgcagttctacatcagctgcgcccaagtcaatgtcgtcaacggcggcagcacaaacccgacccctactgcccagattccgggtgccttccagagcaacgaccctggattgaccgtcaacatctacaacgaccctcttaccaactacgtcgttcccggtcctcaagttttctcttgctag

SEQ ID NO: 1242 - DNA, 1377 bp, Myriococcum thermophilum; identical to SEQ ID NO: 936

SEQ ID NO: 1243 - DNA, 1518 bp, Myriococcum thermophilum
atgtattccctgctcattgctctcctctgcgccggcactgccgtcaacgctgcggctccccgggcccggtctgcgctccatcgtggcagacaagcgcgtgggagccagcatgcggcccatatcctccagcagcgccaggccgggactactctcaccgtcgacctgtccacgacgtaccagagaatcgacgggttcggcacctcggaggcattccagcgcgcagtgcagatgagccagctgcccgaggaaggtcagcggcgtgccctcgacatcctgttcagcaccaccaacggcgcagggctcaccatccttcgcaacggcatcgggtcgtcccccgacatgagctccgaccatatggtctcgattgcgccaaagagccccggctcgcccgacaacccgctaatctacgagtgggacgggtccgacaacaagcaactctgggtgtcacaagaggccgtccacacgtacggcgtcaagaccatctacgccgacgcctggagcgctccgggttacatgaagaccaatggcaacgacgctaacggcggcaccctctgcggcctctccggcgcctattgcgctagcggcgactggagacaggcttatgctgattacctcaccaaatatgtcgagttttaccagcagtccaatgtgacgattacccacctcggcttcatcaacgagccagaattgacaacgagctacgcctcgatgcgcttctcggcctcccaggcagccgagtttatccgcatcctctacccgaccatccagagctccaacctgacccataagccgaccatcgcctgctgcgacgccgagggctggaactcgcagtctggtatgctgggtgccctgagctccgtcaactccatgtttggcctcgtcacggcacacgcctacacctcgcagccgactttcgccatgaacacgcctcatccggtttggatgactgaggctgccgacctacagggagcatggacttcggcatggtaccaatggggcggcgcaggcgagggctggacgtgggccaacaacgtgtaccaggcgatcgtgaacgccaacgcgtcggcgtacctgtactggatcggcgcgcagacgggcaacaccaacagccacatgatccacctggacctcaacgcgggcaccgtcgagccgagcaagcggctgtgggcgctgggccagtggagccgcttcgtgcgcccgggagcccgccgcgtcgccgtctcgggcggctccggcagcctgcgcaccgccgccttccgcaacgaggacggctccgtcgccgtcgtcgtcctcaacagcggcggcgacgccgccctcaacgtccgcctcgacgccgcctcgtccggcgacgaccagcaaccggcctcggccaagacttgggtcacggacaactcgagggccatcgaggagatcgagactagcttcgccgatggtgctgccaccgtcaatgtgccctcgaggtccatggccaccgtggtgctctatccggctccggaggaggagaaccccgaggagtaa

SEQ ID NO: 1244 - DNA, 1332 bp, Myriococcum thermophilum
atggaacggctttctgcaagattcggccgcttgttcgcatcgctaccgaaaccgcagaccggcaccgttctgcgctcatccgccctatctgtctccactgctactgccgttgccgccgccgccgccgccgccgccgcatccatggctgtatactcaagttccgtctccaagctggacctggctgccgacgttcccgatgaggcccgtcaggcgccacatcacgtcaaagattccaatgggaagctcatcaagttccgcaatccccatccgtcggccggggagccgccacgatctgtcttccacgtgatggccaagattttccaggccatgatcgcaggcgagtggtccaaccccgacacgtccaacgtcacgatcccggccgtcaagcccgactttagggagaggcgagctggactggacagcctgcgcgccacctggctcggacatgcctgctacctggtcgagttccccagcgggctgcgcgtcttgttcgatccggtcttcgaggcccgctgcgcgccggtgcagtggttcgggcccaagcggtacacccctccaccgtgctcgctgtcagacctcccccccgtcgacgccgtgatcatcagccattcccattacgaccacctctcgcacaccagcgtccaagagctcgcccgccggaaccccaacgcccacttcttcgtcggcctcggcctggagaaatggtttcgtaacagcggcatcaacaacgtgaccgagatggactggtggcaagatgccgacctcgtcctgaagaggcagcatgacggccaggtccaaagcccggaaaaggcagatcccgaggccatctcggcccgtatcacctgccttccctgccagcactcgtccgggcgctcgcaccaggaccagaaccacaccctgtgggcctcgtgggccgtcaagtcgggcgacaagtcggtctggttcggcggcgacacaggctaccggcgggtgcccaagctgcccgtccacgtggacgactacgggcccgagtacgactcgctgccacgctgtccccaattccgccagatcggcgccctgcgcgggccgttcgacctcggcctgatccccatcggcgcctacaagccgcgctggatgtggagctggatgcatgccaacccgtacgacgctgtcgagatcttcaaagagacgcgctgcaagcgcgccatgggcatccactggggcacctgggtcctgaccgtcgaggatgtcgacgagccgcccaagctgctgaagcaggcactcaaagcaagcggtatcccagagacgggcgtcttcgatgtttgcgcgattggagaatccagggagttctga

SEQ ID NO: 1245 - DNA, 507 bp, Myriococcum thermophilum
atgctgcgcacatccgccctcttcctcgccctcgccgcgatggggcttgctcaggctccagaaggctacagcaccgtgtacatcacctctaaggtggacaccaacttcgtcattgtgcccaaggagcgtgtcgcggggaccacgacgatcgttaagacggccaacaacttgcctgagcagcagtggtatctcaagctgggatcgaccaagattcagttggccgacagcaccctctgcatggatggcggtccgcaagaaaactggagggacatgggccagatcttcgtcgaggagtgctcggatgccgagtctcagaactggttcgtcatggatgacggccgcatcgccttggaggcatcgaatcagcagcaatgcgttgacctggtgttcatgagggcggtggagaacaacgacgtcggactgttcagctgtgccggactgggcggcagcggtgctgccgacgcgggtatcaactggccgctggtcaacgtgacggacagcgcttga

SEQ ID NO: 1246 - DNA, 1221 bp, Myriococcum thermophilum
atgaagatatccaacacctctcttcttgcgctgctgctgccggcggtaagcagccgtttcgttgagcctggagaggctgatcgcgttctgctttatcccgacggcgtccctcaaccgtctgcaagcagcgagaagtaccacatagagctggccccgggagagacgagatgggtgacggaggaggagaagtgggaactgcgccggcaaggcaggcggttttttgacatcaccgaccatcccgagctcggtaccctccgcgcgcgaaacgcattcaacaagaagagcgtattccccgagggtcccaaacaacaggagaaggtcagcccactcctggagaacttgtccaagaaggagatggaggaccacttgaccaccttcacatcattccatacccgctactataagtccgattacggccggcaatcaagcgagtggctcctcggccaggtgcgccagaccatcaaggatgccggcgcggaggactacgtccgcgctgagcacttcgagcacccatggggccagaacagtatcatcgccaccatccccggcaagaccaactccactattgtcatcggcgcgcaccaggactcgatcaatctctggctgccgagtattctggccgcccccggcgccgacgacgatggcagtggcaccgtcacgatcctcgaggccttccgcgtcctcctccagtccgaggacgtggtcaagggcaaccacgagaacaccgtcgagttccactggtacagcgccgaggagggcgggctgctgggcagccaggccatcttctccgcctacgagaaggagggtcgtgacgtcaaggccatgctgcagcaggacatgaccggcttcgtcgcccgcaccctggacgccggcgagccggaaagcgtgggcgtcattgtcgactatgtggacccggacctgacggagttcatcaagcgcatcattgaagagtactgtgacatcccttacgtcgagaccgagtgcggatacgcatgctccgaccatgcctcggcgtccaaggccgggtatccctcggcctttgtcatcgagtcggcgttcgagtactcggacaaccacatccactctaccgaagacttgatcaagtatctgtcattcgaccatatgttgcagcacgcacgcatgactctggcattcggctacgagctggcattcaccgactttgatgccctcgagcggccagaccactcggatgcgttgtaa

SEQ ID NO: 1247 - DNA, 1005 bp, Myriococcum thermophilum
atggcggtctcgttgttggtcaggggtctcctgctcctgattctcggattttataaccacgctgccgcagcctgcacgcgcaccgtagtcgccgagcaaggggatacatgcgccaccatcgccgctgccgccggtattacggtcgccgacttcctgaggctcaatccctcggtcaggagctgcaccgagctcgtcgctggtgaaacctactgcgtcgagagctcagacgacagctctcctcctcagacgtcgacccccccgggacttgacgtcagcatcgacggcacatgtgggcagggtgtcacctgtgcgggctcgaggttcggagactgctgctcgcagcatgggttctgcggcagcacccccgcctactgtggcgagggctgccagccggcttttggtatttgtgatgatggtggcggcagtagcagcactagctctcctgtgacttccgttaccgtcaccgtcaccaccatcacatctgtcaccgtgacggctaccagtccaccagcaacgaccactaagtgcacctccattatcagcctaaccaccatcatcaccagcaccagtgtcagcaccaagaccagtacaactaccaaaatcagcactactaccaaaactagtaccaccaccaaaaccagtatcgacacccttaccagcatcgtgacgtcgacatccacgcacgttatcacctcgggcacgtgtgatggcagcagcacgccgaccaagacgactacgacgagctcagccctaccaacaggtagacctctgcttccaggaactccaagcaattgtagaaactactcccggatccaagacggagatacctgccgcagcattgcaacgcgcaacaacctatccttgcttgatttttacgcgctcaacccagctgtaagtggatctattccgaacctcagccgcgatcttattgcttatcagagcggcccgctccagatcaactgcgacgcccttttgccgggttattatgtctgcgtcgggaaatga

SEQ ID NO: 1248 - DNA, 726 bp, Myriococcum thermophilum
atgaagacactcgctacccttttggtttcggccggcctcgtggctgcgcacggctatgttgaccgtgccactattggcggagaggagtaccagttttaccagccgtaccaagacccgtacatgggcgacaacaagcccgatagggtttcccgctccatcccgggcaacggccccgtggaagacgtcgactcgatcgacatccagtgccacgccggcgccgagccggccaagctccacgcccctgccgccgccggctcggacgtgacgctctactggaccctctggcccgagtcccatgtcggccccgtcatcacgtacatggctcgctgccccgactctggctgccaggactggtcccccggaactgaggccgtttggttcaagattgccgaaggcggacgtgagggcacctccaacgtctgggctgacacccctctcatgacggagccctccgcctacacctacactatcccgtcctgcctcaagagtggctactaccttgttcgacacgagatcatcgccctgcacgcggcctgggagtaccccggcgcccagttctacccgggctgccaccagctcgaagtcaccggcggcggctccaccgtgcccagctccaacctggtctccttccccggcgcctacaagggcagcgaccccggcatcacctacgacgcttacaaggagcaaccttacaccatccctggcccgcccgtctttacctgctaa

SEQ ID NO: 1249 - DNA, 846 bp, Myriococcum thermophilum
atgcacttcgcttcgtacctctcgattctgtccgtcctcggcgccagcggcagcggtgtcctggcttgggctcctccgaactacgacgggtacaggctggtctggtcggacgcgttcccgggctctccgggccagtcgccggacgagggcaggtggaacatcatcacgggcaacctgggcgtcaacaacgagctcgaggtgtacacgcgggactcgcgcaacgtgcagatgagcggcggcgacacgctgcagctcgtcccctggctcgacggctccacctggacttcgggcaggatcgagtccaagtacaccttcacgcctaccgccggcggccgcaccatggccgagggccagatccgcttcggctccaacgaccccagcaccaagcagggcatctggcccgccttctggctgctcggtgactctatccgcaatggcaccccctggccggactgcggcgaactcgacattcttgagactgtcaacggcctgctgacgggctacgggaccgctcactgctccacttgcaacgaacccatcggtcgcggtggcagcatcggcatccccaaccaggattggcagcggtggcggatcgtctgggacctcaccaacggcgactggcgtgcccagaccatcacctggttcatgaacgaccagcagttccaccagctgagcggcgcgaccatcggagaccagggcgtctggaccgccctgaccaacaggccgctcttcttcatcctcaacgtggccgtcggcggcaactggcccggctatcccaacgacaggactcagggtggctggggagccatgatggaggtgggctatgttgctcattactccacctag

SEQ ID NO: 1250 - DNA, 1023 bp, Myriococcum thermophilum; identical to SEQ ID NO: 944

SEQ ID NO: 1251 - DNA, 510 bp, Myriococcum thermophilum
atggtctctcacctcgcaacgctcttcctcctcccgcttggcgccattgccgcggccgtcaccaacaccggcccgggcacactggggctgacccggcgcgaggtgtcccccgacaacacatgtggcggcgagaatgaatacacgtgcccggaggagctggcctgctgctcgcagcacggctactgtggcatcaccgacgagttctgcctgacgacggctggctgccaggccgacttctccaactcgactgacgcctgccacgagcccatcccaggcgagagcacctcgatcgatggtacctgcggcaccgagggcgctggcaccgagggttaccgctgccccggcaatgccactgtcattagctgctgcagcgctgctggatactgtggtacgactgatgaccactgcaacccggagaagggctgccagagtgacttcggcaactgcactaccgatgccgaacagcccgagaaccccgaggatcggggctttagcgtcaagctcttttaa

SEQ ID NO: 1252 - DNA, 993 bp, Myriococcum thermophilum
atgaagaatctcctcgccctcctcccgctggcctccgtcgccctcggagcaccaagcttagtgaaaagacaagctcccctcactgatgaagagctgagcaacctcgaactgtacgtccaatgggctgcagcctcggggtgcaacggagaccaggccgcgggccagcccgtcatctgcaatgcgaacttgtgcactaggtttgcgtcccacggcgccaccgtcgccgcatcgttcattggtgaagatacggatatctggggtttcataggcgtggaccctgttgacgagaacattgtcatctccttcaggggctccagctcggtccagaactggattaccgacttcgactttatccaggtttcctgcgacgacctcgtcagcggctgccaagtccacaggggtttcaaccgggcgtgggaagaagtgtccggcgcgctcctggacggtctcgccgcggccacggcggcgcaccccaactacaagatcgccgtgacgggccactcgctgggcggcgcggtcgccaccgtcacggcggcacacatccgcgcggccgggtacgcggccgacctgtacacgtacgggtccccgcgcgtgggcaacgaggcgttcgtcgacttcgtgaccaagcaggccggggccgagtaccgcatcacgcacgccgacgacccggtgccgcggctgccgcccatctggctcaactaccggcacacgagccccgagtactggatcgacccggacgacaaggaccagctggtcgtcggcgagatccaggtctgcaccggctactccaacaccgactgcaacggcggcaccggcggcctcgacacctctgctcacagctggtacctccagagcctcggcggctgcgccgtcgagaccttgtcgcagcccttcgaggccttcaacgatacgaagctcgagaacactctgacccagtacgccgagatggatatcaaggtggccgccaacttgaatgctgcgcaccactcttaa

SEQ ID NO: 1253 - DNA, 2643 bp, Myriococcum thermophilum
atggtttatcacgcgagtgccgtctggctctcgctggccttcagcctctctgcgcccacaacttttgcccgcgccattggaccgagagataaagtccctgaaggattctatgcggctccctactaccccgcgccgcacggcggctggcttgactcgtggagggatgcatatgcaagggcccatgccttggtgtcccagatgactctggctgagaagaccaacatcacatctggcgtcggtatctttatgggtaggcagccatgtgtgggcaacacgggaagtgccgaccgcctgggttttccccagctttgccttcaagactcggcactaggggtggcatccgccgacaatgtcaccgcctttccggccggcatcaccaccggggcgacatgggataaggccctgatgtacgcccgcggagttgccatcggcaaggagttccgcggtaagggggccaacgtccatctcggcccttcggttggcccaattggacggaagccgctcggcggccggaactgggaagggttcggcgccgacccggtactgcaggccaaggcggccgctttgcacatcaagggcgtccaggaacagggtgttatcgcgaccgtcaagcacctgatcgggaacgagcaggagatgttccgcatgtacaacccattccaacccgggtacagcgctaatattgacgaccggacgcttcacgagttgtacctatggccgttcgccgaggcaatccatgctggagtcggtgcggtcatgaccgcctacaatgcggtgaacgggtctgcctcgtcacaaaacagctacctgatcaatgggctccttaaggacgagctcggcttccagggcatggtcatgtcagactggctcagtcacatttcgggcgttgactcggccctggccggtctcgacctcaacatgccgggcgacaccaacatcccgctcttcggtttcagtctgtggcagtacgagctgaccaggtccgtcctgaacggctccgtgcccgtagataggctgaatgacatggctactcgggtggttgctgcctggtataagatgggtcaagacaaggatttcccgcggcccaacttctcgtccaacacgcgggacaagaacggactcctgtaccctggcgccgtgatctctcccatcggccaggtcaactggttcgtcaacgttcaggaggaccactacaagatcgcccgccaggtcgcccaggatgccataaccctcctcaagaacaacggcagcctcctgccgctgacgggctcgggcaagatcaccgtcttcgggacggatgcgcaggtcaaccccaacgggccgaacgcctgcctaaacagggcgtgcaacaagggcacgctcggcatgggttggggctctggcgtggccgactacccctacttcgacgaccccatcacggccatcaggaagagggtttcagacgtcgaatttcacaacaccgacacgttcccgctcttcttcaaggacgaggccccggcccccgacgacgtcgccatcgtcttcatcagctcggactcgggagagaacagcttcacggtcgagaacaaccacggcgaccgcgactccgacaagctggcagcctggcacggcggcgacaagctggtccagaaggtggccgacaagtttccgaacgtggtcgtcgtcgtccacacggtcggcccgctcatcctcgagccttggatcgatcacccttcggtcaaggcggtcctgttcgctcacctccctggccaggaggcgggtgagtcgctggccggcgtcctctttggggacgtgtcgccgagcggccatctcccttactccatcacccgagccgagaccgactacccagacagcatcgccaagctcaaggggttcacctttggtcaggttcaggatacctactcggaggggctctacatcgattaccgctggctcaacaagcactcgatcaagccacgcttcgccttcggccacggcctcagctacgcccccttcgccttcaccaatgccaccatccgggccgtcaacccccctctggaccccgtcccgccgccgcggccctccaaactgccgacgccgtcctactcgaccgacctgccggccgcctccgaggcctacttcccggacgggttcaatcgcatctggcgctatctctactcgtggctgccaaagtccgaggcggacgcggcgtgggagatcggcgccgccggcgagaagaagtacgcctacccggacgggtggcgtgggagagtcacggtgacggtggccaacgcggccggcgccgacttcagcagcagcagcagcagcaactcgtcgtcgtcgacgccctcccgcttcttccccggcccggcgcgggcgtcggtgcaggcgtacgtgcagtacccgcccgggatcccgtacgacacgccgccggtgcagctgcgcgacttcgagaagacggacccgctggcccccggcgagagccagacggtcacgctgcgcctgacgcgcaaggacgtcagcgtctgggacaccgagctgcagaactgggtcgtccccccgggtcggtacaccgtctggatcggcgacgccagcgataggctgttcctcgcttgctataccgataccggcgagtgtgagcagggattggagccgcctgtctga

SEQ ID NO: 1254 - DNA, 1608 bp, Myriococcum thermophilum
atgcgactacccgtgcgatccttagccgcctttcccgtcatcctttccctcgtctttcccttgccaaccgctggcgctgggctgcagccgcccgcgtaccatcacctagatcgcgcagaggcaaacagccatgtgttcccttttctgaaatggctacgtgacagcgcggtggaggccgtcttcggaaaaccgacgaccaaagcaaaagaccagagacctggcccgcaattacaatctaggtaccaaaatgacgtcgtggttcgatttaacgtcaccagctccgaggaagagggtgccatcgcccaggcagttggccagatgtttctcgatgtctgggcttttacacccgatttcgtcgacgtgagacttgccaaggacgacgttcctgcgctcctcaccctgctgcccagctcgctggagccttcgatactcatacccgatgtcgcagcagcagtatgggcgacatacccttcgtcatctactggggcttcctggctcgagtggagcccggcagacgctgctaagatgaggaggtccctggatggggttggaaatatcttttttcaggactaccagcccttagctgttatcgaaaactggatgcgcctgcttgaagccatgttcccatccgtcgccaacatgagcagcatcggcaaatcgtacgagggccatgatatctatgctctccgtgttggtgctcccagtgaagatggcgagactagcgggcctagaaagacgattctcatcacggggggtctccacggccgtgagtggatatcgacaagttcggccaactacctgttatggtcggcagttacgacatatggtaccgattcgatgatgaccaagcttctcaagcatttcgatgttgttttcatcccggttctcaatcccgacggctacgagtacacttggaaagttgatcggctctggcgcaaatcacgacaaccaaccaagatgcgtttctgccgtggcctcgacctcgaccataccttcagccatggctgggacgcaggtggacaagcctccgacccgtgctcggagagctacggcggggaacagcctttccaggccgtcgaagcagccgctttggcgcggtgggcccgcaacgagacagaacatggcgtcaacttcgtggccttcctcgacttgcactcatattcgcaacaagtgctctatccatatgcgtatacgtgctccctcgagccgcctaatcttgagaacctcgaagagctcgcggtcgggttagcaaaggcgattcgtatctcgagcggagagccgtacaccgtcagttcggcatgcgagggagctgttgcccgggcttacagcgcgaatgatccgcttcagcgtatcgaggtcgggggcggcgcggccatcgattggttctatcatgaactccacgcacggtatagctaccaaatcaagctgcgagacactgggagctacggatatttagttccgagcgacgatatcgttcccactggcgaggagacactgaacgctctaaaatatcttggcgattttctcctcgggaacaatggcattgagaagatctcggctcaggagccactggatcactggaaagatctgaagcggcgcagacgttaa

SEQ ID NO: 1255 - DNA, 915 bp, Myriococcum thermophilum
atgaagcccttcagcctcatcgccctggcaacggccgtgagtggccataccatcttccagcgggtatcggtcaacgggcaggaccaaggccagctcaagggtgtgcgagcgccgtcgagcaacttcccaatccaggatgtcaacgacgccaacatggcgtgcaacgccgtcgtgtataaggacaacaccatcatcaaggtgcccgcgggagcccgtgtgggcacatggtggcagcacgtcatcggcggaccgcagggcgccttcgacccggacaacccgatagccgcctctcacaagggtcccatctcggtctacctagccaaggtggacaacgcagcgacagcgtcgccatcgggcctccagtggttcaaggtggccgaacgcggcctgaacaacggcgtgtgggcggtcgacgagctcatcgccaacgacggctggcattacttcgagatgccgtcgtgcgtggcccccggccagtacctgatgcgtgtcgagctgctcgctctgcacagcgcctcgagccccggaggcgcccagttctacatcggctgcgcgcagatcgaagtcaccggctccggcacccactcgggctccgacttcgtctcattccccggcgcttactcgaccaacgacccgggcatcgtgataagcatctacgacaccacgggcaatcccaacaacggcgggcgtccatacccgatcccgggcccacgccccatctcgtgctccggcagcggcggcaacaacggcggcggcaacgacaacggtggtggcaacaacaatggcggcggcagcagcggcggatccgtccccctctacggccagtgtggtggcatcggatacacgggcccgacctcttgtgctgagggaacttgcacggcgacgaacgaatactacagccagtgccttccctag

SEQ ID NO: 1256 - DNA, 780 bp, Myriococcum thermophilum
atggtcccactaacttccaaagccctgatcctgagcagccttgccagtctggttgccggccatggctacttgaagagcatcacggtcaatggccaggactacctcgcttggcaggtcggccaggacgactatgtcaacccccctccggtccgatatgcccgcaagcttgccgacaacgggccagtcccagactttaccacgaaggatatcacctgtggtgctggtggtaatgagccggctgaaggaattatcgagctgaaggctggcgacactgtaacacttaactgggaccagtggggcagcagccactccgggccagtcatgaattatctcgcccattgcaccaatgacgactgcaaatcgttcaagggcgacagcggcaacgtttgggtcaagatcgagcagctcgcctacaacccgtcagccaaccctccctgggcgtccgatctcctccgtgagcaaggtgccaagtggaaagtgacgattccatccagccttgctcctggtgaatatctgctgcgacacgagatcctgggcctgcacgtcgccgggaccgtcatgggtgcccagttctaccccagctgcactcagatcagggtcacggaaggcggaagcacacagctgcccgagggcattgcgcttccaggcgcttatgacccacaggacgagggtatcctggtcgagctgtggagggtgaaccagggccaggtcaattacacggcgcccggaggacccgtctggagcgaagcggcgccagatcccaaccggcctggtccctga

SEQ ID NO: 1257 - DNA, 1173 bp, Myriococcum thermophilum
atgaagctctcagcagcatcgtccgcggcggcatgcgccgccctgctcccaggggcgtccgccactatctactacgccggtgtcgcccagtcgggcggcgagttcggcgtctggagcgatacggccaccccgggcaccggattacccggcacattcggggttgattatcagttcatcagcacgtcgggcgtcgacgtcatggtggacgagaacaaagtgaacctgcaccggatcgccttcctcctcgagcgcatgtgccccctggagtacgggttgggtgccaagttcaacgagacgcactttgacttgttcaaggaggcggtcgactatgtcactgtgaccaagggagcatacgccatcctcgacccgcacaactacatgcgctacaataacccttcgcagcagcccttctccggcagcgtgatcggcaactcgtcggacccgacggcggccacgacggagcagtttgccgagttctggggcgagctggccaagcggttcgccgacaacgagaaggtcatcttcgggctgatgaacgagccgcacgacatgccgagctcgctgctgctcgacaacctgcaggcggccgtggacgcgatccgggcggcgggggcgaccaacctcatcctcgcgccgggcaactcgtggtcgggcgggcactcgtggaccgagggcgggtccgaggccagcagcgagtggctgcacaagctggtggacccggccaacaacacggccatggacatccacgagtacctggacgaggacttctcgggcgggcacacggcgtgcacgcaggaccccgtcagcaacctggagggcgtgacggcgtggctgcgcgagcacgggctcaaggccatgatcaccgagttcggcgggtccaacacgaccgagtgcgccaccatgctcaacgacctgctcgactacatggccgccaacgacgagtggatcggctggaccgcctgggccgccggccctttctggggtagctacagcccctgctgcaccgacgacttccagttcgggagcctcgagcccgggagcaaggccgccggcggctcgcccagcctgtacgacaccgtctggatccccgtcatccagaagaaggtgccggccaagctgcagtggagcggaccgtcaagcgtcgacgggggtgagttgaccgagaagccctaa

SEQ ID NO: 1258 - DNA, 1866 bp, Myriococcum thermophilum
atggttcggaacatcttcctcacggcagccctcgcggctctgggccaatgcggttcaacagttttcgagtctgtcccctctaagccccgcggctggacacgtctcggcgatgcatccgccgaccagccgctccggctgcgcattgctttgcagcagcccaacgaagaactctttgaacggaccttgtacgaggtatcggacccgtctcatgccaggtacggccagcacctgtcccgagacgagctctcggcgctgcttgccccccgagccgagtcgacggcggccgtgctcaattggctgcgcggcgctggcatctcccccgacaatatcgaggaggacggcgagtggatcaacctccgcgtgactgtgcgtgaggcatccgagctgctcgacgccgactttggcgtgtgggcccacgagggcaccaacgtcaaacgagtacgggcgctgaagtactctgtgccggaagagatagtcccgcacattcgcatggtcgcacccgtcgtccgtttcgggcagattcggccggagcgcagccaggtgttcgaggtggtggatacgcctctgccgcaagtcaagacggcggcggccatcccgccgcaagagctcgatgtcaaggcttgcaacaccagcgtcacgcccgagtgtctgcgcgccctctacaaggttggctcgtaccaggccgagtcgaccgagggcagcctgtttggcgttgctggttacctggaggagtgggccaagtacgaccagcttgagttgttcgctgacgcgtacgccccgtatgctgctgacgcaaacttcacttcggtcggcatcaatggcggagagaacaaccaaagcccatctaatcaggacgacattgaggcaaatctggatatccagtacgccgtcgccctgtcatacaagacccctatcacctactatatcacgggaggccgcgggcctctcgttccggaccttgatcagccagatccggatgatgtctccaacgagccgtacctggaattcttctcatacctcctgaagctccccgactccgagctgccgcagacattgaccacctcctatggcgaggacgagcagtcggtcccccgtgcctacgctgagaaagtatgccagatgatcggccagctcggcgcccgtggtgtgtctgtcattttctcgtcgggagacactggtgtcggatccgcgtgccaaactaatgacggcaagaacacgactcgtttcttgcccatcttccctgcggcatgcccctacgtgacttctatcggtgctacccgttacgtcgaacctgagcaggccgcgaccttctcctcgggcggcttctccgacatcttcaagcgccccgcctaccaggaggcggccgtcagcacctatttggacaagcacttggggaaccgctgggaaggcttgtacaaccctgagggtcgcggcttcccagatgtttcagcccagggcgtcgcctatcacgttttctcgcgtgaccaggacatcagagtctcgggtaccagcgcgtcggcgcccctgtttgcagcgctcgtcagcttgctgaacaatgcgcgtctctcgcagggccggccgccgctcggcttcctgaacccgtggctgtactcggaggaggtccggaaggcgggtgccctgactgatatcgtccacggcgggtcgaccggttgcacgggcaaagacatgtactcgggcctgccgaccccctacgtgccgtacgccagctggaacgccacgcccggctgggaccccgtcaccggtctgggcacgcccatcttcgacaagctgctggaggtcagctcacccggaaagaagctgccgcacattggcggcggatacgggcacctggccggcggtcgctag

SEQ ID NO: 1259 - DNA, 1023 bp, Myriococcum thermophilum; identical to SEQ ID NO: 953

SEQ ID NO: 1260 - DNA, 1458 bp, Myriococcum thermophilum
atgcagcatatcgttcgggtcggggtcagcctcagcttccttgcagcaacggcggtcgcagcagctgccgggaaatgcaccagcacgatccagcgcgacgttgccgttatcggcggcggtgcctccggtgctcatgccgcggtctggctacgcgataatggctacagtgttgtggtcgtggagaaggccagccagctgggcggccacaccaacttctacaaggacccggtcacgggtaaagaaatcaatgtcggcgtgcaagcttggatggagtacaaagacagctacgacttcccgaagcgcatgaacgtgtcgactagcgggtctatggtcttcacgcccaacacggcccggttcatcgatttcaagacggggcggccggtgccgggctacgaggcgcctgcggacgaggagatgtacgcagctctgcagaggttcctcgacgtgatcgagcagtacgaggacatggtgcttccgggcttcttcaacttcccgaagccgggcgccatccccgaggacttgctgatgccctttggcaagtttgtcgccaagtacaacctagaagctgccgtccctcagctctgggacgcgacagtgcaaggtctcggcgaccccatgaacgtgccgacgctctgtgtcattcaagcctcacccatccccatgacccgcgccctgctgggtcaggccgccgcggcagtgcccgagtcgggccggctgtacgacttgtatgagagcgtggccaacttcctcggcgatgacgtcctctactcgagcaccgtcgtctcgtccacccgcaacggcgaccgcaacgccaagaagggcgtctcgctgactgtgaggggctccggtggcaagctcacctgcgtcgaggccaagcggcttcttatttcgatcgagccgacgttggccaacatggcccccttcgacctcgacccgtcggaactgatgatcctgtcaaagttcgagtacacgaccgtctacgccggtatcctccgccacccgtccctgcagataagcaacgcctacaccggccgcaccaccggcccggcctcgctcaactacaccgacttccccgtggcgccgcaggtcggccggatcgaatacctcggcgacaccgaggacctgttccagttcaccgtcgtcggcaccgcccacgacaacaccaagagcatgcaggctctcctgtccaagtcgatcgacaggatgatcgccgccggcatcctcccggccgcaccccgcggcagcggcaggatcgactacgccatctttgccgaccatgggcccatgcactcgcgcgtctcggccgctcaactccgcgccggcttcatccagcagctctattccctccagggccgccgtaacaccttctacaccggcgccgctttctcctccggcttctccactgtcctgtgggagttcaacaaggtgttgctgcccaaggtggtcgaggggctttga

SEQ ID NO: 1261 - DNA, 747 bp, Myriococcum thermophilum; identical to SEQ ID NO: 955

SEQ ID NO: 1262 - DNA, 4416 bp, Myriococcum thermophilum; identical to SEQ ID NO: 956

SEQ ID NO: 1263 - DNA, 1257 bp, Myriococcum thermophilum
atgaagctcaacttgctcgcttcgtccactctgctggcgctcgcctcagccgtggctgtgcgttcgccacagtggaagtcctacgacggatacaaggtcgtccgtctcactgttggggaagatgtggccaaggtcagcgatattatcagccggctcggcctcgagacttggaagggcaaggttcgggccggtgccgtggccgacgttgtgatcccgccctcgaagatcagcgcctttgtcaacgagacggctggtatggaagccgtcaccatgcatgaggatctcggagcgtccatcgcggccgagtcgacgttccatacttatgtcgctggatctgccaacgagacctggttcgagtcgtaccacagcttggacgaccatgttcagttcctgaacgacctccaggagcagttctcgtcccagtccgagatcgtctcatctggaaagtccctgaacggaagggacattaccggaatccacttctggggccagtcgggcaaggggaaacccgccgtcgtcttccatggcactgtccacgcgcgcgagtggatcacaaccatggtcgttgaatatattgcctactacctgctcaacaaccaggactctgctgagatcgccggcttcctcgacaagtacgactttatcttcttccccttcgtcaaccctgacggattcgcctacacccagacagacgaccgactctggcgcaagaaccgccagagcacctctggtagcagctgcctcggccacgacatcaaccgcaactgggacttcaagtgggacgtcagtggcggtgcctcaaccaacccttgtgctcaggacttcaggggaagtgagccggccgatgctcccgagacccaggctctcgccgccttcctgcaaaagacacagcagagccagggtgtcaagctgtacatcgactggcattcgtactcgcagctctttatgactccctacggatactcgtgcacagacgttgcgcccaacaactccgagctgcagtcccttgcccggggcgccgccgcggccatcagggaggttcacggcactagcttccagacgggtcccatctgctccaccatctacaaggccaccggtaacagcgtcgactacgttagcgatgtcatcggtgccgactacgtcttcaccgccgagctgcgcgacaccggaagatacggcttcgtcctccctgccaaccagatgtacccagcagcgaggagacttgggctggtgtccgctacctgctccagaacatga

SEQ ID NO: 1264 - DNA, 1449 bp, Myriococcum thermophilum; identical to SEQ ID NO: 958

SEQ ID NO: 1265 - DNA, 1023 bp, Myriococcum thermophilum
atgcacatgaagtcgcttaccgcgctcgcactcgcggcgccggcgtcggccctgattcgtttcggctgctcgcagctcgtcgtcgagcgtctggatcccctcgttactcctgggagcaacccatctccgcatcttcaccaaatcatcggcggtaacgctttcaatgccaccatggatccggggagcggcgacatcgcggagcgggcgacgtgcacgacgtgccagttcagcgaggacttctccaactactggacggcggtgctcttcttccgggcgcgcaacgggtcgtaccaccgggtgccgcagatcccgaacatcgggttcgagggccagaagggcggcatgacggtctactacatgcaggacgggctggccaactacgagcagacatccaaggtgacggccttcaagacgggcttccgcatgctcatcggcgacgcgtcgtaccgcaccaaggaggaggcgaaccggttccggcagatcacgtacacgtgcctgcaggacctcggcacccgcttccccgagaccatggacttccccaaggagccctgcccggccggcatcatggccaacctccgcttcccgacctgctgggacggcaagaacctcgacagcccggaccacatgagccacatgtcatacccggagacgggcactttcgagaacggcgggccgtgcccggcttcgcaccccgtgcgcgtgccccagctcatgtatgagaccatctgggacacgcgccagttcaacgacaaggagctgtggcccgaggatggctcgcagccgttcgtgtggtcgatggatgacagcaccggcttcggctcgcacggtgattacatgttcggctggaagggtgacgcgctgcagcgggccatggactcgccgtgctacgtcaactgcccgacgctcaagacgcagagcatcgacgagatgaaccagtgctccgtccccgacgtcgtgggcgagcagatcgacggctggctcgagtcgcttcctggctacccgccgcaggagaagaaggcctga

SEQ ID NO: 1266 - DNA, 714 bp, Myriococcum thermophilum
atgaagactcttgcgcctcttattctggccggcgctgccagcgcccacaccatcttcacctctcttgaggtgggcggcgtcaaccatggcgtcggccagggtgtccgcgtgccgtcgtacaacggcccgatcgaggatgtgacgtccaactcgatcgcctgcaacggccctcccaacccgacgacgccgacggacaaggtcatcacggtccaggctggcgagaccgtgacggccatctggcggtacatgctcagcaccaccggctcggcccccaacgacgtcatggacagcagccacaagggcccgaccatggcctacctcaagaaggtcgacgacgccaccaccgactcgggcgtcggcggcggctggttcaagatccaggaggacggcctgaacaatggcgtctggggcaccgagaaggtcatcaacggccagggccgccacgagatcaagatccccgagtgcatcgaacccggccagtacctccttcgcgccgagatgcttgccctgcacggagcctccaactaccccggcgcccagttctacatggagtgcgctcagatcaacgtcgttggcggcaccggtaccaagacgccgtccaccgtcagcttcccgggtgcttacagtggcaacgaccccggtgtcaagatcaacatctactacccgcccgtcaccgactacaaggttcccggccccagcgtcttcacttgctaa

SEQ ID NO: 1267 - DNA, 3174 bp, Myriococcum thermophilum
atgcgactgttcggccgtagagtcggccgaggggccatgtccacctgggcggcctcggctgctctgatttcgttgttttcttcacggtttgggctctgcacggctgcgtcctcgtccgacccgagtccaattctcgacaatgggctccaggacgagatccagtgggaccaccgcagcatcatcatcgggggcgaacgcctgttcttgttcgggggggagatgcaccccttccggctgccggttcccgagatgtgggaagacgtcctgcagaaaatcaaggccatgggcttgaggatggtgtcaatctacgtacactggggattccacgcgccaactccggacactgtagacttcagcaccggcccgcgcaacatcacccgcttccttgagatggcccgggacgtgggcttgtacgtgatcgtccggccggggccgtacatcaacggagagttgaacgccggcgggctggcgctgtgggcgacgacgggcgagcacgggtcgttgcggctgaacgactcggcgttcacggaggcgtggacgccctatcaggacggaatagcccaggttacgcggccgttccagctcacagaggaggggacggtcatcatgtaccagatcgagaacgagtacgggaaccaatggctggacccggaagccaaagtgcccaaccccgaagctatctcgtacatggaggcgttggaggacaatgcgaggaggaacggcatcgtcgtgcccctcatccacaactcgccgaatctgaactcgcccgtgtggtcaaaggactacgacacggtcggtgccggcggcaatgtggacatctacggggtagacaactacccgcaatgttggtcctgtgtcctggaggaatgcggtaacgtaacaccatgggcggtccgcgactactttggccacttcgagaaagtctctcccacgcaaccgtcccttatgcccgagttccagggaggcgccatgaacccgtgggccgggccggcgggaggctgcaaggagcgcaccggggcggactttgtcaacttctactaccgcgacaacattgggcagaaggtcagcatcctcaacctctacatgatttacggcggcaccaactggggctggctggcggcgccgttcatcgggagcagctacgactacggggctgccatctctgaggaccggagcatcgacgacaagtattacgagatcaagagcctcggcttgttcaccagagccgccaacgagctggcctcgactgatcgagtggggacggggctcgagtacacgaataacagcaacctgttcacggccgagctccggaacccggagaccggcgcggggttctatgtcatccggcatgacgacaccgcctcggattcggaggagtggttcgttctgcgggtcaataccagcattggcgagttcttcgtgcccaaggtgtcgagcgctgttgtgctgagcggacacgaggccaagatcctggtagccgacttccattttggcaaccatacactgtactactcgactgccgaggtactcacgtattccatcatcgacggcgaaaggacagtgttggtcctgtggacgcccacgggccggtcgggcgagttcttcctcaagggcgccaaggaagggaaaatctcctcgggtccgtcggtaacactggacgctcaggaagagggcataatcgtcgcgtggtacgagcaaaaggaggagaggaccattctcgagttcgacaacggggtgacggtagtgcttgtagacagggcaactgcctataaaacctgggttccggcgctcaccaaagatcctaaggttcccgtggaccagactgtcattgttatcggcccctatctggtccggtccgccagcctgaccgacgacaccatctccatccagggcgacgtcaagacggctacgccaatcgaggtcttcacctcctcccgcatccagagcatccgctggaacggccgcgacatgcagacgaccccgtctaactattctactctcacaaccaccataccggcacccaagcccgttcaaaacccggtcgggattggcacctggagagtgcacgacgccctcccggagcgcttcctcaactacaccgacaccgggccggcgtgggtcctggcgaaccgaaccacaaccccgaacccggtcgccggcccggacacggccacccggccattcctcttcgcagacgagtacggcttccacacgggcatccgcctgtggcgcggccacttcttcgtacctccttccaacaccaccaccaccagtacctcgtcctcttcaacagctaatagcagcgaagacgagccccgcccgacgggcgtgttcctcaacgtgcagggcggcacggcgcacgggtggtcggcgtacctgaacggcgagttcctgggttcgtggctgggcagcacggacacggcggcgagcaaccgcacgctgtcgttcgtgctcggcgacgaagaaaacggccggtcggccgtgcgggagggcgagaacgtgctgctggtggtgcacgacgacacgggccacgaccagctcggcgccgccgtcaacccgcgcgggatactcaacgccacgctgctgggaggcgggggcgataatatcggcttttcgtcctggaaggtcgccggcacggcgggcgggtcggccccggacaaggccgggctggacccggtgcggacgcactacaacgagggcggcctggtggccgagcggctgggctggcacctgcgcggcttcgacgactcggactgggagacgacttcaaccgtcagcttcgacggcccgggagtgcgcttctaccgcgcctgggtgcccctggacataccgccggatatcgacctgtctctcgccttccgcttcacgcccgccgccgaggacgtcgagcgggacacgctgggctaccgcgtgctcctcttcgtcaacggctggcagtacgccaggtactacccctccatcgcctccgaggacaccttccccgtcccgcccggcgtgctcacctacggcggcgacaacctgatcagcttggccgtctggtccctgcaggaggaaggggcccgggtcgatctcgacatcctggtcaggtatgtgacggactcgtcgctggatgtgcactttgatggcgactatctgcggccgcaatgggatccggagaggctcgagtacgcgtga

SEQ ID NO: 1268 - DNA, 768 bp, Myriococcum thermophilum
atgtaccgcacacttgcttccgttgccctgctcgcgggtggcgctgccgcccacggtgctgtgaccagctacaacatcgctggcaaggactaccctggatacaacggctttgctccctccggtgagcccgtgatccagtggcaatggcccgactacaaccccatcatggacgccagcgactccaagatgcgctgcaacggcggtaccggggcggagctgtatgctgaggctgctcccggcgacaccatcactgccacctgggcccagtggacgcacgcccagggcccgatcctggtgtggatgtacaagtgccccggcgacttcagctcctgcgacggctccggcgccggatggttcaagatcgacgaggccggcttccacggcgacggccagaccgtcttcctcgacaccgagaacccctccggctgggacatcgctaagctcgtcggcggcaacaagtcatggagcagcaagatccccgagggtctcgccccgggcaactacctggtccgccacgagctcatcgccctgcaccaggccaacaacccgcagttctaccccgagtgcgctcagatcaaggtcaccggctccggcaccgccgagcccgactcctcgtacaaggccgccatccccggctactgctcgcagagcgaccccaacatttcgttcaacatcaacgaccactctctcccgcaggagtacgagatccccggccccccggtcttcaagggcaccgcctccgccaaggctcgctccttcaaggcctaa

SEQ ID NO: 1269 - DNA, 1827 bp, Myriococcum thermophilum; identical to SEQ ID NO: 963

SEQ ID NO: 1270 - DNA, 1272 bp, Myriococcum thermophilum
atgcggttctcgacactgtttctgacgctctgcactgccgtcctcccgtcctcggccgacctcgtcaaggaaggctcgaggtgcgtcgtgacgtccctgtcggccagcgccgcatcgtccgaggctggcgagctggtggcacgccagggccaggtggacgacacgccgcagatcctcgaggccttctcgcagtgcggccaggacggcaccatcgtcctggaggagggtacctatcacatccggcaggtcatggacttgaccgacctgagaaacgtatccgtcgaaatctacggcacgctgatctggagcgctgataacctcgactactggcgccgggccagccctgctgtcgtctacgccgatcgccagacggcctggcgcatcggcgggcgcgacatctccattcgcggcttcggcaaggccctcttcgacggtaacggacaggcatggatcgacctggccaacggcgctgccaacctgcaaggaaggcccatctcgttgaccatctggtacggcaccaacgtgttgatcgacggcatcacctggcgcatgtcacagttctggcatacttttgttgcctactcggagaacgtgactatgaccaaccttgacatgtacacctactccaacaacggtaggagctcccagaacactgacgggacgaatacctggaactccaaggacatcttcatcgcaaactggacggtgacatgcggcgatgactgcatcgctgttaagggtaatagcaccaacgtccacgtcaagaacgttacatgcaacgagtctggttctaccgtcatcggcagcatcggttccaactcgtggcaacccgactacgtcgagaacatcgtgtttgaggacatcaaggccaaccattcaagcaatgtcgcctggatcaaaacgtaccctgggaatggatacgtccgcaacgtcaccttccgcaactaccaattcacggacgtcaaccagcccatctacctgtcctcgtgcatctactcgtacaacaactgcgactcgtcccgcctcaggatcacggacgtcacctggcagaacatcacgggcacgagccggtacaacgtggcggtggccatccactgcagcgcttctgccccctgcgacggcttccacttcgagaacatcgatatcaagcccaaggacggcggcaccgccaaggttctgtgctccaacatccagaaccagaactccatgggcatcacttgcaccgggccctgccctggttcccagccacagcagctgaacgggaacgtataa

SEQ ID NO: 1271 - DNA, 1695 bp, Myriococcum thermophilum
atgctgtggacgagccttctctcggccttcctcctcaccggggtggccgaagctgctgggcgtagcatagcgcatgccgggaaacgccatgtcgagcacgctgcgaagagggcgaggcccatcatatccccgggttcttatcaacccgtggtcgagcgggaggagaaggcgcccaaattcctgaccccgaagacaaagaaatttgccgtcgacgggaagggcattccggatgtcgactttgacatcggcgagtcatacgccggcctgctgcccctcagcaatgaccccgccgacgacaagaacctgtttttctggttcttcccctcgaccaacccggcggccgagaaggaaatcctcatctggctcaatggcggtccgggttgttcgtcctttgagggattgctacaggagaatggcccattcctgtggcagtatggcacctataagccggtcaagaacccttggagttggcacaccttgaccaacatcgtctatgtcgagcagcccgtcggcactggcttcaccacgggcacacccaccatcactaacgaggaggagctcgctgctgagttcatgggtttctggaagaactttgtcgacacctttggcatgcacggctacaaggtgtacattgccggcgagtcttacgctggctactactgcccgtatattgctgccgccttcctcgacgcggaggacaagacgtacttcgacatgtcgggcatgaccatttacaacccccttctcgccgccgacgagcttcaagaacccatcccagttgtggctttcaccgagtactggaccggcctcttccccttcaacgacaccttccgtgccgacatcaagcgccgcgagaagaagtgtggctatgacgattacatggccaaatatctcgtctacccacccaggggccccctgccgtcccgcctgccgggcacccatccggacggtaccacgcgtgaggagtgctggaacatctactgggacatctttgacgctatctccctcctcaatccctgcttcgacatctaccagggtgccaccatctacttcgatcgcgaagacgtcaaacgtgccatccacgcgcccgtcaacaagacttgggaggagtgctcgtcccgcgatgtcttcgtcaatggcacagaccgctcggagccccccatcttccgggctctgccgcgcgtcatcgacggcaccaagaacgtcattgtcggccatagcgctctcgacatgattctgcttgctaacggcaccctactggccctgcagaacacaacctggggcggcaagcgcggcttccagaaccggccggaccagccattctacgtgcccctcaacaacatcaccgacctctccaccctggctgctgctggcgtcttcggaagccttgtgtcggagcgcggcttgacatacgtgggtgtcgacctggccggacacatggtgccccagtatgccccttcggccgcctaccggcacgtcgagtacatgctgggccgcgtggactgcatgaactgcaccaagccgttcactacggatcctttcacgccccagagtgaagggaagttgggcaagggcactgcgccgcagggctggagcaatgcgcatgggcacggccatgaccatggccctggccatggtcacgccgtcctccgccctgtcatgatccttcgccagtcctttcatcagtctaaatga

SEQ ID NO: 1272 - DNA, 2550 bp, Myriococcum thermophilum
atgtctgcgaataacacggcctccaagcccctcatcgccaacaacggcgccgcgactgccaccgcctccaccaccgcctccgcccgtttcccgttcctccgcacgaagcgcggcatcgccctcgtcgtcgtcgtcgccatcgtgctcatcgtgggcggcggcctgtccgggctggccgcgctgcgcacccgtggcggcggggatggggactctgcgtcggcagacgagtatggcgagggggtgattagagacgactcgtggttctacgggctgtcgccgcccgtgtatccctcgccaaatataacgggcagtgaaggcaggtgggtagaggcgacgaggaaagccagagagttggtgcgaagaatggcgcttgaagaaaagatcagcttgactgccggcgatggctcgtttcccggctgttccggctctctcccgcctatcccacgcctcaagttcccgggcatgtgtctgagtgacgcgggaaatgggctccgcggtaccgatttcgtcagcacctggccaagcggtatccacgttggtgccagctggaacaaggctctcacccgccggcgaggctctgggatgggaggcgagttcaagaccaagggcgtcaatgtgctactggggcccgtcgttgggccggctggccgagtggtgctaggtggcaggaattgggaaggcttctcggttgacccgtatttgtcgggagttttggtatccgaaactgtcacggcagtccaagcagccggcgttatcaccagcaccaagcattatattgcgaatgagcaagagacgaaccgaaacccctctggggatattcagtcggtgtcgtccaacattgatgataggaccatgcatgagttctatctatggccttttcaagatgctatccgcgccggcagtggaaacataatgtgttcgtaccaacggctcaacaattcgtatggctgtgcaaatagcaaggcgctcaatggattgctcaaaaccgagctcggctttcagggttgggtcgtgagcgactggggtgcccaacatgccggagtcgctacggcgctggctggaatggatgtcgtcatgccgaacggtgatgccttttggggtccgcatctgatcgaggccgtcaacaatgggtccgttgccgagactcgcgtggacgacatggtcgtcagaacgctcgcgacatggtacctattaggccaggatcgggacttccctcgccccggcatcggcatggccaccgatctcacgagggatcacaggattgtcgatgcgaggaactccagtttccggtcgacattgtttgacggtgccctcgagggccacgtgctcgtcaagaacgcccgaaatgccctgcccttgaggagaccaaagatgttgtctgttttcggttattcggctaagaacccggaccacaacaatccctcacctggtcaatcaccctggctctggggatccgagtccttcaactacaccgagttcagcggccgcttcttcgggttcggcggcgaatacagctctacgcccattgcgtttaacggcaccatctactcaggtggcgggtccggggccacatcgccggccaccatcgtttctccctttgacgcgctgatccagcgggcatacgacgatggcacggctctcttctgggactttgtcagcggagaacccttcgtcaatcccatgtcagatgcctgcttggtcttcggcaatgcttatgccaccgaggccgctgaccgacccggcacccgcgacgactacactgacggcttgatcaggcacgtcgcagaccgctgtgcaaacacgatcgtcgtcatccacaatgcggggatccgcctggtcgaccagtttatcgaccaccccaacgtgacggccctcatgttcgcgcatctgcccggggaagcgtctggtcgagcggtggtgtcactgctgtacggggatgagaatccgtcgggcaagttgccgtacacggtggctcgcaacgagtcggactatccggtgctggggccggacgtggagcccgaggggagcatgttcgcgctgttcccgcagagcaacttcaccgagggcgtgttcctggactaccggcactttgacgcgcggaacatcacgccgcggtacgagttcgggttcgggctgagttataccacgttcgaatacgacaagctggtggtgcggaaggtaggctccgccggacggttcggtgagtacccgacgggacggatcgtcgagggcggccaggaggacctgtgggacgtgttggtggaggtgtcggccgaggtgaccaacaccggggaggtggacggcgccgaggtggcgcagctgtacgtggggatccccgccgagggggcaccggtgaggcagctgagaggcttcgagaagccgttcctcaacgcgtcggccacggcgacagtccggttcccgctgacgaggagggacctgagcgtgtgggacgtggtggcgcagaagtggcggcttgtcaggggcgagtacaagatcgaggtgggcagcagtagtaggaacttgccgcttgttgggacacttacgatctga

SEQ ID NO: 1273 - DNA, 1107 bp, Myriococcum thermophilum; identical to SEQ ID NO: 967

SEQ ID NO: 1274 - DNA, 540 bp, Myriococcum thermophilum; identical to SEQ ID NO: 968

SEQ ID NO: 1275 - DNA, 1143 bp, Myriococcum thermophilum
atgaagctcaatcaattcctcgcgggcgctctgctcgcagcgcccgtgctggctcatccgactcacaaggagaaggtttatgcccaccgggctctccccctcgagcgcaagtctctcgcccactgctccgccaagttcaaggagcccgagttcgtcaagaggacggttgagcaccatggccgcgagttgcaccggctgaagcgtgcgcggggcattccggttgaggaagagcccaaggtcagcccgcgggactacctcgatgtcatcaggatcgaccaccagagcaacaagacggtcactgaggggatggatctcagcacgctgtttgacgactacggcgcctgcatgctgatgcccgcggtcgatcagggtcccctgtacgtcaagggtgaggagatccggaaggaaattacgaatggcgaggccggcatccccttgaccctggccatccaggttgtggattacaacacgtgcgagacggtcacggatgcgtatgttgacatctggagctgcaacgcgactggcatctacacgggtgtgcagggctacccaggcatgggcgaccccaacgacgcctcgatcctgcagggtaccacgctccgcggcgtgcagccggttgatgaccacggcattgcttcttttgactcgctgttccctggtcactacgacgggcgtgccagccacattcacgctattgtctaccttggcgccaccaaggagcctaacaacacgatcacgggcggccgtgcggcgcatgttggccagatctactttgaccagaaactcatcacccaggcggaggcggcgtcgccctacaacaccaacacgatgagaattgtgcccaacgagaacgacttcctcttccgggcgggcgccaacggcgacgacccgatcgtccgctacgccttcgtgggcgacaagattgaggacggcctgttcgcctggatccgcttcggcattgaccagaacgccgacatgcctgtcaacccagctgctttctggaccgaaaatggtggtgttatgaacccaaccggccccatctctcagcttcctcctggcggcttccctggctggcccggctggggcatgaagaagagggttgaggccctcctggctgcggctgaggagaagaacaacgcgtag

SEQ ID NO: 1276 - DNA, 894 bp, Myriococcum thermophilum; identical to SEQ ID NO: 970

SEQ ID NO: 1277 - DNA, 885 bp, Myriococcum thermophilum
atgcgtctccttcaattgatcaccaaggcggctgccatggccggcctggctgcgggtgcctcgctgcagccggtgagcaactttggcgacaacccgaccggtctgcagatgtacttgtacgttccggacaatgttgcgcccaacccggccatcatcgttgctctgcacccctgcggaggatcggcccagggatggttctcgcagacccagctcccgtcttacgcggaccagcttggcttcatcctcatctatgccggcacgacccagatgagcaactgctgggatgtccagaacccggctagcctgacgcacaacggcggtggcgacgccggcggcatcgtcagcatggtcaagtacacgctgcagcagtacaacggcgacgcgtcgcgggtgtacgtcatgggcggctcgtcgggcgccatgatgaccaacgtgctggcgggctcgtacccggacgtgttcgaggccggcgcggccttctcgggcgtggcgcacgcctgcttcctgggcgccgactcggccacgcccttctcgcccaaccagacgtgcgcccagggccagatccagcgcacgccgcaggagtggggcgacctcgtgcgcaactcgtacccgggctacgacggccgccgcacccgcatgcagatcttccacggcaacgccgacttcctcgtccgccccgagtgcgcccaccaggccctctcccagtgggccaacgtcctcggcctcgagctcacccagaccaaccagggcgtcccctcggccgagtacacccaggaggtctacggcgacggcacccagctgcagggcttctttggcgagggcgtcggccacatcgcccccgtcaacgagcccgtcatgctccgcttctttggcttgttggagtag

SEQ ID NO: 1278 - DNA, 864 bp, Myriococcum thermophilum
atggtctccctctcttctcttttcgtcgccgcctatgcggcggctgtggccgtggcggccccgagcgaggccgcccttcagaagcgccagacgtacactagcagccagacgggctggcacgacggctattacttctccttctggaccgacggcggtggcaatgtccggtacacgaacgaggccggtggccggtacagtgttacctggtccggcaacaacggcaactgggttggcggcaagggctggaacccgggtgctgctcgcaacatcagctacacgggccaatacaaccccaacggcaactcgtacctggccgtgtacgggtggacacgtaacccgctgatcgagtactacatcgtggagaacttcggcacgtacgacccgtcgacgggggctcagcagctcggcagcatcacggtggacgggtcgacttaccggatcctcaagacgacgcgcatcaaccagccgtccatcgagggcacgcggacgtttgaccagttctggtcggtccggaccaacaagcgcagcagcggctccgtcaacgtcaaggcgcacttcgacgcctgggcccagctcggcctccgcctcggcacccacgactaccagatcatggccactgagggctacttctcgagcggctccgctaccatcaccgtcagcgagggcagcagcaacggtggcgatgacaacggcggcggcgacaacggtggtggtgacaatggtggcggtgacaatggcggcggtaactcgggcaactgcagccccctctatggccagtgcggcggccaaggatggacgggcccgacttgttgctctcaggggacctgccgtgtctccaacgagtggtactcgcaatgcctgtaa

SEQ ID NO: 1279 - DNA, 1179 bp, Myriococcum thermophilum
atgcacttctccgccgctcttctggctcttcttcccgtcgccctcgcggcccccgctggcgaggtcctcgacaagcgcgccccgctccttgctgctcgcagcggccagcacatcccgggcaagtacatcattaagctccgcgagaatgccgccgacgacatccttgagaaggccatcggcaagctccgctccaaggccgatcacgtctaccgcggcaagttcaagggcttcgccgcccatgtcgacgaggatatccttgacgccctccgtcttctccccgaagttgagtacgttgaggaggacgccatcgtgaccatcaacgcgtacacctcgcagtccaacgccccctggggtattgcccgcctctcgtccaagtcgagcggctctcgcacctacacctatgacagcagtgctggcgagggcacttgcgcctatgtgatcgacacgggcatctacactggccactccgacttcggtggccgtgccaccttcgccgccaacttcgccgacagctcgaacaccgatggcaacggccacggcacccacgtcgccggcaccatcggcggcaccacgtacggtgttgccaagaagaccaagctctatgccgtcaaggtcctcggctccgacggctccggcaccacttccggcgtcattgctggcatcaacttcgtcgctgaggatgcgcccaagcgcagctgccccaatggcgtcgtcgccaacatgtcgctcggcggctcctactcgagctctctcaaccgcgctgcggccgcccttgtcgactctggcgttttccttgccgtcgccgccggcaacgagaaccaggatgcctccaacacctctccttcctccgagcccagcgtctgcaccgttggtgccaccgacagcagcgacaggaagtccagcttctccaactacggcagcgtcgtcgacatccaggcccccggcaccaacatcctgagcacctggatcggcagctcctccgctaccaacaccatctcgggtacctcgatggcctctccccacgttgctggtctcgctgcctacctcctgggtctgaatggcccccagagccctgcctctctctgcaactacatcaaggagaccggcaatgctgtcgtctccggcgagcccagcggcaccaccaaccgcctagctttcaacggcaacccctccgcctaa

SEQ ID NO: 1280 - DNA, 1146 bp, Myriococcum thermophilum
atgcgcgtctcgagcttggttgcggccctcgctaccggcggtcttgtcgccgccgcgcctaagcccaaggagcaatcgcaacccagggccgtggacgtgaatcctttcaagggcaaggcgcagttcgtcaacccggcctgggcggccaagctagagcagaccaggcaggccttcctggcaaagaacgacacggtcaacgcggccaagacggcaaaggtccagcagaccagctcgttcgtctgggtctcgaggatcgccgagctctccaacatcgacgatgccattgaggctgctcgtgaggctcagaggaagacccgcaggaggcagatcgtcggccttgtgctctacgaccttccggaccgcgactgcagtgccggtgagagcgccggcgagctcaagagcgacgagaacggactcgagatctacaagaacgagttcgtcaagcccttcgccgagaaggtggcagccgcaaaggacctcgacttcgccatcgtcctggagcccgactcgctggccaacctggtgaccaaccagcacatcgagttctgcgccaacgccgcccccgtctaccgtgagggcatcgcctatgccatctccagcctccagcagcccaacgtgcacctgtacatcgacgccgcccacggcggctggctcggctgggacgacaacctcccgctggccgccaaggaattcgccgaggtggtcaagctcgccggcgagggcaagaagatccgcggcttcgccaccaacgtgtccaactacaatcccttccacgccatcgtccgcgagaacttcaccgagtggagcaactcgtgggacgagtctcattacgcttcgtcgcttgccccgttcctcgaggaggaggggctgccggcgcacttcatcgtcgaccagggtcgcgtcgccctgccaggcgcccgcgaggagtggggcgactggtgcaacgttaaccctgctggcttcggtcccgcgcccacgaccagggtcaacaacaccgtcgtcgatgctctcgtctggatcaagcccggtggtgagagtgatggcgagtgcggcatggctggcgctcccagggccggccagtggttcgacgaatacgcccagatgctggtcaagaatgcccacccatccgtcttccgcaggtggtag

SEQ ID NO: 1281 - DNA, 4599 bp, Myriococcum thermophilum
atggcgtctctactcgcacttttcttgactttgacggccgtacaagggagccttgtacggtcgtccagcacgattccagttcgcgggctatcgaacaaaaccaaactcgattatgaccctcgtccggcgccgtcgtacatggttgacaaccagcacaacttctacaagacagcgcccgacaaaggcaggcagaatggcccagtttgggcctactcgggcagtctagatacttacttgagcaatcttcagcgcggcgttgtactccgcgccagctctcccgggtccaatgataccaagcagaccagctttaggtctgacgaccgcaaacggcagtcatcagacttctggctctcaaacttgggacctttaggaatccaaccatttgctggtggagacgactaccagttcttccgcaacgttgtggaggactttggcgccgacaacacgggagaaacagacacaaccgaggccctcaacgcggcatcagccagttggaatatggaaacagtgggtgactcccggacgcgatgcggcgagacatgtggaaatacgttcgcacagggtgccatcgtatacttcccaggtggcacctacaagatttgccggcctgtgattcagtattactatacgcagtttgttggtgaccccaatgacatgcccgtcatcaaaggctgcgacgagtttcagggaatcgctttaatcgacgtggatccgtacgtccccggtggatcgggtcagcaatggtacatcaaccaaaaccagttctttcgtcagatccgcaactttcgcttcgacctcaccgatatgcccgagtcgacggcggacaacgaccaggatcttgtgcccacgggaatccactggcaggtgtctcaggccacatcactgcagaacctagtgtttgacatgccgaccacgagcaccacgactgccgtcggcatcttcactgaaaacggcagcggcggtttcgtgtccgatatcgagttcaacggcggcaacattggctggcgcgcgggctctcagcagtatacggcgcgcaacctagtgttcaacgagtgcaatacggccgtccagatggtctgggactggggctggaattggcagcagattaccgttaatggcggcaccattgccttcaatatttctggagcaggtggtgacaccggtcagggcatcggcagcgtgtccatcatcgattccactatccgagacgtcgaggttggagttctcaccaacagccactcgacctcacccaacattgtgctcgacaacaccaagtttgagaacgtggccagcccggtcaggactgagggtggcgacaccatcttgtcggggaattcggatctgtgggccacaggcaagcggtacaacggttcagacggctcgacagaaacgggcgccgtgaccgcccctggacgaggggagggtctgaacgattctgatggcttcctctatgtgcgctctaggccgcagtacgagaagcacagtgtcgactccttcctcgtcgcgaccacggatggcggatgcaagaatgatgccagtggtgaccaagcgtcttgcattaacgccttcctgcgccgtgccgtggacagtggcaagatcgcctactttccggccggtgtctatgcggttggatccacggtacacatcccgaccggttcggtcgtgcaaggttcttcatggtcgcagattctcggatcgggcttctacttcagcgacatgaaaaatcccaaagtcatggtacaggtcggcaacaagggtgaaataggtaccatggagattaccgacatgttgttttccgtgcgtggcgccacagccggcgcgatcttgatggagtggaacgtcgccgccgtgtcccagggcgcagcggccatgtgggattcacacttccgcgtcggtggcgccctgggcactaatctcgacctgaccaattgtcccaagttcagtaacaacgccgaatgcatcgctgcctccctcctgtttcgcgttaccgcccaagccaatggctattttgaaaacgtgtgggcgtgggtgagcgaccacgacaacgacgagtcgatctacaaccaaccagactccagctccacgcagatttctatttttgcagcccgtggcatgctcattgagtctgaaggcccgtcatggttctacggcggtggctccgagcacgccgtgctctataactatctcattagtggggccaaaagcgtgttcatgggccacatccagaccgagtcgccttattatcagcctgttcccaagcctccagaacctttccgtgctgccgccagcttccccaacgaccctgacttcagccactgtgaggttacggccgaagtgtgggatgaccggtgcaactacgcctggggcctgcaaatcattgattcgaaagatatcatgatccattcggcgggcttgtacagcttcttcaacgaatactatcaggactgcgttcctacccacaactgccagaaacgcatcctcgaggttaagggctcaacgggcgtcgtcatttataatttgttcactgtcggaaccgtcaacatagccagtggtatcgacaacaccaatatcccgcaggatgccaaccagcgagggttcaccaccgaggttagcgtatgggtgccacttcctgggtccgacaatgtcgacattgtgtgggttggtaccgacgtgtgggacacgcccacggtgagctgcccggcccagtcctgcatgttgatcattccgacgtcctcgttggggtcatcaaccaccatcagacccagcagctatacaacctctctggagtatggaggattctcgagtactaccatcggcggtgtccctactaccatttttgtcacaacaaccactactgtcaccatctcggtgccacccatcgtcaccgacggcatcggcttctccaacgtaaacgtgtcgacgtcgggggccatgcccattaccatctttcccagcgtggaaatcccgcccgtggttgtaacattgccgaacggcgagggcagcgaaaccactcggacagtctcccttcccccttggcctcagatcgacggaggtccctcaattggatatacagacccggccaccttaccttctaacagcagtaccggcctccctaccagcacgacctactttactcctatcagtacctccattacagtgcccagcgccacagtaacaacggtgacgttccctggctcgactggagccattactatcagctgccctgctactacctccattgtcttctccacgccggcaatcgccgtcgccacgacgtgtactgactcggccgatctgaccctgaacttcgcgtgcccgacaacccgggtcctcaccttcctcgggcccgccacggccgtggctaccgttgactgctctctggtcacggcctggaagaccggatctagctctgccaccacgccgctgcccacgtacacatcctggcctccctacgtccgaatcgagcctgaagaagaggagcgcgatgaaccagaacccgatgacgacggcgtacatgttccgtgtaccgcctggttcttcttcttttgcatatcgtggggcgagatccgcgtccgctcctggcactggatcctgccgccgggtatctacggcccgggcccggcgcccatcaacaacatcaggccccccccaggcgtcgaattccgcggaaccctgcctaactggccgcgaatcactattgggcccgaccaccaactcacaaccgagtcggagcccgagtgcgaaacgcagacggccgaggcctgcacgacgaccgactatgtctcggacggtacaacgacgtcgtcgacgacgctgtgcgaaaccatcacgggctgctccatcagcgtatcggactcgtctaccgctgtcgtggtcggaagccagacggctgcgccggtcggcagttggggtgatgagcgatgggcaaccatgacgctgggtgacgcctacaccaactcggtgtatgaggccatcgagtcccgtatggcgcgcgaggaggtcagctccggtggcaccaccctctcgtttacgtcgggcccaaccgctgggccgacgtgcgccggcgcgagcaccgcgtgcggcggcaccatctgctcaggctactggtgcaatccgacaccaacgggcgcaccgccggggtacaaggacccgaaggacccgaactcaaaggggtattcggcgccaacgacgacgatcggtggaggaggctcgtcgtcgtccacgagcacggcgaaacccacaacgccgctgacgcggggtcccatcaactgcttcgacgaggccgatttccccggccatgccgacatccaaccggacgatcaggacgagttctcagtcgaattcagcagctggcagtcggacacgggtgacgacctgattgggccggacgacccacccgttaagctgcacgggatagatctccacggggtcaactatgattactcctgcagctgggttcccggctgcgttactgaggtcgagaagcagagctttcgctttccgcttggcatgtcgaatagcttgatcactgcttacttgctggtccgggaggattataccaagtgtaagtggaccctgtcccgaagaacaaagccgtag

SEQ ID NO: 1282 - DNA, 657 bp, Myriococcum thermophilum
atgcgtaccaccaccatcgccaacgccttctctagcctcgccctgctgctcggcagtccggctgccgcggcggtggtagacaagagacagagcaaggtggggcaatactgtaatccgacaacgcagatctgctacgtcgagtactcgtggggtcccacggtgcctgtcttccgcatcgcggtccccgacagcgcgtcgaccggcaccgacttccagacgctgctccagatcgtcgcgcccgccaccctcggctgggccggtttctcctggggcggcggcatgacggccaacccgctgacggtggcgtggcccaacggcagcggaggggtcacggtttcttcgcgatgggcagattcacggaccctccccacggtgtactcgtcggcgacgtaccgcactatctcagccgagaacaacgggacgcactggatagtcgagacggtctgctctggatgcagccagtggagcggcggcaggctgagcaccacgggtgtcaatacctttgcctgggccgtcagtgaccaacccgtatcgaacccggccgacccctcgagcactttccaggtccacaacaatatcggcagcttcggtacatccttggacgacggaaaggtgccccaggcgacctttgaccagtacgtgcagggggcccagtaa

SEQ ID NO: 1283 - DNA, 1254 bp, Myriococcum thermophilum
atgaagccagtcccagcatacacgttgatagcggcagcggtgggtagcgcctcccgggtgccccggatcccgcgacaaagcggcggcaacggcacgatcgaatgcgccccggtcccgtcccccttcccgacctggcaagaactcccgctgcaaccgtcactgcccgaccctttcctgccgctggcgtacaccacgcccgacgacgccgagaacgtggtggccggtagaggcaagggcagggtccagactccggaggagtggtaccagtgccgtcggcccgagatcatccagctgctgcaggagtaccagtatggctactacccggacccctccgaggagatagtcgaggctacgcgcagcggcaacacgcttaacatcgtcgtgacggcgggaggcaagcagggcagctttagggccactatttcgttgccctcgggtgcttcggagtcgaacccagcaccggtggtgatcaacattggcggtatgcagaaccagccgtacctgaacgcggggattgccattgcgcagtttgattacacgagcgtggcaccggatagtaacgcgaagacgggcgcgttctggagcatctacaatgggagggatatcggcgtcctgacggcttgggcctggggcttccaccgcacgctagatgccatcaacatgacggttcctgagatcgacgcgagccgggcgggcgtgaccgggtgctcccgcctgggcaaggcggcacttgcggcgggcctcttcgacgagcgcatcacactcacgatgcccatgtcgtcgggcgtccagggagcggggccctaccggtactatgacctcagcggacagggcgagaacctcgagaacagcaagcagggagctgggtggtggaccaacagcaaactgggtacttttatgaatcacgcggagaatttgccgtacgacgcccacaccatcgtggccgccattgcaccgagggccgtcatcatcgaccagggcaccggcgatccgttcgtcaacagcaaaggcaccgccatcgtcgtttacccggcggccaaggttgtctatgactggctgggagcaagcgaaaacatcgggatcagtgtgcgcgggggcggccattgcgatctaagcggctactcttctattctgccatacgtccaaaagatcttctttggaaccccgacagacaaggattacaacgatctgggctcatacggctcacccatgtcgtcggcatatccatgggcgactgccgttccgggagcgtga

SEQ ID NO: 1284 - DNA, 666 bp, Myriococcum thermophilum
atggtttccgtcaaggccgttctcctcggcgccgccggcgccctggctttccccttcaacgttacccagttccaagagctcgctgcccgcgccggcacccctagcggcactggcacccacgacggcttctactactccttctggaccgacaacggcggcaacgtcatctacgagaacggccctggcggttcctacaccgtccagtggcagaactgcggcaacttcgtcggtggcaagggctggaaccccggccaggcccgcaccatcacctactcgggcaatgtcgacttcatgggcggcaatggctacctggccatctacggctggacccagaacccgctgatcgagtactacatcgtcgagtcgttcggctcgtacgacccctcgtcgcaggcccagaccttcggcaccatcgaggtcgacggcggcacctacacgctggccaagacgacccgcgtcaaccagccctcgatcgagggcaccagcaccttcgaccagttctggtccgtccgtcagcagcaccgcacctcgggctccgtcgacgtcggcgcccacttcgaggcctgggcccaggccggcctccagctcggcacccacaattaccagatcgtcgccaccgagggctaccagagcagcggctcctcttccgtcaccgtcgaggcctaa

SEQ ID NO: 1285 - DNA, 1017 bp, Myriococcum thermophilum
atgaagtggaacgtcctcacagctgccacggggctggctgcccctgcgcatgccctactgcgcttcggctgctctcaactcaccgtccagcgtctggaccccctggtcacgcccggagagaatccgtcgccgcacctgcaccagatcattggagggaactcgttcaacgtttctatgccttacccggagcacgaccttgtgaccaagtcgacgtgcacgagctgccagttcactgaagatttttccaactactggaccgcagtgctcttcttccgtgcgaggaacggaacctttaagcgtgttccgcagctcgctcaggcgggcatggagggtactaacggaggcatggtagtctactacatgtcggacgccctgttcgacacgcagcagcggtcgacggtgacggcgttcaagccgggcttccggatgctgatcggcgacgcgtcgtttagcaaccgggagcaggcgcgcgagttccggcagatcacgtacacgtgcatggagaaccaggcgtcgcggcaccccgagacggtcgggttccccaagacgccgtgcaagctgggcatcatggccaaccaccggttcccgacctgctgggacggcgtcaacctggactcgcccaaccatcgcgaccacgtggcctacccggagtcgggcaccttcgagtcgggcggcccctgcccggcctcacacccggtcaagctgccgcagatcctgcttgagaccgtctgggacacgtcccagttcaacaacccggacgactggcccgaggacggcagccagccgtttgtctggtccaccggcgacagcaccggctactcgtcccacgccgactacgtcttcggttgggagggtgactcgctccagcgcgccatggacgcccacacctacgtcatcgccccgatgctcaagacccagagcatcgccgaccagaacaggtgcactgtcaaagacatggtcggcgaggacattgacagctggctccctgaactccctggcggtcacgagatctactaa

SEQ ID NO: 1286 - DNA, 906 bp, Myriococcum thermophilum
atgggtcgcttcctaaagacgacagcactggctgttctcgccacggttggtgcagctagcgcaatccctttcagggctaactcctcgacgaagtacctcatcacattcggcgactcgtattctcagacaggtttcgacgtcgggggcaccaagccgtcggcggacaacccgctcggcaaccctcctttgcccgggtggacggccagcggggggttgaactgggtgggtttcttggtctccgagttcaacacatcgacattgttgtcatacaactttgcctatggcggcgccacaaccaacgccaccatcgtgccaccctaccagtcgaccgtgctcagcttcatcgaccaggtggcccagttcagcgacagcatcgcaagcaagccggactatgcgccgtgggacgccaacaatgcgctctttggagtctggatgggcgtcaacgatgtcggcaatgtctggtgggatccaaactacgactcactcttagagcagatcatggcgagctacttcggtcagcttcagattctctatgacgctggggccaggaactttgtcctcctcagtgtgccgcccattcaccggacaccggccgtgttgctcaacaactctcccgaggaccaggaggtcgaggcgctcgcgattgacaagtacaacgaggccatcgcggccaacctagaggccttcacggagaagaacgagggcatcaccgccaagatcgtcgatacaggggtgcccttcaacaccgccctcgacaacccaaccgactacggtgctccagacgccacgtgctacaacagcgacggcaagtcctgcttgtggttcaatgactaccacccaggagttgagatcaacaggcttgtggcgcaggctgttgccggtgcttgggagggcagctttttctga

SEQ ID NO: 1287 - DNA, 972 bp, Myriococcum thermophilum; identical to SEQ ID NO: 981

SEQ ID NO: 1288 - DNA, 1167 bp, Myriococcum thermophilum
atgaagttctcatattccctgctagcagccgtggcggccgaagcggccgtaatcggcagaggacgtcacgtaaagccgccgggtgaggatggccgctataccatctcttcggacggtatcaaggcgcagttcatcccgtatggcgccaccctgaccaacttgtttgtcaaggacaagaacggcgaggatattgacgtggtgctcggctacgacgatgtcgattactaccccgaggaccccggccacccggtttacaacgccattcctggccgatatgccaaccggatcggcaacgggaagtacactctcgacgggaagacgtacctcaccgagaagaatgacggcaacaacacgctgcacagcggcaccaacaactggtcgtaccgcttctgggacgtgaccgaggtcacggacgactccatcaccttctccatcctcgacaaggccaattcatcccagggcttcccgggcgacgttaaggcgtccgtcacgtactcggtcaagggctcgacctggaacatcaagatgacggcggaggctcttgaccacaagactcccctcctgctcactcagcacacctacttcaacctggacgcgtaccggaacccggacacggccaagatctgggaccacgggctgtacctgccctactcgaagcggtacctggaggcggaccagggggcgcttccgacgggcgagatactgacggcggagccggggtcgatcaacgactttgcgtcgtcgccggacctgacggtcgggcacgcgcgggaccagcccggcttcgagggcaactgcggagccgacggcgcctgcgagggctacaacggctactttttgatcgaggacaagccggccgacgacgccgtcgtcgtccgcctctcgagcgccttctcgggcgtcaccgccgagctgcgcaccgaccagcccggcgtcgtcctctactcgtgcaactggatggacggctccgccgacctcaagagcacccagggcatcgagggcgtcaacgagaaggtcatccgcagcagctgcatcgctatcgaggctcaggactacccggatggcatcaaccaccctgaatgggagcgtctcgatgcgcagatctggggtcctggtgagacgtacacatgggagagttcatggacctttggcctgctcgacgagtga

SEQ ID NO: 1289 - DNA, 1431 bp, Myriococcum thermophilum
atggtgtttaccctgaggcttgttggcggcttactcgccacggccactaccatctctggcgcctcttggactcccgaagtcgtcatcagggatgtcgccgtcatcggtggcggcgccagtggtgcctacgcagctatcaggttgaaggaggacttcaataagagcgtcgtcgtgattgagaaggctggccgcatgggcggccatgtctcgacctacgatgatccgaaaacgggctcatcgtacgactttggcgtccaatctttcaatgattacggcccagccaaggccttttttgagcgcatgggtgtacccatcggcagttccccgcgcgtcccactgacgtcgcagtacgccgacttcaccaccggcgcccctgtaaacttcaccgcgccgtcaaacgatgaccgcgtcgtggccctgggccgcttcctcaacgccaccgaggcctaccaggagtacatcttgccgggctactggaacttccccgctccagacaagatccccggggatctgctactcccgtttggcgagtttgtggagaaatatcagctccatgccgccgtaaaccaggtcttcgaggttaccggattgggcgtcggcgacatgataaacaccctcaccctctatgtccttggagcatttggtcaccccatgatccgcttcttcctcggtgaggccgccaccttcacacctgactcccgccgcaacatcgagatttatgaggcaattcagtcccgcctcggcagtgacgtcttgctcaacaccgaggtcagctactcgctgcgcacccccatcggccacattctgtggaccaaatctgcctcgggcaagagcaccatcatcctcgcccgccgcctgctcatggccatcgagccgacgcccgagaacatggcccccttcgacctcgatccggtcgagcagaagaccctctccaaatttagctattcgcgcctccatgccggcattgtctcgcatccatcccttcctgtcaacgtctccctggtcaacactcccgcagctgcgagcccggacaactacgtcgttcttcccaagcccaacttcaacgtccgcttcgactacatgggtggcggctcggacttgtggcgcgtcgtggccgtcggcgacgagcagttcaccaaggacaaggcgcaagacctgatccgcgagaactttgccgccctcgtagaggcgggcaccgttcagcccaagacggctaacccggcagaggagctcgagttccgcgcctgggccgaccatggcgccatgcacatgcgcgtgtccgcggccgagctcaaggacggctttatccagaagctgtacgcgctccaaggccggcgagccacgtggtggaccggcggtgccttttcggtgcagttccaggccgtcctctgggcgtttgacgacattttgttgcccaagatgtttgcctaa

SEQ ID NO: 1290 - DNA, 1011 bp, Myriococcum thermophilum
atgcggctcagccttcttactattgcatcggtcctcgctccattgaccgcggcgttccctctcgggacctttggcctcgcgtcgtgggatatcgagggctttgccaaggacaaccccatcggcatcactaccggtggcaaaggcggatcaacagtgaccgtggataatgcggctgacttcagggaagccgttgcgggagacgagcccaagacggtgctcgtcaagggcgagatcaacctgccgtctcggccaaagattggctccaacaagtccgtaattggtgtcggacgcactgcccacatcaccggcaacggcctcgacgtgttcaactcgaccaacgtcattatccgcaacctcaagatcagcttcattgaggacaatgattgcatcaccatccggaactcgaccagggtctgggtggaccacaacgaatttgcttccgacatcaacaaaggacccgacgcttacgatggtcaagtcgacatcatccgcggctccgactggattaccgtatcatggaactacttccatgaccactggaagtcatccctggtcggtaacgacgccactttccgcgacatcgacttcggccacttgcacgtaacctatcaccataactactggcgcaatgagggcacccgcggcccagccggccgcttcggacaccagcacgtctacaacaacctctatgtcgacttcctctatcaggccatccactcccgctccgacaaccaggtccttgtcgaaggcaacgtattccgcggcaagacccgcgaggccctgagcacctacggcttggtgatcccagaagattcgcccaacacctgcacttgcggcgacgaagaactggatggctatgcaaacttgggagccaaaaacgattggggcaaggcaactgtcaacataacccaggtcggaaactttcacaaggctccctacaagttcaagttgactcccctgccgttggttgaactaattgtcaagctcggggccggcgtgggcaagatttga

SEQ ID NO: 1291 - DNA, 2622 bp, Myriococcum thermophilum; identical to SEQ ID NO: 985

SEQ ID NO: 1292 - DNA, 1152 bp, Myriococcum thermophilum
atgaagctctctgcgtctttgacagccctggctgcggccatgggggcctcggccaccttcgacattcccgcctttgagcagttcgctatcgactccggcctggctcttgctggcctgaacggcatcgccctgctgcagtcggccaccaagtacggcggctcgtgcaatcttggcaacgtcaagatccgccgggaatggaggacgctgtccaaagaacagcggaggagctacatcaaggcggtccagtgcgtccaagataagcccagcagactggaagagggtgtcgctcccggggccaagacgctcttcgatgactttgtttacgtacacatgaatgcgacacccgtcatccactacactggcaacttcctcatctggcaccgcaacttcatccacgcgtacgagaaggagctcaacgcctgtggctacaaggacgcactcccctattgggagtggggtttcgatgtcgaggcgccacacctctcgcccgtctttgatggctctgatacctccatgagcggcgatggcgagttcgtggatgggcccccgctcgagcttgctattcccggcaaccccgagcccgtggtgctggccaaggggaccggtggcggctgcgtcaagacgggcccgttcgccaacatgacggtccatttgggccccatcacgcagccggacccgacggcggacaacccccgctgcctgaagcgcgacctgaacgccgatgccggcaagcgcttcgccagcttccgcaacacgaccgagctcatcctcaactcgcccacgatcgagtatttccggaccgtcctggagggcgaccccgcctatgcgcccatgtcgctgggcgtgcacggcggcggccacttcatcatcagcggcgacccgggttcggatgccttcatctcgcccggcgaccccgccttctacctccaccacgcccaggtcgatcgggtctactggatctggcagatgctggatttcgagaaccgccagggcgtcttcggcactaacaccatgctcaactatcctcccagcgagaacaccacggtcgaggataccgtcgatgtcggccaccttggcggcccaattaagatcaagaatctcatgagcactatcggccagaatggctctcccctttgctacatttatctttaa

SEQ ID NO: 1293 - DNA, 3195 bp, Myriococcum thermophilum
atgtttacagcgggcgtgaagggagccctctggctcgccttcagctcggtggtggccgctctgggacaggagaagatcatctcgactagcccccacggcgctcacttccagatcgctggcggccatgttggcaagggccaaattctggtctcgagcaacgactactggggcgtcatccgcgctgccggtgatcttgccgtcgactttggtcgcgttacggggacgaactatacgctcagcaatggcgagaaaaatgcgcccccggcgacgtacacgtaccatccggtcgacaacatgaacaacacccactattccaccaccggcactgccaacttcaccggcccggcctacgcagaccccgatccggaaaaggtggtgatcattgccggcacaattggccactccaaggtcatcgacaggctgattgagaagcggtccctcgatgtgtcgcgcgttaagggcaagtgggagtcgtttaccagccagctggtcagaaacccggtacctggatgcaagcaggcactcgtgatcgccggaagcgatccccgcggtaccatctacggcatctacgacatcagcgagcaaatcggagtcagtccgtggtatttctgggccgacagtccgccaaagaaacacgaaaatctctatgtaacaacccggaaaaaggtccagggcccaccgtccgtcaagtaccgcggtttcttcctgaacgacgagcagcctgcattgacgaactgggtggctacacactgggaggacaccccgtacggccccggttacagcgcggccttctacggcctcatctttgagctgcttctccgcctccgcgccaactacctgtggccggccgtctgggctaccatgttcgaggtcgacgacccggcgaaccagcccctggccgacgcgttcgaggtcgtcatcggatcgtcgcacaccgagcccctgatgcgcgcacagaacgaattcggccacttctacgagggcccgtgggcctacaacctcaacaacaagaccatcgacgagtacttccggtacggtgttcagcgggccaagccgtacgctcgcaacagcctgtggaccatgggcatgcgcggaaccggcgatacggccatcgagggcctcggggtcgagtacattgtcgagatgctgcagaccttggtcaagaaccagcgtgagatcatcgccgaaggcctcgggatcgaagacatcactacggtgccccagatgtggtgcctctacaaggaagtcatgagctacctttcggctggcctgcaggtgccggacgatgtgaccctgctgtgggctgatgacaattggggcaacgtgcgccggctcccgctgcggaacgagactcagcgtcacggtggcgccggcatctactaccacttcgactacgtcggtgggccgcgcaactacaagtggatcaacacgatccagctgagcaagacggccgagcagatgcacctggcctacgcccgcggcgccgacaggatctggatcgtcaacgttggcgacatgaaggcgctcgagatccccatcagccacttcttcgacctgggctacgatgccaagcgctggcacgtcgacagcacccaggaatgggccgaggcttgggctgcccgcgagtttggacctgcccacgcccgcgagatcgccgatgtcatgatgaagtacggcatgtatgcggcccggcgcaagtacgagttgctcgagccttgggtctactcggtcatcaactacaacgaggccgaggcggtgctgcagcagtgggccgagctcgtctctgaggcccaggccatccacgacaagctccccgacgaggccaagccggccttcttccagaccgtcctccaccccgccctcgccggcgagatcatgcaccagatcaacgtcgccgccgcccggaacatgctgtacgccggtcagaagcgtaacgctgccaacacggccatccaggaagtcctcgcctactcggctgccgacgcgaacctcactcgccgctgggatgccctcctcgacggcaagtggaagcactttatggaccaaacacatctcggctacgatggttactggcaacagcccatgcgtaacaccctcccacctttggtgtatgtacagacagactttacatctcttggaggtgagatcggcatcggtgtcgagggctccaacgccacggtcaggggcgacgacaggtggcaccccaacagcggcaacgatctcaccctgccacctctcgagccgtatggtccggccacgcgctatatcgacatcttctctcgcggctccaaggagtgctcgtggaccttgtccgcctctaagccttggctcaagctgtcccaatccacgggcgtcgtcggtgccggccacccggacaagcgcatcctcgtctcggtcgactgggaatccgccccgcccgccccgtactccgaagaggtccagatcaacatcaccaccccctgcacgggaatggaccggtatggcttcggcgagccgcatgtcttcgtgccggtgacagtacgtaaggcgcccaagtcgttcaagcgcggatttgtcgaatcggacggcaacgtcgcctttgccgccgagcactacagcagggtcatcgagcccgctagcagcaggagcaagggcagggacaaggacgaggtcacctaccacaccttcgcctcgtacggccgcacctcgtcgggcgttggcctggtccccctggacaccgagaagctcacacgcgaggaggcccccgcgctcgagtatgacctctacctcttcaccaacacgtcggctgccaacgtgacgctgtacctgtccccggcactcaactacctcggcgacgccaccccgctcgagtacgccatctccctattccccgcctcttccgacggcgagggcatcgacatcaaatacgtcaagccggtcggcgtcaccgtgggcggcgacatgccggccgggtgggacggcgccgtggccgacggcgtgtgggggctcacggggggttacacgaccagctcgttcgaggtcccccgtgagggcgcctacaagctgcgcgtgtggaccctcatgcccggcatcgtggtccagaaagtcgtcgtcgacctcggcggcgtccggcgcagctacctgggcccgcctgagagcttcctcgtcggtagggacaggatcggggcgaggaatgggactagcttccttggttga

SEQ ID NO: 1294 - DNA, 969 bp, Myriococcum thermophilum; identical to SEQ ID NO: 988

SEQ ID NO: 1295 - DNA, 840 bp, Myriococcum thermophilum
atgaagctacatcttctctctgctcttttcctgctctgtacgggcattcagggcctccctgcctcagccacggaagataacgcgaccgcttcctcctctccctcttcttcatccgccactgcgactcctacctcatacgacttcgctgccggcgccgttacttcctatccgatccatccgtcatgcaacagcaccctaagacggcagctcgagcgcgctctggacgagacggtggctctggcggcgcacgctcgcgaccacatcctgcgctggggcgtcgactcgccgttcgtgcagaagtactttggcgtcaccaacgacaccaagccaagtgcagaccacgaggaggcggttctggcgtcgactgccgcaccgctgggctggtacagccgcgtggtggcggcggataaagggggaataaccttccgctgtgacgacccagaccgcaattgtgcgacgcaagatggctgggcgggacactggcgcggtgaaaacgccacccaggagaccgtcatctgcccgctgtcgttttcgaaccgacgctggctggattcggtgtgcgggttgggatacaccgtggccgggtcgccgctcaatactttctgggccaccgacctgctgcaccgaatctttcacgtaccaaagatcagcgaaggggttgttgagcactacgccgaggactatgagggcgtgctggagctggccgcgacggacccggcccgggccgctatcgacagcaacacgctgcagtactttgctatcgatgtgtacgcatatgacattgctgccccagggaagggatgcaccggaaagccggagaaatcggaggagtcggagtga

SEQ ID NO: 1296 - DNA, 1194 bp, Myriococcum thermophilum; identical to SEQ ID NO: 990

SEQ ID NO: 1297 - DNA, 774 bp, Myriococcum thermophilum
atggcccttcagctcttggcgagcttggccctcctctcagtgccggccgttgcccacggtggcttggccaactacacagtcggtgacacatggtacagaggctacgaccctgacctgccgcccgaggtccagctcaaccagacctggatgatccagcggcaatgggcgaccatcgaccccatcttcaccgtgtcggagccgtacctggcgtgcaacaacccgggcacggcgccgccctcgtacattcccatccgcgccggtgagaacatcacggccgtgtactggtactggctgcacgccatcgggcccatgagcgtctggctggcgcggtgcggcgacgccccggacgccgactgccgcgccgtcgacgtcaaccagctcggctggttcaagatctgggaggccggcctgctcgaggggcccaacctggccgagggcctctggtaccagaaggacttccagcgctgggacggctccccgtccctctggcccgtcaccatccccgagaagctcaagagcggcacttacatcatccgccacgagatcctctcgctccacgtcgccctcaagccccagttttacccggagtgcgcccacctgaatatcaccggtggcggagacttactgccgcccgaagaggctctggtgcgcttcccgggagtttacaaagaagatgatccttctatcttcattgatgtttactcggaggagaatgcgaaccggacggattacacggttccgggaggaccaatctgggaaggtttcgcggattaa

SEQ ID NO: 1298 - DNA, 1380 bp, Myriococcum thermophilum
atgaagtctcttgctctcttggtatcggttgccgcttcgctggcttcggcgtccgccatcgcgcttgatggcgaagctcttccagctggagcctcgattacctttccacgtgatgaatctcagttcaatccatccgtgacgcccgaaagcaggggccatggtaaggagaaggacaactggggcaacgctgttgagaaggaccgcaagaaggtcactatccgtgcttccaaggacgatcgcgacgatatcagtgacgacttcctctgggcgctcaagaaggcaaacaacggtggtctgctgcatttgcagaagggtgaaaagtatgtcattggcaagaagctcgatctgagctttttgaacgacatttacgtcaagattgacggcgagctgaagttcaccaacgacattgaatactggcaagccaacaacttctattacgacttccagaagagcattaccttttgggtctggggtggcaaggacatcaagatatacggctccggcgtcatcaatggtaacggtcaggcatggtgggacggcttctcgggccacgagattctcgatcccgataacgactactaccggcccattttgttcttgaccgacaacgccaccaatgtcgaggtccgaggtctgcatatgaaggactcgccgtgctggaccaatttctttgtgcgctccaagaacattgtttttgacgatgtctacatttctgccgtgtcaaccaacgcatcgaccctgcccaagaacacagacggcttcgactcgctcaacgtcgccggcctgacggtgctcaacacgcgcgtcaacgtgggcgacgactgcttctcgcccaagcccaacacgtccgacatcctggtgcgcaacctgtggtgcaacggcacgcacggggtgagcatgggcagcatcgggcagtacccgggcgtgctggactacatcgccgacgcgcacatcgagaacgtgacgctgctcaacggcgagaacggcgcgcggctcaaggcctgggccggcccggacgtcggctacggctacatccgcaacgtcacgtacaaggacatccgcgtcgagaacaccgacttccccatcgtgctcgaccagtgctacttcaacatcaacgagaccgtctgcgcccagcaccccagccgcgtcaacatctccgacatcaacttcatcaacatccgcggcaccagcagcggcaaggaggggagggtcgtggccgatctcacttgctcccctggtgcgacgtgcactggcattcatctggaagacatcgacatcactagccccaaaggctctcccccgcagattgtctgtgaaaacattcagggtgatattggagttgattgtatccctaaggatgaggcggattattccggttga

SEQ ID NO: 1299 - DNA, 684 bp, Myriococcum thermophilum
atgaagctgagcgctaccattgccgtgctcgcggctgccctggccgaggcgcactacaccttccctagcattgccaacactccggactgggaatatgtgcgcatcacgaccaacttccagagcaacggtcccgtgacggacgtctactccgaccagatccggtgctacgagcgcaacccgggcaccggcgcccccagcatctacaacgtcacggccggcaccaccctcaactacaacgccaaggcgtccatctcccatcccggacccatggccttctacatcgccaaggttcccgatggccagtcagccgctacctgggacggcaagggcgccgtctggtccaagatctaccaggagatgcctcacttcggtgccagcctcacctgggactctaacggcaaactgtccatgcccgtcaccatccccaagtgtctgcaggatggcgagtacctgctgcgtgccgagcacatcgccctccacagtgctggcagccccggcggtgctcagttctacatctcgtgcgctcagctttcggtcaccggcggcaccggcacatggaaccccaggaacaaggtgtcgttccctggcgcttactcgccgaacgaccctggcattctgatcaacatctactaccccgtcccgaccagctacactcccgctggcccgccagtcgagacctgctaa

SEQ ID NO: 1300 - DNA, 1269 bp, Myriococcum thermophilum
atgggccctcagagcaccctggcgggcgtcattgccctggccgcctggttggtggctgacgtctctgctcaatcctgccccggcgtgaccggccgattccagcccaagatgggctcgggatacaggtacagcttgctcgcgaccggccttcgcaaccctcgtcacattgctgtcgactcggcgggcaacctgttggtggccgaaggcggaacccagtcggttcgtcgattggtcctgcaagaccagggagacattgtgtgcgtccagtctgaatcacagctcgccagcggttcgaccaaccacggcattgccctcagcgccgacggaaagacgctcttcacctcgaacctcgccaccgtgacggcctacgactacgacgcggccaccggccaggtcggccagggcaggcagatcgtgacgggcatggccttccagggcacccatccgacccgggccatcgccacgtccaagtggagcccggacaccatcatggtggtccgcggctcccagagcaacatcgacacgctggccgtcgaccaggcgaacgcgcgcagcatgatcaagaccttcagcatcagccagggcctgcaatccccgcacgactacgccgcaggcggcgaggtcctcgcctggggcctccgcaacgttgtcggcttgacagaagatcccaactatggcggagtctggtccgttgagaaccaaatggacgatgtgcacgttaacgggcgggacatccacaatgacaacccggccgagcggctgagctatcacggagtcctcaacgacaccgaaaacaagtacaaggggctcaattacggctatccttcgtgtgtacccgcctgggacccccagagcgtcggcatcgatggcttgctggtcggctccctgttcaagcccgacaacgtgcccaacatcgaccccagtgaatgcgccaaccgaatgacgggtcgcctgcacttccacgcccacactgcccctctcgacgtcaagttcaataacaactcaacggcggcttacattgctttccatggaagctggaaccgcaaccctgcggatggctaccgcgtcatgcgcgttgactttgccaacggcgagcccgtggcggatgtcaccagcacgacggcccagattcccgtcatggagaacagcgacattagcggctgccccttcaactgcttccgccccgtcggcctcgcctttgacgagaagggccgtctgtttgtatcgagcgactcgtctggcgagatctacgtcatttacggcgcttag

SEQ ID NO: 1301 - DNA, 2601 bp, Myriococcum thermophilum
atggcctccaccaagggcatcatcctgtcattgtgcctctccgccctctccgcggtcgcaaacgcagcggacacgcctttcctcggctacccttccccgtgggctagcggtgtcgagaacccggacccgtcctgggcggccgcctacgcaaaggccatcgactttgtctccaaccttaccctgacggagaaagtcaacctcacgacggggacgggatgggaggctgatcgctgtatcggcaatacgggcggcgtgccgcgcctgggattccgcggattctgtctcgaagacggaccgctgggcgtcaggtacacccaaaataactctgctttccccgcggggatcaacgttgctgccaccttcagtcgccggctgatgcggctcagaggcgaggcgatcggggccgagttcaggggtaaggggatcgatgtgatgctcggaccggtggccggcgccctgggcaggacgccgcaaggagggaggtattgggaaggatttggccctgacccgtatcttgctggtgttgccatggccgagtccattcaaggcatccagagccgtggagtagtggccactgccaagcactacatcctcaacgagcaagagacgttccgggggagcattgacgtgcggatcgacgaccggaccatgcatgagttgtacctgtggccatttgcagacgccgtccgggcaggagtaggctcggttatgtgctcgtacaacaagatcaatgggacgtatgcatgcgagaacgagtggacgtccaactacctgcttaagaacgaactggcctttccgggcttcatcatgtctgactggggagctcagcacaccactctcgggtctgcgcttggtggcctcgacatggccatgcccggcgacagcggcccgcttccgtacggatcgttctggggaggcggtctcgctgaggccgtcctcaggggcgacgtcccccagtggcggcttgacgacatggtggtccgcatcatggcggcatactacaaggttcacacgggcgactacgccgaccgcccggacatcaacttctcggcctggaccaaccagaccatcgggccgctgcacccgtcgtccaacgagtccatcacggtcgttaatgagttcgtcaacgtccagggtgaccatgcctccctcatccgcgagatcggcgccaagtccatcgtcctcctcaagaacgaaaacaacatcctccccctctcgcatccggccagcatcgccatcataggcgaggacgctcgcgacccgcctggagggcccaacgcctgcccggaccgcgcctgcttcggcaatggcaccgtcgctatgggctatggttctggcaccgccgagttcccctacctcatctccccggcgaccgccctgctcgcccaggccaagcgcgacaacacgaccgtcgtcttcgacgccacgtcctccaactgggacttggctgctgccgagtcggcagccgcatccgctgacatcgccatcgtcttcgcctcggtcacctcgggcgagggctacgtggaggtagccggccagttcggcgaccggtccaacctgacgctgtgggccaacggggaggcgctgatcgcggcggcggcgcgcgccaaccccaacacgatcgtcgtcctgcacaccccgggccccgtgctcctcggcgacgtcgtcgccaaccccaacgtctcggccgtcctgtgggccggcttccccggccaggagagcggcaactccctcgtcgacgtgctctacggccgcgtcaacccccagggccgcagccccttcacctgggcggccaacaacgagaccgactacggcgccgagctgctcgtcgacgtcgacgacccccgccggcccgtgcaggtctttgacgagggcatctgggtcgactaccgctggttccagaagaacatcaagggcgtgctgttccccttcggctttggcctgagctacacctcgttccgcttctcgaacctgacggtccagctgttggatggtggggatgatgagggggagggggatgaggcggaggaggatggcgacctgacgccgccggcgccgacgtacggcgtggtggacgaggacctcgagaagcacgttacgcccgagggattcagacgcatctggccgtacgtgtactcctggctcaacagcagcgagggcttcgtcgccggggcacccggcaacatcagcgagttccctgccgccgccaggaacgggtcggcccagcccgttctgcccgcttccggggcccctggtggcaacccgaagttgtacgaggtgctctacacgctcactgcgtacatcgagaacgagggcgacgtcaagggaaccgcgatcccgcagctgtatctccaattgggcggcgaggacaatccctggggcatcctccgcgggtttgacgaggtcgagctcgagccgggagagaccaagatggtcacgttcaacttgacgcggagggacgtcagcaactggaataccaccacgcagaactgggagatcacggatctggtaaagaccgtctttgtgggctccaacatcagggacatccacctgaattcgacacttcccgcgcccaaggggatgacatggaggtacggctga

SEQ ID NO: 1302 - DNA, 708 bp, Myriococcum thermophilum
atgaaggccctctctctcctcgcggcggcctcggcggcctctgcgcacaccatcttcgtccagctcgaggccgacggcacgaggcacccggtctcgtacggtatccggaccccgacctacgacggccccatcaccgatgtcacgtccaacgacgttgcttgcaacggcggcccgaacccgacgaccccgtccagcgacatcatcaccgtcaccgccggcaccacggtcaaggccatctggaggcacaccctcgactccggcccggacgatgtcatggaccccagccacctgggcccgaccctggcctacctcaagaaggtcgacgatgcgaccacggactcaggcgtcggcgatggctggttcaagatccaggaggacggctacagcaacggcgagtggggcaccctcaaggttatcaacaacgccggcgagcactacattgacatcccgtcctgcatccccgagggccagtacctcctccgtgctgagatgattgccctccacgctgctggttctcccaacggtgctcagctctacatggaatgtgcccaaatcaacattgtcggcggctccggctccctgcccagccagactgtcagcttccccggcgcgtacagcgccaacgacccgggtatcctcatcaacatctactccatgtcgccctcggacacttacaccattccgggcccgccggtcttcacctgctaa

SEQ ID NO: 1303 - DNA, 960 bp, Myriococcum thermophilum
atgaagggcagcaccttactcgccctcgccctcggctttggcgcctacgcccactttccgccggagagggaggggatcaccgtagtggagtccaagttttacaacaatgtcagcatctcgttcaaagagcctgggatttgcgagactacgccgggagtcaagtcatactcgggatacgttcacctcccgcctaacctgatcgagggagcagatcaggactacccgatcaacctcttcttttggttctttgaagctcgcaaggacccggccaatgcccccttggctatctggcttaatggcggacccggagggtcatccataatcggcctgctcgaggaaaacggtccctgtttcgtcgggcccgactcggagacgacgtacctcaaccgttggagctggaacaacgaggccaacatcctgtacattgaccagcccgtccagaccggcttctcgtacgacgtgctcaccaacgtgaccatccggctggacgtcgacgacccgttcgaacccgtcatcacacccaccaacttctccgaccacgacggcgtcatcccccagaccaacaacaccttccggatcggcacgacggggagtcagaagctgtcccagacgaccaacacgaccgagctgtcggcctacgccatgtggtacttcctgcagacctggctgttcgagttcccgcactaccggtccgacgacggccggatcagcctctgggccgagagctacggcggcacctacggcccgatcttcttccacttcttccagcggcagaacgagcgcatcgctgctggccagctcgacgcccgctacttgcatctcgacaccttgggcatcatcaacggggccgtcgattggcttcttctcggcgagagctggatcgactatcctcacaataatgccagtcttgccctcccctggtcacggcgggacgagttcgccgcggccgagtggaggtaa

SEQ ID NO: 1304 - DNA, 1194 bp, Myriococcum thermophilum
atgaagggtgctttactgaccgcagccgtcctgctcggctccgcccagggagcagttcacaggatgaagctgcagaaggttcctctttctgagcagcttgagacggttcccatcaacacccaactcgagcatctcggccaaaaatacatggggatgcgcccgcgtgaatctcatgtcgatgctattttcaagggcatggtcgccgacgtcaagggcaaccaccctgttcccatttccaatttcatgaacgcacagtacttctccgaaatcacgatcggaacaccccctcaatcattcaaggtggtcctcgataccggcagctcgaacctgtgggttccgtcagtcgagtgcggctcgatcgcttgttacctgcactcgaagtatgactcgtctgcttcgtccacctacaagaagaacggaacctcgttcgagatccgctacggttctggcagcctgagcgggtttgtctcccaggacacagtgtccatcggcgacatctcgatcaagggccaggactttgccgaggcgaccagcgagccaggtcttgcctttgcctttggccgtttcgacggcatccttggcctcggctacgaccggatctcggtcaacggcattgtcccgccattttacaagatggtcgagcagaagctcatcgacgagcccgtctttgccttctacctgaccgataccaatggccagtccgaggttgtctttggtggtgttgaccacagcaagtacaagggcaagatcaccaccattcccttgaggcgcaaggcctactgggaggttgactttgatgccatctcctacggcgatgacactgccgagctcgagaacactggcatcatcctggacaccggcacttctctgatcgctctgcccagccagctcgccgagatgctcaacgctcagatcggcgctaagaagagctacactggtcagtataccattgactgcggcaagcgcggctccctcaaggacgtcacgttcaatctggctggctacaacttcacgctcggcccctatgactacattctcgaggccggccagggcagctgcatttccacctttatgggtatggacttccctgctcctaccgggccccttgctatcctgggtgatgccttcctccggaggtattacagcatttatgaccttggtgccgacaccgttggcctggccgaggccaagtga

SEQ ID NO: 1305 - DNA, 1770 bp, Myriococcum thermophilum
atgagacaaccacttttatcatctttcctgacgctcgttactgcgctgagcggctcgttcggccggagtattcctcgagatccagaggcgtccctgcaaccacgggaggaatgcgaaaacacgccgacgtctcggcactgctggggcaaatacagcatcgatactgattactacgataactatcccaccaacaacggtccagccaaggaattctggctctctgttgaggaaggaccttgttcccccgacggctatgagcggacgtgcaaaacattcaatggcactgtccccgggccgacgctgttcgtcgattggggcgacgaggtcatcgtccatgtgaccaacaatatggtgtccaacgccaccagcgttcactttcacggggtacgcatgctgaataactctatcaacgacggcgttccgggcgtgacccagtgccccatcccgcctggccataccatgacgtaccggttccaagttacccagtacggttcgacctggtaccacagccacctcagcctccagtacgccgatggtatgttcggcggcttcgtcgtgcgcggcccgacaacggacaactacgatgaagacttgggcgtcctgttcctgcaagactggtcccacgtcgaagccttcaccaactggcatgtcgccatggcgggcccgccgccgcccatcgataactggctaatcaacgcgacaaacacgtacaactgcaccggcaggaacgacgacaagtgcgtgggcggcggcaagaagtttgagatggtctttgaacaggacaagaaatacctgctccggctgttcaacgttgccatggagggcgtgttcgagttcagcatcgatgggcactctctggaagtcgtgggcaacgacctcgtgcccatcgtgccttacatgaccgacagtgtccagttaagcatcgggcagcggtacgacgtcatcgtccacgcaaacgcggacccggggaactattggctgcgcgctcactgggtcaaaggctgcgacgggaactcgagcgcgaacgttgacccctacgtccactccacaggtatcgtccgctatgacgccggcagcactgacgacccggagacggagagccacgtcaccccaaccacgtcttgcctcggcgagccgccggagaagactattccctatctctctatagacgtggcaaacacaaaagggggtgtggtgtatgaggagatgggctccaagcaaccctccatgccggaagaatacttccaatggaccatcaacacaagtagcctggtgctcaactggactcttccaacaatggacaagatcatgaaaaacgagaacgtgtttccgactgagtataacgtcgtacctatcaagtcatctggtacaggcccagaatgggcagccttgttgatccaagacatcagcgaagaaaaaataccgcatcccatccacctgcatggacacgacttttgggtgctcgcggccggggatggcgtcttcgacggcgacaagaacaaattcaatacgaataacccggcgcggcgcgacgttgccacgctgcctggaggcggttacattgccgtcgccttccgtctggacaacccaggcgcctggctcatccactgccacatcggctggcacgctagccagggcctggcgctcgagttcatcgagaaccagtcggatatcacgttcgacgagctcagcatccgcgagtacgaggaaacgtgcaaagcctggggggaatgggaacctgtttggccccaggatgactccgggatataa

SEQ ID NO: 1306 - DNA, 1722 bp, Myriococcum thermophilum
atgacccgccttctagctctcgttaccagtattgtgttattttgcgccctcgacgcgctggcagtcccctttgatctgccgcacggtatatggccaccggtaaaggctttacgctgcaaccgagtcttctttagccatgtgctccctccgggtgcaacccttgagaaagtcgccgtggttccggagggcgagagctacggcgagggcgaggcgaacgtggcataccccaaaaacccgaaaaaccttccagcattgtgcgccgttaccgttcgggtaaagagctccccaacaagcagctaccgttttggcctctttctgcccgatgagtggaactcgaggtttctggtggtagggaacggcggctttgcgggtggtatcaactggatggagatggctgccggcccacgtctcggtatggcctcgctctcgaccgatactgggcacaactcgaccgccgaagactctagttgggcatggagggagccagagaagaagaccgactggggttggcgcgccctccacggctcaaccgcgctcgggaagtctcttgtgcgcgcatactatgtgcacaagccactcacctactcgtactacagtgggtgctcgaccggcggccgccagggtctcaaagaactgcaactctctccaggcagcttcgacggtgctctgataggggccccttcatggtgggcatcccacatcggcgcctatcttacccaagccggcctgtacaaccttcccgtagacgaccctaagcgcctttctgacgccgaaaccgccctccttgccgacgaagtcatccggcagtgcgacctggaagacggcgtacaggatggcattgtcagcaacttggaccgttgcaaccccgatctgactgttctcctctgcagcgatcaagacaatgggttaaagagagctggggcctccgggaaggcacactgcctcacaccggctcaattccagactgccagaaacatctacagcgactggaccctcccacccgacaacgagctccttcacccgggtctgacctactcctcagagagggaatggtacatcctcatcaatggcaccgagccaataccgtacgggatcggatacgcacgtgactttttgttcgacaacgaaggcgacgggaacgattcgtcaaagtgggactggcgcacgtccttcaacgagagcgtggtgttctacgcggaggagcacgacccaggcaacgcgacggccgacgactacgccgccctgggtgctgtccgggagcggggcggcaaggtggtactctaccatggcctctccgacgcgctggtgccgaccaaggggaccggcgtgtactggaaccgcaccctggacgccctcggcggcccggccggcgtggaagacttcatgaggctgtttctcgtccccggcatggcccattgttacggcacgaccgtggatgcgccctggaattttggcgccgcgtcccaggccagcctattgggggatgaggtgaggtcggtgcccgggttcgaggacgcgcagcacgacatcctcatggcgttgatcgaatgggtcgagaatggaaagcccttggacagcattatcgcgactacgtggaaagaaccgaaaaatccaagttccggggtaaagagacagagaccgatctgcgcgtggcctcaacaggccgtgtgggatggagagggggatatagataacgccacgagttggcgctgctcgagctga

SEQ ID NO: 1307 - DNA, 1335 bp, Myriococcum thermophilum
atgagagtctcgtttcagtcagtcctgctgctcggcgttttgagcgctcaagcatcggcgtacgcgaaacttgaataccagcagcagactttcgttcgttccccaggcctgcatgtccgcacgtggttctctccccgtgagggcccccggggcaacactccctcgtatcgagtccctctgctcaccctccaccgtgcccttgtcaacgtctcctccatcagcgactccgaaggattggtcggattgctcctggcggggctgctcaaagacttcaattacacggttgagctgcagcaagttccccccagcaatgccagccaaggtctcgatctccctcccaggtacaatgttattgcttggcccggccgcaactccagccgcaccctggacaagcgtaccatcataacttctcacatcgacgtggtgcccccatacatcccctacgccatcaacaacaagactgtcccgccctcggaggaggtcgacttcggtgcgctgtcccccacgacacgcatctccggccggggctccgtcgacgccaaggcgagcgtggcggcccaaataacggcgaccaacgagctgctgagcgagggcgccatctcgccggacagcgtggtgctcctatacgtcgtcggcgaggagaactcggggacgggaatgaagtacttctccagctcgctctccaacacgacggcgtacccggttcggccgcagttccgcgccggcgtcttcggcgagccgaccgagaacaagctcgcctgcggccacaagggcggcgccagcggcaacatcactgccatcggcaaggccggccactcgggctacccgtcggccggcaagtcggccatccacgtgctgatccgcgccctcgacaggctgctggacgaggacctcgggtcgagcgagcggtacggcaacacgaccgtcaacgtcggcctgatcgagggcggcgtcgcgcccaacgtcatcgcccccgctgccagcgcccgcatcctcgcaagggttgccgtgggcaatcatacgacgggaggccagatcgtcgccgagcggatcaaaaaggtggtagaggacgtagaccccgagtcgctgaaggtggaaatcatctcagcgcgtggaccggtggagaccgactgcgatgttgatggattcgaaaccgtggttgcacattatggaacagatatccccaacctcgagggtgaccacgtcaagtacctctatggaccgggcagcatcctagtagctcatgctgataacgaggggctggcggttaaagaccttgaggaagcggtggagggatacaagcgcttgatcaagcatgcagtggggtcctcatga

SEQ ID NO: 1308 - DNA, 1263 bp, Myriococcum thermophilum
atggctggccgacttcttctctgcctcactgccgccctcagtgcgctgggcgtgtcggcggccccggccccggacgcttctgggcgcccgttcctcggtctgcccatctccaacccgggcatccccaacgccatcccgaacaggtacatcgtagtgtacaacaactcattcaccgacgatgacatcgacgtgcaccagagcagtgtcatcaacacgatagctaagcgtaacatcgctaagcggtcgttgaccggcaagcttctctccaccactgtcaacacgtacaagatcaacaactggcgcgccatggccctcgaggccgacgacgtcactatcagcgagatctttgctgccaaggaggtcagctacatcgagcaagatgccgtcatcagcctcaacgttcggcagatgcagtcgcgtgccaccactggtttggcccgcatcagccacgcccaggccggcgccaggacctacgtctttgacagcagcgccggcgagggcatcaccgcctacgttgtcgacactggtattcgagtcacccacgaagactttgagggtcgcgctaccttcgccgccaacttcatcgacgatgtggacacagatgagcagggtcacggcagccacgttgccggcaccatcggtggcaagacctttggtgtcgccaagaaggtcaacctggtggccgtcaaggtcctgggagctgacggcgccggttcgaactctggtgtcattgccgggatgcagttcgtcgcgaacaacgccactgccatgggactgaggggtagggccgtcatgaacatgtctctcggcggtccggccagcagggctgtcaactcggccatcaaccaggtcgaagctgccggcgtcgtccccgtcgtggcggccggcaacgaggcgcaggacacggccaacacgtcgcccggctcggccgaggccgccatcactgtcggcgccatcgaccagaccaacgacaggatcgccagcttctccaactttggagagctcgtcgacatcttcgcccccggcgtcaacgtgcagagcgtcggtatcaggagcgacaggtccaccaacaccctgagcggcaccagcatggccgccccccacgtcgccggcctggctgcctacatcatgagctttgagaacatcacgggcgtccaggcggtgagcgaacgcctcaaggagctcgcccaggccaccggcgcgagggcgaggggcgtcccgaggggcaccaccaccctcatcgccaataacggcttcctgtaa

SEQ ID NO: 1309 - DNA, 1149 bp, Myriococcum thermophilum
atggctgacaagccaaagccaaagcgggagctgcgatgcctcatgtattataccggtcagcacccggtggcgccctccattgacgagctccgacatgtaacgcacgtcgccgttgcttttatgagccctggcatcttcaacgagcccgggcggacggaatggccattgtttacaaccgtcgatgaagctcgtgccaagttcccggaagagaccaaagttatagtggccattggtggctggggggacacggtcggcttctctgaggctgcgctgaatgatgaaacacggaaaacatttgccgagaatgtggctcgcatggtagaagccacgggtgcggatggcgttgacattgactgggaatatccgggtggtaatggcgaggattataagcaggtccccaacgaagccaaggcttgggagattgctgcctaccctcttctcctcgcagagctgcgcgccgcccttggacctcacaaaatcatctcggccgcagtgcccggtctgaagcgggacatgctcgctttcactcccgagacggtgccccgaatcatgcgctacatagacttcctaaacgtcatgacatatgatctcatgaaccgccgcgacgtggtgaccaagcatcacaccggagtggaactaagcctagaggctgttgatgcctatatctctgccggcgccgagccccagagaattaatttgggatttccattttatgtcaggtacttcaagacggaacacgacgcctgcgcgctcgcctccccgataggctgcccgaccctgctacttgaagacccggagacgggtgaggatctcggccgtagcggggcgtttgcgtggcacgatccggtgcctgaaggaatggcagaatcttttgccagggcgctggaagatggtgtctacgacgaagagggcggtggatactactattgggacgccagggaagatctctggtggacatttgacactcctgactccatcaagcgcaagttccctcgggtactagacaagcggcagttggggggagtctttgcgtggggactcggcgaagacgcacctctgtacgaacacttcgctgcactcaatgacgggctggagagatacttagaaggcaaggaaccagactgtgaggaaaaggaagtttcgacctaa

SEQ ID NO: 1310 - DNA, 699 bp, Myriococcum thermophilum
atgaagttcgcttcgtccctcgctgttctggccgccgccggcgcccaggctcactacactttccccaggggcggcgttggcagctctctctctggggagtgggaggtggtccgcatgactgagaaccgctactcgcacggtccggttaccgatgtcaccagctccgagatgacctgctaccagtccggcgtgcagggtgctcctcagaccgtccagatcaaggcgggcgagaagttcaccttcagcgtggacacctcgatcggccaccccggccctctccagttctacatggccaaggtgccctcgggccagtcggcctctacctttgacggtaccggcaacgtgtggttcaagatctaccacgacggccctaacggcctcggcaccgagcagattacctggcccagcgacggcaaaaccgaggtctcggtcaccatccccagctgcatcgaggatggcgagtacctgctccgcgtcgagcacattgctctccacagcgccggcagcgagggcggcgcccagttctacatcgcctgcgcccagctctccgtctcgggtggctccggcaccctcaacaccggctcgctcgtcgccctgcccggcgcctacaagtccaccgacccgggcatcctcttccagctctactggcccatcccgaccgagtacatcaaccccggcccggctcccgtctcttgctaa

SEQ ID NO: 1311 - DNA, 954 bp, Myriococcum thermophilum
atgctccgtaaaaccgccctccttgccgtcgctgcactcccggccttgtcgtcggcccagatctccaacgacttcgagaacggttgggacgagacggcatggccgatctacgctcctgactgcaaccaaggcggcaaggtgtccctggatacgtcgactgcccacagtggcacaaactccatcagggtcgacggtgccggtggctattgcggccacatcttcttcggaacgaaccaggtccctagcggcgatctctacgtgagggtctatctcaaggcatccaatgccctcacttcttcccatgtcaccttcatcaccatgccggaccctgcccagggtaccaacaagcacctccggatcggcggccagaaccagatcatcatgtacaaccgcgagtccgacgatgccaccctccccgagctctcgccgcagggcgttgccacctccacctcccttcccaccaacagctgggagtgcttcgagtaccacgtcggcaccgacggcaccatcgagacctggctcaacgacgaggccatctccggtctgacatacggcccgggaatcgacaaccccaacgccggcgcctggtcgcgcagctccatcatccccaagccgtcgggcgtctacttcggctgggagtcgtacggcggcgacacgaacaccttctggtacgacgacatcgtcatcagctcctcccgcgtcggctgctctggcagcggcaatcccccgtcttcttctaccaccacctcttctcctaccagcgccatcccctccaccaccttcaccacctccaccacgtctaccaccagctcggcgcccgccacctctacgaccagcagctgcaccgtgccgcaatatggccaatgcggcggtattaactacacgggatgcacgacatgcgcggccccgttcgaatgcacgttcagcaatgagtactactcgcagtgcctctaa

SEQ ID NO: 1312 - DNA, 882 bp, Myriococcum thermophilum
atggcactcctcggctcctcggccgtgctgcttctcctaacagcagcgatagcggcggccgcccctcaagggcccagccccttcaggaactcgacaataccaccatggcgagggggagggaactcaacaatccccgggccgtggacgacgacggcggcggcggcgccagatccgcccaaggcgctgccgcagcgggcgacggccaacgacctgcgatggcagccgtcgctggacttcgacacggacgggtgctacaacgtgccggcgatcgacgccgagggcaacatcgccgagggcttgccgcacgagtgggtggacctggcgagcgactgccgggacgcgtcggacctggacaacaacaacgtgtactcgcggcagcggtgcaacagcggctggtgcgtctacctgtacggctactacttcgagaaggacgtgcccgtgcccttcgtgcccctgggcggccaccgccacgactgggagcacatcgccgtctgggtcagcgacgcctcgggccgcgccgagtacgtcgccgcctcgcagcacggcaactacgaggtccgccccgccgccgacgtccgctgggacggcgaccaccccaagatggtctaccacaaggacggctccagcacccactgcttccggttcgcgaacgaagcggacgacaagattgagaaccacaagggggtatggttccgtggcgacttggtctcgtacaatggcttcccgtcgaccgagatcagggacaagctgttcgcccacgactttggcgcggcaaccatcgacttcaaggattcgacattccccggcgctatcacgaaggcgatgccggctggtatcacctttgacgtgaacctagacgagggatctccagggactccctga

SEQ ID NO: 1313 - DNA, 1788 bp, Myriococcum thermophilum
atggtccgcttcatgagatggctggcagcgatgccggctagtagctggctcggcgttgtattcgcatcgcctacacctgcccgggaacttcacccgcgacaagctcagacgagtttctggtacgccaacatcgaccacacgtccgccgacgtccgtggctacgccccagatctcgacggagattatgtgtatgaggtctacaaagcagttgcccccggggatggggcaggtattcaggcggccatcaacgcagcgacaaatggcaccacccgccacggacaatggtttgcgagccagccgcgcgtcgtctatatccctcctggcgagtacgtcgtcagcgagaccatcttcatgaacaccgacaccattcttatgggcgatgctaccgacccacccgttatcaaagcatcttctagcttctcccgtagcggcactcttctcaacggccaagacccgacaactggcatctcgggcgagctgtccttcgctgtcagtctcaagaacatcattctcgataccaccgatgttccgggtgacgcacccttcgtggccctgtactggggcgttgcccaggctgcccacctccagaacgtcgtgattcgcatgcccccgtctgtcaacggcaacggccattccggcatcagaatgggccgtggctcgaccctggccgtggcagacgtgcgcatcgaaggtggtcagaacgggatctggtacaacggccaccagcaggccgtcttcaggggcgtctacttctaccagaacacgatcggcatgctgatcgacggtggtagcaccatcagcctcattaatcccaccttcgacacggtgggcttcggtatcatgaacacgggcggttccccctggattgcactcgtcgacgccgcatccaagaactcgggcgtgaccctgaagactacctcttggccgagctacctcatcgagaaccttgagaaggataccgacagcaatattgccgagggacctggagactttgtccttcccgcccagtcacacctcgcccagttctcgtacggcaacactgtcggccgcgaccccatctacggccctgtgagcagcgacgacgcggaccgcccatctgctctcttgacttcttccggacggtttccggccatctcagcgcccaactacgccgatgttcccgtcagcgagttcctcaacgtcaaggaccagaaccagaatggcggccggcgtgtgctgggtgacaacacggtcgacgagtccgaagcactcaatgccatcctgcagctggcagcggaccaaggcaagatcgcctacttccccttcggcaagtacagggttgactcgacccttctgatccccgtcggtagccggatagtcggcgaagggtgggcgaccatcgtcgggcacggctcccagttcgccgacgcatcgtcgccccgacccgtcgtgcaggtcgggaaccccggcgacgtcggggtggcgcagatccaggacatgcgcttcaccatcagccagccgctgccgggcgccatcctggtgcgctggaacatggccggcgccaaccccggtgacgtggccatctggaacagcctcatcaccgtcggcggcacccgtggagcggcggagctgaccgacacgtgccgggatgcatcggcaccctgccgggccgccttcctgggcatgcacctgaccgagtcgtcgtccgtattcgacggctgcagggccggccacggctggaagagcgtggcgcggactgagcgtctgagagtacgttgtgatgcctctgtgagtgcgcgccctgtctag

SEQ ID NO: 1314 - DNA, 1152 bp, Myriococcum thermophilum
atggttttgtctaaagtttggggtgcggtgctcctcgccggtgttgctgtggcccagacataccctccagatgtggtcgatgagctggcgaaggagagtttgcccaagcttaaggaatggctcgagaagaatccgcagggagaatgcaccttagagacggcggttaggcggcgtgaatggagcgacctgaccctcgaagaacgcaaagcatacattgatgccgttctctgtctccagtcgaagcccgctttgacaagtgaccaggcaccgggagccaagagcagattcgacgattatgttgtcattcatatgcaacaaacgccgaggaaccatggctcgaccttcttcctcccgtggcatcgttactacatctggcactacgagaatgctctgagagaagaatgcggatatacaggataccagccgtactggaactgggaccgatatgccaaggaccccgtcaactcgccgcttttcgacggcagcgagggcagcatgggcagcaacggtgcctacgaagaacaccagggcatacgtttccccggcgcaccaccgccgtacgacgtgatcccgcctggagaaggcggcggctgtgtgaccaagggaccgttctcgaacatgaccgtcaacctcggcccactcgcgccgtcgctgaacgtggagcgcaacccccgggcggacgggttgggatacaacccacggtgcctgcggcgcgacatcaacaagaacgcggcagcggtgacgacggcaaactacacgtacgatcttatcaccaacaaccacgagatctactggttccagacggtcatggagggccagttcccgcagggcaagtggggagtacacgctggtggacactacactgtctctggcgacccagccggcgacttctacgtcagccccggcgaccccgtcttctggctgcaccactccatgatcgaccgcgtctggtggatctggcagctccaggacctcgagagccgcctgactcaggtcagcatgaccaagaccatgttcaacatcccgcccagcgaaaacggcacgctcgacgacctcagcggcctcggcgtcctcgccccggacgtcaccgtccgcgagctcatgagcaccatgggtggccttggcggcaagttctgctatatctacgagtaa

SEQ ID NO: 1315 - DNA, 672 bp, Myriococcum thermophilum
atggtgaagctctctctcattgcagcgagccttgtggcacctggcgtgcttgcgggtcctatgatcggccccaagacgctgaccgagaccacgctgaacccccgtcaaggcggctactacgactacttccagaactggtccgagggaggcagcaacatccagtgcatcaacggccaagggggctcctacacggccgactggaatagcggaggtggcttcgtctgtggcaagggctggagctacggaggcaaccgcgtcatcacgtacacgggcgaatacaacgccactgggccgggctaccttgctgtctacgggtggacccgcaacccgctgatcgagtactacatcatcgaggcccacgccgacctcgctcccaacgagccgtgggagtccaagggcaacttcacgttcgaggagggcgagtacgaggtcttcactagctggcgtgtcaacaagccgtccatcgagggcaccaggaccttccagcagttctggtcgctgcgcaaggagcagcgggtcggcggcaccatcactacccagaggcacttcgaggagtgggccaagctgggcatgcagctgggcaaccatgactatgtcatcatggcgaccgagggatacactgccaacggaggaagcggcagcgccggacactcaagcatcaccctgcagtaa

SEQ ID NO: 1316 - DNA, 813 bp, Myriococcum thermophilum
atggtggctctgagtacacttgccagggcggtcagcgttcccgcccttgccggctggaagattgtttcgacgatcacgtttgatggagaagccggaaaggaagtagacaaatctgcttgggagattatgactaacatcaatttcaacaacgaggtccaagagtacaccacatcgacagacaacatgcacctctccggtaacggtacgctgctcatcatcccgctcaagtccgagacgggcgagtggacgtcggctcggattgagtccaaggagtcgttcacgcccgaggacggcaagacgacgcggtaccagggcgagctgcgctttggcgactcgccgcaggacaagcagcagggcatctggccggcgttctggatgctgggccagtcgtcgcgcgacaagggcgtcccctggcccgagtgcggcgagctcgacatcatggagcgcaaaaacggcgagccgaccggccacggcaccccgcactgcggcaccggcgactcctgcggcggccttaccaagagtgtgcccctcgacggcaacggctggcacacctgggccatcgagatcgaccggacgaacaagaagtgggaggaccagaccatcacctggttcttggacgacgacgagtacaacaagatccagggctccgatgttcaggatgaggacacctggaaagctattgcgcactcgcccatgtatttcatcctgaacgtcgccgtcggtggtaactggcctggcgagcccaacgacaagacagcggacggcatggacaacatgatggaggtcaagtacatcgctgtatactcgaagtag

SEQ ID NO: 1317 - DNA, 1011 bp, Myriococcum thermophilum
atgaagtggttcgcactcagcctcgccctggccgggcagacccaggccgccctgcgcttcggatgctcgaccgtgagcatccagcgtcttgaccccctcgtcgagccgggcaagatcccctcgtcccacgtgcaccagatcgtgggcggcaacagcttcaacgccacgatggagggcgatcggtctgagcacgccacctgcacgacctgcaccttctcagagaacttctccaactactggacggccgtcatgttcttcaagcacagcaacggctcgtacaagcgggtgcccctgatgcagaacactgccctgcccaacggcatcaacggtggcatgaccatctactacacccagcaggacttcttctccaatggcaaccagaagattactgccttcaagcctggcttccgcatgactgtcggcagcccgaccagcaacggtgaggagggcaaccccggtctgcggttcgtctgcctgcagaacaagggcactcgtttccctgagcttcccaccttccccaaggagccctgcccgggcggcatcatgacggtgcaccacttccctgcctgctgggacggcaagaacctcgactcgcccgaccaccaatcgcacatgtataacacggtgcgcgaggccttcacgcccgcgggcccgtgcccggcgtcgcaccccgtgcgcatgcctcagctggccttcgagaccctgtgggacacgacgcagttcaacagcatgtggcccgaggacggctcgcagccgttcgtgctcagctacggcgacggcgtcggctacggcacccacgccgactacgtcttcggctggaagggcgacgcccttcagcgcgccatggactcgccctgcatgttcaacgcctgcgagaacggcaacccgctccagagccagagcgtcgccgagatgaacgcctgcacggttgagagccaggtcaacgaggacctcgatggctggctggatcacctccctggctacgagaacatcgagaacaagaaggagtaa

SEQ ID NO: 1318 - DNA, 1482 bp, Myriococcum thermophilum
atgaggttactccgcaccacgggcgcggcgactcttctcctgtcccgtgcggcctttgcgaccaacaacactctaaccccagacaagcttgcagcggatattaagacggaggagttacaaaacgtcctctggaatctcaaccacatcgccgatacccacggcggcaaccgagcctttggcgagccagggttcaaagcctcgtcagacttcattctcgagcgcgcggttacgcgcttccacaatgagtttgacactgttgttcaggcatttaattacacctatgccaagacaaaccagatcaaagtgactgggccagaaggcgaggatgtcattgtggtcagcccacaatacaatccctccacgccgctacccgacggagtcaccgctcctttggtggatacaccagtcgatgatgagcgtgggtccgcgtgctttccggatcagtgggagggaatcgatgcaaaagggaagctggtgctggtaaagcgaggcacctgtgcagtggcggataagtcggccctcgctaaggagcgtggggcactgggggtgatcctgtacaacgacgagccaggaacggacattatcgtcccgaccttgggcgcagaaagcatcggaaaaaccgttcccatcggaattatcccatcagatgtaggagagaactggaagtcccggttggccgatggggaggaggttattgtgaatctgctggttgacgccatatccgacactcgcgagacgtggaacattcttgccgagaccaaacagggcgaccccgacaaagtcatcatgctcggtgcacatcttgacagcgtgcaggcgggaccaggtatcaacgacgacggcagcggcacggcagctctgctggagatcctgaccgcggtcaggcgctacgatggtttcccacacaagattcgtttcgcctggtgggcagcagaagagagtggtctggtcggatctctttactacacctcccacctgaccgaggaggaagccgaccgcatcaagtattacttcaactacgacatgattggctcaccccatcccgactttgagattgcgagtgatgacaatagcggagtcgggccacagcttctggaggaatatctcgttgagcagggcaaggagattgtccatggcggcttcggttctggctccgactttgtgggtttcctcgaacttggtatcccgagcaccgcgttgcataccggtgccggggctccattcgatgcatgctaccaccaagcgtgtgacaacctcgacaacatccattgggaagccctgaccatcaatgccaaagcggccgctcgggcggctgctcgtttggccctttcactcgagggtgtgccgcctcgcaggaaaactagcctcaaccttaacacgcgccagggtgtggtgcaaaacttccggaagtgggcggcattggccaaggaagcgagtcatgggcacgcatgctcgcacaaaaggaagaaggtcgtagtgtaa

SEQ ID NO: 1319 - DNA, 915 bp, Myriococcum thermophilum
atgtggcccactcccaggattgcgtacctcatactggcggctcactcgctgctcgtcagcgggaccccggtcgaggccgaggctgtggacggaaccgtcctggccaagcgtcaatgcccgcagattcacatttttggagctcgagaaacaacagcgccgcccggatatgggaccgctggcactgtcgtcaatatgatcctcaatgcgttccccggagccacggctgaagctatcaactatcctgcctgtggtggacaaggatcttgtggaggagtccagtacggtgactcggtgaggcagggcaccgacgcggtggccacggcggtgaacaacttcaaccagcgatgtcccaacacacagattgtgcttgttggctattcccagggcggtcaaattattgacaatgccgtttgtggtggcccagacacgggcgctggcatcacgtcctcaacccctcccatctcagctgcggcgctgaaccagatcaaggccgtcatcgaaatgggttctccccggtacgtcgccgggttatcctacaacgtcggtacctgcgcagcacaaggttttgctgcacgccctcctggctacgtctgcggttccaactcagcgtccaagatccagagttactgcgactcaaccgacccatactgctgcaccggaaacgacgccaacagtcatcaacagtatggcaacaagtatggacagcaggccttggcctttgtcagtgctagactcagcagcggtggcgatggcggcaatggcggaacgcccacgtcgtcggccggtggctccgttccgaccggtaactgcagccctctttacggccagtgcggtggccagggatggacgggacccacgtgctgctctcagggaacctgcacggcgtctaaccagtggtactctcagtgtttgtaa

SEQ ID NO: 1320 - DNA, 1551 bp, Myriococcum thermophilum
atgagattcagccacgcgtcaggcattgccagcctggcaacctttggggttgcctcgacactgagtggtcagaaaccattgaccgatgcttcgttgcctcaagtgccgctcgaaggtgactggccgagttccaaatcgcttgtaacctcggaggccttgcaagcgaccatcaacgtcgacgcgctcctctcacgcgccaagcagctcttcaagattgcccaccttagccaggacgagtatggccgccctactcgcgtcattggctccaaaggacacttaggcactttagaatacatttacaattccttggtcgcccttggcgactactatgtcctgtcaacacaaccctttcctgccgtcacgggcaccgtgtttgagtcacgcttgctcatcgacctgagcgtggctgagtcggccttgcccatgagcctaacgccgccaacaaagggaaagcaaccggtggacggcaagctcgtgcttgttgctaacgaaggctgcgatgccgccgactacccttcggacctcaaaggcaacattgcctttatcaagcgaggaacttgcccatttggcacaaagtcggagctcgccgggaaagcaggggctgttgccgcggtcgtcttcaacaatgacagtggaccgctgagcggcacgctaggcacgccttcggaagatcatgtcgcaacgtttggtctgtccggctccgaagcggccccgttcgttcgcaggctggaggctggcgagacggtcgaggcgtcggcatatattgattccgaggtgaagagcatcgagaccacgaacatcatcgctcagactcgcgagggcgaccctgaaaactgcgtcatgctcggcggccacagcgactcggttgccgaagggcctggtatcaacgatgacgggtccggcagcctggccttactggaagtcgcgacgcagttgaccaacttcagcgtcaacaactgcgtgcgtttcgcctggtggtctgcagaggaagaaggtcttctcggatccgactattacgtgagcgtgctctccccggaagagaacaagaagatccggctgtttatggattacgacatgctcgcaagtcccaactttgcatatcaggtgtatgacgcgcgcaacgatgtcaaccctgttggttcacaggaactgagggatctttatgtcgactggtatgccgcccacggcctgaactacaccttcatcccgtttgatggccggagcgattatgatgggtttatcaggaacggtattcctggcggcggcattgcgacgggcgccgagggaatcaagaccgaagaggaggcggcagctttcgggggtgaggccggcgttccttacgatgtctgctaccatgcgatctgcgatacaatcaacaacttgaacctgacggcttgggagctcaacaccaagctcgttgcccactctgttgctacctatgcccgctccttcgagggctttcctgagcgcaccatcgatggactgtctgccgaagtttcgaatgcgtattccgaaaacgtcaagtatcatggcagcaaattgtttatttaa

SEQ ID NO: 1321 - DNA, 963 bp, Myriococcum thermophilum
atgaagggatccggtctcgttagggtggcggccctgctcccggcatttgtttccgcctatgaactccccggtgaatgtaccggaatctgcaacaactcccacgacccgtcaatcatccgccgcgcagatgggacatacttccgcttctcgaccggtggcaagatcgccatccacacggcgccgagcttgaccggtccgtggacatacaggggacctgctctgccagacgggtcttccatcaacctggacggaaaccaggacctttgggctcccgacgttgcacaggttggagatcagtactacttgtactactctgtcagcacatttggcgtccagaactcggccatcggcatagcccgctcatcgagcctggacgccggcacctggatcgatctcggctctaccggcgtcacgtccagcacgggctatgcgtacaatgccatcgacggcaacctgatcaacgagccggggaccagcaactatttcctcaccttcggcagcttctggaacggcatccaccgcgtccgaatgacgcccacccagacgaacggcaacgtgtaccaagtcgcttttgaccccaacgacccagccatggagggcccgaccgtcttcaagtggggcgactactactacctcttcttctccaagggcagctgctgcggctacgaccaaaacaggccggctccgggacaggagtacaggatcatggtgtgcaggtcgaccgcgcccaccggcccctttgaggacagggacggcaggtcatgtcgctcgggcggcgggaccctggtgctcccgtctcacgactgggtgtatgggcctggaggccaaggtgtctacgatgaccccgaatacggaccggtcttgtattaccattatgttgatactcgcattggctatgcagacggccagaagaagtttggttggaaccgcatcgacttctcaagcggctggccggtggtctga

SEQ ID NO: 1322 - DNA, 963 bp, Myriococcum thermophilum
atgaaaggtgttttcattgcaggggccttctgggggctcttcaacttggcctcggctgccgatttctcaaaccctctcaaacccttcaatgggtctgaccctcatatgacctattacgatggatattattacttgatgacaactacttggtccgacctgcagattactcgggccaggacgttagagggccttaaagacggagagaccaaggtggtttgggttgattcgaatccatcccgctgctgcaatgtttgggcacccgagcttcacaaagttgacgacaagtggtacatctactacacagcaggtaacagccagaaccttgatggccagcggtctcatgtcctagaaggcggctctgatccgtggggcgagtactcttatgccgggcagctcacccaagactgggggatcgacggtacgattctccgggtggaggaccaaaactacttcgtctggtcctgcttcgcggataacattcagtccctctgtattgcgcctttgcagtcgccgacatccatcggctctccttgggtgctctcgcagccactccttgactgggaaagggccgacaccccagttaatgagggaccggcaccgctctaccatgacggcagaatcttcctcgcgtacagcgcaagcttctgctggacacccagctatcaactaggccttctgacctacaacggcggagatccgactgcagccagcagctggacgaagacgggacctttcttcagctcagctaatggaaactatggaccggggcacaattcatttgtcaatagtcccgatggcaccgagatctggaacatctatcatgccacctccatctcgactggtaattgtgacgggaacaggtatacagcggctaagaaagtgacctggaattcggacggcactcccaactttggcagccccggccccttgggcgttgtcactcctgggccttcgggagaataa

SEQ ID NO: 1323 - DNA, 1011 bp, Myriococcum thermophilum
atgaagttcctcaacgccctcctcggtgctgcagctgccagcacggccctggcagcgccgtcttgcacgaaggcgaagcgcgctggcaagttcaagtgggttggcgtcaaccagtcttgcgctgagtttggccagaacatccttccaggccagctcgacaaggagtacacctggccggccaagtcgagtattgatacactcctcggcaccggaatgaacaccattcgcattccattcatgatggagcgtctcattcccgaccaactgacggggactgttaatgaaacgtactcggctgggctcatcgatactgtgaactatgtcacggagaagggagcgtatgctgtcattgatccccacaactttggccggtactatgaggagatcatcagtgacgtcgatggcttcaaggcctggtggtcgactacggccaaactgtttgccgacaatgagctggtcatcttcgacaccaacaacgagtatcacgacatggaccagaccctcgttgtcgatctgaaccaggccgccatcgatgctatccgtgaagccggtgccacctcgcagtacatcttcgtcgagggcaactcgtggacgggtgcctggacttgggtctcctcgggcaacgctgacactctgatcaacctcactgaccccgcgggcgatgacaagctcatctatgagatgcaccagtatctggatgaggatggttcgggcacgcatgaggagtgcgtctcggccaccatcggccaggagcgcctccaggaggccaccgagtggctcaagcagaccggcaagaaggccatcctgggcgagacggccggcggccccaacgaccagtgcatccaggccctcaccggcatgctgtccttcatggaggagaactcggacgtctggcagggctggctctggtgggctgctggtccctggtgggcggactacatgtactcgcttgagcctccgagcggtaccgcctacacccaggttttcccgagccttcaggcttatatttga

SEQ ID NO: 1324 - DNA, 1878 bp, Myriococcum thermophilum
atgaagcccttcatcggcgctgcggcgcttttggtgggcgtactctctcacatcgtcgctgccgcccctccgtccacatcagagcagcgcgaccttctcgcccccatcaccgagagggacgagccagccgtggagcctcgccagggttgtagctcgttctcaaacaacgaccgggcgtgctggcgtgggggatacgacctcaggaccgactgggaaacggacttcccggatacgggagttgttcgcaaatacactctggaaatcacagaaaaggacaattggactggacctgatggcgtcgtcaaggagaaggtcatgctggttaatggcaacatactcggaccaacaatcttcgcggactggggtgacacggtagaggtaaccgtcatcaacaaccttgagcacaacggaacatccatccactggcatggaatgcaccagaagaagaccattctgaacgatggcgtaaacggtatccttgagtgcccgatccctcccaagggaggaaagaaggtgtaccggttcagggctcagcagtacggaacgagctggtaccactcacacttctcagcccagtacggaaatggtgtcgtcggcacgattgtgttctacgggccggcctcggcggattatgacattgatcttggcgtgttccctatcagcgattactactatcaaacggcagacaggttggtggagtacacgaaacaaaacggaccgcccccggccaacaatatcctgttcaacggaacggccaagcacccgacgacgggtgaaggcgagtatgccaatgtgacgctgactccgggcaagcggcaccgcctgcgcctcatcaacacctcagttgaggcccacttccagctctcactcgtcaaccacaacatgaccatcatcaccgccgacacggtgcccgtccagccccgtacagttgacagcctgttcatcggcgtcggccagcgttacgacgtcatcattgacgcaaaccagacacccggaaactattggtttaacgtcacctttagtgagagctctggttgtggcgaggttttgagtccggatggtgagacaccggtttatccggccgccattttccactacgccggcgcccccggcgaccttcccactaacccgggcggtcctgtgagagaccacaaatgcctcgacctcatcgatctcaagccggtagtgccccgcaaggtgcccgtggacggcatcgggacggtcggatcgctggacatccacctcgagaccacgccctacttcaaatggaccatcaacggcagcgccatcgacgtcgactggcaaaacccagtcatcgactacgttatcaatcagaacaccagctttccacccgagtacaacgttgtcgaggtggaaggaaagagcaataatcactggacaatctggttgattcagaacgacatggagtcaggtttcagtttgccgcatccgatgcacctacatggccacgacttttacattttgggtcgctcgccccaggggtcagtcaggagggggaggaccttcgagttcaacccagcaagggacgcggcccagctgaacgggaacctgccgctgcggcgggacacagccatgcttccggagggcggctggatggtggtggccttcatgaccgacaacccgggcgcttggctgttccactgccacatcgcctggcacgtctcgtggggtctgagcgtcacctacctcgaacgccccggcgagatactcaaggacatcccccaggcggaccttgaccagcacaaccgcatctgcaaggagtggcgcgagtactggcctaccaacccctaccccaagatcgactcaggtctgcggcaccgctgggtcgaggagggcgagtggcctgtcaagatctaa

SEQ ID NO: 1325 - DNA, 1128 bp, Myriococcum thermophilum
atgagatccgccggtctttggtccaccgccttgacggcgttggcacatacagccgttgcagtcacgggtgccgccgaaggtttcgccaagggagttacgggaggcggaaatgcgactccggtctatccccaaaccatagacgagctggtctcgtaccttggtgactcggagcctcgcgtcatcatgctggaccggacattcgacttcaccggaaccgagggcaccgcgaccgagactggttgtgccccctggggcaccgcctcgggctgccagttagccctgaacaagaacgactggtgcacccgggagcagcccaacgcgcccaaagtgagcatcacgtacgacaaggccggcgttctcggcatcactgtcaagtccaacaagtccctcatcggtgtcggtgacaagggcgtcatcaagggtaaaggcatccgcatggtcagcggcaccagcaatgtcattatccagaacatccacatcaccaatctcaacccgcaatacgtctggggaggcgatgccatcacgctcgataataccgacatgatctggatcgaccatgtcactacctctctcatcggccgccagcacgtcgtcctgggcaacaacccgagcgggcgcgtcaccatctctaacagcaagttcgacggcaaaacctcctggtccgcaacctgcgacacttaccattactggggcctatatttcactgggtcaaatgacatgatcacgctcaagaacaacctcatcacccacatgtcgggccgcagccccaaggtggcgggcaacacgctgctgcacgccgtcaacaactactggtacgacagccaggggcacaacttcgagctggacgcgggcgccatggtgctcgtcgagggcagcgtgttccagaacaccgaggcgccgctgcaggcgggcggcgccgggcggctcttcgccagctccagcgactcgtcggcctgcgcccagtacctcggccgcgcgtgcaaggccaacggcttcggcagctccggctccctctccggctccgacacctccttcctgcagtacttccagaacaagaacatcgccgacgcgaccgactacaacacggccaaggatgttttcaacactgccgggtttggcaagatctga

SEQ ID NO: 1326 - DNA, 1221 bp, Myriococcum thermophilum
atgaagccaattctaggacttattgcgcttctcaactttggggtcaccacggtcagtggtcatcctgtttccggtcgcgctgactggccaaatgggcccctggtcacctccggccgttggattctcgacgcatcgggaaagaacattacctatgccggcaccaactggcccggacacaacgatgtcatgatccccgagggtctgcagtaccagtcgatcgagtcgatcgtcgagaaagtgaagagtctcggcatgaacgctgtccgcctcaccttcgccatccagatgatcgacgagatctacgacaatggcggcgaagacatcaccatcgagaaggccttcgtccaggccttgggccagaccaacgggatcaaggtgctgaaccaggttctggagaagaatccccagttcaacgcctccacgacccgcttgcaggtcttcgacgcggtggctgaggagctcaacaagcagcagatctacatccacctggacaatcacatctccaagggcatgtggtgctgctccaccaacgatggtaacagctggtggggagacaggggtaaatcctggccggcactgatgtcgatcgggctgcgcaacgagccgcgcgagccgtcgtcgaacccagcactcgtgcagtcgtcgtacaactggcagtcgtggtacgagtacatgcggcagggggcggacgcggtgcacgaggcgaacccggacctgctgatctttttgtcgggcatgaacttcgacacgtacctgacgcccgtcgtgcgaggggagccgctggcgccgggaacggcccgcttcgacgtcgccgacttcgcagctggcccggccaacaagctcgtgctggagttgcacaactacgagaacggggcgaccagctgcgactccctgcgcggaaacctcgaccgcaacggcttcgaagccatgttgtcgggcggagccgctgtcaacgcgttccccgtccttatgacggagtttggcttccagatggacgaccgcacctggcgtggcgtctacgcgagctgtctagctcagtaccttcccgagctcaaggccggatggaccatctgggtgttggccgggagttactacatccggtcgggcacgcaggattacgacgaggggtgggggttgctgagtcacaactggagcgattggcggagtccgtcgtacgtggatggggcgttgaagaccatggtgcaagagacgttgagatga

SEQ ID NO: 1327 - DNA, 762 bp, Myriococcum thermophilum
atgcttgccaagactgtcctcggcggccttgccctggcctccagcgccatcgctgccccggccccgaacccgatcgagttcgtgaagagggccccacccgccggcgtggtcatccagaagtgcagcaagcccggagtgctcgcgcttgcctacgacgacggcccgtaccagttcacctcgaggctggtggacatcctcgacgcggccggtgccaaggccaccttcttctggaccggaacgctctacgggtgcatctacaaccaggctgatgctgttaagaaggcctttgcctcgggacaccagatcgcttctcacacatggacccacccccactggtccggctatagcgcggcgcagatccagcaggagatgaccaggctcgaggacgccttcgttaacctgatcggcaagaagccggcgtatgtgcgcccaccctacctcgagacgggcggccaggtcctgtccgtgctcggacagatgggctacaaggtcatcaccaacgacatcgacacgggcgactggaacaaccaatcgccccagcagagcgagcaggccttcatccaggccggcgccgggggcaacggccacatccctctcatgcacgagacctacgactccaccgtcaacgtcctcaccccctggatcattgactgggctaagcagaacaacctgcagcttgtcaccatcgctgagtgcttggatgaccccgatggtgggtaccagcccggtaacttcgagggtaacggccagaacttctgctag

SEQ ID NO: 1328 - DNA, 1134 bp, Myriococcum thermophilum
atgcatctctcctcgtctctcctcttcctcgccgccctgcctctgggcatggccggcaggggcaacggccacggccctcgtaccgggctccatgccctcgccaagcgtgccggcctcaagtacttcggctctgctaccgactctcccggtcagcgcgagcgtgccggttacgaggacaagtatgcccagtatgacaagatcatgtggaagtcgggcgagttcggcctgacgaccccgaccaacggccaaaagtggctgtttaccgaacccgaacgtggcgtgttcaacttcaccgagggtgacatcgtgacggacctggcccggaagcacggcttcatgcagcggtgccacgcgctggtctggcacagccagctggcgccgtgggtcgagacgaccgagtggacggccgaggagctgcggcaggtcatcgtggaccacatcacgcacgtggccggctactacaagggccggtgctacgcctgggacgtggtcaacgaggcgctcaacgaggacggcacgtaccgcgagtccgtcttctaccaggtcctcggcgaggactacatcaagctggccttcgagacggccgcgcgcgtcgacccgcacgccaagctgtactacaacgactacaacctcgagtggcccagcgccaagaccgagggcgcccgccgcatcgtcaagatgctccaggacgccggcatccgcatcgacggcgtcggcctgcaggcccacctcatcgccgagagccaccccaccctcgacgagcacatcgccgccatcgagggcttcgccgagctcggcgtcgaggtcgccctgaccgagcttgacatccgcctgtccactccggctaatgccaccaacctcgcccagcagaaggaggcgtacaagaatgtcgtcggagcttgcgtccaggctcgcggctgcattggtgtggagatctgggatttctacgaccccttcagctgggtcccttacgtcttccccggcgagggcgctgccttgctctggttcgaggactttaccaagcaccccgcctacgacggcgtcgtcgaggccctgaccaacacgaccaagggtgacggcaatggcaaaggcaagggaaagggcaagggcaagggcaggctctggcaagcgtag

SEQ ID NO: 1329 - DNA, 1107 bp, Myriococcum thermophilum; identical to SEQ ID NO: 1023

SEQ ID NO: 1330 - DNA, 1434 bp, Myriococcum thermophilum; identical to SEQ ID NO: 1024

SEQ ID NO: 1331 - DNA, 690 bp, Myriococcum thermophilum
atgaagttcctctcgctccttactgccacaggcattgctgccgctctccctacctcgccggccgaggtttccaacgccggtgaaatcgaggctcgccaattatcatccacccgcaacgacttggagaacgggaactctgccaattgccctaaggccatcttcatctttgccagagcctcgactgagcccggcaacatgggcatctcggcgggccccaatgtcgcatccgtcctagagctggcgtacggcgacgacatctgggtgcagggcgtaggaggtccatacgaggcaaggctaatcgacaacgcgctgccagcgggcacgacgcgggcggcgatcgacgaggccaagcggctgttcaacctggccaacagcaagtgcccggatgcggccgtcgtcgcgggcggctacagccaggggacggcggtcatgtccaacgccatctcggagctggcggggacggcgacgcaggagcagatccgcggcgtcgtcctcttcggctacaccaagaacctccagaaccgcggccgcatccccaactacccgaccgaccgcaccaaggtcttctgcaacatcggcgacctcgtctgcgccggcacccttatcgtcgccccgtcccacttcctctacacgaccgagtcgctcggcgaggccccgcgcttcctccggagccagattgacgccgcgtag

SEQ ID NO: 1332 - DNA, 981 bp, Myriococcum thermophilum
atgaagttcctgtggaccgcaactattgccgccttggccggccttgttgccgcctcgcccacacccaccgtcaacatcgacggacagatctacaaacgtgccagtcccgatgacgtttgcgacatcggttacgcctccaccaatggcggcacaaccggagggtctggtggaacgaccacgaccgtctccagcttcgacgaactcagtgctgccgctaagggtgacgacaagaagattatcattgtcgacggcagcatcagcgggtctggctccgttcgggtcggcgccaacacgagtattctcggaaaggctggtgcttccctcaccggcatcaaccttaccatcaagggagtcagcaacgtcatcgtgcgcaacctgaagctcagcagggtggtggacggcgactgcatcaccgtccaggaagccaccaacgtctggcttgatcacctcgacttgagcggcgacctgaacgccgacaaggacgaatacgacggcctcatcgacatcacccacgccgccgattttgtcaccgtctcgaacacccacttccacgaccactggaaggcttcgctggtcggccactctgacagcaacgccgacgaggacactggcacgcttcacgtcacgtacgccaacaacaggtggaccaacatcaacagccgtacgccctcgatccgcttcggcaccggccacatcttcaacaactactacgagaacatcctggcctcgggcatcaacacgcgcatgggcgccgtcgtgctggtcgagtcgagcgccttcgtcagcgccaagcgcgccatcacgtcgatcgactcggacatcaacggctccgccgccgtcgtcgacgtcgacctgggcggctccaccaacgacgcccccgtcgccaactcgcccccgtccatcccgtaccagtactcggtcgtcggctcggccaacgtccgcgacgccactgcgcagagcggtgctaccctctccttctag

SEQ ID NO: 1333 - DNA, 1404 bp, Myriococcum thermophilum
atgtaccccaatctgctcacactcgccgccgccgtcctcgtggccaaggccaccggccagcaggttggtacctacaccaccgagacgcaccctaggatgacccggcaaagatgcagttccggtggttcctgcacgaccgtaaatggagaggtggtcatcgattccaactggcgctgggtgcacgacaagaacggctacaccaactgctacacaggcaatgagtggaattccaccatctgcaccgataacaactcatgcgcggcaaactgcgccatcgatggcgccgactactccggaacgtatggggtgaccacgagcggagatgccctgactctgaagttcgtgaccgaggggtcgtacagcacaaacatcggctctcgtctatacttgatgtccggatcagaaaagtatcggatgttcactcttcttggcaacgagttcagctttgatgtcgacgtctcaaagctcggctgtggcctcaatggtgccttatacttcgtgtccatggacgaggatggtggaaagtccaagtactcgtctaacaaggcgggtgccaagtatggcactggctactgcgatgcccagtgcccgcgtgaccttaagttcatcaatggcgaagccaatgtttccggctggaagccatcgtccaacgacgaaaacgccggcgttggcaactatggctcatgctgtagcgagatggatgtctggcaagtggtttacccaacctccctttttctcctggaggccaactccatctcgaccacctacaccccccacccctgcaccacggttggccagcaccggtgccagggcgactcctgcggcgggacttattccgcagaccgatacggagggacctgcgaccccgatggttgcgacttcaacgcctaccgccagggcgtcaagaacttctacggtccggatatgacagtggacaccaagaagaaattcaccgtggtcacgcagttcatcaagggcagcgatggcaacctagccgaaatcaagcgcttctacgtgcagaatggtaagacgattgccaaccccagcagcaccatccagggcaatacgggcaacagcatcacgcccgagttctgcaggacgcagaagacagcctttggcgaccgcgacatcttcaacgccaagggcggtttccctcagatgagcaaggccctcgccgcacccatggtgctcgtcatgtcggtttgggatgaccaccacgccaacatgctgtggctcgactcgacctaccccgtcgacgccggccccaacgtgcccggcaaggcccgcgggacctgctctactagctccggcgtgcccaaggacgtcgagtccaatcaggccaacgaccaggtcatcttttccaacatcaagtttggccctatcggctcgaccttcaaacagtaa

SEQ ID NO: 1334 - DNA, 1191 bp, Myriococcum thermophilum
atgttttccaagctcttcaccacggtcgccctcgcggcctcgctggtttctgcgcagaccttcacggactgcgaccccaccaagcgtgatgactgccctaaccccaaggctgtcggctccaagccggtcgacatcgacttccgccagggggccagcaacttcttcaaggcggcagatggcacgagtctcacgtacgacaaggagctcggtgccgtcttcagtatcaataaggagacggatgctcctaccatcacctccagcaagtacatcttcttcggccaggttgacgtgactgtgcgcgctgcccgcgggacgggcatcgtcaccagcttcgtgctgcagtcggatgacctcgacgagatcgactgggagtggcttggggccgacaacacccaggtccagaccaactacttcagcaagggctgcacagaaacctacgaccgtggcggttactctcccgtcgccgaccccatcggccaattccacacctacaccattaagtggacacccgagcagcttgactggatcatcgacggcaacgtcgtccgcacgctcaggaacgagggccttgagggctgtgccggctacccgcagacccccatgcagatcaagctcggcacctgggttgctgggcgcaaggacgcgcctcagggcaccatcgactgggctggtggtcttaccaacttcgaggaggctccgtttgacggatattaccagagcctgcatattgtagactacatgggcggccgcggcgccaaggaggcgaccgagtaccaatacaccgaccgcagcggcacgtggcagagcatcaaggtggtcaacaatggcgaggaatctgacgatgacgacgacgacaacaccaccaccactactactactacttcctccaaaaccagcgcgacttcgaccacctccaaggccacgtcgacctccatgtctagctcgtctagctcctccagctcgtctcgcgccacccccaccaccctttccaccgtgagcacctcggctaccccgagcaccagcgacatcgacagcccgactcccaccaacggcccgaccagcaccgtcggccgcgaggtcgaggccacttccgctgtctctcagaccgtgtccaccggtgcggccccgaccatgggtggcaatttggccgctgtgggtgctgctgccctccttggcgccctcgctctctaa

SEQ ID NO: 1335 - DNA, 1683 bp, Myriococcum thermophilum
atgttattcgcttccctgcttctaggcttcctggccggcgtgtccgcttccccggcacacggccggaattccactttctacaaccccatattccccggcttctaccccgatccgagctgcatctatgtgcccgagcgtgatcacaccttcttctgtgcctcatcgagcttcaatgcctttccgggtatcccgattcacgccagcaaggacctgcagaattggaagttgatcggccatgtgctgaatcgcaaggaacaacttccccggctcgccgagaccaaccggtcaaccagtggcatctgggcgcccaccctccggttccacgacgacaccttctggctggtcaccacgctagtggacgacgaccggccgcaggaggacgcttccagatgggacaatattatcttcaaggcaaaggatccgtacaatccgaggtcatggtccaaggccgtgcacttcaatttcactggttacgacacggagcctttctgggacgacgacgggaaggtgtacatcaccggcgcccatgcctggcaagttggcccatacatccaacaggcagaagttgacctcgacacgggcgccgttggcgagtggcgcaccatttggaacggaacgggcggcatggctcctgaaggaccacacatctaccgcaaagatgggtggtactacttgctggctgccgaaggcggaaccggcctcggccatatggttaccatggcccggtcgaggaaaatctccggcccctacgagtctaacccacacaaccccgtcttgacaaacgcaaacacgactagttacgacgtgggaactgctgtgagctggccaaaaggcgagtggccggctttcacccctgtatctggcaagatgagcgtctggccgatgcctcgcccgcataaggacattcgcggagtcggccccttggtcaactcccccgatccggaacacctgaccttccctcgctcgggccctctgccggcccatctcacctattggcgataccctaacccatcctcctacacaccgtctccaccagggcaccctaatactctccgcctgaagccatcccgcctgaacctgaccgccctcaacggcaactacgcgggggacgaccagaccttcatctcgcgccggcagcagcacaccctcttcacctacagcgtcacgctcgactacgcgccgcagaccgctggggaagaggccggagtgaccgccttcttgacacagaaccaccacctcgacctcggcatcgtcttgctccctcgcggctccgccaccgcgccgtccttgccgggcctgggcagcgatctggacaaagatgccgagtatgagagtggcagcgaaggagcgagagaagacctgatcccacacgtgcgcttcaggggtgagtcgtacgtgccggtcccgcctcccgccgtgtacccacttccgcgagcatggaggggtgagaagcttgtactagagattcgggcttgtaattcaagccatttctcgttcagcgttgggccggcggggagacggtctgagcggagggtcgtcatggaggcttctaacgaggccgttagctggggctttactggaacgttgctcggcatatatgcgaccagcaatggtggtaacggaactacgccggcatacttctcggattggcggtacacaccactggagcagttccgggattga

SEQ ID NO: 1336 - DNA, 1065 bp, Myriococcum thermophilum
atggcgtggctaaggtctgtaattcttggttcttttatcacactgttgttaccatggacgggcttggtatttgggcttgctatcgacttcacgggccatagtggtcaagtggctgcacgggcagaccccaacttggccggctacttgggtgttttctttctcggtgccgacccgtacgtctacttttatctcagcaatggaaacaatcctgtctctttcaaggccctgaatggaggctcgccaattataaggccaacaaaaggcaccgggggagttcgcgacccgaccatcattcccggaggtggaagcgaagccggcaagaagtggtacatcattggaacagatctagacattgggaagacaacatgggatgcggcgcagcggaccggatcaagagggatcttcgtgtgggaaagcactgacttgattaactgggggaacgaaaggcttgtggaggtggaggatgccactgctggcatggtttgggctccagaagccatctgggatcccgagaaaggccaatacctggttcactgggcatctaaattttactcgacctcggacccgggacataccggctctccctccaacattcgcatccgctacgcctatactagcgacttcaccaccttcaccgcccccgaaaccctcatcgacaaaaaccccaccaatatcatcgacttgaccttcctccccctcaacggcacggagtccaactccttccttcggttcatgaaagacgagactctcaaaacggtctttgtcgaggtctccgacactggtctcttcggcacgtggaccaggccgggcggcgactcggcgatcatccagcagggcgtggaggggccggcggcgtactgggacaacacaaccccggggaaggcgcacctcttgctggacttctacggggaggatgggtacaggccgtttgagagtaccgatcccggcagcaacagcgggtggacgggaagcgataggtcggcattcccgaggaatttgaggcacgggagcgtgctgccgattgatcaagcggcttatgatgcgctgaacgcgcagtggggttag

SEQ ID NO: 1337 - DNA, 1023 bp, Myriococcum thermophilum; identical to SEQ ID NO: 1031

SEQ ID NO: 1338 - DNA, 2271 bp, Myriococcum thermophilum
atgaagggcacatcggtgctgcgtctccttcttgctgccgtcgcggcggtggcccccgccgatgcggcgacggcgtggaaaaatgtcaatatcggcggcggtggtggattcgtccccggcatcatcttccaccccaaggagaaaggagtggcatacgcccggaccgatattggcggtctctaccggctgaacccggacgacgactcgtggacccctctgacggacaacctgggcacccacgagaattggggccgctggggtattgatgccgtcgctgtcgacccccaggatgccgacaaggtgtatgcggccgttgggatgtacaccaacgactgggatcccaacaagggttctatcatccgcagttcggaccgtggcgccacgtgggaggtctctgaactgcccttcaaggtgggcggtaacatgccgggccgtggcatgggcgagaggctagccgtagacccggccaactcggatatcctgtacttcggcgcccgcagcggcaacggcctgtggaagagcaccgacggcggcgtcacctgggcccaagtcgagtcctttaccaacgtgggcacctacgtgcccgatcccagcgacgccagcggcctgaactcggacgtgatcggcctggctttcgtcacatttgactcgacctcggacgtggtcgacggcgccacctcgcgcatttttgtcggcacggccgacaatgagaccgcctctgtctacgtgacggaagatgccggtgccacctggagccccgtcgagggccagccaggcaccttcttcccccacaagtgcgtgctgcagcccgaggagaaggccctctacctgagctacagcgacggtgccggcccctacgacggcaccctgggtgccgtctaccgctacgacctagcctccggcaactggaccgatatcaccccagcctcgggcgaagacctctacttcggttttggtggcctcagcgtcgatctgcagaagcccggcaccctgattgtcgccaccctgaactcgtggtggcccgatgcccaaatctaccgctcgaccgactcgggcgccacttggtcccagatctgggagtggacagcctatccagacatgaactggtactatggcctctataccgacaaagccccctggatcaacgctggcttcatttcccaagatactaagcgtctcggctggatgatcgaggctctcgagatcgacccgcatgacagcgaccattggctgtacggcaccggtctcaccctgtacggcggccacgaccttaccaagtgggataccgagactcgcaacgtcactatctcgtctctcgccgccggcatcgaagagatggccgtccttggcctcgcatcggccgtcaacggatccgaactcctggctgctgtgggcgacgactgtggcttcactttccagaagagcgaagacctcgataccccccctcagactccctggatgaaccccatctgggctacggccaccgatgtcgactatgccggcaacgagcccgatcacgtcgtccgcgttggtaactcagaggggtctccgcaagtcgccgtgtccgaggatggcggcgtgacctggcaggcccaccctggtgccgatgataccattactgggggcacgctggcctactcggccgacggcgacacgatcgtctggtcgtctggaagtgccggtgtgcttcgctctcaggaccaaggttccttcgccgccgtggactcgctgtcttcgggcgccgttgtcgccgcggaccgccgcaacaacactgtcttctatgccggctcgggtgcctccttctaccgcagcaccgacactggcgccacctttgcagaggttccctccgcctttggtggcgacggtagcgaggtcaccgccgtcaaagacattgcggcacacccggttgtcgctggcgaggtctgggtcgccaccgacgctggcctgttccgcagcaccgacttcggcgccaccttctccgccgtcggttctgacagcatcaccaacgtcatccaagtctcccttggtaagggtgatggttccgcctggaacgtctatgcttttgccacgggccccgagggaaccaaactgtacgcctcggccgacgagggcgccacctgggtcgatatccagggcgaacagggcttcggctcgctcacggccaacaggctcgtcggcagcggcaacgtcgccaaccaggtctacgttggcaccaacggccgcggcgtcttctacgctcaggcatccttctccgccgccgcaaagaactaa

SEQ ID NO: 1339 - DNA, 1530 bp, Myriococcum thermophilum
atgatgcctctcacaaagcgagccgccgccgccgttgcgttgctgctgtctggcgccacagcacaggagagcagcaccaccactagcccagctccgtcggcatgtgcaacgctgacgccggcctactccccgcccgtcgtggcaaagggttggaaggcccagctgattgccacgggtctcacgaggccccgcgggatcaagttcgactcgaacggcggtctgctcgtcattgagcagggcgtcggcctgacacacctgacgctcgacgacaacggcggcacctgtgtgtctgtcgctaagaacaccaccgtcatcgaggactcgaggctcaaccatggcctcgagttgtcggaggacggcaggaccctctacgtctcgtcgttcgagtacgtcgaccgatatgactacgatcccgacgccatctcggtgggtgagcctacccgcttgatagtcaatatgaccaacccgggcggcggccactccacccgcactctcctgctgtccaaggcacagcccgacctcctcgtggtctctcgcggcagcgccaccaacctcgacccgctcgctatcgaccagtctaccggcgtctcccacatccgtgccttcaacatctcggacgctgccctcggcgaggagccttacaactacccgtcggacggcatcctcgtcggctggggcctgcgcaactcggtcggcgtgggcgagcatcccgtcacgggcggcatctggtcggtcgagaactcggccgacaacgtggcccggctcgggcaggacgtgcacgaggacaacccgggcgaggagctcaactaccacggcctgctcaacgacacgtcgctactgggcgccaactacggctacccgctgtgcttcgccctctggaacacgaccgacttcccctcgcagggcgacctggtggtgggcagccagttctcgctcgacaacgacgcgacggccaacgacacgtactgcgccgagagcacgaccccgccgcgcctgaccttccgcgcccacacggccccgctcgacatcaagttcctccccggcaacggctcccgcgccttcatctcgttccacggcagctggaaccgggacgtcccggccggctaccggctggcgtacgtgcccttctcggacgaggacggccagccggccgacgagagcgacagccgcgccgccgcccgcgacatcctcagcccgcccgacgtcacgcagtgctccaacgccggcgcctgcttccgccccgtcggcctggcctttgacccgcccgcccagcggctgtttgtcacgagcgatgccacgggcgagatctgggtcgtcctgagggacggtgaagaggaagaggaagaagaagaaggaagggagggtctcgaagagagggagacggccaccgagacgtccgaccagcccgggagcacgtccgagggcgctgcgatgcccagagctgcccttcgtgggttggatatcaaggcgtggctgattgttgctctcctgacggtttggatgatgtttgtcggaactcttgtcttttga

SEQ ID NO: 1340 - DNA, 1602 bp, Myriococcum thermophilum
atgagaggtctcgtggcattttcgctcgtagcctgcgtttcggcagcgccgagcttcacagccgagaccatcaacggcgagcatgctcccattctttcctcgtcgaatgctgaggttgtccccaattcgtatatcatcaagttcaagaagcatgtggatgagagctcggcctccgcccaccatgcctggatccaagacatccatgcctcccgtgagcaggtccgtcaagacctgaagaagcgtggccaagtcccgatgcttgacgacgtcttccacggcctcaagcacacgtacaagattggcgaggaattcctcggctactccggccatttcgatgaggaaaccatcgagcaagtcaggaggcaccctgatgtcgagtacatcgagcgcgacagcattgtccacaccatgagtgtcaccgaagagagttgtgacggcgagaccgagaaaaccgctccttggggcttggcccgtatctctcaccgggaaacgctcggcttctcgactttcaacaaatacctgtacgctgccgagggcggtgagggcgttgatgcgtacgtcatcgacaccggtaccaacattgagcacgtcgacttcgagggtcgcgccaaatggggcaagactattcccgccggcgatgccgacgttgacggcaacggccacggaacccactgctccggcaccatcgcaggcaagaagtacggcgttgccaagaaggcgaacgtctatgccgtcaaggttctgcgctccaacggctctggcaccatggctgatgtcgttgccggtgtcgaatgggctgccaagtctcatctggaacaggtgcaggctgccaaggatggcaagcggaagggcttcaagggttccgtcgccaacatgtcgctcggcggtggcaagaccagggcgcttgatgacaccgtgaacgctgctgtctctgtcggtatccacttcgctgttgccgccggcaacgataacgctgatgcctgcaactactcgcccgctgcggccgagaaggctatcacggttggtgccacggctatcgatgacagccgtgcctacttctccaactacggcaagtgcaccgacatcttcgcccccggcctgagcatcctctccacctggatcggcagcaagtatgccaccaacaccatctccggcacctcgatggcctcccctcacattgctggtctgctcgcctactatctctcgctccagcctgcctccgactcggagtactcggttgctcccatcacgcccgagaagatgaagtcaaacctcctcaagatcgctacccaggatatcctcaccaacatgcccaaggatactcccaatctgctggcctggaacggcggtggctgcaacaactataccgccatcgtcgaggccggcggctacaaggccaagaaggccgctagcgacgagactgacgttgaggcctctgtctctgagctcgagaagctcattgaggacaactttgaggttgtctctggcaagtttgtcaagggcgcctcgtcctttgcggagaaggtcgagaagttctctgagaagatgcacgagctgctcgaggaggaactcaaggagttttttgaggatattgccgcctaa

SEQ ID NO: 1341 - DNA, 1851 bp, Myriococcum thermophilum
atgaagaacttcgtcccatttgcggccctcgccgctggcgtgtcggctactttcatccatgcccctcccttcacctgcccggccaacacggacaaccaatgtaccgacaagcagaagcccggcttcagctgggacgaccttgacttcggtgacttcttcgactatggcggcttccacttccgcggctggaagtgcgaggatgccggcggaagcaggggtcgcttcgctcctcgcaccttcaagaaggtcatcggtggcacatgccacgcggacaagagccagtcgccgtcatttggatgcggccccgacctcgacaggttctcgctaggctccatccacgtcaagcccgagttcgactgcgacctcgagttccactacgacatgcctgatggttccatctgcaagcatcgtagcccctgcagcaggtcgggcaccaccgtccacaacacccagtgcggtggtgctaagaacgtcaccatcatctaccccccgcagccggacaagccaaagccgacctgcagcatccaggtgcccaccatctccttcgactgcagcactgcttccagcaccctgccgcccaagacgaagacgtcccagactgccggagccaccactacccctcccgccggtgacaccacgaccactacatctgcagttgagactacacccacatctgacgccgaggtttcgtctacctctaccggccagaccggcgctcctccggtccagacgagcgttacgctcgtcccgggcaacaacacgactattcccatccccggcgtcagcagcaccagcaccgtttcccctggcgaggagactagcagcagcgacagcagcagcgtggccactcctacgcccggcgagagctcttctgatagcaccgtcatcgtgcctccggtgacaaagacggtcacgaccagcttcgacagcacgtcgaccatcttcaccacctccactcagaccatcacgtcgtgcgctcccgagcagtcggccgactgcccggccaactcggtcaccaccacggtcgtcaccatcgccatctcgaccaccgtctgccccgtcaccgagacccgcacgacggtccgccaccggctcggctgtgtcccccccggtgatgctaccacgacggcggtcggtagcgacgtggtcagctccgccgctccggtcgagaccctcccttgcccggccattgtcccgtcctgcctgaacacgttcctgttcagcgtcggctgctccgacaacacggatgccgcctgctactgcccggacgccaccttcgtcaagaacgtgtatgactgcctctacgcccacggcgagaacgacgccatcatcgccgaggccatcgcctacttccagggcatctgcggcggctgggtgagcgagaacccggccatcgcgacgggcgccaccatcaccacctacatcaccgtgactgccacgccgaccgtcgcccccgtctacaccaccgtcaccgtcgacgtcaccaccgtcgtgccctgcaccaacgatgccggagaggtcatcccgagctccagcaccaccgtcaccgtcagcaccagccttaccgtgccccaggtcggcttcagcccgggcccgtccgacgatggcgacgtcaacgtggttcccatcaccaccgccaccggctccccggccgttcccaccaccgtcaccccgcccgccggcaatggccccgtcttcaccggcaacggcaccgtcaccggcatcaccaccccgaccttcaccagctcgcctagcccgaccgacaccccggttgtggttggcggcagcggccgcgttactgccagcttcggcctggctgccgcggttgctctcctcgcctttgctctctaa

SEQ ID NO: 1342 - DNA, 3048 bp, Myriococcum thermophilum
atgctctccaggactctggctgtcgtggccttcgccgtggccccgaccatagccacaactcctgccgtcaatgtctactggggacagaaaggcactgcctctgacagacttagcactttttgtgacgcatccagcttcgaatatgtcacagtcggcttcatcaacaagtctcccgagaaagacccgtccgcgttgaggtacccgggcagtgacttttccgttcactgcacgaacatagccaagtaccaagacaccgagggagtcgactccaacctcttgcgcaagtgcggccagatcgctgccgatgttcggtattgccagaagaagggtaagaaggtgctcctctccatcggtggcgaatggaacccgcccaagacggattacagcatctccagtccgccagaaggggagtatttcgccgacttcatctggggtgcattcggtccttacaccgagaactggaaggacaaaccaagacctttcgatgacttcttcaacgccgacgagggcgaagagcactttgtttttgatggttttgattttgatatcgaacacaagtttgaggaccagagcggttatgtcgcaatgatcagaaggttgcgtgccctgaccgagaaggacacgacaaagcaatacttgatcaccgccgccccggagtgccccctgaacccggattacttcaagatgaagaccatcatcgacacttgccaattcgatgctctcttcgtccagttctacaacaaccccgtctgcgccggagttgacaataacaactttgacgactgggtggagtacctggccaagacgcccagcaagaatgcgaagatcttcatcgggcttcctggttctccggaagcggccggctctggctacctggctcctggacccgcgtttcagttgatcaacaaacataaggacaagcctgctttcggtggtgtcatggtctgggatgccgtctatggcagccagaagtttggtggcatcccgttctacgacttgatgcatgactttgtctgcggcgccccgtcccacaccacgacggccccggccccgacagcaacggccaccgtttgcgtcaagtggcacacggttgtcagcggcgatacttgctacgagattgccggctcctacggcatctccctggatgacctgtacaagtttaacccgggcattacttgtaacctccaagtcggtgaccaggtctgcgtgaggtttggcgtcccaatccttacgagcagcttgagcagcagcttgacaagcacagaaaccctggctagcactagcacaacttcaagcaccagcaagtcgacaagctcgactagaggctcggctatttcgaccaaaccttcaacaagctcgatcagaacttcggctagctcgacgggaagctctacaagcccaacaggaacctcaaccaagacctcggccagctcaattaagagctcgagcacaactttggctagcccaaccaaagccccgactagctcggccaaaccgtcgacaagttctattaaaacctcggcgagcaagacttcgactagctcaactaagacctcagccagcccgaccaagacaacgacaagctcaactaaagctccgacaagttcagccaaaacgtcagtgagcaagacctcggttagctcaactacgacctcgacaagttctgtccggacctcggccagctcaacaaagacctcggctagcaagacctcagcgagctcaaccagttcaatcactagtccgacgagaacctcgaccagttcagccaggccctcaactagttcgatcaaaacctcggtcagctctaccaagaccttgactacttcaaccagtctctcggttagaccaactacttcgactaagccgtcgactagttctagcccgtcaaccagcccggttagcgtgaccagcgcgaccagcatcaacagcccgagtatcacaagcgcctcggctacaagtacctcgactggcgtcgatgactcgtgcccggatgaggagaccagcacatcaactgctgcgacctctacagagcccgttaccctttcgattaccgaatctgtcaccgtgtccgctaccgagacgactactgggtctgttaccgagacgactactgggtccgctaccgagacgactactgggtctgttaccgagacgactactgggtctgttaccgagacgactactgggtctgctaccatcacactgcctccgcagtctacgtctactagtagcgaagcgctcgctagcacttcgactaacgatgatgactcgtgcccggacgatgagaccagcagcagttcggccacagagactgccaccgtcacatttaccccaggatttacttctacgggtggcgaggcggtcactagcacctctgctgtggacgatgaggccagcacctctgctattgtgtccgctactcagatcaccacatcgtctggtgtcacaatcaccggttcgtcagtctcggacatcagcaccactgcgagcagcaccgcctcctctgagagctggacaacgtcgaccatctacacgaccaccacctacaccgtcactagctgcccggttaccgtgaccgactgccccggcaaaatcggccaggtcgtgactgagacgatcgccgtcagcacgaccgtatgccccatcaccgaaggtgcggaagtgggcccgtcaacctcggcctcctcgccgccggcgccgatcgagtcgggcagcggcgccaagcctcccttccccaccggcggggagagcgagaacacagactcgacatcgaccgcacgagtcactgcgacgcgcttcactaccctgacggtgcccaagtcggaggctaccggctcggcggttaacacctcgtcgtcgccatcgtcgccgtccttgccgcagtcgtcgtcgttgtcacggtccccgtcggctggccttcctatcaagtcgggttccccggccccgccatcggtgaccacgatccccgtgttcgcgggcgccggccgcaacgccgtcacgcttggaatgccggctgtcctggctgttgttctggtacttgctttttaa

SEQ ID NO: 1343 - DNA, 753 bp, Myriococcum thermophilum
atggcatcaaaggtggtcattgtcaccggtgcgagccgcggtataggcctcgctgttgctcagtccctgttggcatcatcccaaaatgtcgtccttgtttccagatcggccgatcggcttcaacaactgaaggatctctttccttcccaggtcgcttttctcgcggctgatatgacagctgctgacacagcccggagggcagcagagctcgccatccttacctttgggagaatagatggggtcgtcgtcaaccacggcgtgctttctcccatagcacgaatcgaaaacgcctcgatcgaggagtggaagaagctctatgatgccaacttcttcagcgcgcttgcattgaccaaggaggccatccctcacctgcgggcttcgaagggccgaatcgtgttcgtctcctccggcgccgcaacgggggcttatactgcatgggcggcctacggctcttccaaggccgccttaaactctcttgcgaagcacattgctgtcgaggaacccgatattaccgcggtagccatcagcccaggccgggtcgacaccgacatgcagaaagaacttcgcgagaaaggctcggaaatgtcaaagaaggattacgacacattcgtagccgattttaacgagggccgactgaacaagcccgagctgcctggaggtgtcatcgcaaagctgtctctggacgccaaaccggagctttccgggaaatatttcaaatgggatgcatcagagttggccgagtatcgtcggtag

SEQ ID NO: 1344 - DNA, 831 bp, Myriococcum thermophilum
atgatctcgattcgcactctcgctctggctcttgcggccgccgtccaggtcgccgagtccgcctcgcctggctgtggcaagaatcccccttcctcgggaaacaagtatgtgacggtcaacggcaagcagcgtgagtacatcctccagctgcccgataactacgacgcacaaaagccccaccgggtggtgatcggataccactggctcgacgggtccatgtacgacgtggccaacggcggtttctatgatctgcggtccagggccggcgacagcaccatctttgtcgcccccaacggcctcaaccgcggatgggccaacatgggcggtgaggacatcgcctttacggaccagatcgtggacacgctcttgaacgacctctgcgtggacgagacgcagttctttgccaccggctggagctatggtggtgccatgagccacagcgtggcctgctctcggccagatgtcttcaaggccgtcgccgttatctcgggcgctatgctgtccggctgcgacggcggcaggacgcctgtgccgtacctcggcatccacggtgccgccgacgacgtcctccccatcgactttggccgtcagctgcgcgatcagtggctgcagaccaacggctgccagtaccaggccgctcaggaccccgcgccgggccagcaagcccacatcaagaccgtttacacctgcagcaacgcgcccgtcacctggatcggccacggcggcggccacgtccccgaccccactggcaacaacggcgtcaagtttgcgccccaggagacttgggacttcttcgatgctgccgtcgcagcggccaaggcgaagaactaa

SEQ ID NO: 1345 - DNA, 645 bp, Myriococcum thermophilum
atgctgcgcacttcggtcttcgggcttgtcgcagctctgctggggactgcctttgcggcgaatgaagtcgtccaagacccggacacgggactcaccttcacctccaactaccagctgttcagcctcagtgaagggatcaccttccgcgtcgccattcccgatgacgcgcagcccaacaccgccttcgacgctgtcgttcaagtcgtcgcacccaaccaggccggttgggtcggtctcgcctggggcggctctatgaccaacaacccgctcgctgtcgcctgggagaacggtggctctgttgttgtgtctcctcgctgggcttctggccatgtcatgcctactgagtcctccaatgggggcacctacagggtcttccagacgggcaccaagtccaacggcacgcactggcagtacaccgccctctgccagggctgcaccgcgtggaccaccagctccggcggctcccgctacctaactccttcgggcggcaaccgccttgcgttcgcttactcgtccaccaagccctccagcccgggcagctcgtcctcctcaatctccattcacagcgtgcacggctactgggaccacgacttcgccgccgcgcgcaaccccaacttccacgatgtggtgcagaacctcgtctaa

SEQ ID NO: 1346 - DNA, 999 bp, Myriococcum thermophilum
atgaagtcgacttttgccgctgccctagcagccctcgctgctcagaaagtggccggccacgccacgttccagcaactttgggtggacggtaccgattatggctcaacctgcgtccgtctcccaccgagcaactcgcccatcaccgacgtgggaagcagagactttgtttgcaatgctggcacccgccccgtcggtggcaagtgccccgtgaaggctggcggcactgtcaccatcgagatgcaccagcaacccggcgaccgcagctgcaacaatgaagctatcggaggggcacactggggtcccgtccaggtgtacctgaccaaggtcgacgacgcctcgacggcggacggctcgactggctggttcaagatcttctcggactcgtggtccaagaaccccagcggcggctcgggcgacgacgactactggggtactcgcgacctgaacgcctgctgcggcaagatggacgtgcccatcccggccgacatcgcgtcgggcgactatctgctccgggccgaggcgctggcactgcacacggccggacagtccggtggcgcccagttctacatgagctgctaccagatcacggtcgagggcggctccggcaccgccagcccggccaccgtcaggttcccgggcgcctacagcgccagcgacccgggcatcctcgtcaacatccacgccgcgctgtccagctacaccgcccccggccccgccgtctactcgggcggcaccatccgcgaggccggctctccctgcaccggctgctcgcagacttgcaaggtcggtgagtccccgagcgccatcgcccctggcagcggctcgggcgacggctcgggcgacggcaacggcgacggttccagccccggcggctgcaccgtccaggcctacggtcagtgcggtggcgaaggctacactggctgcactgagtgcgcgcccggctacacttgcacggccatttccccgccgtactactcgcagtgtgctcccagtgcttga

SEQ ID NO: 1347 - DNA, 792 bp, Myriococcum thermophilum
atgccatcgtggtcaaccatcatcgccgcggggcttgctacctcgggagcttacgccactccggttgaggtcgctcggcaagcaacgccgacggtctacctcgctggtgatagcaccatggccaggactggcaacgggctcatgggttggggcgagtacctcgcgaattacatcacgctccccgtggtcaacaaggccatctccgggcggtcggcccgcagcttcaccaacgaagggcgcttcgccgagatcgagtcgctggtacagaccaacgacattgtcgtgatcgagttcggccacaacgacggcggttcgcccaacggggctgacgacaacggccgcagcgactgcccgggcgagggcgacgagatctgctactcgggcaagacgggcgagatcgtctacacattcaaccactacgtggaggcggcggcgcggagctacatcgccaagggcgcccaggtcatcatcagcagccagacgcccaacaacatgtgggagggcggcacctacaacaacgcgccctcgcgcttcgtcggctacgccgccaaggccgcccagaacgtcggcagcggcgccagcttcgtcgaccacttccaggctgtcggcaccatgttctggcgcctcggcaacgaagccaccaacgccctctacccgcaggatcacacccacaccagccccgagggtgccgacttggtcgctcaggcctttgtgcaggctgtgagcctcgactttaacgggacgacgccgctcaaggaatatctcaagaccccagttcctgaggtgttctaa

SEQ ID NO: 1348 - DNA, 753 bp, Myriococcum thermophilum
atgaagatcccactcatcaccagccttacttcggcactacttgccgtatcggctaccgccgccccggctccggccgctcggcaggccaagccggcagctttcttcctcgcaggcgactcgacgacggccgtcaacggcggctggggtgacggcttcgtcgctctcttgcggaacggggccatcggtgagaacaagggccacagcggcgccacgacggcgtcgttcgtcggcggcggtgactgggccagcgtactcgacctggtcgagagcaacaaggctcagtacgactgctatgtgacgatccagttcggtcacaacgaccagaaatcgacatcgggcatcagcatctcgcaattccagaccaacctcgaaaacatggcacgggacgtggagcaggcgggaggcacgcccgtgatcctgacgtcgctgacgcggcggaccttcacgggcggcgtgctggacgacagcctggcggacgtgtcggaggcggcgcgcaaggcggcgtcggccgccggcgtcgccctgctcgacctcaacaaggcctccaaggacttcgtccaggccatcggccaggacgccgccgaccgctacaacctcgccgacggcgaccgcacccacctcaacccccacggcgaggccgtctttgcccgcatcgtggccgatctcgtcgtcggatggaaggaggagctcggcgagtacatcactcccgatccggagatgtcggacaagatcgccaggggggagtatgtctga

SEQ ID NO: 1349 - DNA, 1830 bp, Myriococcum thermophilum
atggccaagacgcttctctggttactcctatgctcctgcctttcacaagtctcttgggctgctaaggcccgggagaccttgcgtctcacgtggggagaaggtgccccaaacggacggccaagagagatgatattcgtcaatgaccagtttccggggccgaatctcatctttgatgaagacgacgatgttgagatcacagtgtacaatgacatgctcagaaatgcaaccgttcactggcacgggatagcccaaacgggcactccgtggtctgatggtgccattggactctctcagaaaccgatcttgccgggggagtcctttgtctaccgcttcaaggcctctcctccgggcacacattggtaccattctcatgaacgtatgtcactcgaggatggtctctacgggggaatctttatcaggccaaaacaaaagctcaatggactgtggccccagatcagcaagaaccctaaggatatcaaggcgatggagagggccgcccgcgatccaaagctcatggtcctgtcagagtggacaagtttcacttcggaggaatggtggaaagccgtcgaggaatcagggatgttgatcttttgcgtcgatagcatcttgctgaacggccaaggggaggcctactgcccgcctcacgaattcctcatcaatcagacgaacccgggtcccaaacagaccagtttccccaaccagaacgtcaccgacaaaggctgcttccccataacggcagaaggaattcaggggccatgggtgcgcaaccaaagcgatatcaccaaggttcccaaccacctccaatggggatgccttccgtcgagcgggagcaactacacgctcgaagtcgatccggccgaccggtgggtcagcctgaacttcatcgcgacagggtccaacaagcaggtagatttctccatcgacgagcacaccatgtggctctacgaggtcgatggagcctacgtggagccacaggagttcgtcgccgcggccatcagctcgggcgagcgcttctctgtcatggtgaagctggacaagaagcccggccgctacaccatccgcttgcccgactcgggcgcgacccaggtgatctcgggcttcggcgagatggtgtacaagggcggcgagaacagcacccggcagtcgatcccgtacgtcacatacggcggcatgagcgcgctccccatcacagacgaaaagagctacacgccgtacgaccttgcgtccgacaccatgacgccctggccgcgcgtccggccggcgccggtggcggacgaggagtacctcctggtgatgggccgcgccaactcgtccatcaggtacaccatgaacgccaagtacctctacccgcccggcttgcaggcggaccggccgctgctcttctacccgaacgacacgctcgggacggtggacgagaacctggtgatccggacccggaacggctcctgggtcgacctgatcctcgaggtcgccacgctgccgggggacgagctggcgttccagcacgtgatgcacaagcacggcagcagaaccttcaagatcggcggtggcgtggggccgtggcggtggaacagcgtcgccgaggccatggcggccgaacccgagagcttcaacctggagaaccctggctaccgggacacctggatgacccccttcgtcaccgagatcgccggtggttattggacaatctaccgctaccaggtgaccgacccgggcccgtggttgttccactgccacttcgagctgcacatgatgggaggcatgtccatggccattctggacggcgtcgacgcatggccgaccgtgccgcccgagtaccaaattacttag

SEQ ID NO: 1350 - DNA, 585 bp, Myriococcum thermophilum
atggtatcgttttcgagcctggccatcttcggcctaagcctggccgcgcgagtctctgcgaccattctccagaatggccaagtaagggagaccagtttcccagatacccggatcgatccggcggactactcgtttaagacgtatccggccaatgccaccgagatctcgtacaaggggcgttgggattcaaaatacgtctcttggtggtcagcccccggtatcaagtttggctttacggggaagacagtcgccatcaccttcggcagcctgacagacaatggcgtcctggtcggctaccgcatcgggggcctcgactggatattcaccaacatcacagcaggagccactcacctcctcgtgagcccagaaacgccgtgtataaatgagacaggtccaatcaacccgtggacgttcgagatgcgggtctccaattgggcatatggcgtgcagatcgactccgttcacgttgcccccggggagaagctggtcaagataccagattttggccgccggatcgaggtgattggcgacagtctcgctgcgggcatgtacacgacgtatgaagggttgtcgagttgggcctag

SEQ ID NO: 1351 - DNA, 1251 bp, Myriococcum thermophilum
atgcgcctctcactcttactctacggagcagccttgtcgctgaaggaggcgctggctactcctccacatgattcgcctggtgaaggcccggacgagaatgggaaatactggatctatggggagggaattgcggccgccttcattccatatggtgcctccatttccaacctcatcattgaagacaagaatggaattccgcgcgacctcgtgatgggcttcgacaaggccagcgactacgccaatgacgaatcgcacccacatcttggcggcgtccccggccgctatgcgaaccggatcaagaacagcacctttgagattgatggcaagacttaccgcgtctcggccaatgagaatcccactgccgagcacccagacgggctcaataccctccacggcggtaaagaagggtgggattggcgagacttcgaagtggtcgcacacaccaacgagtccattaccttttccattgttgaccccgacggcaaggaaggcttccccggcgaggtcatctcatacatcacttacacaatgggcaagttgacctgggacgcgaagatggtggctatcgcgacgaccaagaagactcccatcatgttgagcagtcacacgtactggaacctcgacggctttgccaacgatgagaccgataccatcttgaaccacaccttccacctgccgtacagcggccagagggtcgacgtcgacaacattctgatcccgaccggcaagatcctgccaaaccctaagggctctgtcaacgacttctggagcgctcctaagcagatcggtgatggcttcaatgacccggagatccatggaaactgtggcttcaattgcactggctacgataactgctggctcgtcaaccggccgggcgcgcacgactggcgcgccgacggagcctacgtcgccagcctatcctcggcatggtccggcatcaggctcgacatctattccgaccaggatgccttccagatgtactcttgcaacggccaggacggcactttcccgttaaagtcgactcagggcgtcagaggtcacgccaggcgcaacactgacgatggtcatgccaacgagccagcccggactgtgccaaagtatggctgtatcgtcctggaggtggaggactacatcgacgggatcaatcaccctgagtggggccggctggagaagcaggtgtttgggcccgggagcgatccgtacgtgctgcagattagccaccgcttctcagtagacaagggcgacgcatga

SEQ ID NO: 1352 - DNA, 2127 bp, Myriococcum thermophilum
atgcgggccgtatctcttctcctcgtgctgtcctccctcgcggaggcggtgccggttggccaacgccgcagggttgtccaatcgttcaatgtgcaccggaacaagagctctgatacaacacctctgcaagtgggaaatggcaactttgctttcggcgccgacgtcacggggctgcaaacctttaagccctatgccatcatgtcaacatggggctggcacaacttcagcctccccacgacacccgggcagacttctacggacgactacacgggggtgcaattgtggactcatggtagactcgtcacctacgagattccgaacccgaaccagagcgacatctcaaactggctcagggagaatccccatcggctgaatttgggccgcgtcggctttgattttggacgtgataacgtcaccgaggaccagctgaaattcaagtcccaggagcttgacatctgggcggggaagctgtcttcgtttttcgtatatgatgggcacccggtcagggttgagacttgggctgaccctgactccgacactgtcgccgtcaacatcaagtcaagcctcctgaggaaatgcctaggcctgttcttcgatttcccttaccccgacaaggagaagttcaacgccccatttgttggccagttcaacctcacatctcaacactcgaccgcattggagagactatcgcgtgactcagccaggatcaggcatacgctacaaaacatgacctattacgtccacatctcatgggacggccatgggagggtgacaggcccggcggagggtagccatcgctacttcttcacgtcacctcaaaccaacgtccaactgaccatcaccttttccccctcgacaaggaatccccatccgaccacctatcaccgcgtcacctctgcctcacgcagctggtggcgtacattctggtctaccggtgccttcatcgatctaacctcagtccgccatgacccacgtgcccgagctctccaacaacgcatcatcctgtcccagtacctcaccgccgtcaactcggcctccgactacccgccgcaagagtccggcctcgtcaacaacggctggcacggcaaattccatctcgagatggccctctggcacgcactgccatttgctcgctggaaccacttcccgctcttctggcgcagcatcccgaacacctacgcacgcctgctcccctcggcgcgtgcccgcgcaaagaaacagggctacgcaggcgctcgctggggcaagatgatggcgccgctgtcggtggcccccggcgggcccagcgcgccgggcgacattaacgcattgctcatctggcagcagccacacccgctctacttcgccgagacggaatggcgggcgtttcccaaccgcacgacgctggagcgctgggacgaggtcatcacggccaccgccgacttcatggcctcgtacgcctggcggaacgccacgacgggccggtacgacctcggcccgcccatgtaccccgtctcggagaacacggacccgatggccacgcggaacccgacgttcgagctggcgtactggcggttcggcctggacgtggcggcgaggtggaaggagcggcaggggaagccggtgccgggggagtgggtgcgggtgcgcgacggcctggcgccgctgcccatggtcgacgggacgtacgccgtgtacgagggcgtcgagggcatgtggacgtcgaacgcgacgaccaacgaccacccggccatggcgggcatctacgggctcctgccgccgccggcgagcggggagcctctggacatggacgcgctcaacaagacggcggggaagatcagggagctctgggcgctcgactactcgtacggctgggacttctccatgctggcgatgaactcgctgcggctgggcgatcccgaccaggcggtcgagtacctgctgcacccgatcttccagttcgatgatgcaggttatccggttggtggttcacgggtcccaacgccgtacttccccaactcggcctcgttgttgatagccacggccatgatggctggtggctgggacgggagtgaaggcagcacaggacattggcccaagtcgtgggagaagcatgtgcgtgtggatgggtttacgccggcgttgtag

SEQ ID NO: 1353 - DNA, 1074 bp, Myriococcum thermophilum; identical to SEQ ID NO: 1047

SEQ ID NO: 1354 - DNA, 603 bp, Myriococcum thermophilum
atggtcactctcaacagtcttgtcactgccgcgggcatggccctcctggctagccagaaggcctttgctgcgcagctcactagggtcgactaccctaataatgccacgtcccgggcagagatgtacatctatgttcccgataacgttgtcgagtcgccgccgctggtggtggttgtcccccagcaatacttccagaacgcggcgatcccgtggaagcaggggtcggacagcaaggggtacatcacgctgtggccgtcgtcgccgaacccggggacgtgctgggacgtgtcgtcgccgcagtcgctgcagcggggcggcgggggcgactcgacggccatcgccaacatggtgcagcacgcgctcgacgagtacggcgccgacccggcccgcgtctacctgacgggcggcagctcgggcgccatgatgggcaacgtcctggccgccacctacccggacctgttccaggccgtcagcatctactcgggcgtgcccgccggctgcttcgtcagctcggccggccaggtcgccgcctggaacaatacctgcagcggcggccagagccgggctagtcctgagcagtggtacgtgctgatttctctctag

SEQ ID NO: 1355 - DNA, 876 bp, Myriococcum thermophilum
atgctcgctcgctcgttattctggttcgccacctcagcggcgacatgcctcgccgcctctttgcaggaggtcaccaactttggtgataacccgaccaatattcagatgtacatttatgtgcctgatcagctggctgccaaccctccggtgatcgttgcgctccatccctgcggtggtaacgctcaacaatggttcagcgggacgcaactgccgtcgtacgccgactccaatggcttcatcctcatctaccccagcacgccgcatatgagcaactgctgggacatccagaacccggacagcctgacgcacggtcagggcggcgacgcgctgggcgtcattagcatggtcaactacaccctcgacaagtactcgggcgacagctcgcgcgtgttcgctatgggtttctcatccggtggcatgatgaccaacacgcttgctggctcgtatccggacgttttcgaagctggtgctgtgtactcgggagtggcctttggttgtgctgcgggtgccgaatccgctacgcccttcagccccaaccagacgtgcgcccaaggcctgcagaaaacaggggaggagtggggcaactttgtccgcaacgcgtatccgggctacaccgggcggcggccgcggctgcagatcttccacgggctcgacgacacgctcgtccggccgcagtgcgccgaggagtcgctcaagcagtggtccaacgtcctcggggtcgagctgacgcaggaggtgagcgacgtgccgtccgcggggtggacgcagcggatctacggcgacgggacgcagctgcagggcttctttggccgcggaatcggccaccagtcgacggtgaacgagcagctgctgcttgagtggttcggtctgctctaa

SEQ ID NO: 1356 - DNA, 663 bp, Myriococcum thermophilum
atggtctcgttcactgccctcctcacggccgtcgccgccgccgtgtccacgacggctagcccgcttgaggccctcaagcgcggcatccagcccggcaccggcacccacgacgggtacttctactcgttctggactgacggccagggctctgtcgacttcaaccccggcccccgtggctcgtacagcgtcacctggaacaacgtcaacaactgggtcggcggcaagggctggaacccgggccccccgcgcaaggttgcgtacaacggcacctggaacaactacaacgtgaacagctacctcgccctgtacggctggactcgcaacccgctggtcgagtactacatcgtggaggcgtacggcacgtacaacccgtccactggcgccggccggctgggcaccatcgaggacgacggcggcgtctatgacatctacaagacgactcggtacaacgccccgtccatcgagggcacctccaccttcgaccagtactggtccgtccgccgcgagaagcgcgtcggcggcaccatcgacacgggcaagcacttcgacgagtggcgccgccagggcaacctcgtcctcggcgactggaactacatgatcatggccaccgagggctaccagagctctggttcggccaacatcgaggtccgggaggcttcttaa

SEQ ID NO: 1357 - DNA, 1032 bp, Myriococcum thermophilum
atgagattttcggtcctttccggaattatcaccaatgcgctgtccgtctcggcaggcaccatcctgtgggatggtcgcttcaatgacctgagctcctcaacggaccttgaaaaatggtcgtggggcaaccaggtcggcccttaccagtggtacatccatggcccttcttcggtgacggcctatgtcaatctgtcgcccgattacaagaacccggcggactctggctccaaacagggagctaagatcactctggacgacacggcctactggaacggtcagaacatgcgccggactgagctgattccgcagacgagcgcacccatcaaccaaggcaaggtgtactaccacttctcgctgatgcgcaaggacaccaaccccccggcgacgacgcgcgagcaccagattgccttcttcgagagccacttcaccgagctcaaatccggcctgttgtcgggcgccccgggcgagtcggactcgctgctgcgatggtgcgtgggcggccagacgcagtggagcaccgagtgggaggccgacgtctggcacaacgttgcctatgagatcgacttcggcgccaacacggtcggcttctggcactcgaccggcagtgatcctctgacgcagaaggtcgcccccgtcagcgcgagcaccagcagcaacggtgccgactggcatgtcggcgtgctcgagcttccgcgctcgggctaccctgacactgtcgaggacatttactggtctggcgtgtacatcgagagtggtagcatcacgactaacattgcgggtcccggtgctccatccgacggtggcaacagcactactagcattactacggctctcccgtcgacaacatttactacttcgacctcctcgactaccacctcctcggcgccagccacttccaccacttcgggctctggtggttgcacagcagcgcagtgggagcagtgtggtggtattaatttcactggctgcacgacgtgtgctgcaccatacacatgcaactttatcaacgactactattcgcagtgctcttaa

SEQ ID NO: 1358 - DNA, 2364 bp, Myriococcum thermophilum
atgaagctcttcagccgcattggggcaaccgccctagcggcgacgttgtctctgcagcaatgtgcagctcagatgacagaggggacctacaccgatgaggctactggtatcaccttcaagacgtggaccgctgccgagggtgctcctttcacttttggcttggccctccccgccgacgcgctggaaaacgatgctaccgagtacattggtcttctgcgttgccaaatcaccgatccctcctcgcccagctggtgcggtatctcccatggccagtccggccagatgacgcaggccctgctgctggtcgcctgggccagcgaggatgtcgtctacacgtcgttccgctacgccaccggctacacgctccccgccctctacacgggcgacgccaagctgacccagatctcctcctcggtcagcgaggacagcttcgaggtgctgttccgttgcgagaactgcttctcctgggatcaagacggcgccacgggcagcgtctcgaccagcaagggcaacctcgtcctcggccgcgccgccgccaaggacggcgtggagggcgccacgtgcccggacacggccgagttcggcttccacgataatggcttcggacagtggggtgcggcgctcgacggtgctacttcggagtcgtacgaggagtgggctcagctggccacgatcgagcctccaaccacctgcgatggcgatggccccggcgagaaggtgtgcgttcccgctcccgaggacacgtatgattacatcgttgtcggcgccggtgccggtggtatcaccgtcgccgacaagctcagcgaggctggcctcaaggtcctcctcatcgagaagggtcccccgtcgaccggcctgtggaacggcactatgaagccggagtggctcgagggcaccgacctcacccgcttcgacgttcccggtctgtgcaaccagatctgggtcgactctgccggcatcgcctgcactgataccgaccagatggcgggctgcgtcctcggcggtggcactgctgtcaacgctggtctgtggtggaagcctcaccccggtgactgggacgacaacttccccgacggatggaagtcgagcgatctcgctgaggcgaccgagcgtgttttctcgcgcatccctggcacgtggcacccgtcccaggacggcaagctgtaccgccaggagggcttcgaggtcatcagcaccggtctggccaacgacggctggaaggaggttgacgccaacgctgagcccagcgagaagaaccacacctttgctcacagcgtgttcatgttctctggcggcgagcgtggcggtcccctggcgacgtaccttgcctcggctgcccagcgcagcaacttcaacctctgggtcaacacttcggtccggagggccgtccgcagcggcagcaaggtcaccggcgtcgagctcgagtgcctcactgatggcggcttcaacggaaccgtcagcctgaacgagggcggtggtgtcatcttctcggccggcactttcggctctgccaagctgctccttcgcagcggtatcggtcctgaggaccagctggagattgtggccagctccaaggacagcgagactttcactgccaagagtgactggatcaacctccccgtcggctacaacttgatcgaccacctcaacaccgacctcatcatcacccacccggatgtcgttttctatgacttctacgaggcctgggacgagcccatccccgaggacaaggaggcctacctggaggagcgctccggcatcctcgcccaggcggcccccaatatcggccccatgatgtgggatcaagtcaccccgtccgacggcatcccccgccagttccagtggacttgccgtgttgagggcgacagctccaagaccaactcgacccacgccatgacgctcagccagtacctcggccgtggtgttgtctcgcgtggccgcatgggcatcacgaccggtctgaccacgaccgttgcggagcacccgtacctgcacaacgatggcgatctggaggccgtcatccagggcatccagaacgttgtggactcgctcagcaaggtgtccgacctcgagtgggtgctcccgccgcccaactcgacggtcgaggagtacgtcaacagcctgatcgtgtcgccggccaaccgccgcgccaaccactggatgggcacggccaagctgggcaccgacgacggccgcaatggtggcagctcggtcgtcgacctcgacaccaaggtctacggcaccgacaacctgttcgtcgtcgacgcctccatcttccccggcatggtcacgggcaacccgtcggccatgatcgtcatcgtggccgagcaggccgcccagcgcatcctggccctgcggtcgtag

SEQ ID NO: 1359 - DNA, 885 bp, Myriococcum thermophilum
atgcgtttccggatattttcaccactcctgcgtgcgctcttgttcgcgcatcgcgggcaggctaatattgagagacaggagccctattacacggacatccacacaaatatccgcttctacggccatgccgaacccggcggctatctctttggcttggtgatctccgaacgaccaaccacagacttcattgcacaactcgtcgtacctcttaaccacagcaaggggtggggaggtgtgagccttggggattccatgatcggtccactcctgcttgttacgtgggccgatggcagcgacgtgatgacagccgcccgcatagccaatgctcacagcgcagccagcgtagtcccatacacaaccagcccaataaccatatccccaatccgggcaggggctttcgccaacaacacgcacgtcttctccacctttctctgcggaggctgcatcaacaaccactccttcgacccgaacggggatggcgatgtcttcttcggatacgcctattcccgaacagccgtcgcagacccgtcggacatcgacaccactctctcggaccataccggcaaaggcggcgggtacggcgggttcagcgtagcgctgggccgtgccaagtcggccgcgtattatcgctatgcccagatggcagagattggtgactacggcgtcaagcccgaacctccacgcccgccagccacgcctacaacttcaacccctgcaccgatcccaaatcccacgcccacagacgagtggaggagcgggtgcaatgaggacgagtgcggtttggcgacagaaccagactacaaccacgagaaggtatcatggccgctgttgttcggattggtgaccatcgccgtgatatactttctccaaccgttcattagttga

SEQ ID NO: 1360 - DNA, 1185 bp, Myriococcum thermophilum
atgaagtacgtgcagtccgctgccctggcgctcgccgccacggccctcgctgcgccctcgcgcacgactccccagaagcctcgccaggcggctggttgcgagtcggccgtgacgctcgatgccagcaccaacgtcttccagcagtacacgctgcaccccaacaacttctaccgcgctgaggttgaggcggccgtcgaggccatctccgactcctcgctggctgagaaggccgccaaggtcgccgacattggtaccttcctctggctcgacaccatcgagaacattaaccggctggagcccgcgctcgaggacgtcccttgcgagaacatcctgggtctcgtcatctacgaccttcctggccgtgactgcgcggccaaggcctccaacggtgagctcaaggtcggcgagattgacaggtacaagaccgagtacatcgacaagattgtcagcatcctgaaggagcaccccaacaccgccttcgccctcgtcatcgagcccgactcactccccaacctcgtcaccaacatcgacctgcagacgtgccaggacagtgccgcgggctaccgcgagggtgtcgcctacgccctcgagcagctcaacctccccaacgtcgtcatgtacatcgacgctggccacggtggctggctcggctgggacgccaacctcaagcccggtgctgaggagctcgccagcgtctacaaggctgccggctcgccttctcaggtccgtggtatctcgaccaacgtcgccggttggaacgcctgggacgaggagcccggtgagttctcggacgactcggatgctcagtacaacaagtgccagaacgagaagatctacatcaacaccttcggcgctgagctccaggctgccggcatgcccaaccacgctatcatcgacactggccgcaacggtgtcaccggcctccgtgacgagtggggtgactggtgcaacgtcaacggcgctggcttcggtgtgcgcccgactgccgacactggcgatgacctcgccgacgccttcgtgtgggtcaagcccggtggtgagtctgacggcaccagcgacgagtcggccgagcgctacgacgacttctgcggcaagcccgatgccttcaagcccagccccgaggccggtacctggaaccaggcctacttcgagatgctcgtcaagaacgccaacccgcccctctaa

SEQ ID NO: 1361 - DNA, 1620 bp, Myriococcum thermophilum
atggagctccgatctgtcgtccgtctcttggtcctgtcggcctccattttcgcaccgggggtcctcagtgcattcgggtacacctcgtccggcaacaattatgtcatcgacgccggctctagcaatccgttagtcttttcagtgagcaagtcgagttgtgacatcaactcgatcaagtatcgcggcaccgagctccagtatagcaagaccggaactcacatcggctctgggctcggatcggccaccgtctcggtcagccagattagcggatcgtcccggtacatcaaggtaacatgcgtgacgtcgaccctgacgcactacatggtggtccgggagggtgaaagcatcatctacatggccacctacatcaccgccgagccgtcggttggcgagctgcgcttcatcgcccgtttgctgcctgacaaactaccctacgaatacccgtatggtgaagtttccaccacgagcggctccagcgcaacagtcgaggggtccgatgtcttcatcgtcaacgggcagaccagatccaagttttactcttcgacgcgcttcattgacgaggattcacactgcgtgtacggcggcagcgacctgatccacgtctgcatcatgacgccccaacaggagtcatcttcgggcggcccattcttccgtgacatcaactcgaacaacgcgggggattcgaccaatctgtacaactacatgaacagcggccatgtgcagaccgaggcgttccgcatggggctccatggaccgtacgccatgcagttctcgcgttccggtatccccagcgtgaagaacctagacgtctcgtggtttggcgaggtctcggtcaccggttatgtgccggcctccggtcgcggaaccgtgcagggaaccgcgagcggcgtgcagagcgggatggaaggagtggtacactggtacaacgacaacgcgcagtattgggccaggacgtcgtccaacggcgccttcacctcgccgctcatgaagcccggcacgtacaccatggtgctctaccagaccgagttcaagatcgccacggccacggtcaccgtgtctgcgggccagacgaccaggcaggacattgccggcaacttcaacacgtcccgcaacacgctcttccagatcggcgagtacgacggccaaccgaccgggttccgtaacgctgacaagttcctccgcatgcacccgagcgacagccgcatggacaattggggccctctgacctacacgctgggcagttcgcagttgtccgacttccccatggcagtcttcaaagaggtgaacaacccggtgaccatcaagttcgatctggccagcgctccgggggccgctaccttgcgcatcgccacgaccctcagctttgcgggaagccgtccccaagcaacggtcaacggctggtccggccccatcccagctgctccgaccaagatcgacagccgcggcgtgacgcgtggtgcctaccgtgggtacggcgagatctataccgtcgacatccccgccggcacgctcgtggctggcaccaacaccatcacaatcaattccgtttcaggaagcagtggagatggcttcctgagccccaactttatctttgatgctgttgaactctacactgcttga

SEQ ID NO: 1362 - DNA, 1107 bp, Myriococcum thermophilum
atggttgctccatctgttctcgtcttgctggctggccttgcatggccagcagttgctgcgcccgccacggagtcgtcaagagcaacaaaggccgggttgcgcctcatcaagacatctccggaagaccccggacaatgggtcaccgaggaacagaagattcgagacttcaaatcaaagaggatcggatttatcgacataactgacatcaccgatccggaagtgctcgctgcgctgtcagaacccgactctcctaatggtaacaacaccatctcgacacaagctgtctcgtacccgtccagcgttagccaccagtccgaggccaatccgctggtggcagcagtctcgactacgaatcccaagtcttggctgaagaccttgaccgaaagctcgtacgggaccgaggctggctcctggctgtttaacacaattaagagcgtcgccgcggccaacccttccattactgtgactcagttcacccactcctttaatcagccgtctctcattgccaaaatcccgggcactacatcagacctagtcattgtttcggcgcactatgactctaccggcggatcctcgacagcacgcggaccgggtgccgatgacaacgggtccggtgtcgtggtcctcctcgaggcgcttcgggtgttagcctcggctggattcaagcccaagaacactctcgagttccacttttacggcggtgaggaaggcggcctgctgggctcccaggctgtcttctccaactacaagtcggccggaaagagcgtgctcgccgtcgtcaaccaggacatggcaggctactcacccagcgggaaactgtctatttacaccgactacgttgactcgggcctgaccgcatatacccgagtcgttgctaacgcctacatcggatcgactacgagtgacgcttgtggatacgggtgctcggatcatgcttcggccaggtcctatgggttccctgcggcctatgtgtgtgacgagccgatggacacctcgacaccctatatccatactcctaacgacgcttactcgactatcatgtgggacgctgtcctccgtcacgccaagttcactgtcgcattcctggtggaggcttcctacctttaa

SEQ ID NO: 1363 - DNA, 324 bp, Myriococcum thermophilum
atgcagcttctccagagtgttgcacgggtggctgccttcctgggcctcgcccggaggcagttcgagcccgattcgtccccgtatgaggacccggagaccggcctgacgttcgcctcgtacaccagtgacagcggtatcacgtaccgtgtagccattcccgatcccgtccctgaggacaaggtgtacgacacgctccttcaggtcgtcgctcctaaggagctcggctgggttggctgggcctggggcggttccatgacgtacaacccgctcactgtcgtctgggcggacggggacaacgtcgtcctgtcgtcacggattgcctag

SEQ ID NO: 1364 - DNA, 846 bp, Myriococcum thermophilum
atgcggtggcctcttgcggcgctgcttgtctcggccctcgcggccggacaggcgcttgccaaactgacgttcacggtcgaggccacgcggaacggcgtcccgatcccagcgtccgaaatccggatggagccgttcgagcccggccgtacccgcatgggccccgtcaaggatgccccccggggccggcagcagaagatgcgaaggagcaatccccaggccgacagcgcaaactggtgcggcaccgtcaacagggcgcccttcggcaaggggatccagcttgcccacggcacgttccagcatccgtcttgttacatacggcccgagcatcctttcccccaggcggccgcgagctgggtaggcatcgacggagacacctaccgggacgctttgttgcaatcgggaacagtatgcaagattgaaaattccacgggagtcgtcatacacgaggcttggtggcaatgggttcccgaggtagccttcactatcaactctatgccagtggcaccgaatgactggttcgaagtcaccctcaatacaacatccaccacctcagcagaggtaaccatctccaatctctcgcaagggcagacgtattcgatccggatccagagcgggccggtcctggcgcgggtggacgtggactgggtgatcgagcggccctactacggcaccgctctcgccggcttccccaccttcaccgacgtctggttcgacgacgcccgcgccacgctcacggacgtgccgccgtccctgctgggcgtccagggcgctaagcagtaccagatccccggcctgtgcgcgtcccaggagtggcagagctggcaggaggtctcttggtctctatga

SEQ ID NO: 1365 - DNA, 2289 bp, Myriococcum thermophilum
atgcgactccttccagcattgctggctgttgccggcttcgttgagacggtgaagggacattggctcggggaaatatctcatcaaggctttgctccgttcgctggggccaactatcccgtctttcgtaatgtcaaggactacggcgcaagaggtgatggtgtaacggacgacacggcagctatcaatgctgccatcgaagccgggaacccttgcaacaggggctgtgcgtcgacgactcaaacgccagcggtgatctactttcctgccggcacatacctgatctcttcgtccatcaagccggcctacttcacccagctcatcggcgatgcttcgtctcctccgacgctcaaggcaacatccgactttgccgggtttggactcattgacaccaatccctactataccgaggtgctgaactggaagtctcaaaatgtgttcttccgccagatacgtaactttgtcattgacacgactaatattccacccgcaacggctgccaccggtatccactggcccacgtctcaggcgacaagcctccagaacatcgtcttcaacatgcccgcaacatctgacgtcgtccatgtcggcttgttcatggaagagggaagtggaggcttcttgactgacctcgagttcaacggcggtgccaccggcgcgagtatggggaatcagcaattcaccatgcggaatatgaggttcaacaactgcaagacagccatcatccaaatttgggactggggttggacatattccggcctatctatcaacaattgccaagtcggcattgacatgtcgaatggcaacacgatgaacgtgggctcggtcaccctgattgacagcaccttcaccaacgtaggggttgccatcctgacctcttggaccgagaacccgaaccctgccaccgtcgagagcctggtgctggagaacgtggtactggataacgttcctatcgccatccagggaccaaacggaaggacgctgctcgccggcgggtcgacaacgatcgatggctggggtatcggccacagctacggctcctctggccctaacccgtttgccggcccgatcactcccaacccgcggccgggaattctgctcaataacgggcgatacttcactcgctctaaaccgcagtacgaggacctgcccgtctcgtcttttctgtcggttcggtcggcgggcgccaagggcgatgccgcgacagatgacactgcggcgctgcagaacgccatcaacacagctgtatccgagaacaagattctcttcctcgactacggcatctaccgagtgaccaataccatcagcatcccgcccggcgccaggatcgtgggcgagacgtacccggtcatcatgtcgtcgggcgccttcttcgacgacatcgacaaccccaagccggtggtccaggtcggcaagccgggcgagcaggggcgggtcgagctgaccgacttcatcgtctcgacacaggggagacaagcgggcgcggtctgcgtcgaatggaacctcgccagcgaccccggcaaccccagcggcatgtgggacgtccatgtgcgcatcggtggcttcacgggcacgcagcaacaggtcgcccaatgccccaagacgccgggcaacccggccgtcaacgacaactgccttgtagcctatctgggtatgcatgtcactaagggggcgagcgggctctacatggaaaatgtgtggatatggatggccgatcacgatatcgatgatgctcagaacacccaaatcaccatctatgccggccgtggtctcctggtcgaatccgagaacggacccctctggctctggggcacggggtcggagcactttgtgctctaccagtaccagttcgtcaacaccaagaacatctacatgggccagatccagaccgagacgccgtactaccagccgacgccgaacgcgctggtgcccttcccggcggtgtcggcgctgcacgacccggacttcgaggcgcagtgcgcgggcgtggaggggaactgcgcggcggcgtggggcctgcgcgtcgtcgactcgagcgacgtgctggtgtacggcgccgggctgtactcgttcttcagcgactacagcacggcctgctcgaccttcgacgccggccagacgtgccagcagcgcatcacgtccatcgagggcgacgctaccaacgtcaacctgtacaacctcaacacgatcgggacccgcgagatgctgacgaggaacggggctcggatcgcttggttcgcggacaaccagaacacgtttgcgtccaacgttgccgtgtacaagagcaactga

SEQ ID NO: 1366 - DNA, 1089 bp, Myriococcum thermophilum
atgatgatcagatacgtattgctcctcttcctcaccctcgcttggccttgggtctctcaggctttcccggacattgacgaatccctcacagggggtttctcacctaccgacactcagcgcccaacagggagactcttagcagacatcaggaacctcccagacacctctctgtcaccggctggttggatgatcaagaacattctgctcggtaatcgcgccgtcgtatcacctcaggacctgaccgcaatctacacggtcccgggaccgctcaacagcactgaatgtcgccgtgagacctgctgtgtgtggaaacacatcacagaagttatggcggcgtccttccgcgacggcattgggagatgcaacgagcttgcacgccaggccatccgcctgggtttccacgacgctggcacgtggtcgagctcctcaggcgatggcggcgccgacgggtccatcctcttggcacccaaagagctggcacgggacgataaccacggtctcgaggtcgtcggggcacaaatggcagcctggcatggagaatggcgaatccacggcgttggcatggccgacctggtccagatgggtgcggcggtggcagccgcgttgtgtccaatgggaccccgaccacgcgttttcgtagggcgcaacgacagtgccacgcccgcaccccggggccggctccctacggcggacaccagcgacgccgctgcgctggaggcgctgttttctgataagacgatcagcctcagtgagctggttgccctcgtcggcgcccacaccgtcagcgtccaacgtttcttcgacccgctcgccgccgggtcctctcaggactccacgccaggcgtgtgggacaccctctacttcaaccagacggccagatcggatcctccggagggcgtgtttcacttcccaagcgacttagcactctcgcggtaccccgccgtgcgtgagctgtggcaaacgtttgcaaatgagcaggctatgtggaatgataactacgcggccgcatacctgcgccttagtctgttgggcgttgagcatatcaatgacctgacagagtgcaccggggtgttgccattgccaagttga

SEQ ID NO: 1367 - DNA, 912 bp, Myriococcum thermophilum; identical to SEQ ID NO: 1061

SEQ ID NO: 1368 - DNA, 1230 bp, Myriococcum thermophilum
atgcgccgcttaacctcgaaacttcttgctgccagcctcttggccgctacttccacggcggctcctcgccgttccgatttcgtgacggtcgagggagggatcttcaaactctcgggaaaagattttcactttgctgggagcaacgcttactacttccccttcaatgggaaccaagaagatattgaaaaagggttaacggccgctaaggaagctggactttctgtattccgtacctgggggtttaacgataagaacagtacatacgatcccaatggtttgcctcagtatgggggagaaggggccggtcctactgaagtcgtatttcaaagatggtatcctaacggcacttccatcattgacatcagcggtttcgacaaagttgtggaggctgcggagaagactggcatcaagcttcttgtagctttgaccaacaactgggccgattacggtggcatggatgtctacactgtcaatttgggcggcagataccatgacgatttctataccgtacccgaaatcaaggaggcgttcaagcgctatgtcaacgcggtagtgactcggtacaaagactcgccgaccatctttgcttgggagctcgcaaacgagccccgctgtggcgctgacggggttcgcaatcttccacggagtcccaactgtacgcccgaggttctctcgtcttggatctctgagatgagcgcatacatcaagagcattgatagcaaccatttagttacttggggaggcgagggaggattcaaccgcgaatccgacgactggtcgtacaacggtggggacggcggcgacttcgaccatgaactttcgattgagaccattgattttggtgtctttcactcctatcccgactggtgggataagactgtcgagtggacgcaccagtggatacgcgatcatgctgctgccggccgggaggctggtaagcctgtcgttcatgaagagtacggctggatgacgccagagaagagactggagtacaccggcaaggtcgacaacaggacaagagtcgaggtactcggcggctggcaaaagacgacggtcgaggagaagctggccgggagcatgtactggcagtatgggtattcggattactcctatggtagaaaccacgatgatgggttcaccatttatttggacgatgaggaagcaaggccgcttgtgtacgggcatgcaaaggacatgaattctcttaacgttcgccgtggccggaaatag

SEQ ID NO: 1369 - DNA, 1218 bp, Myriococcum thermophilum
atgaaacacgcctatagtaccttgctcgccggcctgtattggtcttggattgccaaggccctggacaatggggttggcttgacacctcacatgggatggagcagctggaacgtggcccagtgcaatgctgcctcggccaagtacgcccttgacacggctgagaagttcatttcactcgggctcaaggatctcgggtacgaatatatcaacatcgacgactgctggtcgctcccgtatcgcgacgggaacgggaagcttattcccgatccggcaaagtggcccgacggtatcaaaccagtcgtggaccggatccacgagctggggctcaagtttggtctgtatggctgtgcaggcgagaagacttgcgcaggttatcctgggagcgatggggataggtatgcggcctcggatgtcgctcagctggtcgagtggggagtcgatttctggaagtatgataactgctacaccccttgcttggacaacccaccgcctcagacctgtgggaggccggcaggaaacacccagcagtggtatgcccctatgcgagatgccatcctgagtgttcaagacacgcgcaagatccacttcaacctctgcaactggggacgtgacaacgtctgggagtggggttatgattacggacactcgtggcggatgagcgtcgacaactggggagactgggagagcgtcgagcggatcggcagtgcggcggccggtatttacgaatacagcaagcctggcgggttcaacgacctcgacatgctgtacctggggtcgccgaagctcaacaccaaccaggagcgcctccacttcggcctctgggccatcaccaagtcaccgctcgtgctggggctcgacctcaacaccatctcggactcgaccctcgagatcatccgcaacaagggcctgatcgacatcaaccaggacagcctcggcaaggccgccaccactttcaccccgcccggccagcccggcccggaatacggcaagatctacccgtactgggcgggcccgctcagcgacggcgtcgtcatcggcctctgcgccgccggcggcgcgggtacttacgccgtcgacttcaaggacgttccgggcctcggcgacggcagctactcgtgggaggagatgtacacgggcgaaaccggtactggcaccggcatctcgttcaacatcgaccaatacgacatgcgggtcatcaaggtgaagacggacgggtaa

SEQ ID NO: 1370 - DNA, 1524 bp, Myriococcum thermophilum
atgaggacccccgccgtttccctgctcgccttcgccctcccggcattggccacatttggccacggccatggcggcccaccggtattccggcccctggtgtcgtcgggagctctgcaatccctgatcaagaaggacgacctgctcgccggcgcccaagagctccaggacatcgccgatgcccacggcggcaaccgggccttcggcagcagcggccacaatgctaccgtcgacttcctctactacaccctcaaggcctgggactactacgacgtgaagaagcagccctttaaggagatcttcgcgtccggcactgcttcgctctccgtcgacggcgaggacattaaggccgagacgctgacctacactccggccggtgaggccaaagacacccccatcgtcgaggtggccaacgtgggctgcgaggccgccgacttcccagccgaggtggagggcaacatcgccttgatcaagcgcggcgagtgcacgttcagccagaagtcgatcaacgccaaggccgccggtgctgttgccgccatcatctacaacaacgaggagggcagcctgcagggcaccctgggcgagcccttcctggagtatgccccggtcctgggcatcaccctcgaggccggcaaggccatcctcgccaagctcgccgacggcaccgtcactgccacgctcaagatcgacgccatcgtcgaggagcgtctgacgtacaacgtcattgccgagaccaaggagggcgaccacgacaacgtgctcatcgtcggtggccacagcgactcggtccctgctggcccgggtatcaacgatgacgggtctggtatcatcggcattctcgccgtcgccaaggctctgaccaagttccgtgtcaagaacgcggtccgcttcgccttctggagcgctgaggagttcggcctgctgggctcgtacgcctacatgaggtcgatcaacagctcagccaccgaaatctccaagatccgtgcctacctcaactttgatatgattgcgagccccaactacgtctacgccatctacgacggcgacggcagcgccttcaacctgacgggcccgaccggttcggacgtgatcgagcgcaactttgagcgcttcttcaagagcaagcacgcgccgtcggtgccgaccgagttctcgggccgctccgactacgccgccttcatcgaaaacggcatcccgtcgggcggcctgttcacgggcgccgaggtgatcaagacggaggaggaggccaagctgttcggcggccaggccggcgtcgcctacgacgtcaactatcaccagcccggcgacactgtcgagaacctcgacctcgacgccttcctgctcaacaccaaggccatcgccgacgccgtcgccagctactcggtcagcttccgcggcatcccccgcgtagacgccaagaagcgccgctgggacgccttccgcgcccgcatgctcaagcgtagcaccggctcccacggccacgcccacttccactcgggcccttgcggcggcggtgcgaccatctaa

SEQ ID NO: 1371 - DNA, 1071 bp, Myriococcum thermophilum; identical to SEQ ID NO: 1065

SEQ ID NO: 1372 - DNA, 981 bp, Myriococcum thermophilum
atgaaggccaatctcctgttcctcgcgccgctcgccgtctcggctgcgcccgcggtcgagaagcgccaggcagctgagagcatcgacgagctcatcaaggccaagggcaagctctacttcggcacctgcaccgaccagggcctgctgcagcagagccagaatgccgacatcatcaaggccaacttcggccaggtgacgcccgagaacagcatgaagtggcagagcatcgagccacagcagggccagttcacctggggccaggccgactacctcgtcgactgggccaccgagaacaacaagaccatccgcggccacaccctcgtctggcactcgcagctcgccggctacgtccagaatatcggcgaccctaacaccctgacccagacgatccaggaccacatcgccgccgtcatgggccgctacaagggcaagatctacgcctgggatgtcatcaacgagatgttcgacgaggacggctctctccgccagagcgtcttctccaacgtgctcggcgaggactttgttgagatcgccttcaacgccgcgcgcgaggccgacccggacaccaagctgtacatcaacgactacaacctggacgacccgaactacgccaagctgaccaacggcatggtcgcccacgtcaccaagtggcgccaggccggcatccccatcgacggcatcggcacccagggccacctccaggccaaccagggctccagcctcgcccaggccatcaaggctctcgctgccgtcgacgtcgaggaggtcgccgtcaccgagctcgacatccagaaccacagcaccaacgactacactgccgtcgtccagggctgcctggatgagcccaagtgcgtgggtgtcaccgtctggggtgtccgcgattctgactcgtggcgtcctcagggcaaccccctgctcttcgacagcaactaccagcccaaggcgagctacgatgccatcgtccagctcctgaagcagtaa

SEQ ID NO: 1373 - DNA, 753 bp, Myriococcum thermophilum
atgcatcgctacgccttcctcgctctgctgccggcggccctcgccagggttccccatgctgtccgcgccgcagtcactaccacgctgccgcccagcgcaggtgccactgccacgtcggctcctatcaccgtcggcgccggccaaacctttgacggcggaatgaagaactttgatcgctccccgcgggtttgtgctgagcagaatgagacgggcgaggatgacgccatgttcgttctcgaggacggtgccactctctccaacgtgatcatcggtcccaaccaggcggaaggtgtccactgcaagggcacttgcaccctgatcaacgtctggttcgaggatgtctgtgaggatgccatcaccctcaagcaatcaagcggcacatcccggatcatcgggggcggcgcgttccacgccgacgacaagatcgtgcagttcaacgggttcggcacggtcgagatcagcgacttcttcgcgagcgactacggcaaggtggcgcgcagctgcggcaactgcgagaacaacggcggggcgcggcacatcgtcatcaacaacgtcgtcgccgtcgacggcggcgtcctctgcggcatcaacaccaactacggcgacacgtgcaccatctccaacagctgccagaacgacggcaagagctgcgaccgcttcaacggcaacaacaacggcgacgagcccgacaagctcggcagcggcccggacggccagttttgcatcgctaccaacctctccgagagctgctag

SEQ ID NO: 1374 - DNA, 1044 bp, Myriococcum thermophilum
atgttcctgctggggcttctcgctgcggcgcctgctgccgttcaggcgcagttcagcaccaccatgctgcggttcggctgctcgcagctgaccgttgaccggatcgaccccctcgttgagccgggtaatgttccttcggctcacgtccaccagatcgtcggcggtaacgccttcaacgcctcgatgcccaccgaggacatctcgaagctcgcttcctgcaccacgtgcactttctcccaggatctgtccaactactggaccgccaacgtctacttccgggcccgcaacggcagcttcaagcgcgtcccgcagatggtcaacgagatgatcggcgacgccaacgccggcatcactgtctactacaccgccccgggcccgaacacggtcaccgcgttcaagccgggcttccgcatgttctcgggtgacgtcaaccgccgcgaatcgaccggcctcggctcccgaatccagagctgcttccgctgctacgacgcccctaacttcggcggcaacatttatgctccatgctccgacccggagcgcgataccgagtctttcccgacaaagccatgccccggcggtatccgctcgagcgtcatcttccctatctgctgggatggccagaacctcgactcgcccaaccacatcgaccacgttgcccacccaatcgacggcccggcgccgttcgccatagttgatggccagtgccccgagtctcacccggtcaagatcccacaggtgcactatgaggttgtctgggatacgaccgcgttcaacgacccggcggagtggcctgaggacggctcgcagccgtttgtcttgtccactggtgatcccaccggttacggccaacacggcgattacgtcttcggctgggagggcgacgctctgcagcacgccatggacaaccgctgcttcggtccgacttgcaacggcctgagcacccagggcttcgaccaggctaacgcctgcaccattcccccggtggtgaacgaggacatggagggctggctcgacgagctgcccggcggacaccagatcatgtaa

SEQ ID NO: 1375 - DNA, 1080 bp, Myriococcum thermophilum
atgttcctgtccacgttgctgcttgcggcgcttgccgaggccctgcctcaatttccaggcagtggcaacgggccgaccatgctccggttcggctgctcccagctcgtcatcgaccggatcgaccccttggtgacgccgggacagctgccgtcgccgcacatgcaccaggtcgtcggtggcgacgtcttcaacgtttccatgccggaggacgacatcggcgccttggcctcctgcaccacctgcagctatgccgaggaccgctcgaactactggactgcaaacatgtacttccgcgcgaggaacgggagctacaagcgcgtcccccagattcctaacagactcctcttcggtgatgagttcaccaccaagaccaatggcggtttcgtcgtgtactacgtctctcccggcaaaggcggtgtgacggccttcaagcctggcttccgtatgctcactggcgaggcctcccagcgcgaaaagattggcgagggccggaagtcgcagtcgtgcttccgctgctacaccgggccgaactggggcggcgacgaccttgccccctgcgccgaccctaacctcgactcggaggagctgcccaacaagccgtgccacggaatccggtccaacgtcctgtacccaacctgctgggatggcaagaacctcgactcgcccgaccacaagtcgcacgttgcctacccgatcgacggcccgcacgcgttcgatggcatgggcgtaggcggacagtgccctgagtcgcaccccgtcaagattccgcagatcatgctcgagatcgtctgggacacgacgcaattcaacaacccggaggactggcccgaggatgggtcgcagccgttcgtgctgtcaatgggcgaccacaccggctacggccagcacggcgactacgtcttcggctggcagggcgactcgctgcagcgagccatggacggcggctgcctcggcgccacctgcgcggacctcaagacgcagacggtcgaggaggccaacaagtgcaccgtcccgacgcgcgttaatgaggacgttgatggatggttcgaccatctgcccggcctgccggttccgaactaa

SEQ ID NO: 1376 - DNA, 1626 bp, Myriococcum thermophilum
atgaggttatctttcaccgccctcgcggcgagcttcgccttcgcgccgttggccgccgcctttggcggccatggtatgagaatggacgtcgggcccgacgacgtctcggatgccgacctgcagaagcgagccgctctccgtggctggggcacgttcgatcagcttattgaccactccaacaagtctctcggcaccttcaagcagcgttactggtacgggactgagcactggaagggccccggctcgcccatctacctgatctctcccggcgagcagtctggtgacggcttcaaccgcacatggctcacgagtcaacgcctgtcgggccttatggccaaagagacaggcggtgctatcgtcattctcgagcaccgctactggggagagtcgtcgccctatacgaatctcacggaggagaacctcaagtacctcacccttgaaaacgcgctcaaggatcacatccactttgccaagacgtttgtcccgccatttgataagagcggcaacagctctgccgataaagcgccgtggatctttgtcggcggctcctattccggcgccctcgctggctggctggcggccaaggagcccggtaccttctgggcctactacagctccagcggtgtcgtcgaggccatcggcgacttctggcaatactttgtgcccgtgcaggaggcgacgccgaagaactgcagctcggacgtcgggctcgtcatcgactacgtggactatgtgctgacccatgggtccaagaagaagaagcaggctttgaaggctaagtttgggctgaaagagttgaacgacgccgactttgctgccacgctggagtggggtccctggcagtggcagtccggccaattttactcggaatatcaaccattttacctcttctgcgactacgttgagaatgtgtggcccaactcaacccacaaagtgcccggaccacacggcgtcggactgtccaaggcgctggatggctacgccaaatatatcaaagagcaaatcattcccggggcctgtgaggcggccggatatcctgaatggaagggcgagtacaacattgagtgcttcaagaactccgatccggacaacgtggcctacaaggacctcagccttgacaactggattaaccgtcagtggaactggatgctctgcaacgagccctttgaatggtggcaagacggcgcccctcgcaaccggtcgactcttgtctcgcgcctagtgactgcagattactggcgcaagcagtgtgccctgcacttccccaacggcgggtacagcctggcggaaggcaagcgggccaaggatgtcaacaaatggacgggcggctggagcgtcaccaacacgacgcgggccatgcacaccaacggccagtacgacccgtggcgtgatgccaccctgtcgagcaagttccgccccggcgggcccgtccagagcactgagcagctgccggtgcgtgtcgtcaagggcggcatgcactgctccgatctgtacggagccaactgggaagtgaacgatggcgtcaagaacctggcactggacgcgaccgaacagatgaccgagtgggtcaaggaatggtatgaggagaagggattgccggtaccttgggatcgttctaggaattag

SEQ ID NO: 1377 - DNA, 1314 bp, Myriococcum thermophilum
atggctcgcggcgttgctttcctgggtctcgcctcgctcctcgctggcgcggccaaggcccagactccgggcgagggtgaggaggtgcaccccaagatcacgacctaccgctgcaccaaggcggacgggtgcaaggagcagaccaactacatcgtgctcgacgccctgtcgcacccggtccaccaggttgacaactcgtacaactgcggcgactggggccagaagcctaacgagacggcctgcccggacctcgagtcgtgcgcccggaactgcatcatggaccccgtctcggactacagccagcacggcgtctcgaccgagggcacgtcgctgcgcctcaagcagctgctcaacggcaacgtcgtcagcccgcgcgtctacctgctcgaagagaacaaggagaactacgagatgctcaagctgaccggcaacgagttcacctttgacgtcgatgccaccaagctgccctgcggcatgaacagcgccctctacctctccgagatggacgctagcggtgcccgtggcgagcttaacccgggtggtgccacctttggcactggctactgcgacgcccagtgctacgtcacccccttcattaacggcctgggcaacattgacggcaagggtgcttgctgcaacgagatggacatctgggaggccaacgcgcggtctcagcacatcgcgccgcacccgtgcagcgtggccgggccgtacctgtgcgagggcgaggagtgcgagttcgacggggtgtgcgacaagaacgggtgcgcgtggaacccgtaccgggtcggcgtgacggactactacggcgagggcggcgagttccaggtggacacgcggcggccgttctcggtcgtgacgcagttccacgccaacgacgagggcaagctcgagagcatctaccgcctgttcgtgcaggacggccaggtgatcgagtcgtacgtcgtcgagcagcccggcctgccgcagacggaccgcatgacggacgagttctgcgacgccaccggctcgacccgcttcatggacctcggcgccatggaggccatgggcgacgccctctcgcgcggcatggtcctggccatgagcatctggtggagcgagggcgacaacatgaactggctcgactcgggcgaggccggcccctgcgacccggatgagggcaacccgtccaacattgtcgtcgtccagcccgacccggaggtcgtcttcagcaacatccgctggggcgagatcggctccacctacgagtccgccaccggcaacactaccgcttctgcccgcaaggtcaagagcaggcgcttcaggaggttctaa

SEQ ID NO: 1378 - DNA, 708 bp, Myriococcum thermophilum
atgtacatctcgaacctcgtctcggccctcggcctggccggcctcgccctggcaagcccaatggaggtggctaagcgtcaaggtgaaaagttgaggatcatgcccctgggcgacagcatcaccgaaatcacctgctggcgcgcctttgtctgggaccagctggctcaggccggcctagctgaccaggtgcagtacgtcggatcgcagaacagcaaccctgtgggctgccaaccccagacggccaactgggaccaacaccacgagggccactccggctggaccgccgtcgacatcgccaacaactggctggccggctggctccagagcacccctgccgatatcgtcatgttcatgctgggcaccaacgatgtcgtgggcgggacctcgacggaccagatcatcgctgcctacaccaagatggtcgagaccatgcgtgcgtcgaaccccaacatcaagatcattatcgacctcgtcatcccattgcccttcatgaacgcgccgatcgaggccatcaacgcgcgcattcccgagtgggccgccagcctcaactcgaccgagtcgcccatcgtcatcgccgactgctaccagggcttcaccaactccatgctccgcgatggtatccaccccaacctacagggcgacgagctaatcgcctcgcgcgtcggcccgctgctgctggactacgtcaagcagtcgttgggtcagtaa

SEQ ID NO: 1379 - DNA, 858 bp, Myriococcum thermophilum
atgcgtgtcgctctagccttgttggctctctactcgtcgctggcctgtgcgacgccagctccggcctaccccggcttcaagctggtatggtcagacaccttcccaggcgctgccggagctacgcccaacaagaagaaatggaacatcatcaccgacgtccaaaccaacgatgaggtgcagcactactcgacgtcgaacaagaacctgcagatctctggcggtgacacggtgcagctggtgccgttcaagaacagcaagggcaggtggacgtcggcacggatcgagaccaagaaggcctttacgcccaagaagggcaagctgaccatgttcgaggcgacgatccggttcggcgacacgccggcgatccacaagcagggcatgtggccggccttctggctgctcggcgattccatccaccacggcacgccctggccgcgctgcggcgagctcgacatcatggagacggtcaacggcctgccgacggcctacggcaccacgcactgcggcaacggcgagaagggcgggccgtgcaacgagcccttcggccgcggcggcgccgttcccctgctcgactacgactggcacacgtggtccctgcagatcgaccgtaccaacaaggagggcggctggaaggccgagaccatccgctggctgctcgacggcaacgtcttccacgaggtccgcggctccgacattggcgatcaggccatctggggcacccttgcccactcgcccatgttcatcatcctcaacgtcgctgtgggcggtacctggccgggtgctcccaacgccttgacggctgatggctatggcagcatgatggaggttgagtacgtggctgtgtacacgtcctcttaa

SEQ ID NO: 1380 - DNA, 1191 bp, Myriococcum thermophilum
atgaagcttcttggtctcgcagcgctcctccaccttgccctcgcggcaccggtgatcaagccccaggggctccagctgatcccggacgagtacattgtgaagctgaaggatggtgtgtccgagagcatcctcgagaacgccatccggcagctccaggggagcaagaccaagcatgtctaccgcgcaggccggttcaagggcttcgctgccaagctgaaccagcaactggtcgagaagctgagcatgcttcctgaggtcgaatacatcgagcaggacaccgtcattaccacccagacgatcgtcacccaggaagacgcgccctggggtctggctcgcatctcgcaccgcgagctgggtcccacttcatacgtgtacgatgacagcgccggcgagggcacctgcgcctatgtcatcgacacaggcatctacgtggaccacaatgcgacaacactgacgctgcaaccccaggagttcgaaggccgcgcgacgtggctgactaacactatcgacagcagcgactccgacggcaatggtcacggcacgcacgtggcgggcacgattggcggcaagacgtacggcgtggccaagaagaccaagctgttcgcggtcaaggtgctcaacgcaggcgggtcgggcacggcgtcgtcggtgattgcggggctcgagttcgtcgcgaatgacgcgccacagcgggtggcctcgggcgagtgccccaacggcacggtgggcaacatgagcctcggcggcggcaggtccgatgccatcaacgccgccgccgccgccgccgtcgacgccggcgtcttccttgctgtcgccgctggcaacaacggcggtgatgtcagcttgatctcccctgccagcgagcccagcgtctgcaccgtcggcgccactgacgatgccgacatccgcgcctacttctccaactacggcagcctggtcgacatctttggtcccggcgtcgacgtcctcagcagctggatcggtggtcctgatgctactaacaccatctcgggcacttccatggcaaccccgcacgttgctggcctcggcgcctacttcctcgccctgttgggttacaaggatcccgaggcgctgtgcgagtacatcaaggagacggccaccatcggcaccgtcaccgacattcccagtgacaccatcaacgccattgcctacaacggtgccacctcttaa

SEQ ID NO: 1381 - DNA, 2637 bp, Myriococcum thermophilum; identical to SEQ ID NO: 1075

SEQ ID NO: 1382 - DNA, 753 bp, Myriococcum thermophilum; identical to SEQ ID NO: 1076

SEQ ID NO: 1383 - DNA, 1971 bp, Myriococcum thermophilum
atggctccgtcgatgcttcggttgggcgctactgccctagcttgtgcctcaagcactctcgctggcgagatttaccagctcaaggagtcatataacccgtccaacttctttgacaaattcaacttctttagctctccggaccccaaccagggttttgtccagtacagaagcagggaggatgccgccaatctcggccttatccagagcactgaggatgaggtaaccatgaaggtcgattcgaccaacgtcgccgagggcggccggagtagcgtcaggatcgagagcgtcaacacctacaactcgggcttgttcattgccgacttctcccacttccctaagcctgcatgcggcgcttggcctgcttactggatggtcggccccaactggccgggggatggcgaggtcgacatctacgagggctggaacttgaatactgccaacaaggttgtgcttcacacggacggccctgatgccgtgggttcttgcaccgtcaatccggaggatttcacggcctcgatgcgctacagcaactgctggtatgaggctccggatcagccgggtaacacgggttgcgcagcggaccaggcagatggaacgtttggcagcgctgacggagcagtctacgccactgaatggagcgagaccggcttcagggtctggtcctggacccacgatgccgttccctcggacgtgaagagtggccagcctgacccgagcacatggggcaagccggtgttcgccgccggaggtaacacttgcgacgtcacaaaggccttcaaagatatgcgcatcatcctgaacatcaacttctgcggcgatgctgccggcggtctctggggcgagacctgccaggcgaagaccggggaggctcagtgcgcccagtatgtgcagaataacccgaaggcttacgaacagacctactggaagattcgcggcatcgacgtgtaccagctcgagacggccgagccgagcacgactaccgtctccagcacctcgaccacgaccagcaagtccagcacctcgaccaccgccgcttcttcctctacgaccactaccgacggcaccacgagcgccacatccaccaagtcgactgctcagacctcgactacggcttcggagacctttacttcagatgccaccacggacagcgccaccgagaccgtgacctcgacctccacgggcggagttgctaccgagactgcgaccgagaccgagagcgaatgctccgacgatgtctccgagacggccactgccggccccaccgacactctcacggagggtaccgtcactgccacgcccactggctcgttcactgaagtgacggctaccgcctctaccacggagttcaccacgtccaccatcttctcgaccgtcacgtccaccatcacctcgtgcgagtccaccgtggtcgactgccctggccgcacagttaccagcgtcgtcgttatcagcaccactgtctgccctgtgacagatgtcaagccgaccgagaccggcgtccccgataccagcgctccgggtgctggcaccccgagcacagacgtccccggaaccggtgtcgttcccacttcgagcgtgaccgcccctggcggttcgttcggaaacgagaccaccttccggacgttgaccaccgcctcccgcacaaccaccgtcgtcgtcccgcgcccgggaaataacacgacgacgagcggcggcagcaccactgccactaccaccaccggcggcgtgcccagcttcgtgaccccgccggtcgcctcgagttcggatgccctcgacgagcccgtgcagccgccgcagccgaccaccgacacggaagcgcccgtaccgcccgtcgagatcgtgaccagccctaccccctcgcccacgactagcggatttccgccaatcgtgactgctggcgccggcagggtggctgccaggagcgcggtgctgatgggtgttggtgctgtggtggccttggccaatctttaa

SEQ ID NO: 1384 - DNA, 741 bp, Myriococcum thermophilum
atgaagctctctctcttctccgtcctggctgctgccctcaccgtcgagggtcactgcatcttccagaaggtctccgtcaacggagcggaccagggctccctcaccggcctccgcgctcccaacaacaacaacccggtccaggatgtcagcagcgaggacatgatctgcggccagccggggacgacgtcggacactatcatcgaggtcaaggccggtgacaggatcggtgcctggtaccaacacgtcatcggcggcgcccagttccccggcgaccccgacaacccgattgccccgtcgcacaagggccccgtcatggcctacctcgccaaggttgacaatgccgcaaccgccgccaagaccggccttcagtggttcaagatcttcgaggatacctttgatcccagcagcaaggtctggggtgtcgacaacctcatcaacaacgacggctgggtgtacttcaacatcccggagtgcgtcgccgacggcaactacctcctccgcgtcgaggtcctcgctctgcactcggcctacacacccggcggggctcagttctaccagtcctgcgcccagatcaacgtgtccggcggcggctccttcacgccgtctcagaccgttagcttcccgggtgcctacgacgccaacgaccccggcatcaccatcaacatctacggcgctgccggcgagcccgacaacaacggccagccgtacaccgcccctggtcccgcgcccatctcctgctga

SEQ ID NO: 1385 - DNA, 1260 bp, Myriococcum thermophilum; identical to SEQ ID NO: 1079

SEQ ID NO: 1386 - DNA, 1032 bp, Myriococcum thermophilum
atgcgtctctcctgggttcttgttggcgcttggatcgccctggctaagtcgcacaaaggccacaatttcaagacgttggtcactttcggtgacagctacaccgacaacggccggttgggctattacatcaaccatggtgggaaggcgcctccgccggggacgatgcacgatgagacgaccacgacggcatctggcggcttatcatgggcccagttcgctgccagggatgccggggcgacgctgatggattacgccgtcggcggtgccgtctgctccaacaaggtcgtttcacggtacttcgacgccatcaaccggaccttcccggccatctttgacgacgaacttccgtccttcgaggccgacgtgtttttcaggtcgctctatcctcatcggacggccgagaacacggtatacgctgtgtggatcggcaccaatgaccttggctggggcgctttcctgtcggactcgcagactcccggcaagaccatcagtgactttgtcagctgcgtcttctccgtattcgatcgtgtctataagacaggcggacggcgcttcgtcatcctcaacgcggctcccctggagctggccccgctgtacgcgccgcccgagaacggcggcacgctcgactcacagttctgggacactaagagcaagtacaacatgactgagtacagccagaagatccgtgagtattcgacgagcgtcaacaccatgctagagtacggcgtccctgtcatggcatccctgaagaatcgctggccaagagcgacggtcgacatcttcgatgtccacagcctgttcagcgacatctataatgagcccaccaagtacttggatgagccgcacaatgtcaatggttactaccaccaatgcgaaccggctggcagcccatgcgtcgaccagcctgggcctctgaatgggtatatgtggtttgatgagctacatccctccaacaagaccagctccatcatcgcgcagaacttcatcgacgtggtagctggaaagtcgaaatatggaagacgcttccgttaa

SEQ ID NO: 1387 - DNA, 1122 bp, Myriococcum thermophilum
atgcttttcaccaaggctgtttcaggcctcgccctcctcgcgggcctcgttgccgcccacccggggcacgatgctagtaaggaggctgccgagcgccgggcttacctgcaaaacgccaagcggacctcgctcgcccactgcgccgacaagctgagggcccgcggcaccgaggctcgcaacattgcccgtcgcaaggcggtcgttgagaatgcccgtcagaagcgcggcatcaccaagcgcgactttggcgacgtcctggacaccaaccacaacaagaccactgagggttacacccccgagaccgatcctgccaccttgttcgctggctacaactcgtgcctcctgacgcccgaggtcacccagggcccgtactatgtcgctggcgagtacgtccgcgagaacgtggttgaggaccaggccggtctgcccctgctcgtggaataccaggtggtcgacgtggccacgtgtgagccggtgccggaggtgtacctcgagatctggcactgcaacgccacgggcgtgtacggcggcgtggtggccgggggcaacggcgactcgtcggaccagagcaacctcgacaatacgtggctgcgcggcatccagcctaccgacagcgagggcgtagcccagttcgagaccatcttcccgggccactacatcggccggacgacgcacatccacgtcatggtgcacaccaacgcgaccctgcaagccaaccagacgctcggccacgagaactacgccagccacgtcggccaggccttcttcgaccaggcgctgatcgacgaggtggagaagctggagccgtacacgagcaaccagcagccgctgaccaccaacgagggcgacttcatcatggcccaggagtcggccaccgacggtgtcgaccccgtcatggagtacacccttctcggcgacgacctctcggacggcctgttcgcctggctcgcctttggcatcgacaccacccgctccgagcccgtcaacccggccgtctaccttgaggagggcggcggcaggcccaaccccaacgccggcggccccggtggtccgttccctaccggcttcccgaccggtggtttccccgtccccactggcaacgcccgccgcgcccagaactaa

SEQ ID NO: 1388 - DNA, 2388 bp, Myriococcum thermophilum
atgctgctaaaccgccgtctcctcgtagctggcgtggctggcctctgggccgccaccggcgttcaagctgattgctcgtccgatctagtaattgacgacttcacggaatggctaaccggcctcaacaacctcggttctgaaaacggcgacgatgcgaccatgacagccatcgcagcgtcccccggacgggtcgtcttcattccaaaagacgatgactcgtacttttatgagtcgttcccgtgccagcaggccgccagcgagggatataccgccattgagttccccgtcctggggccggagggcggctccttcgcctttgagctgcagaccacgttcaactgcgaccaagaagggtcttacaacagctcttggactgaagtggccgacctgactggcgagtggcagaccatcactctccccttagaagggtgggacaacgagcccaactacgacggcatcgtcggcttggtctggtctaccttctcggagaacggaattgagtggtctgttggcaacgtcactctcgtatgtggaggcggaggagatggaggaggtgatgatgacgatgaaggggaacagagctcaacggttgacacccagccgaccgcaacaagtgcgactccaaccgaggacccaacttcctcgcccacctctccgccggacacgtgctccaacctgctgattgacgactgggcgtcccagtcccgtctgaccttcctcggctacaacgccctgctgcagacctcgagcgacgacgcgtccatgtcgtcggtcgtcgtcagtgacaacagactcaccctgacgcctggtgaagaatactcgtacttctacagccagttcggctgcctcgacgtcagcgagcagtatggcggcatatctttctccgtcaaggcggagaggagaactagtttctccgtgacattagcgtacgtgacggagtgcggatcccagagagaggagagcatcacaaagtcgacagacgagctggactggacctttgacggcaccgagaagctctactcggtccccttctccgtcttcgaagacgtcgacactagcaagctcaccatgatttactttgacgacttctccggccccgtcacgttcggtcccatgtccttctactgcggctcgaagccgtccgagtacgagctgccgtccgagacgccgacggctcccgacgtcacggtcacgacgacggcggcgccggccccgaccaagacgatggtgatcgacacgtttggcgatccggagaccaacgacctggggcagtggcacggcgccgacgaggagggcatcacgaccgactttggcaacaacgtcatggtcatccgcaccaacgactcggacctggcctggtacacgcagctgaccgaggactgcctggacctcggcgcctacgcgggcggctacctccacatcgcctactcgggcagcaacaagttcagcatcgccctgcagcagcacaacgccgactgcgacccggacatcaagccgtacccggagacgtgggactcgctcgaggcggcgcgctacgccagcgacgaagacatctacatccccatcaaccactttaacgtcgacctctcgcgcgtcatcggcttcgccctgaagggcttctacagcgccgagccgaccgagctgacccggatcgagatcgtcgacgagctgcccgggaactggccggacatcccgcccaagctggcctcgggccggctggtcttttcgtgcacgcggccgaactcgttcgccttcgccatcgacgacggcgacccgtcgctggccgaccgcgtcatggagatcgtccagcaggccgacatccccgtcaccttcttcaccgtcggcctgccgctgctcgacacgagcaacggcctggccgacatctacaagaccatggccgcccgcgggcaccagatcgccatccactcgtacacgcacccgccgctcgagggcctgcccagcgacgcggccatcgactgggagtacgtcaacgacctgggggcggtgcgccaggtcttccaggagtccaacacgcccgtcaccacccggtacttccgcccgcccttcggcaccgagggggcgcgcatgcgccagcggctggccgccaacctggacgacgccgacccttacctggtccagtggagcgtcgacgtcgaggactggctctgggccgagtcggacacgcccgagaagcagctcgacgccttcaagcgcgacgtcgccgccggcggcaacctcgtcgtcatgcactacctctacaactccaccgtcgacctcctgcccgagttcatcgaggtcgcaaaggccacgggcaagcgtctcatgcgtgtcgaccagtgcatggaggaccccaacgcgccgcctttggatgatgaagaggaagagtga

SEQ ID NO: 1389 - DNA, 648 bp, Myriococcum thermophilum
atggctactggtccggcaacgggtacgaggtcaacaacaacaactggggcaaagactcggcctcgagcggcagccagtgcacctgggtcgacagcagcagctccggcggcgtctcctggcacaccacctgggacctggcagggcggcgagaacaatgtcaagagcttcgccaactgcggcctgcaggtgccccagggcaggaccatctcgtccatcaacaacctgcagacgtccatctcgtggtcctatagcaacaccaacatccgcgccaacgtcgcctacgacctctttaccgccgccgacccgaaccacgaccacagcagcggtgactacgagctcatgatctggctggcaaagtacggcgacgtctacccgatcggctcgtccgcgggctacgtcaacgtggccggccaggactgggagctgtggacgggatacaacggtgccatgcgggtctacagcttcatcgcgcccagcccgcgcaacagcttcagcgccaacgtcaaggagttcttcaactacctcgagtccgcccagggcttcccagccagcagccaataccttctgatcttccaggccggtaccgagcccttcactggcggcgagaccaccttcaccgtcaacaacttctctgcgagcgttgcataa

SEQ ID NO: 1390 - DNA, 2442 bp, Myriococcum thermophilum
atgaaggcatcggtcgcgtggtgcctcgccggcatgattgccgtggccagcggccagaacgagccgtttcagagctatcccgactgcaccaaaccgcccctttccgagatcaaggtgtgcgaccggagtctgtcggatgcggagcgggcgacggcgctcgtggaggccttgacggaggaggagaaactgcagaatctggtgagcaagtcactcggagcgccacgaatcggcctgccagcatacaactggtggagcgaggcgttgcacggggtggcctacgccccggggacgcagttccggaatggccccggggacttcaactcgtcgacgtcgttcccgatgccgctgttgatggcagcggcctttgacgacgcgctggtcgaggccatcgggcacgtcatcggcaccgaggcgcgcgccttcggcaacgccggctggtccgggctcgactactggacgcccaacgtcaacccgttccgggaccctcgctggggccgtgggtccgagacacccggcgaggacgtgctccggctcaagcggtacgccgcctccatcatcaacgggctcgagggccgggcgccgtcctcgtctcccttcccgggagaaggaggtggtgaacaacaacaacaacaacaaccgccgaggatcatctcgacgtgcaagcactacgcggccaacgacttcgaggactggggcggacacacgcggcacgacttcgacgccgtcatcggggcgcaggacctggccgagtactacctggcgcccttccagcagtgcgcgcgcgactcccgggtcgggtccatcatgtgcgcctacaacgcggtcaacggggtgccggcgtgcgccaactcgtacctgatggagacggtgctgcgcgagcattggaactggaccgagcacgacaactacatcaccagcgactgcgaggccgtctacgacgtctcggcccaccaccactacgccgagaccaacgccgagggcaccggcctgtgcttcgaggccggcatggacacgagctgcgagtacgagggctcgtccgacatcccgggcgccgtcgccggcggcttcctgacctggccgaccgtcgaccgcgccctgacccgcctgtaccggaacctggtgcgcgtgggctacttcgacgggcccgagtcgccctacgcctcgctgagctgggccgacgtgaaccagcccgagtcgcaggagctggccctgcgtgctgccgtcgagggcatcgtgctgctcaagaacgccgacgacacgctgccgctgcccaccgaggaggacgaggatggcaatgccgtccttgccgggaacgtcgccatgatcggcttctgggccgacgccccccagaagctgtttggcggctacagcggcactcctgcctttgcccactcgcccgtctacgccgccaagcaactgggctggaacgtcacggttgccgacggtcccattctggaaggggatgatgccgaggacacgtggacggggccggcgctcgaggcggccgccgatgccgactacatcgtctactttggcggtctcgacacgtctgctgcgggcgagaccaaggaccggacgacggtgtcctggccggcggcgcagctggcgctgatcaaggagctggcggggctcggcaagcccgtggtggttgtccagatgggcgaccaggtggacgacacgcccctgttcgagctcgagggggtgggcgccatcctgtgggccaactggccgggccaggacggcggcacggccgtggtccgcctgctcgccggcgtcgagagccccgccggccgcctgcccgtgacgcagtacccggccaactacaccgacgccgtgcccctgaccgacatgacgctccgcccgtccgagaccaacccgggccggacctaccgctggtacccgacgcccgtccgccccttcggcttcggcctccactacaccaccttcaaggccgagttcggcccgcaccccttcttccccggcggaaacggcaacgagaccacggcgagcaggatcaaggcccggacgcggcaggcggcggcctcgacgccgatcgaggacctgctgagcgggtgcgaccggacgtaccgggacacgtgcccgctgccgccgctgacggtgcgggtgacgaacgaaggggagcggacgtccgactttgtcgcgctggtcttcgcgtcgggcgagtacgggccggagccgtacccgatcaagacgctggtctcgtacgcgcgggcgcgcgccgtcgagggccggggcggcgacgccaccctctcgctcgactggaccgttggcaacctcgcccgccacgacgagaacggcaacacggtcctgtacccgggcacctacaccctcaccctggacgagcccacccaggcgagcgtgcagttcaccctcgagggcgagcccgtcgtgctcgacgagtggccggcgctccccgagtga

SEQ ID NO: 1391 - DNA, 2334 bp, Myriococcum thermophilum
atgaggttcctcgcctcgacattattccttgcgtcagctgccctggctgccgaccacgggcgatcgagtttggaggatgctgtgtacaagaaccccaaggcctcgatcgaagatcgtgtagccgaccttctctcccggatgacgatcgaggagaaggcatctcagcttctccaaggcgatatccgcaactggatgaacgaggcaaccaacgagctcaaccagacaggcctggaatggagcacgagggttcggggaagtgccttttacgtaggcgtgccagttgcaaacgagtggctgtcaaaacacatcaaggctgcccaggattacatccaggaggagaccgacctcggcatcccagcctttgtgcagaccgagggccttcacggtcttcttgctcacaatgccactatttttaactcgcccataggactgggctgctcatggaacccatccctgattgaggagatggcagctgccattgccaaagaggcgcgggccctcggtgtcaaccagctttttgctccagtcgccgacctagcgcgggaactccgccacggccgagtagaggagatgttcagcgaggacggctatctcgccggggagttcgcccatgcctatgtgaaaggcgctcagtcggccggcgtcagtgccatggtcaagcactttgctgcatttggtgtggcggagcagggcttgaacaccggccccgtccacggcggcgaacgagagttgcgcacgatctatctcccgccgtacaagcgcgccatcatcgacgggggcgtctattcgatcatgaccgcctaccacagttacgacggcatccccgccgtgtctgatccgcacctgctcactgacattctccgggatgaatggggttacaagtactttaccatgacggatgccggcgcctcggaccgcctttgcgtggacttcaagatgtgcgcttcgagccccatcgataaggaagccatcgtcaagtacatcctcccgtccggtggcgacgtggagatgggaggcggatcgtactcgttcgagaagattccagagctcgtgaccagcggcacaatcaaggaggagctcgtcgatatcgctgtcgcccgtgtcctgagagccaagtttgagctcggtcttttcgaggacccttttccgggtctccctatcgaagaggcgaataaagtgatccacgcgcccgagcacgtctcccttgccaggaagatagacgaggaatccatcgtcctcctggaaaaccacaacaacgtcctgccgctgagcaagaacgcgtccgtggctgtcattggacccatggcgcacgggtacatgaactacggcgactacgtcatcgtcaattcttcgactcgtgggattacgcccctcgacggtatcaaggcggccagccgaggcaaggtcacgtacgcgaaaggctgtgagcgctggtccaattcgcaggacgggttctctgaggccatcgctgccgctgaggccgcagatgtcgccgtcgtcgtagtcggaacctggtctcgggaccagaacgagctctggcagggcctgaacgccactacgggagagcacgtcgatgtgaatagcctcgacctggtcggcgcccaggaggccctcgtccgcgccatcattgagacgggcaagccgaccgtggtggtcttctcgtctggaaagcccgttacagcgccctggatctcggagcacgccgccgccctcatccagcaattctacccttcggaacagggaggggccgccctcgcttccatcctcttcggcgacgtgaacccgagtggcaggctgagcgttagcttccctcacagcgttggtgacctgccggtttactacgaccattggaactcgggacgcagtacctcgccggatgccggcatcgcttacgagaacgggactcttgtttttgggcatcagtacgtcctgggagacccgaggcctctctatgagttcgggtacgggctgagctactccaagttcgagtatagcgatgtcagcgtcgacaagaccaccgtgggacccgaggacaccgtcacagtcactgttagcgtcaagaatgtgtcgaatcgagacggccaggaagttgtccaagtttacgtcaaggacctggtcgccagcgtcgttgtgccaaacattcgtctgaggggatttcaaaaagtgaaactgagagctggggagagcaaacaagtgagtatcgaggtcaaggtccaggatctgggtgtctgggacgcgaggatgcgatatgttgttgagcccggcgactttctgtttcttgttggtgcgtccagcaatgactttaggggaaatgttaccgttactctgaagtag

SEQ ID NO: 1392 - DNA, 2556 bp, Myriococcum thermophilum
atgttagccacggccatcctactaattgtgagctacggggcggccgaggctgccgcgaaatgggatgcgtctcgctttgcctggtatacgaccgacgcgggagatgacttcaagagcgcgctgcctatcggaaacggaaggctggcggccgccgtgtacgggacgggcactgagaagctggccctgaacgagaactcggtctggagcggaccgtggctggaccgggtcaacccgaactccaaggacgccttccccaggattcgagagatgctgatcgccgggaatattaccggtgctggccaggaggcgctagacaacatggcaggcattcccacctcgccgagggcataccaaccaacggcgaacctgacgatcgactttggccacaactccggaacctcggactacgtccgctggctagacaccttccagggcacggcaggggttaactacacgtacaacgggatcagctacagccgcgagtacgtcgccagctatccacacggcgtcctggctttccgcctgagcgccgaccaaccgggcaagctcaatgccagcttctccctctcccggagccagtgggttctctcacagagtgctagcgtcgacgacggtgagggatggcacacaatcaccctgagtgctgatagcgggcaggcgtcggaagccattactttttggtccgaggccaggatcgtaaacgcaggtggcactgttgccacagatggcagtatcatctccgtcgtgggagcggacacggtcgacgtcttctttgacgccgagacgacgtaccggcatcaggacgcagaggcggccgggacagagctgaagcagaaactagacgcagcggtggcggccgggtatgcggcggtacgcgaggccgccatcgaggactttagcgggctgatgggacgtgtgagcctggatctcgggtcgtcgccgccgtcggtaggggagcagccggtgcccatccgcctgaacaacttccggcaaaacccggacgctgacccggagctaatgactctcgtgttcaactttggccggcatctgctggcggcgtcgtcgcgcgacacgggccctcgctcactgccggctaacctacagggtatctggaacgaccggtacgacccgccgtggcagagcaaatacaccatcaacatcaacatccagatgaactactggcccgccctggtaaccaacctggccgagacgcacgagccgctgtttgacctgctgatgggcgccgccatcccgcgcggccgggccgtggcctccgccatgtatggatgcgagcagggcttcgtgctgcaccacaacacggacctctggggcgacgcggcacccgtcgaccgcggcacgccttacacggtttggccgatgggcggggcgtggctggcgatgcacgccatggagcactaccgcttcacgcgcgaccgcgacttcttggccgaggtggcctggccgatcctgcgggaggcggcgcacttctaccattgctacttgttcgagtgggactcgtactggaccaccggcccgtccctctcacccgaacacgagttcatcgtgccccctagcatggctaccgccggcgccgacgagggtctcgacatcagcccggagatggacaaccaactactgtaccagctgttcaccgacgtgaccgaggcctgcgccctcctcggcctcgtctccaactcctcttcctctgacgacgccgagacgtgtactacgacagccaagacctacctaccgcggatccacccgccaaggatacacccgaccacggggcggatccaggagtggcgctcccccgaatacagtgacacggagcccgggcaccggcacttctcaccgttgtggggactgtacccggggcggcagctgacgacaagcacagacctgctcgaggcggctgctgcgctgctggaccaccggattgagagcggatccgggtcgacggggtggtcgcgcgcctgggcggccgcgctgtatgcgcgattgccgggaagggagggcgacgcgtggcggcacgcacagcagctcgtcgccacctacctgctggataacctgtggaactctgacagcggccccggctccgtcttccaaatcgacggtaacttcggcttcgtcgccaccctggccgagatgctgctgcagagccacgagacggttcccgccccgtccttggcgcgcggtccaccggctcaaagcagcggtggtgatggtagcgatgatgtcggcagagggagaggtctgcgagaagagcaagagagagaggaggtatatgtggtgcatctgctgccggcgctaccgggtgacgaggtgccggatgggcaggttgacgggctggtcgccagggggggcttcgtggtgcaggagcttctctggagaggcggcaagtttgcaagggcgagcgtggtgtcgcagacaggcggcatgctcaaactcaaggtgcaggggagagagagcgggttcgccgtagacggtgtaagctatgacgcggagaagggaatcgagacgacagttggcggcgtgtatgagatcactcctttctga

SEQ ID NO: 1393 - DNA, 843 bp, Myriococcum thermophilum
atgaacagactccggtccatgatgccgtctgccacgcaaacctggacgtttgcgccgttgagccggccttacactcctagtccccaaaggcggaggctagagggtattgtgtttgacgttgacgggactctatgcgagccacagacatacatgtttgccgagatgcgctccgtcctcggcattcccaagtccgtcgatatcctcgaacacatctacaacctcccaaccgaggaagagcaacatcgcgcaatggagcagatccgtaacatcgagcggcgcgccatggagcaccaggtggcgcagccggggctaaccgagctcatggcctacctggactctcggggcattcgcaagggaatctgcacgcgcaactttgaaacgccggtccagaatctgctcagcaagtttctctccgggaccgtcttcgcgcccattgtgacgcgggatttccggccacccaaacccgatccggcggggattcttcatattgcccgtagctggggattggtgcggcggagcaccggcgaggccgggatcccctccgatcctgcagcggaggaagagcgtcggtcggctgcggaggagggcactcgcgcccgcagtggggaggccgatcatccaaatctggtacagacccaagtgggagaagaggttgctgacgcaagcgggttgattatggtgggcgacagcattgatgatatcacggcaggccggagagcgggggcaaagacggtgctgctggtgaacgatgtgaatcgccatctggctgaccatgagcatactgatctgacaataacacggctagatgagctgatcgacatccttgaaaatggattgctctga

SEQ ID NO: 1394 - DNA, 903 bp, Myriococcum thermophilum; identical to SEQ ID NO: 1088

SEQ ID NO: 1395 - DNA, 1320 bp, Myriococcum thermophilum
atgcgtctaatccaaatcgccgcaagcgcagcggcgctgctattcacaggtgccaatgccgacatcccacagctcccggtgccgcagtcctgcagcggcgtcaccaactcccggttccagtacacaacggcgtcgggctggtcggccttcaagattgccgggggtctgaagcaagtccggaccatcgtatgggacaccgagggcaacatgctggtcgccgagtccggcaggggcatctcggtgcactccttcggcgaagacggatgcatcaacagcactagcatgctcatccaggccaaccagctcaaccacggcttggccctgtcgccggacggcaagaccatgtatgcaagcggtgaaacgggagtctacagctggagctacgacccggtcacccggtccattagcaaccagaagaccctcattaccggcatctccacgggcatccacttcacccgtactatcgctgcggtccccgactccgacctgattcttgtccaagtcggtagcaactccaaccttgacatggccacgcaggacccttctgccggcagggcgatcatcaaggttttcgacgccgccgccgcacccgccaacgggtacaactacaacacggacggtgaagtctttgcctacggtctgcgcaacacgatcggtttcgttcccgaccccagcggcgtctactggggtgtcgagaacagcggtgacgacttcgcccggactgagaacgggcagcgaatcgacatccaccaggacaatccggcagaggagctcaataaccttggcaaccccctggaccccgagaggcgcaatgtctggtacggctacccgacctgctttaccgtctgggatccctcgccgttcagcggcctcaagactggcgaccagttcgttctttcccccagcgccacattcaacgatgcctcatgtgtcgaaaacggttccgtcccgccgcgcctctcgttccaggctcactccgcacccatctggaacaccttcaacgccgacggaacaaaaatgtacgtttcatttcatggttcatgggacagacagccacctactggcttcaaagttgtcgaaattccgttccagaaactcgacgatgggagctatgagcctgtcgcggcggcggacagccaggacgggtacaccgagattttcggtgcaccgaacccggaaagctgcacggccaatggtctcacaatgagcaactgcctccggctgacagcagctgcctgggacccgagtggccgtggcctctttgttggtagtgacaatagtgctgagggtgagattttcatcctaactccctcggcctag

SEQ ID NO: 1396 - DNA, 1416 bp, Myriococcum thermophilum
atggccaagaaacttttcatcaacgccgcgcttgcggccgccgtgttggccgcccccgtcattgaggagcgccagaactgcgccagtgcttgggctcaatgcggcggtagtgggtggcagggccctacgtgctgtgcctcgggctcgacctgcgttgcgcagaacgagtggtactctcagtgcattcccgacagccaggtgacgtcgacctcgaccactcaaggcaccaccagcaccaccagcaccatcaccactcccactaccaccactaccccgcccatcacgacctcctggagcagcatccccggtggtgcgacctccacggcgagctactctggcaaccccttctcgggcgttcagctttgggccaacgactattacaggtctgaggtccacaacatcgccattcccagcatgactgggtctctggccgtcaaggcttctgctgttgccgaagtccctagcttccaatggctcgaccggaatgtcaccgtcgacaccttgatggttcaaaccctgtctgagatccgggaagccaacgcggccggcgccaaccctccctatgctgctcaacttgtcgtctatgatctccccgaccgtgactgtgccgcagccgcgtccaatggtgaatgggcgatcgcagatggcggtgcggataattacaggggctatatcaacaggatccgtgagatcctcatcgagtactcagatatccggaccattctggttatcgagcccgactcgatggccaatatggttaccaacatggacgtggccaagtgcagcaacgccgcgtcaacctaccatgagttgaccgtgtacgctctcaagcagctaaacctgccccacgtcgccatgtatctcgatgccggccatgctggctggctcggctggcccgccaatatccagccggccgccgacttgtttgcaggcatttacaatgacgccggcaaaccagctgcagtccgtggtcttgccaccaacgtcgccaattacaacgcctggagcatcgactccgctccggcgtacacgtcgccgaaccccaattacgacgagaagcactatgttgaggccttcagcccgctcctgaattcggccggcttcccggcacgcttcattgtcgacaccggccgcaacggcaagcagcctaccggccaagaagaatggggccactggtgcaacgtcagggacaccggctttggcgtgcgcccgacgactaacacgggccacgacttggtcgatgcctttgtctggatcaagcccggcggcgagtccgacggcaccagcgacaccagcgccgcccgctacgactaccactgcggcctgagcgatgccttgaagcccgctcctgaggccggccagtggttccaggcctacttcgagcagctgctcgtcaatgccaacccgccgttctaa

SEQ ID NO: 1397 - DNA, 1443 bp, Myriococcum thermophilum; identical to SEQ ID NO: 1091

SEQ ID NO: 1398 - DNA, 738 bp, Myriococcum thermophilum
atgtcgcgtatgttgctccaacttctcctcttcctcccatcccttgttcttgggcatggtggcatctggaactattccatcgcaaacgaatggcgtcctgggttcttcccatactaccccgctgagggccagtcatcaatccagcgtcactggattgacttcagccccatcaaggatctgaaagccccttggttggtctgcaacaacccaggcgactacgccgaggaatacgcaactattgatgcgggcaccgaaatcggggcctactacaaaggatggccgcatgatattgggcccatcgttgtgtggatggcgtactgtggctcggaaccagcttcttgttcgtctttcaacggcacgggcaatcactggtttaagattgctgaggctggcttactctccggtacgatccacgagggcgtgtgggcgcaaaaggaaatgatctcgaacaattacacttggaccgtgacaatccccgagcaactcaagagtggtgcatatttgatccggcacgagctcatcgccttgcatgttcctttcgagccagagttttaccctgagtgtgcacacctgtatgttcagggttctggcgacgctcttcctggagaggagtacttggcctccatccctggcgtctggaaggaaggcgagccggagcttcatctcagcgtttacgaggagccgactgcaagtcggaccgaatggacaattcctgggccaccggtgtggaggggatga

SEQ ID NO: 1399 - DNA, 918 bp, Myriococcum thermophilum; identical to SEQ ID NO: 1093

SEQ ID NO: 1400 - DNA, 573 bp, Myriococcum thermophilum
atgaagttcttcactgctgccctctctctcgccgccgccgcctgcgccgctcccacgagcaccaggagctacacgggcgagttcggcatcatcgccctccggtccgcctcgcccatccacttcgcgacgctcagcgcgaccgggaactcgctgaggttgaacctgccccaggataaggtcgactctcagtgcgtcgacggcgagacccacgtccctgctaccctctacatcgaggacgaagagctgtatctctacggcccggaggacaagccgaagcagatcgtctatctcgaccgcagcggcatgggccagggagttatccagtataccaccaagaccgacgatcccctgggcggcaggctggaaaccaagggctggagagtggacgaggtcgggaacctctttttcaaggacaacggcctgctcgcctgtccgctcgaggccgaccagggctacgtcgtccggctcgacgtcggcatctctaacccccatggctacaaggattgcctcggcttcacagctcgcacagtttcccttgaggaacccgtcccgtgctggtacagcagccactga

SEQ ID NO: 1401 - DNA, 2721 bp, Myriococcum thermophilum; identical to SEQ ID NO: 1095

SEQ ID NO: 1402 - DNA, 246 bp, Myriococcum thermophilum; identical to SEQ ID NO: 1096

SEQ ID NO: 1403 - DNA, 1296 bp, Myriococcum thermophilum; identical to SEQ ID NO: 1097

SEQ ID NO: 1404 - DNA, 1530 bp, Myriococcum thermophilum
atgttgatcctcgccgcacagttgtctttatttgcagtttttcttgtcatctgccttgcttacttcgctttcctcgtgccgccaagacacccaaccaacatcccggctgttcccttttgggtggctctcatacccttcttcaaagacgtcgaccaatcagacatcttccgcaagtacattgagagaccgctccggacgcatggcgctgttaagctgtttttcggagcgcagtggaatatcctggtgcacaaaccctcctatctcgcgatgatcttcaaagaagaggacatctaccaaaagagcggcaatcaaaaaaagatccctcacagtgtcctcgctcacttcctcggggacaatataatatctagccacggggaggtatggagaaaataccggtccgtggtacagcctgggctgcaaagagactttgacgccagagtaatcgcccgcaacgctgagcgcctctgcggcttattgagagatgctcaattccgcgcgagagacgggggcgtgcccgtccaggagctactgcaacggtactcggtggccaactgttccgaggtagtactgcagatcaagcttactaccctgacttctgccagcgcgcctatccaccttttgcagaccgaggtgaagagggagatcttcaagccaatcttcatgaacttccccgttctcgaccgttttccgttcccaagccgaacaagggcccgccgaatcgttgacgggttcaagcatgaacttaggcgtgccctcgtcgaaagccacgcgaaaggcgctgcgcctgtttcctcggcatcttctgatggcctgggccaacggatgctggacgccagggagtctggactgtggaacgagaaacagcttctggacaacctaacagttactttcgtggcgggtcaagaaaacccgcaactctgcatgatatctacattatacctcatggccaaacaccctgaatcccaagctaagctctatactgaggtccagagcaaagggctgctggagagcgcggacccagacccagaagtcttgcaagacatgccgtacctgacttcgctgatatacgagagcctgcggctctttcccccgattggtcagctggtcaatcggaaggcaagcgaggatatcgtactgggcaacaacattttcatacccaaggggacctatctaggctacaattgctactcaaccaacagagaccctgctgtctgggggccaagggctgacgagttcgacccggctcggtggggagactcgacatcagccattcagaaacagtatcggctgcggagagccagggcagagttcatcagtttccacggcggacgccgcgcatgtctgggggagaagtttgccatgctggagatgcgagtcactctcgttgctctcgttcgggagtttcgctggaagcttgatccgtcatgggtcgatagaatgacaccggccgggcctctctaccctcgtgcgctaaggctcgtatttttcgacaggagaaaggactttggtgaagctacctactctaggtag

SEQ ID NO: 1405 - DNA, 405 bp, Myriococcum thermophilum
atgatgctgttcagagcgaccattgccggattccttctcggctctctcgcccagggctcacctgtgcccactgagcgcaataacattggcggtgtcttgatctgtaacggtcccaatggcaaagggaactgcaaatatgccgtctatgagctcgagaagtgctacaacctgccaccggagttcgcgaaaggagcagccaccttcgcacctgacaacgcgcccttctactgctatccctacatcatggaatgcggcggtatctgcatgtcgcccacgggctgcaccatgggagccgtctcgtccgactacgagcacaagtacaacttgactgaagtcgggtggaacaagtacatcacgtcgtttgagtgccacctcaacaagactagcgatgcctactcgcaatga

SEQ ID NO: 1406 - DNA, 2037 bp, Myriococcum thermophilum
atgtggcctgccggattgattcttgctcttgccggtctggcggcgggcgagtcccttaaaaaccttgacaccagcctgaccatactgaccaagaatgatctccagggaccttccagccctgacgcggataccgccgtgatcctaaccgacgcccacccatatcggcatgtctctgacgtgtgcaacaagctgggcgagcagttgtggcgtccagggagggacacgggggaaaagaacgaaactggcgccccggtcgtaccatttgcggagtacctggcgtatgagagcgcggctgatgcgtcatccaaggtctgggtcaatggctctgatttcgcagccgtagacctctccggccgccgcctgtccgtggactcggtctcgcacttgaggctcccgggtttgtgcacaaatacggcgccattttcgaatccgagcacccaggatacgagtcccaggtggcagatcagcctggaggtcaacaaccagacccttaccgggttccgcgaccgtctcgctttccgcttcctcggaatccgctatgcgccgcagccgcagcgattcgcctattctaccttgttccaggggtccggcgaggaagtgtctgcgctttcgtatggcccgcagtgtgcccagtcgggcggcggcagcgaggactgtttgttcctgaacatctggaccccctaccttcccaatcccaacactgcgccccagaaggacaagaagctccgtccggtcggcgtgtggattcacggaggcggcttcgtcggtggcaccgccaatgatcccacttttgatggcgccaatatcgtttccagaggtgacatggtactggtggccatcaattatcgggtcttggctttcgggttcctggccctcaaggacggaaagtcgaacgggaattacggcctggccgaccagatcacggccctggactgggtgcgcaacaacatccaccacttcggcggagacaaggaccgtattaccatctttggtcagtcggcgggtgccggttcggtgcgggcgctgatggcttcccccgaggccgctggcaagttctcgggggctatcatgttgtccaacctcggcggtatcagctacgggaattcgttctcggagtactacaccattgacgaagagatcgaaatctccgctaagtccatcctcgctgcgaccaactgcaccaatgcggcatctcaagttgattgcctccgctcggtcccggcatcaaagctggccgcgtttgacgaagcccgctacatcgtcatcgatggcacctatctcaagacccgctccctgccagtgaccgggccccggctccccatcaggctgatgatgggcatcacccgcgacgacggcgcacccttcatctcgttccccacgacggctaatgaatcaacctacttcgacaggatcggcttgccacgcccctcccgggagctcttcccgattacctcgacaggcaacgccacccttgatctctacacaactgcatctcgggtcgcaaccgacggcatgttacgatgcgtagaccaagcgacggcctcctctctcctcacccacggccgactcgaccacatctactactacgagttcgatcggacctaccaattgcagagctggccgggccgtgacgtgtgtgagccgccccgtacaccctcccacccggccggcgacccgtccaagccgtacttgcgctgccattcgggagagctgtactacgtctttggaaacctgcatcgggagggtctgccgatgcgggacgaaggggacctggagtttgagcagagcgtcttggacagcttcgcgtcgtttatccggacgggagacccgaacccggacgatgcctggttgagggccagaggttactaccagcaacaacgacgacacggccggaagggggatcggtgggaaccgagcaccaagaggggcgggttgaagttgagagtactggattggcccgcttcgaggatgagcgggttccgtgacgagaagcagtgcgaaagtctcggtttgggcctggactattacgaggaataa

SEQ ID NO: 1407 - DNA, 1692 bp, Myriococcum thermophilum
atgattttcacagttatcgtcgcaactgtgctgtcggtcctgttcggcatccgggtttcccacgtcatattgtcacggcgggaagagaaacgacgacgcaatctagaagcagcccggcgaggatgtagtcctgcaccaacaatgcccaagaaaggcattctgggcttcggtcgactactcgagggtctcagggcaacacacaacgacagaggacctcagtatgtgattgaggcgatagacggcgagatgggcaaggacgtgcacacagtggttgtacccatccatgattacgaactcctcgtctctcgtgatccccttaatattcaaactgtgctcgtgacacaggctgccgactgggatgtcagtgaacaccgtactgctagctgggagcccatggttggccacggcatctttacatcgcgtggggagaactggaagcattcgcgcgcactcatccggccacagtttgccatggagcaaatcaatgacttcgacatgtacgagcgtcatgtgcagcaattattcatcgctatcgacaagcatcacggcgggtcgaggagtcaaggatggacggaagcttttgatctacaaccgctgttctacaacctcgccctcgacgttatgactgagatgctctacggctactccgtccactcgcagaatccgtctgaacgtgtagaactgcccgtgatagatggctacgagaccccggaccgggagcacatcggaatacacatggatgctggcaaagcctgggtcgagacgcgtggtgcgatgtggaagtatcgatggctgctaccatcgtcgcagttccgcaggcactgtgctgccattcacaaatacgctgcatggttcgttcaactaagactccagcagggcgaccaatacctggacaatctcctgcaacaaggtggactgcccaaccgtgatcgctacgttcttctccatgagctgtccaaggcaacccaggaccccgtcgagctacgcagccaaacactcaatgtcctgacagctggccgggacacaactgccgcgctcctcggctggattgtctactttcttgctcgccatccctctgttacgaagaagctgcgggaggaggttctccgcctgtttgggccgtatgttccgggacagtcgagtgggatcgaattcaagaaggtccgcgacgcaatgccatacatgaacgctgtcatcaacgagacgctgcgcatggcgccagttgtgccattgaatgatcggatttcgcttcgtgacaccgtgctgccgcgcggtggtggacccaaacgggatcaacccgtgtttgtcccagtggggactcaggtcctgatcccggtttacgccctcgcgcagcggccggatctttgggggcccgatgtcaccatcttcaggcccgaaagatggacggaggatggtgggtgcaaaccagggttcgagtacatccccttcggaggggggccacggcagtgtcttggtcaacaacttgcaagactcaaatctgcttatataatcacccggttgctgcagcggtacgacgacatcgcgaacgcagaggtaccaccggatgccgccgtgaaattccaccacacaatcgaaaacaggagcggtaccggtgtccaggtcaggttgcatgtctcgaactggggtgttactacaggaggcgtggcgcccaatccggctaaccgggaataa

SEQ ID NO: 1408 - DNA, 1569 bp, Myriococcum thermophilum
atgttgggcatcctggcactgagtatagggctggccgcaaccgtcgcgtatctggtgctggaatttccccggctccaacagagttggcggctgtggtcgcaccgctcacagttgccaccgggacccaagacgatcaagaccgggatccgcaagccatggctctggtttcgggagctgcacaaggagtatggtgacgtggtctttctccagatggggcccacgcctactgtcgtcttgggctccgcgcaagccgcctgggacctgctcgagaagcgcggggcaatctactcgtcccggccgcgcttcatcatgggcggggagctgctctctaatggcctgcgcggcctgatggccccctactcggcattctggcgccgctggcgcaagctgctacacagcggctttatgcagcgccagagcgagtcgtaccgacccatccagagcctcgagtccaaggtgcttatgcacgatctcctgaccaaccccaaggactaccgcacccacctggagcggtatgccgcctccgtcatcgtcaccgtcgtttacggtcgcagggtcgaggacgtccggacggatgctgtagttcgcatgaatgccgaggctatggaacggcttacttcggtaaatattcccggcaggtatgcagtcgagcggtatcccgcgctcaaatacatcccttccctctttgcaccctggaaggcacaggtgttggaacaacggaagaaggacatcaagacatacacgggactcatggacgacgtcaagaagaggatggcagcaggtacactgccggactgctttgccaagcatattctagaggagcaggggaaactcggcatgactgatcttgaggcggcttacacggccggaagtccgttcagtgccggtgttgaaacctctgccggttcgctcgccagctttctgctcgcctgtgtcaagttcggcgacaactttgttccgaaagcccaggcggaactcgacagggtcgtgggcagtgacaggctacccacgttcgatgacctactatcgctagagtatgtaagggcagtcatgtccgagactctacgctggcgtcccgtggctgtcttgggcggcaccccgcatgcaagcacagccgacgacgtgtacaagggaatgttcatcccaaagggtagcaccattatcgccccgctgtggagcatccatctaaacgaggccgacttcccagatccacacaacttccaaccagagcgcttcctcggacagcgcggttatcccggtaaccttggccacagcgcgtttggctggggtcgccgcatctgtcctggaatgcatctcgcatcggcatctgttgcgatcaacatcgctcgaatactatgggcattcgatgtcaagccagccaagaatgagaaaggagagatgattgatgtcgacatctttgcattctcagatggattcaactcaaccccgctaccctttgagtgttccatcaccccccgctcggagaagcatgccagggtggtcgaggacgaataccagagggcccttggcgagctgcagcagtactcggctgccgtaaacggggcgtga

SEQ ID NO: 1409 - DNA, 1266 bp, Myriococcum thermophilum
atgcagggacttgtcaagaccgctctcgcggcagctctcgttgcgagtgctgctgcccagcctcatcaccatggccatcgccatctccacgccaagaagcatgaccaccagcagctggggaagcgtgacaccgtggttgtcaccaaagtggtcgagggcccgactgttacggagtatgtcgacaaggccgggaacaagatcgatgctgccgaggcgaagagcgaactcgagaagggcgaatggatcgtcgtgggcgagaccgagcccaccttcagcgcgccgcccctcatcgtctcgacctcgatcgctaaaccccctcacggaggccagttctatgaaaagaccagctcggccgccccgaccacctcctcgtctgtcgctcccaagccttccgcttcgtcctcaccgtcgccaaaaccgaacggaccaaccggcctcaatgcggagtttccgagcggcaaggttccgtgcgacaaggtcccgaccgagtatggtgcgatcgaagttccctggctcgacactaacggctggacgacgctggccaagttcggcaaatggatcaaaggagtcgcaattaacaacatcgagactcctaccgacggcaagtgtgggccgggaatcatgtgctcctatgcttgcccccccggttacgagaagactcaatggcccgaggagcagggtgccactggccagtcggttggcgggttgtggtgcaacgaagatggcttcttggagctcacgcggcccaacgccaccagactctgccagcccggtgccggcggcgtttacgttgtgaacaagctcccgggcgacgcctgcgtctgccgcaccgactaccctggcaacgaggccatggtcatccccctggtcacctcccccggcggaaagtatccactgacgaaccccgactccgcaacatcctattggtgggacgggaagcccactactgcccagtactacgtcaacaacctcgacgtcgaggttgaggaggcttgcacgtggaggagcaagaagttccccaactcggccggcaactgggcgcctgtcaacatcggtgtcggcaagagcctgacgggagagaccttcatttcgattttccctaacaagccgaccagcgacgctgtccttgacttcaacatcaagattgagggcgaagggctctcgggagattgctggctcaaggatggcaaatattctgatggccccaatggttgcacggtcggcatgaagtcgggcggtacggcgaacatcgtgttctacaagtag

SEQ ID NO: 1410 - DNA, 1467 bp, Myriococcum thermophilum
atgaggatctcatccttccaggccgccatcggctcggcctcggttctgctctccgcccaaccaacttccgctagcattcgtcacagacacgcacatgtcgaatttgcgaggaggcatctccacgggcatgggcacattgctgatacccgccaggtggaggaggccgtcaatgccactgaggtcgtcgcgaggaaggctacctgcacgctgccagaccatcccgatcttgtctacatcccgggcaaggataacaatggattcgccatgagccctgatcagtcctgcaacgatggagactactgcccgattgcctgcgtacccggcaaggtgatggcccagtggaagccaggcacgacttacacgtatcccgagtccatgtacggaggactctattgcaacggtgggaaggcagagaagcccttcgagaaccggccgtactgcgtggatggcactggcacggtgaaggccgtgaacgaagccggcaagatcgtgtcgttttgccagacggtactgccgggtaatgaggccatgatcatacctaccgatgtcacagacacagaaacacttgccgtcccggggccggattattgggacggaactgctgcacactactacgtcaatccgcccgggatatcttccgctgttggctgtgtctggggtgtcatcacgaaagcaatcggcaactggaccccatatgttgccggcgcgaacacaatggccaatggtgaaacctatgtgaagattgcgtggaacccggagtaccttaagacacctttgaccaagatcgtaccgaactacggtctcaagattgagtgccccgatggcggctgcaagggcctgccctgcacgattgacccctccaagggcggaatcaatgccctcgagagccccgtcggcaccagcggcgtcgacgacgccaacttctgcgtcgtgactgtgcccaagggcaagaccgccaacattgtggtctttaatacggacagttcttcaggcggcgacgatgacgatgatgatgagaatgatgacagtgatgacgagaacgacagcgatgatgaacctgagtctgaatcctcacccgaaccattgccctctccttcaaagactcccgagccgcccaagactactcgcgacgctgacgtcccgactacgacggccgagccatcttcgtcgcgccctgagtcttcgttcacgacctccgttttgtcgccgtcaacgacgacgaggtcgttctccacttccacctcggaagccttctatggtggcatgttccacgagcaggaggtgcacggcagcactgtgtcgcacgggacgaccctgaccacggcacccgtcaaggctccaacaacatccgacccagcgaaggatcccgtgttggccacgtcgaagaacgagggcgctgctgccgagggtggctcggccattgccgggctcgtggtcgcgcttgttgccgccgcagcccttctctag

SEQ ID NO: 1411 - DNA, 1266 bp, Myriococcum thermophilum
atgaagcctaccgcgctgctgggagcagccctcgcggctgcggcaattcccgcgggtgtccatgctcattgttcttcagccacgcagcagcctatccctgttgtcgacgacctcacggagcccaaggagctgacggacctgttcgaaacggccaagaaggccatcatcgagcacctccgggtggaagagaaggccgcgcgagcccgcggagagacacctcgttgcactgccgataagctcatttttcgacgcgagtacggatctctgtccaaagaagagcggctcgcgtacatcaatgcggtcaagtgcctacagagcaagccgccccggacgccagcgagcgtagcaccgggggcgcggtcgcggtttgacgacttcgtggtgacgcacatccagcagacgctcgacatccactactcgggcatcttccagccgtggcaccgctggttcgtgtaccagtacgagcgggcgctgcgggacgagtgcggctacgaggggtaccagccgtactgggactggcccaagtacgcgagcgcgccgcaggactcgcccctgttcaacggcgacccgtacagcctgggcggcaacggcgagtacgtgccgcacgacgggcccgtcatcgtcccgcccgaaggggtcagcggcggcaacatctccctccccgccggcgagggtggtggctacgtccgaacgggacccttcgccaacatgacggtcaaccttggtcccgtcggcggcctggccgacactgccccgggcccccagggcgggctcggctacaacccacgcgggctcaaacgcgatctgggcggagccatgaacatgcgctacgccaactacaccacggtcctgaagctactcgcccagccggacatcgacgccttccgcaccgtgtcggagggcgtgccctacacgatcgagatcggcccgcacggcgggattcactacacgatcggcggcgacccgggcggcgacctgttcacctcacccggggacccggccttctgggtgcaccacgcgcagatggaccgcgtctgggccgtgtggcaggctctcggcctcgtcttcccggatgtcgacgacccggcccgccgctacaccgacctcggcaagggagaatacgcccaccgcacctggcagaataacccgccatccccctttgccgagctctccgacgtcattgatatgggttatgcggccccttcgaccgccatcggcgaggtcatgtccaccactcagggcgagctgtgctacttttatctctaa

SEQ ID NO: 1412 - DNA, 768 bp, Myriococcum thermophilum
atgaagttcttcagcactctcgccgccgccttcatggctggctctgctctcgccgctccggctgttccggttgactgcgactgcggggatggctatgacattcccgtcccgacccacgtcaccaagaccctgacggccaccgccactggctaccccatcccgatcaacacctcgttgcctggctcccagatccctggccacaacgcccccgttgaccccgatgtcgtcgtggtcgtcaagaccgtcgtcgccaccgccgtcgacgtcgaggccaaggtcaaggctcacctcaagctgatcaccgacctctgcgccgatgtcaatgccaacatcgatgcccaggccctcctcaaggtcatcattgatctcaaggctgacatcaatgtcctcgtcggcctccttcccgagttgaagggtctccttgtccacgccgatgctcttgttgccgccgatgtcaagctcatcctcgacctcctcgtccgcgttgaggctctcgtcgctgaggtccaggccgtcctgggccttgtcgccaagctcaaggctgaggttctcgctgttgtcggtgttgagctgcgcgctgtcctcgacctcgttgtcggcctcgttggcggcattgtcgccttcgccaccgacctcgttgccaagatcggcgccattgttgacctcaaggtcctcgttggcgagatcacctccgtctgcgccaagctcaacgcccacgttggcgtcattgtcaagatccttggcctcgttctcaagctcatcctctaa

SEQ ID NO: 1413 - DNA, 1125 bp, Myriococcum thermophilum
atgaggctcaccaggtgtgcgccggcgctgttggcggccgtgtcggcaagagcgctctccatccctgcgcccggaaatctcgccattaccaaggatctggctcacgacacgaagaaggacatggactcgttcacggtgctcacatggagcgagctcgatgctattatgtcgggcgattccgataccggcaagaacagcggaagtcatggtgactcggacaatgacagggtcgggcttctcgacgggccagcagcgacgccctgcgagaatcccaaggtccgggtggagtgggacaggctgaaagaatcgaagaaggaagagtttctcaaggcggttaggtgcttgatgaacaagaaggagccgttcgacggcgtacccgagttgccgagcatctggcacacgttggcatgggtgcacaacgagggcaaggctctgattcacggtaccgaccagttcctaccttggcatcgctactacatctacatgctcgagaccctcctcaaggatcaatgctcctacgggggccccattccctggtggtacgagcccgattacgctggcgacctggccgatgccagcctgttttcgcccgagtacttcggcacgctgcacccgaaaataaacggaagaactacatgcgtcaccgatgggtggtttgccaacaccacggtcattgttggcacctctaagacttgcctctcacggggtgaggacaaagcatacagcaatctagtgacgacgaactacgaggagaggtgccacggtgacaagaacaccagctacgagagccaccgctcttgcgtcgagggcacgatccacgccgccacgcacaatgccattggcggcgccatggcaagcctcagcgcctcgccacacgaccctattttcttcctccatcacggttacgttgactggcagtgggcacgctggcagaacgttgactccgaccgcaagagaacgatttccgggtgcgccgtcccgcgtgacgaactcacccgagtttgcaacgagtatctcaccctagatacggtacttaaggggtatggcgtgatacctgacatgaaggtcagggacgtgctcgacaccaaaaaccagatcatgtgttatacctatgacaaggcttga

SEQ ID NO: 1414 - DNA, 1608 bp, Myriococcum thermophilum
atggcatcccccttgttcatcctcttcgccaccaccataggttatgtcctcttccgactcagcaaggtcggacgaagacccaaaggaataccccctgggccccctacggtgcccatccttgggaacttgcacttgatgccaaaagatgaccctcccacccagttcaagaaatgggctgatgagtacggcccgatttactcattgatcttgggtaccaacgtgaccatcgttctctcgtccgatgttgtggttaaagagctgttggacaagaggagcagcatctactcgtcacgacctgagtcgtacctcagctcgttgtcgagcgatttccgccgcatggttctcatggagtacggaagtcaatggcgccggattcgcaagttcttccacgccttcctgcagctaaagtcggtcaaggcgtacgtgccctacatcgagcttgagagcacgtcggttatggtcgatctcttggacaaaccgcagattatttttgagcacgtccgacgctattcgacctcgatagcctcccagctggtatacggattccggatgcccaaggtcgatgatcccaggctcctccatgtgtacgaaatcatggagggtttcagcgagattaccggcccgggagctgcagcactgctcgacatctttcccatcctgcgttatctgccgccggccctccagccgctccgtggctttgccatctacctccggaagatctccatcgatcttgccattaagctctggctggaagtcaagcagcaaatgcaggacaaaactgcgaagccctgtttctgcgtcggtcttgccgatgcccaggccaaggagggccttgacgacctggacctcggatttgcagcaagcacagggttggaagccgccgctgacacgacggcgaacagcctgagcggcctcgtcctggccttggtcatccatcgcgacgttcaaaagaaagcgcaggaggcgattgaccgggcgtgcggtgataggctcccaactattgccgacatggagaaccccgatgcgcaatacatcaaggcttgcgtgaaggaagttttgcggtggttccccacggcacctctgggcgtgcctcatgccgtcacccaggacgacgagtacatgggctaccggatcccgaagggcgccaccgtcgtcatcaacgcctggggcatccacatggatgagaagagatacaagaacccgcgcgtgtttgacccggaccggtacatggacgacaccacgacgtcgagcgagtcggcaatgggaccggatccgacgaagcgggaccatttcagcttcggagccggccgtcgcatctgtgagggtatgcacttggtcgatcgaaccatgtttctcttcatctcccgtctcgtgtgggcctttgacctgttgccagccaaggatgccaaggggaacgatgtcatcccggatcagaacgatttgctcggtaactttttgaggcgcccgaggccgttcccgctcgaggtcaaaccgcggagcgaggcacgtgccgctgcgctgcgtcaggcatggaaggaagcccaggaactcctcgacaaagatcagcagtggaaggtcattcccgaaggaatgccgtttaccttgtga

SEQ ID NO: 1415 - DNA, 837 bp, Myriococcum thermophilum
atgaagcctacgcgccccagtgccgtcgtcctcctcgctgccgcgacctcggttgcaggacagtcatgcgaccttcccacctcgtaccgctggacatcgagcggcgtgttggcagagccgcagtacccctgggtatcgctcaaggacttcaccatcgccccgtaccaaggccagcacctggtctacgcaacaacaaatgacggaaccaactggggctccatgggtttcggcctcttcagcgacttcagcgccatgggctcggcgtcacagacgggcatgagctcgggtgcagtggcgcccactctgttctacttcgagcccaagaacgtctggatcctcgcccaccagtggggcccgacggccttctcgtacaggacgtctaacgatcccgccaaccccaacagctggtcgtcaccccagccgctcttcaccggctccatctcggactcggacactgggcccatcgaccagaccgtcatcggcgacgacaagaacatgtacctcttcttctgcggtgacaacggcaagatctaccgcaccagcatgcccatcgagaacttcccgggcaacttcggcgaccaggcgaccgtcatcatgagcgacagccggaacaacctcttcgaggccgtccaggtgtacaagatcgacgggcagcagaagtacctcatgctggtcgaggccatcggcgcccagggccgctacttccgctccttcacggccacgagcctcgacggccagtggacccccaacgccgtcgacgagtacagccccttcgccggcaaggccaactcgggcgccacctggaccaacgacatcagccacggcgagctccgctaa

SEQ ID NO: 1416 - DNA, 2085 bp, Myriococcum thermophilum
atgaaggcatcggtcgcgtggtgcctcgccggcatgattgccgtggccagcggccagaacgagccgtttcagagctatcccgactgcaccaaaccgcccctttccgagatcaaggtgtgcgaccggagtctgtcggatgcggagcgggcgacggcgctcgtggaggccttgacggaggaggagaaactgcagaatctggtgagcaagtcactcggagcgccacgaatcggcctgccagcatacaactggtggagcgaggcgttgcacggggtggcctacgccccggggacgcagttccggaatggccccggggacttcaactcgtcgacgtcgttcccgatgccgctgttgatggcagcggcctttgacgacgcgctggtcgaggccatcgggcacgtcatcggcaccgaggcgcgcgccttcggcaacgccggctggtccgggctcgactactggacgcccaacgtcaacccgttccgggaccctcgctggggccgtgggtccgagacacccggcgaggacgtgctccggctcaagcggtacgccgcctccatcatcaacgggctcgagggccgggcgccgtcctcgtctcccttcccgggagaaggaggtggtgaacaacaacaacaacaacaaccgccgaggatcatctcgacgtgcaagcactacgcggccaacgacttcgaggactggggcggacacacgcggcacgacttcgacgccgtcatcggggcgcaggacctggccgagtactacctggcgcccttccagcagtgcgcgcgcgactcccgggtcgggtccatcatgtgcgcctacaacgcggtcaacggggtgccggcgtgcgccaactcgtacctgatggagacggtgctgcgcgagcattggaactggaccgagcacgacaactacatcaccagcgactgcgaggccgtctacgacgtctcggcccaccaccactacgccgagaccaacgccgagggcaccggcctgtgcttcgaggccggcatggacacgagctgcgagtacgagggctcgtccgacatcccgggcgccgtcgccggcggcttcctgacctggccgaccgtcgaccgcgccctgacccgcctgtaccggaacctggtgcgcgtgggctacttcgacgggcccgagtcgccctacgcctcgctgagctgggccgacgtgaaccagcccgagtcgcaggagctggccctgcgtgctgccgtcgagggcatcgtgctgctcaagaacgccgacgacacgctgccgctgcccaccgaggaggacgaggatggcaatgccatgggcgaccaggtggacgacacgcccctgttcgagctcgagggggtgggcgccatcctgtgggccaactggccgggccaggacggcggcacggccgtggtccgcctgctcgccggcgtcgagagccccgccggccgcctgcccgtgacgcagtacccggccaactacaccgacgccgtgcccctgaccgacatgacgctccgcccgtccgagaccaacccgggccggacctaccgctggtacccgacgcccgtccgccccttcggcttcggcctccactacaccaccttcaaggccgagttcggcccgcaccccttcttccccggcggaaacggcaacgagaccacggcgagcaggatcaaggcccggacgcggcaggcggcggcctcgacgccgatcgaggacctgctgagcgggtgcgaccggacgtaccgggacacgtgcccgctgccgccgctgacggtgcgggtgacgaacgaaggggagcggacgtccgactttgtcgcgctggtcttcgcgtcgggcgagtacgggccggagccgtacccgatcaagacgctggtctcgtacgcgcgggcgcgcgccgtcgagggccggggcggcgacgccaccctctcgctcgactggaccgttggcaacctcgcccgccacgacgagaacggcaacacggtcctgtacccgggcacctacaccctcaccctggacgagcccacccaggcgagcgtgcagttcaccctcgagggcgagcccgtcgtgctcgacgagtggccggcgctccccgagtga

SEQ ID NO: 1417 - DNA, 1458 bp, Myriococcum thermophilum
atgaagtctcttgctctcttggtatcggttgccgcttcgctggcttcggcgtccgccatcgcgcttgatggcgaagctcttccagctggagcctcgattacctttccacgtgatgaatctcagttcaatccatccgtgacgcccgaaagcaggggccatggtaaggagaaggacaactggggcaacgctgttgagaaggaccgcaagaaggtcactatccgtgcttccaaggacgatcgcgacgatatcagtgacgacttcctctgggcgctcaagaaggcaaacaacggtggtctgctgcatttgcagaagggtgaaaagtatgtcattggcaagaagctcgatctgagctttttgaacgacatttacgtcaagattgacggcgagctgaagttcaccaacgacattgaatactggcaagccaacaacttctattacgacttccagaagagcattaccttttgggtctggggtggcaagtacgcatcatttctacccctcctcttcgagtttgtgaatcacttctaccgtgagcctgcctctcacacacttcccagggacatcaagatatacggctccggcgtcatcaatggtaacggtcaggcatggtgggacggcttctcgggccacgagattctcgatcccgataacgactactaccggcccattttgttcttgaccgacaacgccaccaatgtcgaggtccgaggtctgcatatgaaggactcgccgtgctggaccaatttctttgtgcgctccaagaacattgtttttgacgatgtctacatttctgccgtgtcaaccaacgcatcgaccctgcccaagaacacagacggcttcgactcgctcaacgtcgccggcctgacggtgctcaacacgcgcgtcaacgtgggcgacgactgcttctcgcccaagcccaacacgtccgacatcctggtgcgcaacctgtggtgcaacggcacgcacggggtgagcatgggcagcatcgggcagtacccgggcgtgctggactacatcgccgacgcgcacatcgagaacgtgacgctgctcaacggcgagaacggcgcgcggctcaaggcctgggccggcccggacgtcggctacggctacatccgcaacgtcacgtacaaggacatccgcgtcgagaacaccgacttccccatcgtgctcgaccagtgctacttcaacatcaacgagaccgtctgcgcccagcaccccagccgcgtcaacatctccgacatcaacttcatcaacatccgcggcaccagcagcggcaaggaggggagggtcgtggccgatctcacttgctcccctggtgcgacgtgcactggcattcatctggaagacatcgacatcactagccccaaaggctctcccccgcagattgtctgtgaaaacattcagggtgatattggagttgattgtatccctaaggatgaggcggattattccggttga

SEQ ID NO: 1418 - DNA, 1494 bp, Myriococcum thermophilum
atgatccggctaagtgtatgtgtctctgcactcctggccggcctctcggcagccaagtatatcgtcccggggggaagatggcgggatacggacggtaatctcgtcaatgcccacgcaggctgcgtaacagtggacaaggataccagcaaattctggctttttggcgagtacaaggtcgaaggccaaaccgaaggtggtggtgtctccgtatacagctcggatgacctagcgacgtgggaataccacggccttgccttagagcgtctcacagcacccattgagggccaccaatacatctcgccctctcatatcatccaacggccaaaggtggtctacagcgaggtctctaaggagtatcacgtacagcagatgtggtggcacgcagataactctacctatggactgctgctccaggggtttgctcggtcgccaaacatttcggggccttatacctttgtgagcgccacggcccctctaggcaactggtcccaggatttcggcatctttaccgactacaaggacgggaggtcctacgcactttactcaaacggcgacagcgcggaaggtcgagacgtctatattacagcctacaacgaagatgtgtcggagctcgacaaggtcatccaccgcttcgacaaatatgatctcgaagctccgacaatcgtccagacggacaagagttactacgccctcatgagccataaaacgggctaccggcccaacaacgtcgtcgccttccgggccgactcgctggccggtccgtggtcgcagccattcatggttgcgccgcccaatacgcggaccttcaattcccagtcgggctacacattgaccatccggggcaagaacaggacgacgtacctctacctcggtgaccagtgggattctaactcgctttgggagagccgatacatttggcttccgatcgagattgacgaccgcaagaagacgctcagcctcgtgtggcatgacgtgtatgacctggacgttcggacgggcgagtggtcccccgtccaaggcaagacgtactacgcagccgacgccaagacggccggcaacgcgttcaaacaggaggccaacttcgccagcaagggcgtcatcgtcaccggcatctacgacaaccacagcaccgttacgtttgaagggatcgaaggcaccgggaagccgcagtgggtgtcgttctactaccagaacacggacgacatgggcttcggcgaccagccgggcggcacgccggaccgcatcggcggcacgtggcagctgcgccggatcgcgagcgtcgtggtgaatggtaactgggagaaggtcgagacgttgtaccagcgggacacgcacaagggcatcatcctctcgacgcccctgcagctgacgttgaacaaggggaagaacaacaccatcacggttggcgggttgtacaatgggtttgattacaagggggccgatctggaccgaattgtcgtgtatcccccggaaccggaccacgagaggcaatga

SEQ ID NO: 1419 - DNA, 1494 bp, Myriococcum thermophilum
atgatccttcaggcatctgcgctgctggcggcggcagccctcgtgcgggcttccccaaccaaggtccgccgcgatgctccggtaggagccgccgcgtgggaagctgctcactcctcggcagctgccgccttgggaaggctgtcccagcaggacaaggttaacatcgtgaccggcgtcggctgggaccaggggccttgcgtgggcaacactcccgctatcaactccatcaactacccgatgctctgcctccaagacggacctctgggcgtccgcttcggttccagcatcacggcattcaccccgggcatccaggccgcgtcgacgtgggacgtggagctgatccgacaacgaggcgaatacatgggcgaggaattcagggggtgtggcatccacgtccagctcggtcccgtggccggcgccctgggcaaaattccgcacggcggccgcaactgggagggcttcggcgtggacccttacctcgcgggcattgccatggccgagaccatcgaggggatccagtcggcgggcgtgcaagccacggccaagcattacattgtcaacgagcaggagctcaaccgcgagaccatgagcagcaacgtcgacgaccgcaccatgcacgagctgtacgtctggccgttcgccgacgctgtgcactctaatgtggctgccgtcatgtgcagctacaacaagatcaacggcacgtgggcttgcgagaacgagtgggtcttgaacaccatcctgaaggaggagcttggcttcccgggatacgtcatgaccgactggaacgcgcagcactcgaccgaggattcggctaacaacggcctggacatgacaatgcctggcaccgacttcaacggagggaatatcctctggggcccgcagcttgacagcgccgtcaacagcggccgggtacccagggaacgcctcgacgacatggttgagcgcatcctcgcggcatggtatctcctcggccaggacagcaactacccttctatcaacatcggcgccaacgttcagggcaaccacaaggagaacgtgcgggcggtcgcgcgcgacggtatcgtgcttctcaagaacgacgacggcatcctcccgctcaagcaaccgtccaagctcgccctcgtcggttcggccgccgtcaccaacccgcagggaatcaacgcttgccaggaccaaggctgcaacaacggcgccctgggcatgggttggggctccggagcggtcaactacccgtacctcgtctccccgtacgacgccctcaaggagcgcgccggccaggacgggacgacgctcagcctgcacgacagggacgacacgaacggactcaagctggagcccggcgccagcggaaccgccaccttcagcctccgcaggcgcgacctcagctactgggactcgggctcctcccagtgggtcgtgcccgagggcgagttcggcgtctcggtcggcgccagctcccgtgatatccggctgacgggaactttccaagtataa

SEQ ID NO: 1420 - DNA, 909 bp, Myriococcum thermophilum
atgcatctctcctcgtctctcctcttcctcgccgccctgcctctgggcatggccggcaggggcaacggccacggccctcgtaccgggctccatgccctcgccaagcgtgccggcctcaagtacttcggctctgctaccgactctcccggtcagcgcgagcgtgccggttacgaggacaagtatgcccagtatgacaagatcatgtggaagtcgggcgagttcggcctgacgaccccgaccaacggccaaaagtggctgtttaccgaacccgaacgtggcgtgttcaacttcaccgagggtgacatcgtgacggacctggcccggaagcacggcttcatgcagcggtgccacgcgctggtctggcacagccagctggcgccgtgggtcgagacgaccgagtggacggccgaggagctgcggcaggtcatcgtggaccacatcacgcacgtggccggctactacaagggccggtgctacgcctgggacgtggtcaacgaggcgctcaacgaggacggcacgtaccgcgagtccgtcttctaccaggtcctcggcgaggactacatcaagctggccttcgagacggccgcgcgcgtcgacccgcacgccaagctgtactacaacgactacaacctcgagtggcccagcgccaagaccgagggcgcccgccgcatcgtcaagatgctccaggacgccggcatccgcatcgacggcgtcggcctgcaggcccacctcatcgccgagagccaccccaccctcgacgagcacatcgccgccatcgagggcttcgccgagctcggcgtcgaggtcgccctgaccgagcttgacatccgcctgtccactccggctaatgccaccaacctcgcccagcagaaggaggcgtacaagaattcggacctccctctcccttga

SEQ ID NO: 1421 - DNA, 2313 bp, Myriococcum thermophilum
atgcgactgttcggccgtagagtcggccgaggggccatgtccacctgggcggcctcggctgctctgatttcgttgttttcttcacggtttgggctctgcacggctgcgtcctcgtccgacccgagtccaattctcgacaatgggctccaggacgagatccagtgggaccaccgcagcatcatcatcgggggcgaacgcctgttcttgttcgggggggagatgcaccccttccggctgccggttcccgagatgtgggaagacgtcctgcagaaaatcaaggccatgggcttgaggatggtgtcaatctacgtacactggggattccacgcgccaactccggacactgtagacttcagcaccggcccgcgcaacatcacccgcttccttgagatggcccgggacgtgggcttgtacgtgatcgtccggccggggccgtacatcaacggagagttgaacgccggcgggctggcgctgtgggcgacgacgggcgagcacgggtcgttgcggctgaacgactcggcgttcacggaggcgtggacgccctatcaggacggaatagcccaggttacgcggccgttccagctcacagaggaggggacggtcatcatgtaccagatcgagaacgagtacgggaaccaatggctggacccggaagccaaagtgcccaaccccgaagctatctcgtacatggaggcgttggaggacaatgcgaggaggaacggcatcgtcgtgcccctcatccacaactcgccgaatctgaactcgcccgtgtggtcaaaggactacgacacggtcggtgccggcggcaatgtggacatctacggggtagacaactacccgcaatgttggtcctgtgtcctggaggaatgcggtaacgtaacaccatgggcggtccgcgactactttggccacttcgagaaagtctctcccacgcaaccgtcccttatgcccgagttccagggaggcgccatgaacccgtgggccgggccggcgggaggctgcaaggagcgcaccggggcggactttgtcaacttctactaccgcgacaacattgggcagaaggtcagcatcctcaacctctacatgatttacggcggcaccaactggggctggctggcggcgccgttcatcgggagcagctacgactacggggctgccatctctgaggaccggagcatcgacgacaagtattacgagatcaagagcctcggcttgttcaccagagccgccaacgagctggcctcgactgatcgagtggggacggggctcgagtacacgaataacagcaacctgttcacggccgagctccggaacccggagaccggcgcggggttctatgtcatccggcatgacgacaccgcctcggattcggaggagtggttcgttctgcgggtcaataccagcattggcgagttcttcgtgcccaaggtgtcgagcgctgttgtgctgagcggacacgaggccaagatcctggtagccgacttccattttggcaaccatacactgtactactcgactgccgaggtactcacgtattccatcatcgacggcgaaaggacagtgttggtcctgtggacgcccacgggccggtcgggcgagttcttcctcaagggcgccaaggaagggaaaatctcctcgggtccgtcggtaacactggacgctcaggaagagggcataatcgtcgcgtggtacgagcaaaaggaggagaggaccattctcgagttcgacaacggggtgacggtagtgcttgtagacagggcaactgcctataaaacctgggttccggcgctcaccaaagatcctaaggttcccgtggaccagactgtcattgttatcggcccctatctggtccggtccgccagcctgaccgacgacaccatctccatccagggcgacgtcaagacggctacgccaatcgaggtcttcacctcctcccgcatccagagcatccgctggaacggccgcgacatgcagacgaccccgtctaactattctactctcacaaccaccataccggcacccaagcccgttcaaaacccggtcgggattggcacctggagagtgcacgacgccctcccggagcgcttcctcaactacaccgacaccgggccggcgtgggtcctggcgaaccgaaccacaaccccgaacccggtcgccggcccggacacggccacccggccattcctcttcgcagacgagtacggcttccacacgggcatccgcctgtggcgcggccacttcttcgtacctccttccaacaccaccaccaccagtacctcggcggcacggcgcacgggtggtcggcgtacctga

SEQ ID NO: 1422 - DNA, 2277 bp, Myriococcum thermophilum
atgtccacctgggcggcctcggctgctctgatttcgttgttttcttcacggtttgggctctgcacggctgcgtcctcgtccgacccgagtccaattctcgacaatgggctccaggacgagatccagtgggaccaccgcagcatcatcatcgggggcgaacgcctgttcttgttcgggggggagatgcaccccttccggctgccggttcccgagatgtgggaagacgtcctgcagaaaatcaaggccatgggcttgaggatggtgtcaatctacgtacactggggattccacgcgccaactccggacactgtagacttcagcaccggcccgcgcaacatcacccgcttccttgagatggcccgggacgtgggcttgtacgtgatcgtccggccggggccgtacatcaacggagagttgaacgccggcgggctggcgctgtgggcgacgacgggcgagcacgggtcgttgcggctgaacgactcggcgttcacggaggcgtggacgccctatcaggacggaatagcccaggttacgcggccgttccagctcacagaggaggggacggtcatcatgtaccagatcgagaacgagtacgggaaccaatggctggacccggaagccaaagtgcccaaccccgaagctatctcgtacatggaggcgttggaggacaatgcgaggaggaacggcatcgtcgtgcccctcatccacaactcgccgaatctgaactcgcccgtgtggtcaaaggactacgacacggtcggtgccggcggcaatgtggacatctacggggtagacaactacccgcaatgttggtcctgtgtcctggaggaatgcggtaacgtaacaccatgggcggtccgcgactactttggccacttcgagaaagtctctcccacgcaaccgtcccttatgcccgagttccagggaggcgccatgaacccgtgggccgggccggcgggaggctgcaaggagcgcaccggggcggactttgtcaacttctactaccgcgacaacattgggcagaaggtcagcatcctcaacctctacatgatttacggcggcaccaactggggctggctggcggcgccgttcatcgggagcagctacgactacggggctgccatctctgaggaccggagcatcgacgacaagtattacgagatcaagagcctcggcttgttcaccagagccgccaacgagctggcctcgactgatcgagtggggacggggctcgagtacacgaataacagcaacctgttcacggccgagctccggaacccggagaccggcgcggggttctatgtcatccggcatgacgacaccgcctcggattcggaggagtggttcgttctgcgggtcaataccagcattggcgagttcttcgtgcccaaggtgtcgagcgctgttgtgctgagcggacacgaggccaagatcctggtagccgacttccattttggcaaccatacactgtactactcgactgccgaggtactcacgtattccatcatcgacggcgaaaggacagtgttggtcctgtggacgcccacgggccggtcgggcgagttcttcctcaagggcgccaaggaagggaaaatctcctcgggtccgtcggtaacactggacgctcaggaagagggcataatcgtcgcgtggtacgagcaaaaggaggagaggaccattctcgagttcgacaacggggtgacggtagtgcttgtagacagggcaactgcctataaaacctgggttccggcgctcaccaaagatcctaaggttcccgtggaccagactgtcattgttatcggcccctatctggtccggtccgccagcctgaccgacgacaccatctccatccagggcgacgtcaagacggctacgccaatcgaggtcttcacctcctcccgcatccagagcatccgctggaacggccgcgacatgcagacgaccccgtctaactattctactctcacaaccaccataccggcacccaagcccgttcaaaacccggtcgggattggcacctggagagtgcacgacgccctcccggagcgcttcctcaactacaccgacaccgggccggcgtgggtcctggcgaaccgaaccacaaccccgaacccggtcgccggcccggacacggccacccggccattcctcttcgcagacgagtacggcttccacacgggcatccgcctgtggcgcggccacttcttcgtacctccttccaacaccaccaccaccagtacctcggcggcacggcgcacgggtggtcggcgtacctga

SEQ ID NO: 1423 - DNA, 771 bp, Myriococcum thermophilum
atgcggctcacgggcggcttcttctccgccgtgacggccatcgcggcatggctggcggcccctgcggttgttgcttcaccagcagtgagctaccacaacacgctcatcgagcagcgtgccgacccgcacatcaacaagcacacggacgggtggtactactttacggcgacggtacccgagtatgaccgcatcgtcctacggcgggcgcagtcgatccaggcgttgcaggatgcggccgaaacgaccatctggcggcgcaaaccgtacggggttggcagcggccaggtttgggcgcccgagctacactatatcgacggcaagtggtacatctacgtggcgctgggcgtggccaacgagtggcgtatccgagcggccgtgctggagggcacgggcgacaacccgctgacggcgagctgggtggaaaaagggctgatcaggaccaactgggacaccttctcactggacgcatccacctttgtggccaacggcacccgctacctgatctgggcgcagcaggagccgtctcggccggacgagaactcgagcattatgattgcgcctctcgagaacccgtggacgatccgcggcacggccgttgccatctcccggcctaccctggcatgggagaggatcgggtacaaggtcaacgagggcccgtaccgcgaccgacgccaactactgcatgggcctgctgacggcggaggagggatcggacctgttggacccggcctcgtggagcaagtcacaggagcccatcctcaccagcaatga

SEQ ID NO: 1424 - DNA, 1635 bp, Myriococcum thermophilum
atggtcttcctcttcttgcccttcttcattttctcaattccgtacacgtacggatacacgcccagcgagttgaccagcaaggaggttgttcaggcaggcatttcccggacgctcgcgggcatctttgagagcaagtttgttccttggaagctgcacaagcccgggtccaagtgggagcccgatctgtccgagagtcagcagtggatcgagacgctggagatcgtccagacgggcaaggataagcccagtgccttcaagcctcttgccggccaggtggacgagtcgtacaatctgacggtgagtgccgagggcgaagccaagctcacggccgtctcgtccatcggtgtgctccgcggcctcgagaccttctcgcagctcttctaccagcactcggccggcacgttctggtacacgccgttcgcgcccgtgtcggtgcaggatgcgcccaagttcccccaccgcggcgtcttgatcgacacggcgcgcaacttcctccccgttcccgacatcctgcgcaccatcgacgccctggcctggagcaagctgaaccggctgcacgtccacgtgaccgactcccagtcgtggccgctcgtgatcccttctctgcccgaggtctcggagaagggcgcctaccacccgagccagacgtattcgcccgaggacattgagaggatccagaagtatggtgccgagcggggcgtcgaggtgtacttcgagatcgacatgccgggccacatcggagtggtgtcgctgtcgcacccggagctgatcgtggcctacaacctgcagccgtaccagtggtggtgccaggagccgccgtgcggcgccttcaagctcaacaacacggcggtcgatgagttcctggagaagctgttcgacgacctgctcccgcgggtggagccgtactcggcctacttccacctgggtggcgacgagctcaaccggaacgactcgatgctggacgagggcgtccggtccaacgacaccgaggtgctgcggccgctgctgcaaaagttcatcgacgcccagcacgggcgcgtccgcgcggccggcctgaccccgatcacctgggaagagatcccgctcgagtgggaaatcgagctggccaaggacacgctcgtgcaggcgtggctgggcggcgactcggtcaagacgctgaccagcaagggtttcccagtgattgacagcaactataacttctggtacttggattgcggccgaggtcagtggctctcgtgggggaacggggaggcgttcgcccagggctatccgttcaacgactggtgcggtccgaccaagtcatggcagctggtctaccagcacgacccgacggccgggctgacggccgaggaggccaagctggtgctcggcggcgaggtggcgctctgggccgagaccatcgacgcagtcaacctggacacgatcgcctggccgcgcgccagcgtcgccggcgaggtcctctggtccggccggatcgacccagccacgggccagaaccggagcgccgtcgacgccgccccgcggctcaacgagttccgcgagaggctcgtcgccaagggagtccgggcctcgcccatccagatgaccttctgcactcaaggaaaggcggaggagtgcgagttcattgttgcttga

SEQ ID NO: 1425 - DNA, 744 bp, Myriococcum thermophilum
atgtacatctcgaacctcgtctcggccctcggcctggccggcctcgccctggcaagcccaatggaggtggctaagcgtcaaggtgaaaagttgaggatcatgcccctgggcgacagcatcaccgaaatcacctgctggcgcgcctttgtctgggaccagctggctcaggccggcctagctgaccaggtgcagtacgtcggatcgcagaacagcaaccctgtgggctgccaaccccagacggccaactgggaccaacaccacgagggccactccggctggaccgccgtcgacatcgccaacaactggctggccggctggctccagagcacccctgccgatatcgtcatgttcatgctgggcaccaacgatgtcgtgggcgggacctcgacggaccagatcatcgctgcctacaccaagatggtcgagaccatgcgtgcgtcgaaccccaacatcaagatcattaagagaagctcaccaaccatctacctcactcgccagatcgacctcgtcatcccattgcccttcatgaacgcgccgatcgaggccatcaacgcgcgcattcccgagtgggccgccagcctcaactcgaccgagtcgcccatcgtcatcgccgactgctaccagggcttcaccaactccatgctccgcgatggtatccaccccaacctacagggcgacgagctaatcgcctcgcgcgtcggcccgctgctgctggactacgtcaagcagtcgttgggtcagtaa

SEQ ID NO: 1426 - DNA, 1476 bp, Myriococcum thermophilum
atgtattccctgctcattgctctcctctgcgccggcactgccgtcaacgctgcggctccccgggcccggtctgcgctccatcgtggcagacaagcgcgtgggagccagcatgcggcccatatcctccagcagcgccaggccgggactactctcaccgtcgacctgtccacgacgtaccagagaatcgacgggttcggcacctcggaggcattccagcgcgcagtgcagatgagccagctgcccgaggaaggtcagcggcgtgccctcgacatcctgttcagcaccaccaacggcgcagggctcaccatccttcgcaacggcatcgggtcgtcccccgacatgagctccgaccatatggtctcgattgcgccaaagagccccggctcgcccgacaacccgctaatctacgagtgggacgggtccgacaacaagcaactctgggtgtcacaagaggccgtccacacgtacggcgtcaagaccatctacgccgacgcctggagcgctccgggttacatgaagaccaatggcaacgacgctaacggcggcaccctctgcggcctctccggcgcctattgcgctagcggcgactggagacaggcttatgctgattacctcaccaaatatgtcgagttttaccagcagtccaatgtgacgattacccacctcggcttcatcaacgagccagaattgacaacgagctacgcctcgatgcgcttctcggcctcccaggcagccgagtttatccgcatcctctacccgaccatccagagctccaacctgacccataagccgaccatcgcctgctgcgacgccgagggctggaactcgcagtctggtatgctgggtgccctgagctccgtcaactccatgtttggcctcgtcacggcacacgcctacacctcgcagccgactttcgccatgaacacgcctcatccggtttggatgactgaggctgccgacctacgcgagggctggacgtgggccaacaacgtgtaccaggcgatcgtgaacgccaacgcgtcggcgtacctgtactggatcggcgcgcagacgggcaacaccaacagccacatgatccacctggacctcaacgcgggcaccgtcgagccgagcaagcggctgtgggcgctgggccagtggagccgcttcgtgcgcccgggagcccgccgcgtcgccgtctcgggcggctccggcagcctgcgcaccgccgccttccgcaacgaggacggctccgtcgccgtcgtcgtcctcaacagcggcggcgacgccgccctcaacgtccgcctcgacgccgcctcgtccggcgacgaccagcaaccggcctcggccaagacttgggtcacggacaactcgagggccatcgaggagatcgagactagcttcgccgatggtgctgccaccgtcaatgtgccctcgaggtccatggccaccgtggtgctctatccggctccggaggaggagaaccccgaggagtaa

SEQ ID NO: 1427 - DNA, 2604 bp, Myriococcum thermophilum
atgtctgcgaataacacggcctccaagcccctcatcgccaacaacggcgccgcgactgccaccgcctccaccaccgcctccgcccgtttcccgttcctccgcacgaagcgcggcatcgccctcgtcgtcgtcgtcgccatcgtgctcatcgtgggcggcggcctgtccgggctggccgcgctgcgcacccgtggcggcggggatggggactctgcgtcggcagacgagtatggcgagggggtgattagagacgactcgtggttctacgggctgtcgccgcccgtgtatccctcgccaaatataacgggcagtgaaggcaggtgggtagaggcgacgaggaaagccagagagttggtgcgaagaatggcgcttgaagaaaagatcagcttgactgccggcgatggctcgtttcccggctgttccggctctctcccgcctatcccacgcctcaagttcccgggcatgtgtctgagtgacgcgggaaatgggctccgcggtaccgatttcgtcagcacctggccaagcggtatccacgttggtgccagctggaacaaggctctcacccgccggcgaggctctgggatgggaggcgagttcaagaccaagggcgtcaatgtgctactggggcccgtcgttgggccggctggccgagtggtgctaggtggcaggaattgggaaggtaaaatctcctttccccaacagcgctcccgggaccagtcgctaaatttaacaggcttctcggttgacccgtatttgtcgggagttttggtatccgaaactgtcacggcagtccaagcagccggcgttatcaccagcaccaagcattatattgcgaatgagcaagagacgaaccgaaacccctctggggatattcagtcggtgtcgtccaacattgatgataggaccatgcatgagttctatctatggccttttcaagatgctatccgcgccggcagtggaaacataatgtgttcgtaccaacggctcaacaattcgtatggctgtgcaaatagcaaggcgctcaatggattgctcaaaaccgagctcggctttcagggttgggtcgtgagcgactggggtgcccaacatgccggagtcgctacggcgctggctggaatggatgtcgtcatgccgaacggtgatgccttttggggtccgcatctgatcgaggccgtcaacaatgggtccgttgccgagactcgcgtggacgacatggtcgtcagaacgctcgcgacatggtacctattaggccaggatcgggacttccctcgccccggcatcggcatggccaccgatctcacgagggatcacaggattgtcgatgcgaggaactccagtttccggtcgacattgtttgacggtgccctcgagggccacgtgctcgtcaagaacgcccgaaatgccctgcccttgaggagaccaaagatgttgtctgttttcggttattcggctaagaacccggaccacaacaatccctcacctggtcaatcaccctggctctggggatccgagtccttcaactacaccgagttcagcggccgcttcttcgggttcggcggcgaatacagctctacgcccattgcgtttaacggcaccatctactcaggtggcgggtccggggccacatcgccggccaccatcgtttctccctttgacgcgctgatccagcgggcatacgacgatggcacggctctcttctgggactttgtcagcggagaacccttcgtcaatcccatgtcagatgcctgcttggtcttcggcaatgcttatgccaccgaggccgctgaccgacccggcacccgcgacgactacactgacggcttgatcaggcacgtcgcagaccgctgtgcaaacacgatcgtcgtcatccacaatgcggggatccgcctggtcgaccagtttatcgaccaccccaacgtgacggccctcatgttcgcgcatctgcccggggaagcgtctggtcgagcggtggtgtcactgctgtacggggatgagaatccgtcgggcaagttgccgtacacggtggctcgcaacgagtcggactatccggtgctggggccggacgtggagcccgaggggagcatgttcgcgctgttcccgcagagcaacttcaccgagggcgtgttcctggactaccggcactttgacgcgcggaacatcacgccgcggtacgagttcgggttcgggctgagttataccacgttcgaatacgacaagctggtggtgcggaaggtaggctccgccggacggttcggtgagtacccgacgggacggatcgtcgagggcggccaggaggacctgtgggacgtgttggtggaggtgtcggccgaggtgaccaacaccggggaggtggacggcgccgaggtggcgcagctgtacgtggggatccccgccgagggggcaccggtgaggcagctgagaggcttcgagaagccgttcctcaacgcgtcggccacggcgacagtccggttcccgctgacgaggagggacctgagcgtgtgggacgtggtggcgcagaagtggcggcttgtcaggggcgagtacaagatcgaggtgggcagcagtagtaggaacttgccgcttgttgggacacttacgatctga

SEQ ID NO: 1428 - DNA, 1071 bp, Myriococcum thermophilum
atgttttccaagctcttcaccacggtcgccctcgcggcctcgctggtttctgcgcagaccttcacggactgcgaccccaccaagcgtgatgactgccctaaccccaaggctgtcggctccaagccggtcgacatcgacttccgccagggggccagcaacttcttcaaggcggcagatggcacgagtctcacgtacgacaaggagctcggtgccgtcttcagtatcaataaggagacggatgctcctaccatcacctccagcaagtacatcttcttcggccaggttgacgtgactgtgcgcgctgcccgcgggacgggcatcgtcaccagcttcgtgctgcagtcggatgacctcgacgagatcgactgggagtggcttggggccgacaacacccagcttgactggatcatcgacggcaacgtcgtccgcacgctcaggaacgagggccttgagggctgtgccggctacccgcagacccccatgcagatcaagctcggcacctgggttgctgggcgcaaggacgcgcctcagggcaccatcgactgggctggtggtcttaccaacttcgaggaggctccgtttgacggatattaccagagcctgcatattgtagactacatgggcggccgcggcgccaaggaggcgaccgagtaccaatacaccgaccgcagcggcacgtggcagagcatcaaggtggtcaacaatggcgaggaatctgacgatgacgacgacgacaacaccaccaccactactactactacttcctccaaaaccagcgcgacttcgaccacctccaaggccacgtcgacctccatgtctagctcgtctagctcctccagctcgtctcgcgccacccccaccaccctttccaccgtgagcacctcggctaccccgagcaccagcgacatcgacagcccgactcccaccaacggcccgaccagcaccgtcggccgcgaggtcgaggccacttccgctgtctctcagaccgtgtccaccggtgcggccccgaccatgggtggcaatttggccgctgtgggtgctgctgccctccttggcgccctcgctctctaa

SEQ ID NO: 1429 - DNA, 744 bp, Myriococcum thermophilum
atgcagccgtctctgctcttgttcctctcgtccctcgtggcggcgagccccctgactgcgctcgacaagcggcagcaggccacgctgtgcgaacagtatggctactggtccggcaacgggtacgaggtcaacaacaacaactggggcaaagactcggcctcgagcggcagccagtgcacctgggtcgacagcagcagctccggcggcgtctcctggcacaccacctggacctggcagggcggcgagaacaatgtcaagagcttcgccaactgcggcctgcaggtgccccagggcaggaccatctcgtccatcaacaacctgcagacgtccatctcgtggtcctatagcaacaccaacatccgcgccaacgtcgcctacgacctctttaccgccgccgacccgaaccacgaccacagcagcggtgactacgagctcatgatctggctggcaaagtacggcgacgtctacccgatcggctcgtccgcgggctacgtcaacgtggccggccaggactgggagctgtggacgggatacaacggtgccatgcgggtctacagcttcatcgcgcccagcccgcgcaacagcttcagcgccaacgtcaaggagttcttcaactacctcgagtgggcccagggcttcccggccagcagccagtaccttctgatcttccaggccggtaccgagcccttcactggcggcgagaccaccttcaccgtcaacaacttctctgcgagcgttgcataa

SEQ ID NO: 1430 - DNA, 3048 bp, Myriococcum thermophilum
atgctctccaggactctggctgtcgtggccttcgccgtggccccgaccatagccacaactcctgccgtcaatgtctactggggacagaaaggcactgcctctgacagacttagcactttttgtgacgcatccagcttcgaatatgtcacagtcggcttcatcaacaagtctcccgagaaagacccgtccgcgttgaggtacccgggcagtgacttttccgttcactgcacgaacatagccaagtaccaagacaccgagggagtcgactccaacctcttgcgcaagtgcggccagatcgctgccgatgttcggtattgccagaagaagggtaagaaggtgctcctctccatcggtggcgaatggaacccgcccaagacggattacagcatctccagtccgccagaaggggagtatttcgccgacttcatctggggtgcattcggtccttacaccgagaactggaaggacaaaccaagacctttcgatgacttcttcaacgccgacgagggcgaagagcactttgtttttgatggttttgattttgatatcgaacacaagtttgaggaccagagcggttatgtcgcaatgatcagaaggttgcgtgccctgaccgagaaggacacgacaaagcaatacttgatcaccgccgccccggagtgccccctgaacccggattacttcaagatgaagaccatcatcgacacttgccaattcgatgctctcttcgtccagttctacaacaaccccgtctgcgccggagttgacaataacaactttgacgactgggtggagtacctggccaagacgcccagcaagaatgcgaagatcttcatcgggcttcctggttctccggaagcggccggctctggctacctggctcctggacccgcgtttcagttgatcaacaaacataaggacaagcctgctttcggtggtgtcatggtctgggatgccgtctatggcagccagaagtttggtggcatcccgttctacgacttgatgcatgactttgtctgcggcgccccgtcccacaccacgacggccccggccccgacagcaacggccaccgtttgcgtcaagtggcacacggttgtcagcggcgatacttgctacgagattgccggctcctacggcatctccctggatgacctgtacaagtttaacccgggcattacttgtaacctccaagtcggtgaccaggtctgcgtgaggtttggcgtcccaatccttacgagcagcttgagcagcagcttgacaagcacagaaaccctggctagcactagcacaacttcaagcaccagcaagtcgacaagctcgactagaggctcggctatttcgaccaaaccttcaacaagctcgatcagaacttcggctagctcgacgggaagctctacaagcccaacaggaacctcaaccaagacctcggccagctcaattaagagctcgagcacaactttggctagcccaaccaaagccccgactagctcggccaaaccgtcgacaagttctattaaaacctcggcgagcaagacttcgactagctcaactaagacctcagccagcccgaccaagacaacgacaagctcaactaaagctccgacaagttcagccaaaacgtcagtgagcaagacctcggttagctcaactacgacctcgacaagttctgtccggacctcggccagctcaacaaagacctcggctagcaagacctcagcgagctcaaccagttcaatcactagtccgacgagaacctcgaccagttcagccaggccctcaactagttcgatcaaaacctcggtcagctctaccaagaccttgactacttcaaccagtctctcggttagaccaactacttcgactaagccgtcgactagttctagcccgtcaaccagcccggttagcgtgaccagcgcgaccagcatcaacagcccgagtatcacaagcgcctcggctacaagtacctcgactggcgtcgatgactcgtgcccggatgaggagaccagcacatcaactgctgcgacctctacagagcccgttaccctttcgattaccgaatctgtcaccgtgtccgctaccgagacgactactgggtctgttaccgagacgactactgggtccgctaccgagacgactactgggtctgttaccgagacgactactgggtctgttaccgagacgactactgggtctgctaccatcacactgcctccgcagtctacgtctactagtagcgaagcgctcgctagcacttcgactaacgatgatgactcgtgcccggacgatgagaccagcagcagttcggccacagagactgccaccgtcacatttaccccaggatttacttctacgggtggcgaggcggtcactagcacctctgctgtggacgatgaggccagcacctctgctattgtgtccgctactcagatcaccacatcgtctggtgtcacaatcaccggttcgtcagtctcggacatcagcaccactgcgagcagcaccgcctcctctgagagctggacgacgtctaccatctacatgaccaccacctacaccataacaagttgcccggttaccgtgaccgactgccccggcaagatcggccaggtcacgaccgagacgattgtcgtcagcacaaccgtatgccccatcaccgaaggtgcggaagtgggcccgtcaacctcggcctcctcgccgccggcgccgatcgagtcgggcagcggcgccaagcctcccttccccaccggcggggagagcgagaacacagactcgacatcgaccgcacgagtcactgcgacgcgcttcactaccctgacggtgcccaagtcggaggctaccggctcggcggttaacacctcgtcgtcgccatcgtcgccgtccttgccgcagtcgtcgtcgttgtcacggtccccgtcggctggccttcctatcaagtcgggttccccggccccgccatcggtgaccacgatccccgtgttcgcgggcgccggccgcaacgccgtcacgcttggaatgccggctgtcctggctgttgttctggtacttgctttttaa

SEQ ID NO: 1431 - DNA, 1290 bp, Myriococcum thermophilum; identical to SEQ ID NO: 1125

SEQ ID NO: 1432 - DNA, 1677 bp, Myriococcum thermophilum
atgaggcatctgaacgatttcgccctcctcttcacgctgttgagcggcagtgccacctcggccgccgtgagaggcagcacatatcatcaagctcgagcggatgaattcaacaatccggtgctgtgggaggactatccggacctggacgtgttccggatcgggtcgacctactactactcttcctcgacgttcgcctactccccgggagcgccggtgctcaagtcgtacgacctggtcaactggacgcccgtcacgcactcggtcccgacgctcaacttcggggaccgctacaacctgacgagcggcacgccggcggcctacgtcaagggcatctgggcgtcgacgctgcggtaccggccgtccaacgacaagttctactggtacggctgcatcgagttcggccagacgtacatctggaccagctcgggcacgcgggcgggcgacaaggacggcgaggtcgacccggccgactgggcctgggagccgcacccgcccatcaacaagtgctactacgacagcggcctgctgatcgacgacgacgacaagatgtacatcgcctacggcaaccccaacatcgaggtcgccgagctgtccgacgacgggctcagcgaggtctcgtcgcgcgtcgtctactccccgccgtccggcaccaccatcgagggcgcccgcatgtacaaggtcggcggcgcctactacatcctggtgacgcgcccggccgacgccgagtgggtgctcaagtcgacgtccgggccgttcgggccgtacgagatgcgcgagctcgtgacgcgcatcagcgggccgctctccaacgccggcttcgcccaccagggcggcatggtcgacacgcccgacgggaacaactggtactacgtcgccttcatggacgcgtacccgggcgggcgcatccccgtggtcgccccgctgcgctggaccgacgacggctggcccgagctggtgacggacgaccgcggcggctgggccaccagctacccggtgcccgtgcaggcggccaagacggtgccggacgacggcctggacctggacgagttcacgggcggccagctgagccaccactgggagtggaaccacaacccggacacggcccgcttctcgctcggaggcgaaggcgagggcggactgactctgcagacggcgacggtgacggaggacctgttcgcggcgaggaacacgctcacgcgcagggtcaggggccccaagtcgagcggcacgttccggctggacgtcagcaagatgcgcgacggcgaccgggccggagccgtgctgttccgcgatacggcggcgtacatcggcgtgtggaagcaaggggatcaggcttctatcgtcgtggtcgatggtctcgagctgtctcagggctcctggaacaccgtctcgaccgggaggttggccgagacgggcccgaccctgagcaacacggaggatgtctggctccggatcgaggccgatatcacgcccgcgtttgggaccaacacggccaggaccacgaccttctcgtacagcgttgacggcgggcagacgtttgtccctcttggcccggcgttctcgatgagtaacacttggcagtactttacgggctacaggttcggagtctttaactttgctaccagggagcttggaggagaagtgaaggtcaagagcttccagatgcagcctctgtga

SEQ ID NO: 1433 - DNA, 1200 bp, Myriococcum thermophilum
atggcggtattgcggatgttctggttgtttctctgcttcttctcgcttaccatggctgacaagccaaagccaaagcgggagctgcgatgcctcatgtattataccggtcagcacccggtggcgccctccattgacgagctccgacatgtaacgcacgtcgccgttgcttttatgagccctggcatcttcaacgagcccgggcggacggaatggccattgtttacaaccgtcgatgaagctcgtgccaagttcccggaagagaccaaagttatagtggccattggtggctggggggacacggtcggcttctctgaggctgcgctgaatgatgaaacacggaaaacatttgccgagaatgtggctcgcatggtagaagccacgggtgcggatggcgttgacattgactgggaatatccgggtggtaatggcgaggattataagcaggtccccaacgaagccaaggcttgggagattgctgcctaccctcttctcctcgcagagctgcgcgccgcccttggacctcacaaaatcatctcggccgcagtgcccggtctgaagcgggacatgctcgctttcactcccgagacggtgccccgaatcatgcgctacatagacttcctaaacgtcatgacatatgatctcatgaaccgccgcgacgtggtgaccaagcatcacaccggagtggaactaagcctagaggctgttgatgcctatatctctgccggcgccgagccccagagaattaatttgggatttccattttatgtcaggtacttcaagacggaacacgacgcctgcgcgctcgcctccccgataggctgcccgaccctgctacttgaagacccggagacgggtgaggatctcggccgtagcggggcgtttgcgtggcacgatccggtgcctgaaggaatggcagaatcttttgccagggcgctggaagatggtgtctacgacgaagagggcggtggatactactattgggacgccagggaagatctctggtggacatttgacactcctgactccatcaagcgcaagttccctcgggtactagacaagcggcagttggggggagtctttgcgtggggactcggcgaagacgcacctctgtacgaacacttcgctgcactcaatgacgggctggagagatacttagaaggcaaggaaccagactgtgaggaaaaggaagtttcgacctaa

SEQ ID NO: 1434 - DNA, 1185 bp, Myriococcum thermophilum
atgttctggttgtttctctgcttcttctcgcttaccatggctgacaagccaaagccaaagcgggagctgcgatgcctcatgtattataccggtcagcacccggtggcgccctccattgacgagctccgacatgtaacgcacgtcgccgttgcttttatgagccctggcatcttcaacgagcccgggcggacggaatggccattgtttacaaccgtcgatgaagctcgtgccaagttcccggaagagaccaaagttatagtggccattggtggctggggggacacggtcggcttctctgaggctgcgctgaatgatgaaacacggaaaacatttgccgagaatgtggctcgcatggtagaagccacgggtgcggatggcgttgacattgactgggaatatccgggtggtaatggcgaggattataagcaggtccccaacgaagccaaggcttgggagattgctgcctaccctcttctcctcgcagagctgcgcgccgcccttggacctcacaaaatcatctcggccgcagtgcccggtctgaagcgggacatgctcgctttcactcccgagacggtgccccgaatcatgcgctacatagacttcctaaacgtcatgacatatgatctcatgaaccgccgcgacgtggtgaccaagcatcacaccggagtggaactaagcctagaggctgttgatgcctatatctctgccggcgccgagccccagagaattaatttgggatttccattttatgtcaggtacttcaagacggaacacgacgcctgcgcgctcgcctccccgataggctgcccgaccctgctacttgaagacccggagacgggtgaggatctcggccgtagcggggcgtttgcgtggcacgatccggtgcctgaaggaatggcagaatcttttgccagggcgctggaagatggtgtctacgacgaagagggcggtggatactactattgggacgccagggaagatctctggtggacatttgacactcctgactccatcaagcgcaagttccctcgggtactagacaagcggcagttggggggagtctttgcgtggggactcggcgaagacgcacctctgtacgaacacttcgctgcactcaatgacgggctggagagatacttagaaggcaaggaaccagactgtgaggaaaaggaagtttcgacctaa

SEQ ID NO: 1435 - DNA, 1470 bp, Myriococcum thermophilum
atgtacgccaagttcgcgaccctcgccgcccttgtggccggcgccgctgctcagagcgcttgcaccctgacgactgagaaccacccttcactgacgtggtccaagtgcacgtctggcggcagctgcaccaccgttcagggttccatcaccatcgacgccaactggcggtggactcaccagatcgatagcgcgaccaactgctacgagggcaatgagtgggacacttcgtactgcgatgatggcccctcttgcgccgccaagtgctgcgtcgacggggctgactacagcggcacctacggcatcaccacgagcggtgacaccctgagcctcaagttcgtcaccaagggccagtactcgaccaacgtcggctcgcgcacctacctgatggagagcgagaccaagtaccagacattcgagctcctcggcaacgagttcaccttcgatgtcgatgtctcgaacatcggctgcggcctcaacggcgctctctatttcgtgtccatggatgccgatggcggtatgtctcggtactcgggcaacaaggcgggcgccaagtacggtaccggctactgtgatgcccagtgcccccgtgacctcaagttcatcaacggcgaggcgaacgtggagaactggcagagctcgaccaacgatgccaacgccggcacgggcaggtatggcagctgctgctctgagatggacgtctgggaggccaacaacatggccaccgccttcacgccccacccctgcactatcatcggccagtcgcgctgcgagggtgagacgtgcggcggcacctacagctcggaccgctatgccggcgtctgcgatcccgacgggtgcgacttcaacgcgtaccgccagggcaacaagaccttctacggcaagggcatgacggtcgacacgactaagaagatgacggtcgtcacccagttccacaagaactcggccggcgagctctccgagatcaagcggttctacgttcaggacggccaggtgatccccaactccgagtcgaccatccccggcgtcgagggcaacaccatcacgcaggactggtgcgaccgccagaaggccgccttcggcgacgtgaccgacttccaggacaagggcggcatggtccagatgggcaaggccctggcccagcccatggtgctcgtcatgtccatctgggacgaccacgccgtcaacatgctctggctcgactccacctggcccatcgacggcgccggccagccgggcgctgagcgcggtgactgccccaccacctcgggcgtccccgccgagatcgaggccgaggcgcccgactccaacgtcgtcttctccaacatccgcttcggccccatcggctccaccgttgccggcctgcccgacggcggcgacggaggcaacccgcccgtgagctcctccaccacctcggtgccttcgtccaccaccaccactacctcctcacctacctacctacttgtggcctaa

SEQ ID NO: 1436 - DNA, 2295 bp, Myriococcum thermophilum
atgcatgaccctatggccttcgtttcctccttagcctttgccgccctcggggcactcatcgtccctgcgaggggcggagtaacttacccggactgcgccaacggaccgctcagatcaaacacggtatgcgatacgtcggcgtccccggcagctcgagcggctgctctcgtggaggcgatgaacacgaacgagaagctcgcaaatctgatcaacaactctccgggtgtctcgcgactcggcctgagtgcgtaccaatggtggaacgaagccctccacggagtagctcataaccggggcattacctggggtggcgagttcagcgcggctacccagttcccgcaggctatcacgacttccgccacgttcgatgacgctttgatcgagctgatgggcaccattatcagcaccgaggcccgtgcttttgctaacaatgggcgtgctcatcttgacttctggacgccaaatgtcaacccgtttcgagacccgcggtggggacgtggacacgagacgccgggagaggatgctttcaggaacaagaagtgggctgaggccttcatcaagggcatgcaagggcccggaccgacacaccgagtcatcgccacgtgcaagcactacgcagcttacgacctcgagaactccgggagcacgacgcgattcaacttcgatgcgaaggtgtcaactcaggatctcgccgagtactatctccctccgttccaacaatgcgcccgggactctaaggtgggctccatcatgtgcagctacaatgcggtcaacggcgtccccgcctgcgcgaattcttacttgatggacaccatcctgcggaagcattggaactggaccgaccagaatcaatatattgtgagcgactgcgatgctgtgtactatctcggtaacgcaaacggcggtcaccgataccagccgagctacgcggcagcgatcggagcttccctcaaggccggttgcgacaacatgtgctgggcgaccggcggcactgccccggatcccacgtcggctttttattccggtcagttcgacgaaacgacgctggacactgctatgttgcgccagatgcagggcctcgtcctggcagggtactttgacggtccggacggcatgtaccgcaacctgagcgcgtcggacttgaacacgcaagccgcccaagatgctgcgctcaaggccgccgaagaaggcatcgtgctcctcaagaacgacggaatccttccgctctcggtcaatggttccaattcccagctcgctatgatcggcttctgggcgaacgcagccgacaagatgcttggaggttacagcgggaccccaccgttcaaccatgatcccgtgacggctgcaagatcgatgggcatctcggtcaactatgttaacggacccttgacgcaaccttacggggatacgtcggcagcagtgaatgccgcccaaaggtctgatgcggtgatattctttggcggaatcgacaataccgtggagaaggagagtcaggacaggacatccatcgagtggccatctggacaactggccatgattcgggcgctcgctgaaactgggaaaccaattattgtcgtgaggctcgggacacacgtcgatgacacccctctcctcagcattccgaatgtgagggccatcttgtgggcaggataccctggccaggatggcggtacagctgtcatgaacatcattaccggcctcgccagtccggcggggaggctgtcggccaccgtgtatccggcttcgtacaccaaccaggcaccctatacaaacatggccctacggccgtcttcctcctatcccggccgaacataccgctggtacaaggacgccgtatttcccttcggccacggcctgcattacaccaatttcagcgtctctgtgcaggatttcccggaaagcttcgagattgccgacctcttggattcctgcggggactctgtgccgtatcttgacctttgcccgttcccgtccgtgccgctcaacgtgacgaacactggctctcgtgcgtccgattacgttgcgcttggcttcttatcgggagaatttggtccaagtccatatcccatcaagacactggcaacgtataagcgcctgtttaatatcgagcctgggcaatcgcaggaggtcgagctcgagtggaagctggagagcctagcccgagtggacgagaatggtaacagggtgctctacccgggaacttatacgcttttggtggatcagccaaccttggcaaatatcacctttaccttaacaggtgaagaagcagtattggatagctggccgcagccatga

SEQ ID NO: 1437 - DNA, 2283 bp, Myriococcum thermophilum
atggccttcgtttcctccttagcctttgccgccctcggggcactcatcgtccctgcgaggggcggagtaacttacccggactgcgccaacggaccgctcagatcaaacacggtatgcgatacgtcggcgtccccggcagctcgagcggctgctctcgtggaggcgatgaacacgaacgagaagctcgcaaatctgatcaacaactctccgggtgtctcgcgactcggcctgagtgcgtaccaatggtggaacgaagccctccacggagtagctcataaccggggcattacctggggtggcgagttcagcgcggctacccagttcccgcaggctatcacgacttccgccacgttcgatgacgctttgatcgagctgatgggcaccattatcagcaccgaggcccgtgcttttgctaacaatgggcgtgctcatcttgacttctggacgccaaatgtcaacccgtttcgagacccgcggtggggacgtggacacgagacgccgggagaggatgctttcaggaacaagaagtgggctgaggccttcatcaagggcatgcaagggcccggaccgacacaccgagtcatcgccacgtgcaagcactacgcagcttacgacctcgagaactccgggagcacgacgcgattcaacttcgatgcgaaggtgtcaactcaggatctcgccgagtactatctccctccgttccaacaatgcgcccgggactctaaggtgggctccatcatgtgcagctacaatgcggtcaacggcgtccccgcctgcgcgaattcttacttgatggacaccatcctgcggaagcattggaactggaccgaccagaatcaatatattgtgagcgactgcgatgctgtgtactatctcggtaacgcaaacggcggtcaccgataccagccgagctacgcggcagcgatcggagcttccctcaaggccggttgcgacaacatgtgctgggcgaccggcggcactgccccggatcccacgtcggctttttattccggtcagttcgacgaaacgacgctggacactgctatgttgcgccagatgcagggcctcgtcctggcagggtactttgacggtccggacggcatgtaccgcaacctgagcgcgtcggacttgaacacgcaagccgcccaagatgctgcgctcaaggccgccgaagaaggcatcgtgctcctcaagaacgacggaatccttccgctctcggtcaatggttccaattcccagctcgctatgatcggcttctgggcgaacgcagccgacaagatgcttggaggttacagcgggaccccaccgttcaaccatgatcccgtgacggctgcaagatcgatgggcatctcggtcaactatgttaacggacccttgacgcaaccttacggggatacgtcggcagcagtgaatgccgcccaaaggtctgatgcggtgatattctttggcggaatcgacaataccgtggagaaggagagtcaggacaggacatccatcgagtggccatctggacaactggccatgattcgggcgctcgctgaaactgggaaaccaattattgtcgtgaggctcgggacacacgtcgatgacacccctctcctcagcattccgaatgtgagggccatcttgtgggcaggataccctggccaggatggcggtacagctgtcatgaacatcattaccggcctcgccagtccggcggggaggctgtcggccaccgtgtatccggcttcgtacaccaaccaggcaccctatacaaacatggccctacggccgtcttcctcctatcccggccgaacataccgctggtacaaggacgccgtatttcccttcggccacggcctgcattacaccaatttcagcgtctctgtgcaggatttcccggaaagcttcgagattgccgacctcttggattcctgcggggactctgtgccgtatcttgacctttgcccgttcccgtccgtgccgctcaacgtgacgaacactggctctcgtgcgtccgattacgttgcgcttggcttcttatcgggagaatttggtccaagtccatatcccatcaagacactggcaacgtataagcgcctgtttaatatcgagcctgggcaatcgcaggaggtcgagctcgagtggaagctggagagcctagcccgagtggacgagaatggtaacagggtgctctacccgggaacttatacgcttttggtggatcagccaaccttggcaaatatcacctttaccttaacaggtgaagaagcagtattggatagctggccgcagccatga

SEQ ID NO: 1438 - DNA, 2334 bp, Myriococcum thermophilum
atgaggttcctcgcctcgacattattccttgcgtcagctgccctggctgccgaccacgggcgatcgagtttggaggatgctgtgtacaagaaccccaaggcctcgatcgaagatcgtgtagccgaccttctctcccggatgacgatcgaggagaaggcatctcagcttctccaaggcgatatccgcaactggatgaacgaggcaaccaacgagctcaaccagacaggcctggaatggagcacgagggttcggggaagtgccttttacgtaggcgtgccagttgcaaacgagtggctgtcaaaacacatcaaggctgcccaggattacatccaggaggagaccgacctcggcatcccagcctttgtgcagaccgagggccttcacggtcttcttgctcacaatgccactatttttaactcgcccataggactgggctgctcatggaacccatccctgattgaggagatggcagctgccattgccaaagaggcgcggggcctcggtgtcaaccagctttttgctccagtcgccgacctagcgcgggaactccgccacggccgagtagaggagatgttcagcgaggacggctatctcgccggggagttcgcccatgcctatgtgaaaggcgctcagtcggccggcgtcagtgccatggtcaagcactttgctgcatttggtgtggcggagcagggcttgaacaccggccccgtccacggcggcgaacgagagttgcgcacgatctatctcccgccgtacaagcgcgccatcatcgacgggggcgtctattcgatcatgaccgcctaccacagttacgacggcatccccgccgtgtctgatccgcacctgctcactgacattctccgggatgaatggggttacaagtactttaccatgacggatgccggcgcctcggaccgcctttgcgtggacttcaagatgtgcgcttcgagccccatcgataaggaagccatcgtcaagtacatcctcccgtccggtggcgacgtggagatgggaggcggatcgtactcgttcgagaagattccagagctcgtgaccagcggcacaatcaaggaggagctcgtcgatatcgctgtcgcccgtgtcctgagagccaagtttgagctcggtcttttcgaggacccttttccgggtctccctatcgaagaggcgaataaagtgatccacgcgcccgagcacgtctcccttgccaggaagatagacgaggaatccatcgtcctcctggaaaaccacaacaacgtcctgccgctgagcaagaacgcgtccgtggctgtcattggacccatggcgcacgggtacatgaactacggcgactacgtcatcgtcaattcttcgactcgtgggattacgcccctcgacggtatcaaggcggccagccgaggcaaggtcacgtacgcgaaaggctgtgagcgctggtccaattcgcaggacgggttctctgaggccatcgctgccgctgaggccgcagatgtcgccgtcgtcgtagtcggaacctggtctcgggaccagaacgagctctggcagggcctgaacgccactacgggagagcacgtcgatgtgaatagcctcgacctggtcggcgcccaggaggccctcgtccgcgccatcattgagacgggcaagccgaccgtggtggtcttctcgtctggaaagcccgttacagcgccctggatctcggagcacgccgccgccctcatccagcaattctacccttcggaacagggaggggccgccctcgcttccatcctcttcggcgacgtgaacccgagtggcaggctgagcgttagcttccctcacagcgttggtgacctgccggtttactacgaccattggaactcgggacgcagtacctcgccggatgccggcatcgcttacgagaacgggactcttgtttttgggcatcagtacgtcctgggagacccgaggcctctctatgagttcgggtacgggctgagctactccaagttcgagtatagcgatgtcagcgtcgacaagaccaccgtgggacccgaggacaccgtcacagtcactgttagcgtcaagaatgtgtcgaatcgagacggccaggaagttgtccaagtttacgtcaaggacctggtcgccagcgtcgttgtgccaaacattcgtctgaggggatttcaaaaagtgaaactgagagctggggagagcaaacaagtgagtatcgaggtcaaggtccaggatctgggtgtctgggacgcgaggatgcgatatgttgttgagcccggcgactttctgtttcttgttggtgcgtccagcaatgactttaggggaaatgttaccgttactctgaagtag

SEQ ID NO: 1439 - DNA, 1131 bp, Myriococcum thermophilum
atgcgcactcttgggttcgtgctggcggccgcccctgcggctgttcttgctcaatcgcctctgtggggccagtgcggcggcattggctggtcgggtcccacgacctgcgtttccggcgcagtctgcgaagtgatcaacgactattaccaccaatgtgtgcccggatcaggcaaccccccggcgactaccaccggtagcggcagcaacccgtctgctaccggcggcctccacgagaggttcgttgctaggggaaagcaatatttcggtgccgagattgatcactaccatcttggcaacggtgccttgaccgacattgtcaagagggattttggccaagtcacccacgagaacagcttgaagtgggatgctactgagccgaaccgcggtcagttcagcttctccaacgccgatcaggtggttgactttgccacggccaacggcaagtacatccgcggccacaccctcctctggcactctcagctgccgcagtgggtgtcgcagatcaacgaccgcaacaccctgacccaggtcatccagaaccacgtcaccaccctcgtcacccgctacaagggcaagatcctccactgggatgtggtcaacgagatctttgccgaggacggctcgctccgtgacagcgtcttcagccgggtcctgggcgaggactttgtcggcatcgccttccgcgctgcccgcgccgccgacccggacgcgaagctctacatcaacgactacaacctcgacatcgccaactacgccaaggtgacgactggcatggtcgagcacgtcaacaagtgggtctcccagggcatcccgatcgacggcatcggctcgcagtgccacctggccgcccccggcggctggaacccggcctcgggcgtccccgacgcgctcaaggtcctggcctcggccaacgtgtccgagatcgccatcaccgagctcgacatcgccggcgcctcggccaacgactacctcaccgtcgtgaacggctgcctccaggtctcgaagtgcgtcggtatcaccgtctggggtgtctctgacagggacagctggaggtccaacgactacccgctcctctttgacggcaactaccagcccaaggaggcttacaatgctctgattaacgccttgtaa

SEQ ID NO: 1440 - DNA, 1314 bp, Myriococcum thermophilum
atggctcgcggcgttgctttcctgggtctcgcctcgctcctcgctggcgcggccaaggcccagactccgggcgagggtgaggaggtgcaccccaagatcacgacctaccgctgcaccaaggcggacgggtgcaaggagcagaccaactacatcgtgctcgacgccctgtcgcacccggtccaccaggttgacaactcgtacaactgcggcgactggggccagaagcctaacgagacggcctgcccggacctcgagtcgtgcgcccggaactgcatcatggaccccgtctcggactacagccagcacggcgtctcgaccgagggcacgtcgctgcgcctcaagcagctgctcaacggcaacgtcgtcagcccgcgcgtctacctgctcgaagagaacaagcagaactacgagatgctcaagctgaccggcaacgagttcacctttgacgtcgacaccaccaagctgccctgcggcatgaacagcgccctctacctctccgagatggacgctagcggtgcccgtggcgagcttaacccgggtggtgccacctttggcactggctactgcgacgcccagtgctacgtcacccccttcattaacggcctgggcaacattgacggcaagggtgcttgctgcaacgagatggacatctgggaggccaacgcgcggtctcagcacatcgcgccgcacccgtgcagcgtggccgggccgtacctgtgcgagggcgaggagtgcgagttcgacggggtgtgcgacaagaacgggtgcgcgtggaacccgtaccgggtcggcgtgacggactactacggcgagggcgacgagttcaaggtggacacgcggcggcccttctcggtcgtcacgcagttccacgccaacgacgcgggcaagctcgagagcatctaccgcctcttcgtccaggacggcgaggtgatcgagtcctacgtcgtccagcagcccggcctgcccgagacggaccgcatgacggacgagttctgcgccgccaccggctcgacccgcttcatggacctcggcgccatggaggccatgggcgacgccctctcgcgcggcatggtcctggccatgagcatctggtggagcgagggcgacaacatgaactggctcgactcgggcgaggccggcccctgcgacccggatgagggcaacccgtccaacattgtcgtcgtccagcccgacccggaggtcgtcttcagcaacatccgctggggcgagatcggctccacctacgagtccgccaccggcaacactaccgcttctgcccgcaaggtcaagagcaggcgcttcaggaggttctaa

SEQ ID NO: 1441 - DNA, 1146 bp, Myriococcum thermophilum
atgcgcgtctcgagcttggttgcggccctcgctaccggcggtcttgtcgccgccgcgcctaagcccaaggagcaatcgcaacccagggccgtggacgtgaatcctttcaagggcaaggcgcagttcgtcaacccggcctgggcggccaagctagagcagaccaggcaggccttcctggcaaagaacgacacggtcaacgcggccaagacggcaaaggtccagcagaccagctcgttcgtctgggtctcgaggatcgccgagctctccaacatcgacgatgccattgaggctgctcgtgaggctcagaggaagacccgcaggaggcagatcgtcggccttgtgctctacgaccttccggaccgcgactgcagtgccggtgagagcgccggcgagctcaagagcgacgagaacggactcgagatctacaagaacgagttcgtcaagcccttcgccgagaaggtggcagccgcaaaggacctcgacttcgccatcgtcctggagcccgactcgctggccaacctggtgaccaaccagcacatcgagttctgcgccaacgccgcccccgtctaccgtgagggcatcgcctatgccatctccagcctccagcagcccaacgtgcacctgtacatcgacgccgcccacggcggctggctcggctggggcgacaacctcccgctggccgccaaggaattcgccgaggtggtcaagctcgccggcgagggcaagaagatccgcggcttcgccaccaacgtgtccaactacaatcccttccacgccatcgtccgcgagaacttcaccgagtggagcaactcgtgggacgagtctcattacgcttcgtcgcttgccccgttcctcgaggaggaggggctgccggcgcacttcatcgtcgaccagggtcgcgtcgccctgccaggcgcccgcgaggagtggggcgactggtgcaacgttaaccctgctggcttcggtcccgcgcccacgaccagggtcaacaacaccgtcgtcgatgctctcgtctggatcaagcccggtggtgagagtgatggcgagtgcggcatggctggcgctcccagggccggccagtggttcgacgaatacgcccagatgctggtcaagaatgcccacccatccgtcttccgcaggtggtag

SEQ ID NO: 1442 - DNA, 1506 bp, Myriococcum thermophilum
atgtggtcgccgtcgctctcttcgttttctgttttgttggctgcggctttgcaacccgtcgcggcaatctggccagcaccccaaagtttgtccacgggcagcgaggttctgtacttgcatcagaacatcaagatcacatataatggagaatccattccgtacacgtacggatacacgcccagcgagttgaccagcaaggaggttgttcaggcaggcatttcccggacgctcgcgggcatctttgagagcaagtttgttccttggaagctgcacaagcccgggtccaagtgggagcccgatctgtccgagagtcagcagtggatcgagacgctggagatcgtccagacgggcaaggataagcccagtgccttcaagcctcttgccggccaggtggacgagtcgtacaatctgacggtgagtgccgagggcgaagccaagctcacggccgtctcgtccatcggtgtgctccgcggcctcgagaccttctcgcagctcttctaccagcactcggccggcacgttctggtacacgccgttcgcgcccgtgtcggtgcaggatgcgcccaagttcccccaccgcggcgtcttgatcgacacggcgcgcaacttcctccccgttcccgacatcctgcgcaccatcgacgccctggcctggagcaagctgaaccggctgcacgtccacgtgaccgactcccagtcgtggccgctcgtgatcccttctctgcccgaggtctcggagaagggcgcctaccacccgagccagacgtattcgcccgaggacattgagaggatccagaagtatggtgccgagcggggcgtcgaggtgtacttcgagatcgacatgccgggccacatcggagtggtgtcgctgtcgcacccggagctgatcgtggcctacaacctgcagccgtaccagtggtggtgccaggagccgccgtgcggcgccttcaagctcaacaacacggcggtcgatgagttcctggagaagctgttcgacgacctgctcccgcgggtggagccgtactcggcctacttccacctgggtggcgacgagctcaaccggaacgactcgatgctggacgagggcgtccggtccaacgacaccgaggtgctgcggccgctgctgcaaaagttcatcgacgcccagcacgggcgcgtccgcgcggccggcctgaccccgatcacctgggaagagatcccgctcgagtgggaaatcgagctggccaaggacacgctcgtgcaggcgtggctgggcggcgactcggtcaagacgctgaccagcaagggtttcccagtgattgacagcaactataacttctggtacttggattgcggccgaggtcagtggctctcgtgggggaacggggaggcgttcgcccagggctatccgttcaacgactggtgcggtccgaccaagtcatggcagctggtctaccagcacgacccgacggccgggctgacggccgaggaggccaagctggtgctcggcggcgaggtggcgctctga

SEQ ID NO: 1443 - DNA, 1464 bp, Myriococcum thermophilum
atgacaacaaaccacatcatggcgagaacgctgcagtatcttctgtgtggtatcctcgcattggcggcgggcacaaccaatgccgctcctgcagcccatggttcgacccgggtagcggccgcggcagagcccagtgccactacgtacgaggccgaagacgctgttctgagcggaactactgtcgaaaccgaacaggaggggtatacggggaccggctacgtaaccggttttgatgaggccagcgacaagatcacgttcgaggtcgagagcgagacgacgaagctctatgacctcagcatccgcatcgccgccatctacggcgagaagcacaccaccgtggtgctgaacggtggggcgaacagcgacgtgtccatcccggccagcgacacatgggccgacattccggccggccaagtcctcctgaacgagggcgccaacacgatcgagatcgtcagcaactggggatggtacctggtcgactccatcacgctcacgccatcgacgccgcggccggagcaccagatcaacgcggagctgaacaacccgtcggcggacgagagcgccaaggtgctgtacgactacctccggtccatctacggcaagaagatcctctcgggccagcaggacctgacctgggccgactacgtgacggagcagacgggcaagacgccggcgctcgtgtcggtcgacctgatggactactcgccctcgcgggtcgagcggggaacgcagggcacggcggtcgaggaggccatcacgcacgcggagcggggcggcatcatctcggtgctctggcactggaacgcgccgacgggcctgtacgacacggaggagcagccgtggtggcgtggcttctacacggaggcgaccgacttcgacgtcgaggcggcgctgagctcgaccgacaacgccaactacacgctcctggtgcgcgacatcgacgccatcgccgtccagctcggccgcttgcgcgacgctggcgtgcccgtcctctggcggcctctccacgaggctgagggtggctggttttggtggggagctaaaggcccggagccggccaagaagctctgggccctgctctatgaccgccttgtcaaccaccacggcctcaacaacctcatctgggtttggaactcccttgaggccgactggtaccccggtgacgacacggttgacatcctcagcgcggacgtctacgctcagggcaacgggcccatgtctactcagtacaaccagctcattgagctcggcaaggacaagaaattgatcgccgccgccgaagtcggcgccgcgccgctcccggatctgctgcaggcctacgaggcccattggctgtggttcgccgtctggggtgacacattcatcaacaatgccgagtggaactcgcccgaggttttgcagacgatctacaccagcgattatgtcctcaccctggacgagattcaggggtggcaggactcgtaa

SEQ ID NO: 1444 - DNA, 1113 bp, Myriococcum thermophilum
atgcgccgcttaacctcgaaacttcttgctgccagcctcttggccgctacttccacggcggctcctcgccgttccgatttcgtgacggtcgagggagggatcttcaaactctcgggaaaagattttcactttgctgggagcaacgcttactacttccccttcaatgggtatgggggagaaggggccggtcctactgaagtcgtatttcaaagatggtatcctaacggcacttccatcattgacatcagcggtttcgacaaagttgtggaggctgcggagaagactggcatcaagcttcttgtagctttgaccaacaactgggccgattacggtggcatggatgtctacactgtcaatttgggcggcagataccatgacgatttctataccgtacccgaaatcaaggaggcgttcaagcgctatgtcaacgcggtagtgactcggtacaaagactcgccgaccatctttgcttgggagctcgcaaacgagccccgctgtggcgctgacggggttcgcaatcttccacggagtcccaactgtacgcccgaggttctctcgtcttggatctctgagatgagcgcatacatcaagagcattgatagcaaccatttagttacttggggaggcgagggaggattcaaccgcgaatccgacgactggtcgtacaacggtggggacggcggcgacttcgaccatgaactttcgattgagaccattgattttggtgtctttcactcctatcccgactggtgggataagactgtcgagtggacgcaccagtggatacgcgatcatgctgctgccggccgggaggctggtaagcctgtcgttcatgaagagtacggctggatgacgccagagaagagactggagtacaccggcaaggtcgacaacaggacaagagtcgaggtactcggcggctggcaaaagacgacggtcgaggagaagctggccgggagcatgtactggcagtatgggtattcggattactcctatggtagaaaccacgatgatgggttcaccatttatttggacgatgaggaagcaaggccgcttgtgtacgggcatgcaaaggacatgaattctcttaacgttcgccgtggccggaaatag

SEQ ID NO: 1445 - DNA, 1290 bp, Myriococcum thermophilum
atggccaaagactcaacccgtcgtcgtctcgccgccgttttcactgcggccgccgccctagtcgcggtgacccgaggcgatgatgatctggtggcggtgacggacgccgagtgccaatgctacaagaccaacggcacggcagcgagctacttcaaacaccacctgttctatgactttggctcgctctcgcgctacgtcaacgtcacggaccccatcgacaccttccggggcaataaggaggccccgccgacgagctcgtacttcttgcggcccgagttcgtcgatgtatgggacatccagaactgggacaacacggccctcatggcgctgcacgacccggacatcaacgacgccaccgtcaggatggtcaacagccccaacaacatctacatcgagtacgacgacgacgacgacgacgacgacgacgacgacgacgacagtgaagagcgggaccaccgcccgacacacctgactctgcgcacggtgcggcacgaggccgggttccagtcggcggccgagatcgagtcgctcagcaaagacttccactacctttccatgcggatgcgggcgcgcacgttgggttctcgcggtgccgtgaccgccatgttcacgtaccgcgacccgcccgaaggggaggaggaggtcctatcagcgatgcaggaggccgacctggagatcctcacgcgggaagaagggagggaggggaccccgagatgggtgcagtacacgaaccagccgtcgtggaacgacgacggggacgtgcccgagtccacgcgcaacgtgtcgctcccggcggggaagcggtggaccgactggatcaactaccgcatggactggacgcccgaccggggcagcacgtggtacgtcgacggcgagcaggccgcccacatcgccttccaggccccgcgcgacccgctgcaggtcatcttcaactcgtggagcgacggcggcagctggtccggccgcatgcccaagggcgggcaggcatacttgcagatcaagtggatcgagattgtctacaacaccactcgtgaccattcccgccaccatcatcatcacgaggatgaccgccgtcgccgcagcatcggtagcattaaggccagggaaaatgataatgatgatgatgatgatgatggggaggagaaaggatgccacaaggtttgcagtatcgacgagaccaacaagatcggcacgccggtgctgttgtcgaccggtgccagggcggcggttgctgtttcgacgctgccctggctgtccatcttcctgacagcaacctcatttgagcactag

SEQ ID NO: 1446 - DNA, 1485 bp, Myriococcum thermophilum
atgatccggctaagtgtatgtgtctctgcactcctggccggcctctcggcagccaagtatatcgtcccggggggaagatggcgggatacggacggtaatctcgtcaatgcccacgcaggctgcgtaacagtggacaaggataccagcaaattctggctttttggcgagtacaaggtcgaaggccaaaccgaaggtggtggtgtctccgtatacagctcggatgacctagcgacgtgggaataccacggccttgccttagagcgtctcacagcacccattgagggccaccaatacatctcgccctctcatatcatccaacggccaaaggtggtctacagcgaggtctctaaggagtatcacatgtggtggcacgcagataactctacctatggactgctgctccaggggtttgctcggtcgccaaacatttcggggccttatacctttgtgagcgccacggcccctctaggcaactggtcccaggatttcggcatctttaccgactacaaggacgggaggtcctacgcactttactcaaacggcgacagcgcggaaggtcgagacgtctatattacagcctacaacgaagatgtgtcggagctcgacaaggtcatccaccgcttcgacaaatatgatctcgaagctccgacaatcgtccagacggacaagagttactacgccctcatgagccataaaacgggctaccggcccaacaacgtcgtcgccttccgggccgactcgctggccggtccgtggtcgcagccattcatggttgcgccgcccaatacgcggaccttcaattcccagtcgggctacacattgaccatccggggcaagaacaggacgacgtacctctacctcggtgaccagtgggattctaactcgctttgggagagccgatacatttggcttccgatcgagattgacgaccgcaagaagacgctcagcctcgtgtggcatgacgtgtatgacctggacgttcggacgggcgagtggtcccccgtccaaggcaagacgtactacgcagccgacgccaagacggccggcaacgcgttcaaacaggaggccaacttcgccagcaagggcgtcatcgtcaccggcatctacgacaaccacagcaccgttacgtttgaagggatcgaaggcaccgggaagccgcagtgggtgtcgttctactaccagaacacggacgacatgggcttcggcgaccagccgggcggcacgccggaccgcatcggcggcacgtggcagctgcgccggatcgcgagcgtcgtggtgaatggtaactgggagaaggtcgagacgttgtaccagcgggacacgcacaagggcatcatcctctcgacgcccctgcagctgacgttgaacaaggggaagaacaacaccatcacggttggcgggttgtacaatgggtttgattacaagggggccgatctggaccgaattgtcgtgtatcccccggaaccggaccacgagaggcaatga

SEQ ID NO: 1447 - DNA, 756 bp, Myriococcum thermophilum
atggtcccactaacttccaaagccctgatcctgagcagccttgccagtctggttgccggccatggctacttgaagagcatcacggtcaatggccaggactacctcgcttggcaggtcggccaggacgactatgtcaacccccctccggtccgatatgcccgcaagcttgccgacaacgggccagtcccagactttaccacgaaggatatcacgtacgttcccatgacggtcggcactggctgtggtgctggtggtaatgagccggctgaaggaattatcgagctgaaggctggcgacactgtttatctcgcccattgcaccaatgacgactgcaaatcgttcaagggcgacagcggcaacgtttgggtcaagatcgagcagctcgcctacaacccgtcagccaaccctccctgggcgtccgatctcctccgtgagcaaggtgccaagtggaaagtgacgattccatccagccttgctcctggtgaatatctgctgcgacacgagatcctgggcctgcacgtcgccgggaccgtcatgggtgcccagttctaccccagctgcactcagatcagggtcacggaaggcggaagcacacagctgcccgagggcattgcgcttccaggcgcttatgacccacaggacgagggtatcctggtcgagctgtggagggtgaaccagggccaggtcaattacacggcgcccggaggacccgtctggagcgaagcggcgccagatcccaaccggcctggtccctga

SEQ ID NO: 1448 - DNA, 984 bp, Myriococcum thermophilum
atgaagtcgacttttgccgctgccctagcagccctcgctgctcagaaagtggccggccacgccacgttccagcaactttggcacggctcaacctgcgtccgtctcccaccgagcaactcgcccatcaccgacgtgggaagcagagactttgtttgcaatgctggcacccgccccgtcggtggcaagtgccccgtgaaggctggcggcactgtcaccatcgagatgcaccagcaacccggcgaccgcagctgcaacaatgaagctatcggaggggcacactggggtcccgtccaggtgtacctgaccaaggtcgacgacgcctcgacggcggacggctcgactggctggttcaagatcttctcggactcgtggtccaagaaccccagcggcggctcgggcgacgacgactactggggtactcgcgacctgaacgcctgctgcggcaagatggacgtgcccatcccggccgacatcgcgtcgggcgactatctgctccgggccgaggcgctggcactgcacacggccggacagtccggtggcgcccagttctacatgagctgctaccagatcacggtcgagggcggctccggcaccgccagcccggccaccgtcaggttcccgggcgcctacagcgccagcgacccgggcatcctcgtcaacatccacgccgcgctgtccagctacaccgcccccggccccgccgtctactcgggcggcaccatccgcgaggccggctctccctgcaccggctgctcgcagacttgcaaggtcggtgagtccccgagcgccatcgcccctggcagcggctcgggcgacggctcgggcgacggcaacggcgacggttccagccccggcggctgcaccgtccaggcctacggtcagtgcggtggcgaaggctacactggctgcactgagtgcgcgcccggctacacttgcacggccatttccccgccgtactactcgcagtgtgctcccagtgcttga

SEQ ID NO: 1449 - DNA, 765 bp, Myriococcum thermophilum
atggcccttcagctcttggcgagcttggccctcctctcagtgccggccgttgcccacggtggcttggccaactacacagtcggtgacacatggtacagaggctacgaccctgacctgccgcccgaggtccagctcaaccagacctggatgatccagcggcaatgggcgaccatcgaccccatcttcaccgtgtcggagccgtacctggcgtgcaacaacccgggcacggcgccgccctcgtacattcccatccgcgccggtgagaacatcacggccgtgtactggtactggctgcacgccatcgggcccatgagcgtctggctggcgcggtgcggcgacgccccggacgccgactgccgcgccgtcgacgtcaaccagctcggctggttcaagatctgggaggccggcctgctcgaggggcccaacctggccgagggcctctggtaccagaaggacttccagcgctgggacggctccccgtccctctggcccgtcaccatccccgagaagctcaagagcggcacttacatcatccgccacgagatcctctcgctccacgtcgccctcaagccccagttttacccggagtgcgcccacctgaatatcaccggtggcggagacttactgccgcccgaagaggctctggtgcgcttcccgggagtttacaaagaagatgatccttctatcttcattgatgtttactcggaggagaatgcgaaccggacggattacacggttccgggaggaccaatctgggaagggtaa

SEQ ID NO: 1450 - DNA, 1134 bp, Myriococcum thermophilum
atgcggtctttctcggtcgccgtcgccgccctattcgccggtgctgtcggcgctctgccggcacgttcatacgtgacctctccttttcctctcaataatggcagcgagccagtcaagctgccaaacaagttcaagtggatttccaccgggccactgatcggacccaaggatgacgaacgggagctcgcaggcatcaaggaccccagcattgtcgagatcgacggtacgtaccacgtcttcgccagcacggcgaaggccgagggttacaacctggtgtacctcaacttcacctcgttcgatgaggccggcgaggcgccattcttctacctggaccaggcccctctaggtcccggctaccgcgccgccccgcaggtgttctggttcgagcctcagaagctgtggtacctcgtctaccagaacgacaatgcagcctactcgaccaacccggacatcaacgacccggccggctggacggcgcccaagaccttttacccgtcccggccgcagatcatcgacgacaacatcggcgagggctactgggttgacatgtgggtcatctgcgatgacgacaactgccacctcttctcgtccgacgacaacggccacctgtaccggtcgcagacggccgtggccgacttccccgagggcatgagcgaccccgtcatcgcgctcgaggacccggaccggttccgcctgttcgaggcctcgtgcgtctacaccatcaagggcggcaccggcaagcaaaagtacctgctgctgatcgaggccatcggcaccgacgagcagcgctacttccgctcgtggacgtcggacgccatcgacggcgagtggatcccgctggccgacacggaggagaacccgttcgcgcgggcgaacaacgtcgagttcgccgacggcgaggcctggaccaggagcatcagccacggcgaggtcatccgcacgctgaccgaccagaccctcaccatcgacgtgtccgagcccctgcgcttcctctaccagggcctcgacccggccaaggacgagggcgactacaactcccctgccctggcgcctggccctgctcactcagcagaccaacgtgacggctgcccgctggtcgcgagcgtgatctgcacgtcgatttccgtgccttga

SEQ ID NO: 1451 - DNA, 1107 bp, Myriococcum thermophilum
atgcggtctttctcggtcgccgtcgccgccctattcgccggtgctgtcggcgctctgccggcacgttcatacgtgacctctccttttcctctcaataatggcagcgagccagtcaagctgccaaacaagttcaagtggatttccaccgggccactgatcggacccaaggatgacgaacgggagctcgcaggcatcaaggaccccagcattgtcgagatcgacggtacgtaccacgtcttcgccagcacggcgaaggccgagggttacaacctggtgtacctcaacttcacctcgttcgatgaggccggcgaggcgccattcttctacctggaccatgcccctctaggtcccggctaccgcgccgccccgcaggtgttctggttcgagcctcagaagctgtggtacctcgtctaccagaacgacaatgcagcctactcgaccaacccggacatcaacgacccggccggctggacggcgcccaagaccttttacccgtcccggccgcagatcatcgacgacaacatcggcgagggctactgggttgacatgtgggtcatctgcgatgacgacaactgccacctcttctcgtccgacgacaacggccacctgtaccggtcgcagacggccgtggccgacttccccgagggcatgagcgaccccgtcatcgcgctcgaggacccggaccggttccgcctgttcgaggcctcgtgcgtctacaccatcaagggcggcaccggcaagcaaaagtacctgctgctgatcgaggccatcggcaccgacgagcagcgctacttccgctcgtggacgtcggacgccatcgacggcgagtggatcccgctggccgacacggaggagaacccgttcgcgcgggcgaacaacgtcgagttcgccgacggcgaggcctggaccaggagcatcagccacggcgaggtcatccgcacgctgaccgaccagaccctcaccatcgacgtgtccgagcccctgcgcttcctctaccagggcctcgacccggccaaggacgacggcgactacaactccctgccctggcgcctggccctgctcactcagcagaccaacgtgacggctgcccgctggtcgcgagcgtga

SEQ ID NO: 1452 - DNA, 1131 bp, Myriococcum thermophilum
atgcgcactcttgggttcgtgctggcggccgcccctgcggctgttcttgctcaatcgcctctgtggggccagtgcggcggcattggctggtcgggtcccacgacctgcgtttccggcgcagtctgcgaagtgatcaacgactattaccaccaatgtgtgcccggatcaggcaaccccccggcgactaccaccggtagcggcagcaacccgtctgctaccggcggcctccacgagaggttcgttgctaggggaaagcaatatttcggtgccgagattgatcactaccatcttggcaacggtgccttgaccgacattgtcaagagggattttggccaagtcacccacgagaacagcttgaagtgggatgctactgagccgaaccgcggtcagttcagcttctccaacgccgatcaggtggttgactttgccacggccaacggcaagtacatccgcggccacactctcctctggcactctcagctgccgcagtgggtgcagaacatcaacgaccgcgacacgttgacccaggtgatcgagaaccacgtcaccaccctggtgacgcgctacaagggcaagatcctccagtgggatgtggtcaacgagatctttgccgaggacggctcgctccgtgacagcgtcttcagccgggtcctgggcgaggactttgtcggcatcgccttccgcgctgcccgcgccgccgacccggacgcgaagctctacatcaacgactacaacctcgacatcgccaactacgccaaggtgacgactggcatggtcgagcacgtcaacaagtgggtctcccagggcatcccgatcgacggcatcggctcgcagtgccacctggccgcccccggcggctggaacccggcctcgggcgtccccgacgcgctcaaggtcctggcctcggccaacgtgtccgagatcgccatcaccgagctcgacatcgccggcgcctcggccaacgactacctcaccgtcgtgaacggctgcctccaggtcgagaagtgcgtcggcatcaccgtctggggtgtctctgacagggacagctggaggtccaacgactacccgctcctctttgacggcaactaccagcccaaggaggcttacaatgctctgattaacgccttgtaa

SEQ ID NO: 1453 - DNA, 744 bp, Myriococcum thermophilum
atgcagccgtctctgctcttgttcctctcgtccctcgtggcggcgagccccctgactgcgctcgacaagcggcagcaggccacgctgtgcgaacagtatggctactggtccggcaacgggtacgaggtcaacaacaacaactggggcaaagactcggcctcgagcggcagccagtgcacctgggtcgacagcagcagctccggcggcgtctcctggcacaccacctggacctggcagggcggcgagaacaatgtcaagagcttcgccaactgcggcctgcaggtgccccagggcaggaccatctcgtccatcaacaacctgcagacgtccatctcgtggtcctatagcaacaccaacatccgcgccaacgtcgcctacgacctctttaccgccgccgacccgaaccacgaccacagcagcggtgactacgagctcatgatctggctggcaaagtacggcgacgtctacccgatcggctcgtccgcgggctacgtcaacgtggccggccaggactgggagctgtggacgggatacaacggtgccatgcgggtctacagcttcatcgcgcccagcccgcgcaacagcttcagcgccaacgtcaaggagttcttcaactacctcgagtccgcccagggcttcccagccagcagccaataccttctgatcttccaggccggtaccgagcccttcactggcggcgagaccaccttcaccgtcaacaacttctctgcgagcgttgcataa

SEQ ID NO: 1454 - DNA, 1986 bp, Myriococcum thermophilum
atgatgctcaggtggttgttgatcgggctcggggtcctgacacacaagggttgtgcagacagcaatagcgacaaggaatatgattacatcgtcgtgggcagcggacctggaggaggacctctcgcaagcaacctagcacgggctgggtattccgtcctgctgctcgaggcgggaagcgaccaaagcaacaacacaaattccgagattgtatcactgtttacggttgcttacaccgatcccgctttgcgctgggacttcttcgtcttcaactttgcaaacgagacgcggaacttgcagcacaactatctgacttggcgccgtcccgatggctcattttatgtcggtcgagatccgcctcctaattcgaccctattggggatccattaccctcgcggaggtactctaggggggagttctgccgtcaacgccatgtcgacgatctaccctagcgagagtgattggcaaaacattgttgacctgactggtgacacttcatggggcccagaacatatgcgagagatttttgagcgcatagagaggaatcattacctcaaacccgacacgccgggtcacggattcaacggctacctcgacacgtttatgagcaatgagacctcttggactggtcaggacgatctcctaacagctctcggagccgtctctgggcaccttggccagaatccgagcgacatcgctatcaatttgctcgcggaccccaacgctctacttccggagcgcgaccagatcgagggcatttttggtggcccactgcacgcaaccccggtgttacgtcgcttcagctcgcgcgactatatcctcgagactgctagggcggtggatcctgatggacagaagcggtatcaactcacggttcagctcgaaacgttggccacgagggtgctcttcactgatctagacgacaaagagaagaaacctcgggccaacggcgtcgagtatcttcaaggccagagtgtgtatagggcggacccccgccacacagattctaatagtagtcagggaaccatcgggcgcgcgtatgctcgcaaagaggtgatcatttccggtggcactttcaactcacctcagctgcttaagctctctggcatcgggcccgcttctgaacttgccaagttcgacattgacgtggtagttgacctgcccggagtcggcacgaacttgcaggataattacgaggtgcctgttgtgggacacgctgcccgggacttccagcaaccagcacctgatccggacgccccgacgtgcacttacggggcgccggatgacccctgtgtggagctctggaagcagggccgagggccctacacggtaggacccgtcttgaatagcatcttccgcaagagcgctcatgctgcctacgacgagcgcgacttttacttggttggcggaaactttgccctacgtgggttctggccgcccactgactcgatacctgtcgatcctcccaacatgtttgggctgtccacggtcaagatcaatccccagagccgattgggtactgttttgctgaagagcgccgaccctcgagacacgcctgagatcaacttccacttgttcgaagaagaagacgctggcacggagctcgacctaagcgccgagcttgacactgtgaagtgggctcgccgcgcatttgcggacgtccctgctccgcttgggcctatcgtccccgtcgaaccgccctgcccgggaacgccagccgcagacggcacttgcgacgacgagtccgaccgggagtggatcaagaatcagatctttggacaccatcccaccagcacatgtgccattggcgccgacagcgacccaatggccgtgttggactccaaatttagagtgcgtggcgtccgaggtcttcgagtcgtcgacgcaagcgcgttcccgcgcgttcccggcccgtttccggttctcccgacatttatgctcagcgagaaggcaaccgagagcgttttggaggacgcggaacaatggtag

SEQ ID NO: 1455 - DNA, 1728 bp, Myriococcum thermophilum
atgaagttgcagcgctatctcggcgctaccctgctttgcctcggggtggcggacgcgaggccgcgtgtgttcgataggaaacaccagatatcttaccatggtcttgaccgcaatgggatcgaagtcttccttggaatccagtacggtcaggatacgagcggcgccaaccgtttcaagccacccaagaagcatgttcctgcccccggaaccgagatcgaagcgatctcgtacggtcccagttgcccccagcagttcgggcaatgggcgccgccagtttcgttgggagacacaactgaaatctcagaggactgtttgagactgaatgtggcgagaccgcggggcacgcgcccgtgggatcggctaccagtcatggtgtacatccatggcggcagcttctgggcggggagcaacaacgatcccaccatcttgccagacgggctcgtcctcgagtcggagcggaatgggtaccccgtcatccacgttgccatgaattatcgtctcggcttcttcggatttgctcagtcgcgcgcgctcgagtctgagggctccgagaatgctggcctcagggaccagagactcgcaatcgagtgggttagggacaacatcgaggagtttggaggcgatccggataatattaccatcttcggacagtcttcaggaggcctcgcggttggtttgcacattatggcatacggaggcaccaaaccagtcccatttcagcaaggcatctgccagagccaggcactcgagcccggcatcacgaaaaactttaccatcaacgccatgcaggccgtggtcgactatgtcagctgtaacaagacggatcttcattctcaggagactattgcctgcttaagggcactcgacaccgaaactctcctcaacgccagtctcgctacctatcgcgacgacctcaacgtcggcgacatttggctgcccgtggttgacaacggctttctcccggccgcgccctcgactctgatccgagagggccgcttcgctaacgtgacaactatgatgggttggtgcgagaacgatctcaccttctttactgatccggagatccagactcccgacgacactcgcgacttcatctccagctacgctgtcggcctgacgagcgagaacgtggacaagctcctatctttgtatcccgtgtccgagttcgagggcgcagcaaccgataccctgtcggccgagttcttccgcgcctcccggatcttccgagacatcctcatggcctgcgagccgctgttctacgccgagcacattgcccgtgccggcaacaccgtgtacttgtacgactggaaccagaccatcctcgagcccatcctcgagcagatgacgggccgggcgggatggggccccatccacacggccgaatttgcctacatcttcggcaacctatcgcattacgacctcgacggtttccccttcaacccgaccagggtcgactaccagctggaagcccggggatcccgctcgtggtcggctttcgccgccaccggccagccgggcaacctgcgtggtcatcacaccttcaagggattcgggccggccttcccccgcggagacaacagcacctacatctttgtcgccggcgggccgtcggaaggcctctcggccattgatgggccgcattcggcgccagcggtgcgcgtgcagaagctgagggagcgctgtgcctttatcaattccccagaaatcattgaacaacttggcttttag

SEQ ID NO: 1456 - DNA, 2403 bp, Myriococcum thermophilum; identical to SEQ ID NO: 1150

SEQ ID NO: 1457 - DNA, 1905 bp, Myriococcum thermophilum
atggagctggttcgggcctccgtcgccgttgttgcgcttttcccattcttgtgtggcgttgcaaccgcccacccaaccgcccgctctattgcccgctctacgattctggatagagccgacgacctgcttccggaatatgactacatcattatcggaggcggcaccgccgggttgactgtcgccgacaggcttacagagaatgaaaggcattctattcttgtcctcgaaaggggccctttccagaactctagcgcagtgaccactatctctctgggcggccgagcctatactgaccctagcttgaccttcaacatcagctccgttccacaagctgggctgaacaaccggacgattggcgttactggcgggttgattctaggcggtagctccggtgttaacggactacaagtcctccgtgggcagaaagaagactatgaccgctggggattatattttggaccggagtctgagtggagttgggagggtcttctgccatatttcaagaaggcatggaatttccatccacccaggccggagctggtcagccagttcggcatcaagtacgaccagagctactggggcaacacgtcagacctgcacgcttccttcccaaccactttctggccggtgctcaaacttgagatggaagcatttggcgaccttccagggatcgaatatccttccgactccggctccggggagaccggggcgtattggcacccggcgtcagttgaccccgcgactgttctccgttcttttgcccggaccgcgcattgggacgacatcgaggcgacacgccccaattaccacaccctgaccgggcaacgcgtcctgaaggtcgcatttgatggcgatcgagcgaccagcgtcgtgttcgtgccggcggacgcgacagatcagagcaatgctaggtctgtgaaggctaagaaggagatcattttggccgctggcgccattcacacgccccagatcctgcaggcgagcggagtaggaccgaagcaactcttggaggaggcaggcgtgccgcttgtcgtggacgcacctggtgtcggcagcaattttcaagatcagccattcgtggttgctcccaccttcaactttagccattatcccttccacccggacttctacgatctaattctgaatgagacctttattgctgaggctcaggcccagtttgaaaaggaccgaaccggacctctcacaatcgcagccggctattgcggcagctggcttcctctccaagtcattgctccgaactcgtgggaagatatcgctaagcggtacgaatcccaagacccagccgcctacctcccacccgacaccgataagacggtcatcgatgggtacagggcgcagcagaaagcactggcgaaggccatgaagagtaagcaatcggcaacgtacaacttcttcctacggggcggctttcaagaaagttcctgcgtctacctgcacccgaccagccggggtaccgtccgtatcaatcgggatgaccctttcttctcgccacctgaagttgactatcgggcgctgagcaaccctaccgatctggaggtcctgcttgagttcactcctttcacccgcaagtacttcttggagacaaggttgaagacgctcgagcctgtcgagctgtcacccggtgccaacgtcaccgcacccgccgatatcgaggcctggctccgcagcgtcatgatcccgtcctccttccaccccgtcggcacggccgctatgttgccccggcacctcggcggtgtagttgacgagaagcttctagtgtatggggtcaaagggttgagtgttgtcgacgccagcgttatgcccgatttgcccggctcatacacgcagcagacagtgtatgctattgctgaaaaggctgcggacctcattaagagcagagcttga

SEQ ID NO: 1458 - DNA, 1917 bp, Myriococcum thermophilum
atgagagggattgcttacctcttgcctgcttttggccagctggccattgccggcagcctcaagcgccacgcctccgatctcctcgacagttatgactttgtcattgcgggcggtggcaccagtggcttgacagtcgcagatcgtctcacagaggcgttcccggagaaaaatgtccttgtgatagaatatggagaagtcgaatatgcccgcggcatctttgaccctccaatgattgtctggggaggtaacagcaacacggcaagtacctgggcgctcttttccaccccaagccctgagctcaacaacaattcggccatcgtcatggtcggaaaggtagtcggaggaagcagcgccgtcaacggtcagttcttcgaccgaggctcgcgcttcgactacgacgcctggaacaagctccaggagagcggtcgaggctcggggaagagtggcattgactggagctgggaaggaatttatcctttctttcggaagagtgtgaccttcaccccacctgctcctgaggttgtcgagaaatacaactatacgtgggacctgtccgcgtttgaaaacacgacgccaatccacgccagcttgccgccctttctctggggagaccactttgtcggccgagaagcatggaaagagatgggcatctgggtttccgaggaatgcgccaacgggaataaggagggcctctgttggattccgatttcgcagcaccccgtcacggcaagacgttcgtactccgggattggccattacgctgatgtggtggatagcaggccgaattatcacctcctggtcaaacatcaggttgcacgtgtgctgtatccggagggtgatgcgaagtctggacctccgaccgtggaagtgcgccccctcgatggcagcccctttttcaatatttcggtgaagaacgaagtaattctctcagctggtgtgttcgggacgccgacaatccttcagaggagcggcattggaccggcttcattcttgcgcaaagccgagatcccggtggtgctcgacctacctggtgttggctcgaacttgcacgatcattccggtcctcgggtcgcctggaactataccaaaccgcttccgttctctcccctcccgtcggacatgttcaacagaacgttcgcctctcaagccgccgcggctttcaaccagactcccgctcaaggcccgtacacgctcgccatgtctaacagcgcgatctgggtgccgctccccaacataacggccaactacacggccatcgtcaaccagatccgcgccctcgccaactcttccgacccctcagcgctccggctgccgcccgcctacgaaggagacgagtctctcgtggcaggttaccgggcccagctccaccagctggccgacttgtatgcgaacccgcgctgcccgagcctcgagagcaccttcgcgacgggcggctctgtcgcggcgatcctgctgcaccccctgagccgcggcacggcccggctcaacctgacggacccgttcgagccgccggtgctggactaccggtcggcgtccaacccggtcgacatggccgtgcacgtcgcgcacacgcgctacctccgccgcatggtgggcacgcgcacgctccgggagctgggcgccgtcgaggtggccccgggccccgccgtcgcctcggacgacgagatcgaggccttcgtgcgccgcgccgccacccagtcgtacatgcacccctgctgcacctccgccatgctgccgcgcgagctgggcggcgtcatcggctcggacctcaaggtccacggcgccgaaggtttgagggtcgtggacatgagcgcgctgccgatgctcccggcggcacatttgagcgcgacggcgtatgccgttggtgagaaggccgccgatatcatcatcaaacagtggtctgaggaagacgcctga

SEQ ID NO: 1459 - DNA, 1674 bp, Myriococcum thermophilum
atgaaggtttcagctaggacgatcctggcgttcgcgccttggatcggggccaatgcggccgtcatccggagcatgcccgacggcagtccgctgaccccgtctgcccgggccgtgattgaccttgccggccctgctgcgacttgcgagtggttcacccaacccattgaccacaagaacgagagctctcggacgtgggagcagatctactgcgtcgacccccagtggtggacgccaggggctccggtcgtggtcatgactcccggaggcgagcctatcacttggaacgtcaactcagcgcgcggattctcgtttttgaaaaacaccaccctgccgggcaagtacgctcaggagctcggtgccgccgctgtcgtggttgagcatcgttacttcggcggatcctctccgtatgatggctttgacgcgaggacactccaatggctcaccctggagcagtccgccgccgatctggtcaactttgcgcagaatgtcaagttcccgtttgacaaggagcaaaccagcgtggcttccaaagtgccttggatatactttggcgccgcgtactccgcaacgctagggagctggatcgagcacctgcacccgggcgtcttccacgcctaccacctcagtagcgccaccgtccaggccaaccaggagaactggtactactatgataccatccgcaagggcatcgacgcccttcgtggcgacaggctgtgcaccaaggccttgcagactgtcgtcgagtttgttgaccgtttcgtgctcgcttcacccgtcaacgagaccgagatggacgcactcaaggagttttttggggctgtcttccccattgaaaacgacgactttgcctatgccctcgccacaccgtttaggtactgggaagagcgcggaggataccaacgcgtcctcgacatgtgcgatgacatcgtcagcacgaacaagactgagaagcacgagatcctggggactatcccgtccgcggccgtcgccttctccgcacactttcaagaacactttcgcgacaacacatgcacgtacctggacgtctggggccaaaaggacccgctgtggtgcctggacacgcacgacccgctgaaccccttcatcgaggcgcgcacgctgggcaacccgtggcggacgcgcatctggttcctgtgcaacgagccgctggcgtcgtgggccacgggcgcgccgctcgacgacccctccatcgtctcgcgccgcatcaactcggactactaccaggcccagtgcgagatccacttccccgccgtcggcgacaacaagtacggcagcgccgacggcgtccgcaccccggacatgctcaacgaggtcacgggcggctggacgcgcgagtccaagcgggtcatctggactgtcggcgagttcgacccctggcgcgccaccagcatggccagcgagctgcgtcccggcggcccgctcgagtcgtcgggcgacgtgcacgtcttcatcatcaagaacgccatgacggccgacgacgccctcaccgaggccggcttgaccaacctcggcctgcccatcaacccggacgtgctcaaggtgcaggagcagaccatagagatcatcaaggagtgggtcgcccacttcgagcctggagacggtggtgatgatggtggtgatgatgaagaggaggatgggggctcggaggagtaa

SEQ ID NO: 1460 - DNA, 1944 bp, Myriococcum thermophilum
atgggtttcctcgccgccacccttgtatcctgcgcagctctcgcgagcggagtcagcatcccgcgttctcatgccaagcgcgaggtctcccagcttcgtgaagattatgatttcgtggtcgtcggtggtgggacgagcggcctcactgtcgccgaccggttgacagaggcctttccagccaagaatgttcttgtcatcgagtacggagatgtccagtacgctcccggcaccttcgatccgccgacggactggatcacgccccagcctgatgccccgccctcctgggacttcatttccctgcccaacccagacatggcaaacacgactgcgttcgtgcgggcgggccaagtggtgggcggaagcagtgccgtgaacggcatgttcttcgaccgcgcatccaaacatgattatgatacgtggccagcggttggcggctctgagttcgaacagtcgagccataagtgggattgggaggggctttttccttttttccaaaagagcgtcacgttcacggaaccgacagccgaaatggtccagaagtaccactacacttgggacttgtccgcctacgggaatggctcaaccccgatccacagcagctattcagtcttccagtggggcgaccaaccgttgctcaaccagacatggcaggagatgggaatcaatccggtgacggaatgtgcgggtggcgataaggagggcatctgctgggttccctcgtcgcagcaccctattacagcaaggaggtcgcatgccgggctcggtcactatgccgacgttctcccgcgggccaactacgacctactcattcgacaccaagctgttagggtagtgtttcctgacgggccaagccacggaccgccgctcgttgagacgcgttccctagccgacgaccagctgttcaacgtaacggtgaaaagcgaggttatcatctcggcgggcgccctacacaccccgactgtccttcaacggagcggtatcggcccggcagccttcctgaacgacgctggaattccggtgacgcttgacctacccggcgtaggggccaacctccaggaccactgcgggcctccggtttcgtggaactacaccgagccatacaccggcttcttcccgctgccctcggagatggtgaacaatgcgaccttcaaagccgatgccatcgctggcttcaacgagacgccggcccgcggtccctacacgctcacggggggaaacagcgccatcttcgtgtcgctaccgcaccttaccaccgactacagcaccatcacggccaagatccgggccatggttgccgaggggaccgcggcgtcttatctcccggccggccagcgcaccatcccggcgatggtggcgggctatgaggcccagctgctcgtgctcgccgacctgctggacaactcggaggcgccgagcctggagacgccgtgggcgacgagcgaggcgccggcagcgtcgtcggccctagccttcctgctgcacccgctcagccgcggcagcgtgcggctcaacctcagcgacccgctcgcccagcccgtgctcgactaccgctccgggtccaacccggccgacatcgacctgcacatcgcccacgtgcgcttcctgcgccgcctgctggacacccccaccatgcaggccaggggcgccctcgagacggcgcccggccgggacgtggccgagagtgacgaggcgctcgccgactacgtgcgctccaacagcatcctctccttcatgcacccttgctgcacggccgccatgctgcccgaggaccgcggtggtgtcgtcgggccggacctcaaggtgcacggggccaaggggctgagggtcgtggacatgagcgtgatgccgctgttgccggggacgcacctgagtgctactgcttatgcggtgggggagaaggctgcggatatcattatccaggagtggagagacaaggagcagtaa

SEQ ID NO: 1461 - DNA, 840 bp, Myriococcum thermophilum; identical to SEQ ID NO: 1155

SEQ ID NO: 1462 - DNA, 1311 bp, Myriococcum thermophilum
atgatgtccctcgctcgctgggcagcagcggctgcctcattcctcctgctctgccctagtaccctcgccgtccctacgcaaggaaatggcaagccgaaccaggacaccgtcttgccgaggcaagacgacgactggcactgggtagccacgtggacatccatgccgcagctggtcgaaccgaacaacatgcctccggcaccctttaccggaggcggcgccgtgttcagggacgccacgctgcgccagacgctccatgtgtccatcggagctgagcgcctgcgcctgcagatcagcaacaccttcggcggcagcgacctgcccatcactgcggccaccatcgccttgccccagggcggcagggccggcgtggcgggcatcgattcggccaccgtcaagccgctgacattcaacaacggctcgtcctccatcaccatcccgcagggcgaggtcgcctacacggacccgatcgactttaccgtcgaaccgcaggccaacatcgccgtctcgatctactcccagcagggccagtcgggaagcagcattacgggacaccccggcagccgcacgacgtcgtggatgcagtcgggcaaccaggtcgaagcggccagtctttccggttccaacacgaagcattggtacttcctctcggccgtggaagcctgggcgccgccgacgacgagcgccttcgtgatcctgggcgacagcatcacggacgggcggggcagcacggacgacggcaacgaccggtggccggacctgctcctggcgcgcatgcaggccgaggggggcaacctgagcgagatcgccgtgaacaaccaggcggcgggcggcaacgcggtgctgtccgggggcctggggccgacgctgctctcgcggtaccggcgcgacgcgctgcaggtggccggggccaagtacgtcatgatcttcgagggcgtcaacgacatcggcggcgggccgaccgacgccgggtcccaggccggcatcggcagcgggctgcaggacgccttcgcgcagatcgtcgccgactgcaaggccgccggcatcaagaccatcggcggcaccatcacgcccttcagcggaaacggccagccgtactcggacccgacccgggagcagacgcgcgtccaggtgaacgattggatcctgaacagcggcacgttcgacgcgaccgttgactttgcctccatcgtggcagacccgggcatctcgagccagctggcgccgcagtatgacgggggtgatcatctgcacccgaacgtggcgggttaccaggcgatggctgatgggttccccttggacatcttcgactga

SEQ ID NO: 1463 - DNA, 882 bp, Myriococcum thermophilum
atgcgtttcactcccattgccctcgccgcggctgcggtccacggcgtcgtcgctgccccccagcgcgaggttcggccggcgcccggtgagcaggtcttctcctgcggtgcccccgagccagacgcggagcacatcaagatctcgcagcagttcgctgcccaggaggccgagctcctggcctcgggtaacctgaccacccaagctaccatcaacgtcgacctctacttccatgtcgtggccacgtcgactgacctgagcggcggctacattcccgacagccagctgagcgctcagttgcaagtgctcaaccaggcgtacgccccgtacgggttccagttcgtgcacaaggggacgacgcggacggtcaacgccaactgggcgtatgacagccggggctacgagatggagatgaagcggtcgctgcggaagggcagctactcggcgctcaacctctacttcctgtacgaaatgggcagcaacctcgggtactgctacttccccgagtcgggcggcgccaattcgggctcgacggtgcacatccgtgacggctgcaccatcctctacagcaccgtccccggcggcagcgccaccaactacaacctcggccacaccgccacccacgagaccggccactggttcggtctctaccacaccttccagggaggctgcaccggcaccggcgacgccgtctccgacaccccggcccaggccagcgccagcagtggctgccccatcggccgtgactcgtgccccagccagccgggtctcgaccccatccacaactacatggactattcgatcgactcgtgctatgaggagttcactgccgggcagcaggcccgcatgctcagcttctggaacaactaccgcgctggcaaataa

SEQ ID NO: 1464 - DNA, 822 bp, Myriococcum thermophilum
atggcgttcccgtacaagaaggttctcctgatcggcgctacaagcggcatcggccttgaggcggcgaagcagcttgttgctaagggcgtgaatgtcattgcggtcggccggcggcaagatcgcttggactccttcgtctcctccagcgcaggcgcccctggcaaggcttggggagagcctctcgacatcgctgagattgaccagatcccagcttttgctaagcgcatcaccgatgcccacccagaccttgactgcgtcttcctgaacgcgggcatccagtacgtgatggactttagcaagccgtggacagtggacatctccaagatccagcgggaaatcacggtcaactacattagcatggttgctttgacccatgcctttgttcccttcttccaggagaaagctgcgaagcaggagaaagtagcttttattttcaccaccacaagcctcatgagtcttccgtacccgatggtgctcaactactcggcgtccaaggcggctttgcacgccttcattctcagtattcgggagcaattcaagctcgccggccaggacattggcaccctcgagctcgtgacgcccctcgtgcaaaccgagctacacgacggccagcccggttggggcccggacttcaacccgggcatgccggtggacgtgttcgtcaaggaagccttggctggtttcgaggccggcgaggagacggtggcggtcgggccagccaaagccgtctttgacgaattcgaggccgagaagggccggcgcgtcggtcccgtgtgggccaacatccgcaaggccatgggcaaggcccacacattcgactaa

SEQ ID NO: 1465 - DNA, 1731 bp, Myriococcum thermophilum
atgaagggcttcacaaccttggtcatcgccgcccttctgggcagggtggttgcagcgcccccagaaccaccctcgaggaccgttgagaagagagctgcccctacagtcaccatcgcttcaggctccatcgtcggcgtgagccgcctggctaccgaggccttcaacggcatcccctttgcggaaccaccggtcggccccctgagactgaaaccaccagtcaggctcaactcatctctgggcgtctttgatgccacggggattgccccagcttgcccgcagttctttgccgatacggactcgaacgagttcctggccagggtcattgactttgtcaccgacttgccattcttccagaaggctctcaaagtcagtgaggattgtctgacagtcaatgtcatccggcccaagggtaccaaggcgggcgacaacttgcctgttttgttctggatctacggaggagggttcgagcttggctggagttccatgtatgacggcggccctcttgtcaccaatgcaatcgacatggggaagccgttcatcttcgtggcagtcaactaccgtgtcggaggcttcggcttcatgccgggcaaagagattctcgcggatggctcggcaaacctaggccacctcgaccagcgcatgggtctcgagtgggttgccgacaacattgcggcgtttggcggcgaccccaacaaggtgaccatctggggcgaatcggcaggcgccatctccgtcttcaaccagatggcgctctacgacggcgacaacacgtacaacggcaagcccctcttccgcggtgccatcatgaactcgggcagcatcgttcctgccgccccggtcgactgccccaagggtcaggccgtctacgaccaggtggtggccaaggccggctgcgctggagccagcgacaccctggcctgcctccgcgagctgccttacgacaagttcctcgaggccgccaactccgttccagccattttgtcgtaccactcggttgcgctttcctaccttccccgtcccgacggcaaggtgatcactcagagccccgacatcctggtcaaggagcgcaagtacgcggccgtgcccatgatcattggtgatcaggaggatgagggcaccctcttcgcactgttccagcccaatatcacaaacaccaacaagctcgtcgactatctcgggagtctctttttccacgaggccaccaccaaccagatcgagggcctcgtgaacacctattcaacctcgatcctggacggttcgccgttccgtagcggcatcctcaacgagatctacccaggcttcaagcgactcgccgccatcctgggtgacctcgtcttcactctgacccgccgcgtctttctcgagaccgccacggcggtgaaccccgacgtcccggcgtggtcgtacctggccagctacgacgaaggcaccccgatcttgggcacattccacggcagcgacatcctgcaggtcttctacggcatcctgccaaactacgcaagcagaagcatccagagttactatgccaactttgtctataacctggaccccaacgacgccagcggcggcaccagcgccaaaagcaaggtccgcgaggactggccccgttggaccgcaacggagcgcaagcttatcaacttcttctctaaccggagcggttatctcaaggatgactttcggtccaagtcggccgggtacattagcgagaacgtgggagcgctatacttttga

SEQ ID NO: 1466 - DNA, 1260 bp, Myriococcum thermophilum; identical to SEQ ID NO: 1160

SEQ ID NO: 1467 - DNA, 1527 bp, Myriococcum thermophilum
atgcatccgctcgggtccctccggctcgccagcctcctggggttgctggcgacggccgccccagccgccgtacaggcctctcctttccgccacgggatccgcgccaacaaccagacggacccgttgatcgagtgcctgaccgaggccggggtgccggtggacgaggcggggacggaggactaccggctggacgtgtcgacgttcaacctgcggctcaactacactccggcggcggtggtgggggccagcacggccgagcacgtgcgggacgcggtggcgtgcgcggcgcggacgggcgtcaagacgacggccaagtgcggcgggcacagctacgcctcgttcggcctcggcggcgaggacggccacctcgtcatcgagatgagccgcatgaacgaggtcgtgctcgacaccgagaccggcatcgccaccgtccagggtggcacccgcctcggccacctcgccgtcgagctctgggaccagggcaaacgggccatcagccacggcacgtgcccgggcgtcggagtcggtgggcacgccctgcacggcggctacggcatgagctcccacacgcacggtctcgcgctcgactggatcgtgggcgccacggtggtgctggccaacgggaccgtggtcgaggcgtccgagacggagaacccggacctcttctgggctctgcggggggccggctcgtccatgggcgtcgtgaccgagttccgcttcaacacgttccagccgcccgagaacctgacctacttcgtcgtctcggtccagtggacaaccgaggagcgcgccctgtccggcctcgccgccgtgcaggagttcgccaagaccatgccggccgagctcaacatgcgcgtctacatcaccagccgcttcgtcaacctcgagggcctctattacggcgacaaggccggcctcgaggagaccctcgccccgctcatcgaacaggtcaacggcgtgctcgccctggcccagacgggcagctggcttgaccagctcaagcactatggcggctccaacctcgatcagggctacggccacgaggagcacgagaacttccactcgacaagcctatacacccacgagctgagcgaggcccagctgcagtccttcgtggggtactggttcaattccgccaagaacaacacgcgcaactggcacgtgcagatcgaccttcacggcggcgagaactccggggtggcggtgggcgacagggacatcagcggggttccgtcggcgtacgcgcaccgcgatttcttgctcatgttcctgctctacgaccgctccgaccgcggcgccttccccgacgacggcaccgcctccatggacgacttcgccgccgccatcaccgacggcctcgagcccgaccagtggggcatgtacatcaactaccccaaccccctcctcgaccaggccgccgcccagcagagctactgggggcccaacctcgctcgtctgcaggccatcaagaaggaggtcgacccggatgacctgttccactacccgcagggcgtcttgcctgcgtaa

SEQ ID NO: 1468 - protein, 568 aa, Myriococcum thermophilum
MLKSALLPGALALLSGVAVDGQAANGTFRNPILYEDFPDNDVSMGPDGAYYLSASNFHYSPGAPILRSYDLVDWEFVGHSLPRLDFGGGYDLPPTGERAYRGGTWASTLRYSASRELWYWIGCTNFWKTWVYTAPAPEGPWTRAGDFGDGVCFYDDGLLIDDDEDETMYVVYTHDGGKAVNVTRLSADGLSAVRTETVLTPDRAGVDALEGNRMYKIDGRYYILNDHPGTTAYVWKSDSPWGPYEGKALADNVPGPLPGGGAPHQGSLVSTPSGEWYFMSFTWAFPSGRLPVLAPIEFQPDGFPTLVTGVNGNGEENAWGLSYPLPSLPRRPLNYSWARAEYDFYGLSELPPAFEWNHNPDEDSYELHGGERSEMLLRTASVVPDDDLYSARNTLTHRVHGPFPSATLFLDVIDMADGDRAGLAVFRDRSAYVGIHCSAAANDTGGHRLKYEIVARFNMTLDEWGSSETLDLGEVVERVPLPETIPPVRLRASMDVRPDGEKTARFEYSVDAGETFSPIGGAYQLYDGWPFFLGYRFAIFNYATKALGGSVAVSRFEVDSGEGDAGQA

SEQ ID NO: 1469 - protein, 225 aa, Myriococcum thermophilum
MLTTTLALLTAALGASAHYTLPRVGSGSDWQHVRQADNWQNNGFVGDVNSQQIRCFQSSPSGAPEVYSVQAGSTVTYHANPNIYHPGPMQFYLARVPDGQDVKSWTGDGAVWFKVYEEQPNFGAQLTWPSNGKSSFEVPIPSCIPAGNYLLRAEHIALHVAQSEGGAQFYISCAQLEVTGGGSTEPSQKVAFPGAYSSTDPGILININYPVPTSYQNPGPAVFSC

SEQ ID NO: 1470 - protein, 578 aa, Myriococcum thermophilum
MQTASKLAAAAGGALALWLQPAAAQAGCVNISSTETYDYIVVGSGAGGIPVADRLSEAGHKVLLIEKGPPSTGRWGGVMKPEWLFGTDLTRFDVPGLCNQIWADPTGAICTDVDQMAGCMLGGGTAVNAGLWWKPHPADWDVNFPDGWHSEDLVEATERVFERIPGTITPSMDGKRYLSEGFDMLGGSLEAAGWEYLVPNEHPDKKNRTYGHSTFMYSGGERGGPLATYLVSAVEREGFTLWMNTTVKRIIREGGHATGVEVECSNDKGGHAGIVPLTPKTGRVILSAGAFGSAKLLFRSGIGPKDQLNIVKNSADGPTMISEDEWIELPVGYNLNDHVGTDIEISHPDVVFYDYYAAWDEPIVEDTERYLDNRTGPLAQAAPNIGPIFWEIIEGSDGVSRHLQWQARVEGKTNTSMTITQYLGTGSKSRGRMTITRQLNTLVSTPPYLRDEYDREAVIKGIANLRESLKGVANLTWITPPLNVTVEDFVDSIPATPARRCSNHWIGTAKIGPDDGRDGGTSVVDLNTKVYGTDNIFVVDASIFPGHITGNPSAAIVIAAEHAATKILALPAPEDAES

SEQ ID NO: 1471 - protein, 408 aa, Myriococcum thermophilum
MVTVTQLLVASFLAGLSVGSALPPRIGTTSVDKDNSANARSGRVTLHQVPRRNYRFNGARSVYRTYLKYGVPVPEYIVKAVTYTDALNAAAGKRDTGSAPAVPIDPRYDVAYVTPVSIGTPPQTLNLDFDTGSSDLWVFSTNTPPEQMNGQDIYDPDKSTTAELLEGHTWSIRYGDGSASRGNVYTDNVTIGGLTVERQAVQCAEQVSTSFTVKSEMDGLAGLGFSSLNTVSPKGQLTFFDNAKPHLDSPVFTADLKAHKAFRNARARAAGSYDFGFIDEAKYTGNITYGIADTGTSLLYLPTAIVTAYYSQVQGATNSFIYGGYVVPCSATLPSFTFGIGEVRLTIPPSYMSYGPVAEGSSTCFGGLQSSSGLGVNIWGDVALKAAFVVFNGEDPPSIGWATKPLDE

SEQ ID NO: 1472 - protein, 328 aa, Myriococcum thermophilum
MHHWTSLAAAAALLANGAVAQFNMLRFACSQLIVGGNSFNLTMTPVEYDLAERSTCTSCSFKQDKSNYWTAVMFFKHKNGSYHRVPQIGNGGPQGQLINNGGLDVYYIPSGKVTAFAPGFRMLAGEATNTDDSKVSSGNICHRCWNQPDENQFVGGAPCTGTDTVAIPQDPSCYMIRQTIIFPACWDGQNLDTPDHKSHVAYSGTGATGGGPCPASHPVKLPQVMYEIMWDVSQFRDQSMWPEDGPAFIYSMNLGGSAAHGDYLFGWEGDTLQRAMDNGCNLNLDCPSAGLTAQPPEEYNACTIPQQAPEPVDGWLASMPMGEMAVRA

SEQ ID NO: 1473 - protein, 448 aa, Myriococcum thermophilum
MKQYLQFLAATLVGFAAAQQAGDLQTETHPKFTWTKCTAPGSCQQVNAEVVIDANWRWVHDSSGTNCYDGNQWTSACSSADDCAENCYLEGADYSGTYGASTSGDALTLTFVTEHEYGTNVGSRLYLMDGSDKYQMFTLAGNELAFDVDLSTIECGLNSALYFVAMDEDGGIANYPPNTAGAKYGTGYCDAQCARDLKFVGGKGNIDGWEPSTNDPNAGVGPLGGCCAEIDVWESNKWAFAFTPHGCEDPGYHVCETTNCGGTYSEDRFAGDCDANGCDYNPYRMGNQDFYGPGLTVDTERVFTVVSQFQENKLTQFFVQDGKKIEIPGPKVEGITQETADITPELCTALFQAFDDRDRFAEVGGFDAVNTALNTPMVLVMSIWDDHYANMLWLDGSYPPEKAGQPGGDRGPCAPDSGVPADVESQYPNAKVTWSNIRFGPIGSTVDV

SEQ ID NO: 1474 - protein, 297 aa, Myriococcum thermophilum
MRLSALVVLLPALCVQGIRIIQSNDDGWAEQYARSFHNALIAAGHDAVLSAPAENKSGSGSSDAEPSPRKDPCQYDSCPADSGPIGRNETSPRLNWVNSYPATSMRYGIDTIAPPLWDGEAPELAVTGPNVGSNLYLAVHISGTVGAAVYAAKEAKIPAIAFSGASDGTLAWDSPEEPRSRVYAELAATLTNAIIESGKPYLPEDVFLNVNFPKVEDECTDPSQFKWVLSRINVGLVSDPDAEHCGSTRLPHELSVLNTDGCYISVSPGDANDKTTAPAEKQAVVRDKLKSLWTCLP

SEQ ID NO: 1475 - protein, 243 aa, Myriococcum thermophilum
MKNAILIVVAAGLAAAVPQGVARRSAGRPQHHSGTNVRNTSYPEYSANWAGAVQIGTGFTSVYGTITVPSVYDSNPNAAASAWVGIDGDTCQRAILQTGVSFYGDGSYDAWYEWIPDYAYSFANFGLSAGDQIRMSVEATSATTGVATLENLSTGQKVSHTFTNTPSTLCETNAEWIVEDFQEGSSLVPFADFGTVTFTDAYAVGSSGEVTPAGATIIDIQQGGEVLTSCATQGSDLTCTYIG

SEQ ID NO: 1476 - protein, 536 aa, Myriococcum thermophilum
MRHLNDFALLFTLLSGSATSAAVRGSTYHQARADEFNNPVLWEDYPDLDVFRIGSTYYYSSSTFAYSPGAPVLKSYDLVNWTPVTHSGIWASTLRYRPSNDKFYWYGCIEFGQTYIWTSSGTRAGDKDGEVDPADWAWEPHPPINKCYYDSGLLIDDDDKMYIAYGNPNIEVAELSDDGLSEVSSRVVYSPPSGTTIEGARMYKVGGAYYILVTRPADAEWVLKSTSGPFGPYEMRELVTRISGPLSNAGFAHQGGMVDTPDGNNWYYVAFMDAYPGGRIPVVAPLRWTDDGWPELVTDDRGGWATSYPVPVQAAKTVPDDGLDLDEFTGGQLSHHWEWNHNPDTARFSLGGEGEGGLTLQTATVTEDLFAARNTLTRRVRGPKSSGTFRLDVSKMRDGDRAGAVLFRDTAAYIGVWKQGDQASIVVVDGLELSQGSWNTVSTGRLAETGPTLSNTEDVWLRIEADITPAFGTNTARTTTFSYSVDGGQTFVPLGPAFSMSNTWQYFTGYRFGVFNFATRELGGEVKVKSFQMQPL

SEQ ID NO: 1477 - protein, 256 aa, Myriococcum thermophilum
MRPSTATSLLLSCLVGAACGLTIDAKWWWGHHHHHHHHHPKSTCLHPDALQTASSYTGLEEGTPGIRPGLSESATDNANFINFCAGQTLTNGQQNTAGSCNGIPMGRIPATSNMISSIITYPQPGDRIKPNTTFNVTVQTRHLRAGYLVNPSVSYYTAPQDLDENGDIIGHCHISIQNIGSLRTVEVPDPTTFAFFKGVDDEGDGKGRLTTEVTGGLPEGVYRVCTMIAARNHQPVAMPVAQRGAQDDCTKFEVGE

SEQ ID NO: 1478 - protein, 247 aa, Myriococcum thermophilum
MHRFSLFAAFLGLTKGVLGETETCGEVPYDPSKHVCWDNEFLCPITAGEPLSYCAGACYSKFMYTCENNILTLLPPAETPFTLTADNPDVPAIHGKPVTAASQHWVVNGETKSYCPDQVGENCPPGNETVIVSRGGTVSMSVMVPGGQQAYLDQYWNMGYTQAHSAYIPPGSITTGFGAYEGGGFVNLNGNGWGWAACPPRASGGGGPAWNLAARNDSNADRYKDCTPINLRIHSLPRGTYGAWQYT

SEQ ID NO: 1479 - protein, 259 aa, Myriococcum thermophilum
MIVPKVSALITIGVFLSRGRSAPTSSANHTARADTSVPFGVIIEHCTVPGVVALTFDDGPFIYTSHVLDLLDEYGAKATFFINGENWSRGIDDFSTPWPQILRRMDSSGHQIGSHTWSHADLSSVDQATREFQIVELEKALFHVLGKAPTYLRPPYGSCSQDCLSGTGRLGLHVVNFDVDPKDYLHNQEGDTGAAETFSRALDERPWGDSFLVLSHDTLQYTAEYLVPHMLKEIQRRGYRAVTVGECLGDPVENWYWSA

SEQ ID NO: 1480 - protein, 489 aa, Myriococcum thermophilum
MAIPSLFLASALLVALLFCHATAASQQLAHDVGCVHLPIIHSTKVDHFSDKRGIQVQLANRSDVAYYAQLSIGTPPQPVYVQVDTGSFELWVNPDCTTVSGSDAVFCERAGRYDASESSTATSLGTSRTLRYGIGAANISYFTDNISLAGSAMALQDVQFGVATSSEDAFSGILGIGYGKGIGTGYPNFVDQLWEQNVTRVKAYTLALGNKDSEEGVIVFGGVDTSKFAGRLARLPVIPRAQSPDGVPRFWVEMKSLSLTRPNGLNTAYDGASIPVFLDSGSTMTLLPANLTTAIARDFGAQAPDASGFYRIDCALAALNGTLDFVFDGVTVKVPYKELTREVASDPPSCFLGIVASDRFTLLGDTFLRSAYTVFDLETDSIWMAQAANCGSSPAALSNVRDLSAVIGECGISETAESTSSTQVPSTGADDTEAGPPHTSTTTVASQPSETTTQIGGSSSRGSAGNRLGAHRLASFLAIMAALHLFTGI

SEQ ID NO: 1481 - protein, 448 aa, Myriococcum thermophilum
MVLALFSLLACTALVGATPSRHRIVDSLDGQATGAAQRRDNNLARVFSHVQIKTSDGKCLFVGEHPDNVRATSAPVQVADCGSTGGQYWDIITAGRHVKGDNVLLVVNTLTQTCLEFDPRQQPGSQVRLSPCGEGEVTDSQLFASSSGAGPLPLQPRNQVESCVIAKNGVIGISRCDSSDAGQVFTFGEATGISEDSNNNIKINSRGRRNKKVHSTSTCARPTRTVTVLPTQSGGSTATPTTTPAPTAGSGGGEGSSGAGTILTVNPTEPVPVSRAGGVLQPTAAAEAHQRDETAERAFSGVSIRAPNGQCLFVDPTAGDFRQNLIPVSLVDCTGAPNEKWDVITEGKHNKPNPDRPAALIVSALTQGCISFDGRRQPGDTVTIFSCGGRADGGGETDGNQLFPFIGQTSFAFAPVNEDGKTCILPGDGRLDSGPCPTDGSQLFSIFE

SEQ ID NO: 1482 - protein, 403 aa, Myriococcum thermophilum
MRSPWVLSLFFLSGVAANQAAVESCPPVPANFTLSPPQPRGSRELPDPFRTVRGERITKKSEWECRRSEIAELAQRHELGPIPGPPTVLSATVVNDTQLVVEITEDNNTISFTANITFPTVGYPPYPVLIGINGINFPTPPTVAKVIFPMDQLAQPAETFVRPREGLFYTLYGRDHPAGLTAAGAWATSRVIDAIELMAEATGLDPGRVGVTGCLRNGRTALAAGGFDERVALTVAREAGAGGSSCYRLRVDDRPAPGGIDVCNTLQCPPYPDGGQTAAFAHFYDNPHELPFDRHGVAALVAPRPLLVLQSDVNWLEPKSSFQCMGAAKKVYDALGVPDRMAVSVMGGLSVCQLSHRQEALLDAYLRKFLLREEDVDFDTDVIEKDVDWEPLPAYNWTVPILE

SEQ ID NO: 1483 - protein, 647 aa, Myriococcum thermophilum
MFSKRRKAGAENTSAGLVTARLLVSFLALSTCPVAAAGHATSDTQLPIEAGPVAPLIPEAPAPAEHTFTLRHIFHHGTYKHPHLHRRKDVTQPKAEVWLPAEDGFEAQRFGPLRARSSPLRIERLVDRRPSVVDPIVAQSRKQGFVSVLSPSAWTIDDVPGPNVTDKDTILTLALMAADAYVETPGEADWEDVGAPFNRSLDFGWEGDGLRGHVFADETNSTIVIGLKGTSVAVFDGDGTTTNDKINDNLFFSCCCAQQGPWTWHQVCDCATGTYTCNNTCVVQALRDENRYYYAARELYANVTEIYPNSNVWITGHSLGGAVSSFLGLTYGVPVVTFQAVPEALPAKRLGLPVPPGADPDTPQEREYTGAFHFGHTADPVYIGACNGATASCSLAGYAFEAACHTGHECVYDTVGDLGWRVGIGTHRIKSVIRDVILKYDTVPECKLTPECRECGNWKMYESNGTEPTTTSSVPTATTTKTRTRTETCKTPGWWGCLDETTTTTGTETSEVTTTTSTTTCHTPGWFGCKDKTTTTETTTDDSTSTTSTTTSTTCKTPGRFWGCYDKTTTTSTTVTTTTTTTTSSSSTASEDQSTITPPPSMPSPTSAPTSTPAEEGSPRKRRCVDRAWYGLCRKWEGDDHETIDDI

SEQ ID NO: 1484 - protein, 484 aa, Myriococcum thermophilum
MYFTGTFLTVAVAMSGAAAAPSERSIEARQANTITVDLSQTYQRMDGFGFSLAFQRANLITNMSDKTKQKELLDLLFNRTTGAGFSILRNGIGSSPNSNSDFMNTIAPNNPGSPDAEPEYIWDGKDSGQLWVSQQAVNLYGVKTIYADAWSAPGYMKTNGRDTNGGTLCGVPGAQCASGDWRQAYANYLAAYIGFYAQEGVNITHLGFLNEPDYSASYASMQSNGNQAADFIKILHPTLEEAGLADRVKITCCDSMGWNNQVGMVSQIRSAGAEDMLGTVTSHTYAGGPGGPMNSRAPVWLSEQCDLNGAWTTAWYAFGGAGEGLTWANNIYNAVVNANISGYLYWEGVQWPNPNTNEKIIRVDNTTNTYEVSSRLWAFANWSRYVRPGAVRVGTSGGSGGLRTAAFRYEDGTIAVIAISSGGSDVNLNINFTGGPGPAAVQAFVSDNTRKCESTPATVEDDGTISGSVAARSITTFFILPETS

SEQ ID NO: 1485 - protein, 261 aa, Myriococcum thermophilum
MKTVALLAALAASVEGAILWDGRFNDLTSAEDLNKWSWSNQVGPYQYYIHGPGTVTQYINLSPDYKNPADSGSRQGARFTLDSTAFWNGQNMRRTELIPQTNAPINQGKVYYHFSMMRKDTNPPSPNREHQICFFESHFTEMKYGWISGEQGESNVNLQWMTNQQSHWKTEWKPDVWHNIAYEIDFSANTVGFWHSEGDAPLEQVVAPVSVSTSSNGADWHLGVLELPRNGYADTDEDIYFSGVYIESGTITTDVSGPGKF

SEQ ID NO: 1486 - protein, 554 aa, Myriococcum thermophilum
MRIAASTVLLGAASAASFQQQAQHVLSDGLGKAQEAVKPFSDALADAAGRPIESFEEAFSGMTDEAKALWEEIKLLVPDSAFKTPSWFSKPKPHRRRDDWDHVVKGADVQKIWVQDANGESHRQVGGRIEDYNLRVKAVDPSKLGVDSVKQFSGYLDDEANDKHLFYWFFESRNDPENDPVILWLNGGPGCSSLTGLFLELGPSSIDKNLKVVNNEFSWNNNASVIFLDQPVNVGYSYSGSSVSNTIAAGKDVYALLTLFFHQFPEYAKQDFHIAGESYAGHYIPVFASEILSHKNRNINLKSILIGNGLTDGLTQYEYFRPMACGEGGYPAVLSESECRSMDNALPRCQSLIRSCYESGSVWSCVPASIYCNNALIGPYQRTGQNVYDIRGKCEDSGNLCYSALGYISDYLNQQSVMDALGVEVSSYESCNFDINRNFLFQGDWMQPFHRLVPNILKEIPVLIYAGDADFICNWLGNRAWTERLEWPGRQAFNEAKVHDLKLPGAEEEYGKVKASGNFTFMQIYQAGHMVPMDQPENSLDFLNRWLSGEWFAE

SEQ ID NO: 1487 - protein, 491 aa, Myriococcum thermophilum
MRTSSALVAVATLNQITHGLALPERRHGPKVLGLEMQRRAPRNLIHRDRKLRKRGTLEIGLDNEETLYFINGTVGTPPNPVRLHLDTGSSDLWVNTPSSELCSSSDNPCAFAGTYSANSSSTYEYISSNFNISYVDGSGASGDYVSDTVTIGSQKIDRLQFGIGYSSTNSQGILGIGYPLNEVQVGRAGLPPYNNLPAQLVADGVIRSMAYSIWLNDLDANTGNILFGGVDTEKYTPPLLSVPVESASDAVSEFMITLTGLKLGSQTIGPPELAIAVLLDTGSSLTYLPDALVSEIYAAVGAVFDGGANAAYVPCSLARNESAPPLVFTFSEPAIAVGMDELVLDLAVTGSGGGGDGGSSSNGRPTFDNGAPACLFGIGPAGAGTFVLGDTFLRSAYVVYDMENDQVALAPARFNASASSRVVEIGSGPDAIPGATRVSNPVKPTDGLRGVNVRTETAAAARAGLGGGGGGTMRLMAACATLVLVVLGGLI

SEQ ID NO: 1488 - protein, 828 aa, Myriococcum thermophilum [sequence omitted]

SEQ ID NO: 1489 - protein, 248 aa, Myriococcum thermophilum
MKLIEVLLLTSSISMASAKHIMIPSTSFNSQSDFDTDWNYLYPWGSDHNGAARMRESQVSLSNGVLTLTATRVDGEPPAHHGGQDIAIRYLSGAIHAKEHFSVAPGGGYDFAGEFRAPVGRGTWPAFWLTGVDSWPPEIDMAEWKGSGKISFNTFNTSSEVRALDVDYPDPDAFHKILCEVRDVNGQDVSVRFVMDGQEVETQYGRGFVEKPLYLIINLQMEGSSGSPGPESDTLFQARNVEIWSYNE

SEQ ID NO: 1490 - protein, 329 aa, Myriococcum thermophilum
MKTLSAALALVAPVHAGLRFPCSTLTVQRLDPVVEPGKIPSAHVHHIVGGNAFNATMEGDIGEQATCTTCQMSEDFSNYWTAQLYFKHPNGSYHRVPVVPVQPLLGGSEGARGGLTVYYTQHDLMRDNLGQQKITAFKPGFRMTVGDPTVEGKPQVGLRYQCLQGQFRGPELDHFPEEKCSGGIFTTHHFPACWDGKNLDSPDHQSHMYNTIQYDGFMPAGPCPASHPVRMPQVTYETVWDTTKFNDMWPDGTPNPFVWSFEGTAGGTHADYMFGWKGDSLQRAMDTPECFYDGCGSITKQSMEVANQCTIQETVQEDVEGWMDKLPGR

SEQ ID NO: 1491 - protein, 260 aa, Myriococcum thermophilum
MKSFTLTTLAALAGNAAAHATFQALWVDGVDYGSECARLPASNSPITDVSSTAIRCNANPSPAQSKCPVEAGSTVTIEMHQQPGDRSCSSEAIGGAHHGPVIVYMSKVSDAASADGSSGWFKVFEDGWAKNPSGGSGDDDFWGTKDLNECCGKMNVKIPDDLPSGDYLLRAEAIALHTAGSSGGAQFYVTCYQLSVTGSGSANPETVSFPGAYSASDPGILVNIHATMDGYTVPGPAVYSGGTTKQAGSGCSGCEATCSL

SEQ ID NO: 1492 - protein, 871 aa, Myriococcum thermophilum
MKAAALSCLFGSTLAVAGTVQSRETYDKPLARSEPSYPSPWMNPDAEGWAEAYAQAKAFVSQLTLLEKVNLTTGVGWEAEQCVGQVGAIPRLGLRSLCMHDAPLGIRGTDYNSAFPSGQTVAATWDRGLMYRRGYAMGVEAKGKGVNVLLGPVAGPLGRMPAAGRNWEGFAPDPVLTGIGMSETIKGIQDAGVIACAKHLIGNEQEHFRQVGEAQGYGYNISETLSSNIDDKTMHELYLWPFADAVRAGVGSVMCSYQQVNNSYGCQNSKLMNGLLKNELGFQGFVMSDWQAQHTGAASAVAGLDMSMPGDTVFNSGLSFWGANLTLAVLNGTVPAYRVDDMAMRIMAALFKVTKTIDLEPINFSFWTDDTYGPIHWAAKEGYQEINSHVDVRAPHHGNLIREIAAKGTVLLKNTGSLPLNKPKFLAVIGEDAGPSPDGPNGCSDRGCNKGTLAMGWGSGSANYPYLVTPDAALQAQAIQDGTRYESVLSNYAEERTKALVSQAHATAIVFVNADSGEGYISVDGNEGDRKNLTLWNNGDTLVKNVSSWCNNTIVVIHSVGPVLLTEWYDNPNITAILWAGLPGQESGNAITDVLYGKVNPAGRSPFTWGKTRESYGADVLYEPNNGNGAPQQDFTEGVFIDYRYFDKVDDDSVIYEFGHGLSYTTFEYSNIRVEKSNAGEYKPTTGTTAKAPTFGNFSTDLEDYLFPKDEFPYIYQYIYPYLNTTDPKEASADPYYGQTAEEFLPPHATDDDPQPLLRSSGGNSPGGNRQLYDILYTITVDITNTGSVVGEEVPQLYVSLGGPDDPKVQLRDFDRIRIEPGETRQFTGRLTRRDLSNWDVVLQDWVISEYPKTAYVGRSSRKLDLKIELP

SEQ ID NO: 1493 - protein, 304 aa, Myriococcum thermophilum
MRFAIPVLTVALLRIRRAFADSGGRLYVPNAWNADGKGFSCIAIRDSPPSFDATWKWSSDPESVHSYPHVKFSDPALPVPLSNLSALTLSAQWAMGPGSKPRPVPSLDLPGLAYLNVSANVAFDIFADRNPDNAQQETEAETEIMIWLAKIGKSQPLGYRETESDHRTTLRVGHVDFDLYRGRNQRGTSVFTWVARSRETSFSADISLLLQYLWRNGFMSPGSHVGLVSFGTEGNHADGNVTFSSLRYDLHMLIGPAPTLDVSPIPTACSPSASPSSAAGHPEMPWLFGMISISGVFGTVLALL

SEQ ID NO: 1494 - protein, 324 aa, Myriococcum thermophilum
MPSPRLRALLSLLTLAAPAVLGHSHLAYIIVNGEVYHGFDPRPEQENSPLRVGWSTGAVDDGFVGTADYSSPDIICHIDGTSPPAHAPVRAGDRVHVQWNGWPLGHVGPVLSYLAPCGGLEGSESGCSGVDKRQLRWTKVDDSQPVMEVVGDTGGGDGGLSGVPGQRWATDVLIAANNSWQVEIPRGLQDGPYVLRHEIVALHYAANSSGAQNYPLCINLWVEGGDGSMKLDDFDATQFYRPDDPGILLNVTAGLSSYVVPGPTLAAGATPVPYAQQNSSSPKMDGTPVIVTRSTETVPLTAAPTPTETDQAKGRIQYGRNFHG

SEQ ID NO: 1495 - protein, 350 aa, Myriococcum thermophilum
MKLQQRSVLAAALALAGAPSANAILRFSCSELVTERLDPLVFPGSPESPHLHQVVGGNMFNITMDPNQHNIGEEATCTTCTFSEDFSNYWTAVLYFRARNGSYMRVPQRPNVGFEGARGGGMTVYYTASFQPGGGKVTAFQPGFRMIVGDPSIRTEQEAAKYRQLTFTCLENMYTRDGETKSLPNRPCPEGIMANIRFPTCWDGKNLDSPNHAEHVAYPASGTFESGGPCPESHPVKLPQLFYEVIWDTRQFNDPSLWPEDGSQPFVWSYGDFTGYGTHGDYVFGWKGDALQRAMDANCDVFCPTLQTQSISQGNQCSVQPVVNEQIDGWLDSLPGNVQITGPQPRTSSA

SEQ ID NO: 1496 - protein, 777 aa, Myriococcum thermophilum
MLKRLSTAVLLALGLASSALAAPAPAPRQESGWWVASIERQGAPAFNQDKSYKVFRNVRDYGAKGDGSTDDTDAINQAISDGNRCGEGCSSQTTTPALVYFPPGTYVVSKPIIPYYYTQLVGDAVSLPTLKASADFTGMAVIDADPYDSEGNNWWTNQNNFFRQVRNFVIDLTAMPVEVGAGIHWQVAQATSLQNIVFNMRTDGGEANRQQGIFMDNGSGGFMSDLTFNGGNYGAFFGNQQFTTRNLTFNDCKTAIFMNWNWAWTFHDIKINNCGIGIDMANGGPGAQTVGSILVLDSQFTNTQIGIKTAYDPASPQTNGTLILDNVDMTGTERAVFNEATGAEILPGGQKVDFFAQGRGYTGQSGEAVQAPQEPVRKPEALLDPATGKVVTRSKPQYEDVPASSFVSVKANGAKGDGQTDDTDAIQAIFDKATPDQIVYFDHGAYIITRTVKVPKQIRITGEALPLILAGGDSTFKDQANPQPVFQVGEPGDVGEVEMSDLIFGTAGPQPGAIMMEWNLRGSNPGAAALWDVHTRIGGYAGTQLEREQCAKNPDVENPIKPECFGAFLMLRVREGGSVYLENTWYWVADHALEPEAKDGQIDVFNGRGVLIEGEGPVWGWGTASEHSVLYNYQFNNASNVFLALIQTETPYYQGNPDATKPFEPHADLQDPDFAATCAADDAGCKRAWGVRAIGSKDIFIYGAGLYSFFDNYAQECLQTESCQSHMVSIESGSEVHMYGLSTKASVNMVTIDGQGAVLDSDNRNNFCATLAFFHSP

SEQ ID NO: 1497 - protein, 220 aa, Myriococcum thermophilum
MKSAVVVIAIAASAWAHSIFQKVSVNGADQGLLVGLRAPQSDYPVYDVNDQQLTCGLPGTRSDKVIDVKAGDRIGAWWGHVIGGEQYPSDPDHPIAASHKGPISTYMARVDNAATASDAGLQWFKIHEDTFDPATGLWGVDNMIANSGWSFPHGAQFYQSCAQLNVSGSGTYLPSEMVSIPGAYNQDDPGILIQIWVNGIPDNGGKPYTAPGPRPMMCLA

SEQ ID NO: 1498 - protein, 363 aa, Myriococcum thermophilum
MRFSASVALALSGLVAAKPLHMDKVTKFIERQTQTLNEAMVASGREYIGTSLTLRGDYTEEQIIRTEFGSITPENAMKWDATEPNRGQFTFSAADQHANWARQNGKQVRCHTLVWYSQLPGWVSNSGFDNATLIDVMANHINTVMGRYKGVCTHWDVVNEALNEDGTYRDNVFLRVIGEAYIPIAFRIASEADPDAKLYYNDYNLEYLGPKLEGAARIVKLVQQYGVRIDGVGYQGHLVTESTPTQGTPTPSEEDLTAALRTTADLGVDVAYTEIDIRMNTPATEQKLQDLADAYNRVARSCLNVERCVGITIWGVSDRYSWVPGTFPGEGEALLWDSNFQKKAAYDAFLEGISSPPSNSTKF

SEQ ID NO: 1499 - protein, 341 aa, Myriococcum thermophilum
MQPKGWIAALAAAQVAKGQELMRFGCSQLTIDRIDPLVNPGSIPSPHMHQIVGGNSLNASMPPVEYDPPTQSTCTSCTYSEDFSNYWTANVYFKARNGSYKRVPQFANLGLNVDGGVTVYYIRGYQPSATVTAFKPGFRMLVGDPNNRDESKVPPGLCFRCEENMQQNPFGGPPCTGADTKAFPSRTCGGGWRVTVTFPTCWDGQNVDTPDHKSHVTYPASGTFESGGPCPASHPVKIPQVMYEVMYDTREFNNQAEWPEDGSSPFYWSHGDNTGYGIHGDYVFGWKGDALQRAMDNKCAGDRCAPLQRQSDAEAIACTKEQSAKEDIGDNWLPHIPGQEL

SEQ ID NO: 1500 - protein, 313 aa, Myriococcum thermophilum
MKFLSQLSAALALAGSKLAAAHPVFDELMRPTAPLLQPRASLQQVYNFGDNPSNTKMFIYVPDNLAENPPIIVAIHYCTGTAQAYFTGSPYARLADQKGFIVIYPESPYSGTCWDVSSREALTHNGGGDSNSIANMVTYTIEQYGADPSKVFVTGSSSGAMMTNVMAAAYPEMFAAGIVYSGVPAGCFYSQTGAVNAWNSTCANGQINSTPEVWAKMVFDMYPGYEGPRPKMQIYHGSVDFTLSANNYNETIKQWTGVFGYDYNRPDSTQANTPQAGYTTYTWGDGQLVGVYAQGVGHSVPIRGDDDMTFFGL

SEQ ID NO: 1501 - protein, 230 aa, Myriococcum thermophilum
MVSFKALVLGAVGALSFPFNVTELREAHARGENVTELLMARDGTPSQTGYHGGYYYSFWTDNGGYVNYWNGDNGRYGVEWQNCGNFVGGKGWNPGAARTINFSGSFNPLGNGYLAIYGWTQNPLIEYYIVESFGTYDPSSQAQVLGSFYQDGSNYKIAKTTRYNAPSIEGTSTFDQFWSVRENHRTSGSVDVGAHFAQWQQAGLQLGNHNYQIVATEGYQSSGSSDITVW

SEQ ID NO: 1502 - protein, 426 aa, Myriococcum thermophilum
MVTPSLKKAALAALSLLPLMSSASPVPVFNETSVEARQASGYKNIVYFTNWGIYGRNYQPDQLPASQLTHVLYAFANLRSDGEVFLSDTYADLEKHYPGDSWDETGTNVYGCVKQLFLLKKANRQLKTLLSIGGWTYSSTFPAAASTEAGRALFASSAVRLLADLGFDGLDVDWEYPANEEEAANFVALLKAVRSALDEYAAQHAPGYHFLLTIASPAGPTNYAHLPLGEIAGVIDFFNFMGYDYAGSWSTAAGHQANLYPTSDQNKTPFSTDKALSDYVAAGVDPSKIVLGMPIYGRSFQNTDGLGQPYSGVGEGSWENGVWDYKVLPKSGATVEFDEEAGATYSYDPATRELISFDTVDMVKKKVDYVKEKGFIGSMFWEASADRTGDESLIGASFNALGGIDQSENLLSFPDSKYDNLKAGFE

SEQ ID NO: 1503 - protein, 451 aa, Myriococcum thermophilum
MRISSTTLTAALAGVASASLQVVPGGTWTTPDGEHLQAHGAGFIEINGTYYMIGEDKSGGHSFSNVNCYSSTDLVQWTYVGALLSRTDSGDLGPNRVVERPKVIYNDKTGKYVLWMHMDSSDYGEARVAVATGDEVCGKYEYIGSFRPLGRQSRDMGLFKDDDGKAYLLTEDREYGLRIVALSDDYLTPTTDVYSWRLEGGNRVEAPAMVKLGDTYFLFASMMTGWDPNDNQYTTSKSLSSGWSEWRKFADQGTNTYNSQTTYILKTSESSAIYMGDRWVKDNLMASTYVWLPLDISGTSVTMKNFVSWVPTSNFASWQNPPAETSYEAEAATYGGQARNIDCSQCSGGVAAGYIGGPDGGSVTFSGIRSDIDGLTTIRIKFRNGDSSPRYANVRVNGDAGRKLAFLTARGDPASSTLHAELKKGSDNTIVIEGIDGGWGPDIDRLMVPVQ

SEQ ID NO: 1504 - protein, 659 aa, Myriococcum thermophilum
MRCSVPAALLGLFITSVHAAPAVILEETKGIPPGWVYLGNASASDRMTLFVALKEPGIEELKAQLHQRRDVDHPSFGQHFSRDEVAQYRQPREQSSGTVLDWLRSEGIRNIHDQGSLISFEASAEMVRTLFHAELGYYAYEEGDVDTDPAPVLRAKSYAIPASLRDYIDFVHPITNFMPPRRRFGNRGPPHGPPWGPRPRPYPKPTKRPSSTRTTRTPITTTTITATSWTISYPIPSGSTLPPKPQPTSDTPETINPFPNLPCLAATVPDCIKKLYNISYTPSSPETPSPVRFGVAGFLEQWILYSDVDQFLDTLAPNLPKNYNFTVELINNGTNPQDSPRNAGIEASLDVEYAMALGYPTNVVYYSTGGRGTMLDPSTGLALPVLQSDNEPFLELLQALLAKPDEELPHVLSISYADDESGVPRAYARRVCDQFAALAARGTTVLVATGDGGAAGTGRTKCVDRNTGARRFVATFPADCPYVTAVGAVSNVAPPIAGAAYSAGGFSDFFARPEWQDGVVEPYLAALVRGNDTRIGLFNHAGRAMPDISAVGSAFQIVMGGENSQVLGTSASTPVVAAMVALINDARMRAGKPSLGWLNPLLYSEKVKRVLRDITVGESMGCRFPDGVRSVGWSAVGGYDLVTGLGVVDDFYDFMQALM

SEQ ID NO: 1505 - protein, 814 aa, Myriococcum thermophilum
  misc_feature (605)..(703): Xaa can be any naturally occurring amino acid
MILQASALLAAAALVRASPTKVRRDAPVGAAAWEAAHSSAAAALGRLSQQDKVNIVTGVGWDQGPCVGNTPAINSINYPMLCLQDGPLGVRFGSSITAFTPGIQAASTWDVELIRQRGEYMGEEFRGCGIHVQLGPVAGALGKIPHGGRNWEGFGVDPYLAGIAMAETIEGIQSAGVQATAKHYIVNEQELNRETMSSNVDDRTMHELYVWPFADAVHSNVAAVMCSYNKINGTWACENEWVLNTILKEELGFPGYVMTDWNAQHSTEDSANNGLDMTMPGTDFNGGNILWGPQLDSAVNSGRVPRERLDDMVERILAAWYLLGQDSNYPSINIGANVQGNHKENVRAVARDGIVLLKNDDGILPLKQPSKLALVGSAAVTNPQGINACQDQGCNNGALGMGWGSGAVNYPYLVSPYDALKERAGQDGTTLSLHDRDDTNGVQSVVADADAAIVVITADSGEGYITVEDVAGDRPNLDPWHNGNELVRAVAASNPNTIVVVHSVGPIILEDILSNEGVKAIVWAGLPSQENGNALVDILYGLVSPSGKLVYTIAKREEDYGTRVVSGDDSFSEGLFIDYRHFDQEDIEPRYEFGFGLCKSLSPPXXXXXXXXXXXXXXXXXXXXXXXXXXXXXXXXXXXXXXXXXXXXXXXXXXXXXXXXXXXXXXXXXXXXXXXXXXXXXXXXXXXXXXXXXXXXXXXXXXXTIPGGASDLWEEVATVSATITNSGEVEGAEVAQLYLTLPSSAPRTPPKQLRGFTKLKLEPGASGTATFSLRRRDLSYWDSGSSQWVVPEGEFGVSVGASSRDIRLTGTFQV

SEQ ID NO: 1506 - protein, 747 aa, Myriococcum thermophilum
MHDPMAFVSSLAFAALGALIVPARGGVTYPDCANGPLRSNTVCDTSASPAARAAALVEAMNTNEKLANLINNSPGVSRLGLSAYQWWNEALHGVAHNRGITWGGEFSAATQFPQAITTSATFDDALIELMGTIISTEARAFANNGRAHLDFWTPNVNPFRDPRWGRGHETPGEDAFRNKKWAEAFIKGMQGPGPTHRVIATCKHYAAYDLENSGSTTRFNFDAKVSTQDLAEYYLPPFQQCARDSKVGSIMCSYNAVNGVPACANSYLMDTILRKHWNWTDQNQYIVSDCDAVYYLGNANGGHRYQPSYAAAIGASLKAGCDNMCWATGGTAPDPTSAFIPGLVLAGYFDGPDGMYRNLSASDLNTQAAQDAALKAAEEGIVLLKNDGILPLSVNGSNSQLAMIGFWANAADKMLGGYSGTPPFNHDPVTAARSMGISVNYVNGPLTQPYGDTSAAVNAAQRSDAVIFFGGIDNTVEKESQDRTSIEWPSGQLAMIRALAETGKPIIVVRLGTHVDDTPLLSIPNVRAILWAGYPGQDGGTAVMNIITGLASPAGRLSATVYPASYTNQAPYTNMALRPSSSYPGRTYRWYKDAVFPFGHGLHYTNFSVSVQDFPESFEIADLLDSCGDSVPYLDLCPFPSVPLNVTNTGSRASDYVALGFLSGEFGPSPYPIKTLATYKRLFNIEPGQSQEVELEWKLESLARVDENGNRVLYPGTYTLLVDQPTLANITFTLTGEEAVLDSWPQP

SEQ ID NO: 1507 - protein, 228 aa, Myriococcum thermophilum
MKVVAVAVPVLAGIAGANPIDVEARQSCPEVHVFGARETTAPPGYGTSQGLVNMVVQAYPGATSEAIDYPACGGQPQCGGIDYDSSANQGTQAVVSAVTSFNQRCPDTKIVLIGYSQGGQIMDNAYCGGAGATLSGSALDAVKAAIFLGDPHFSQGQSINVGTCQAQGFAARPPGYQCTPGNPDNAKSYCDAQDPYCCNGNDANHHQQYVNIYGQEALAFIQSKLNAA

SEQ ID NO: 1508 - protein, 357 aa, Myriococcum thermophilum
MQWKALALTLLVGRGLGQSVSPTQPWFPNPTDIPAMLRFQCSQLVIDRLDPLGSPGLIPSPHLHQIVGGNSFNATMDPETHDLVAGSTCTTCTFSEDFSNYWTAVMYFRARNGSYKRVPQRPNMGLSGNGGVTVYYIPPHDKSVGVTAFKPGFRMLVGDAASHEPGQDPKVCHRCMPKEGELPHLNCAPPDSQEFPKEPCEGGIRSVITFPTCWDGVNLDTPDHKSHVAYPVSGNTDMTPDAGTCPDTHPVKIPQVMLETIWDTTPFNDKELWPEDGSQPFVWSTNDKDGYTQHGDYVFGWKDDSLQRAMDARCTGDVCDVLERQSVEESVKCTIEQTVKDDVDGWVASIPGQKPLA

SEQ ID NO: 1509 - protein, 224 aa, Myriococcum thermophilum
MKGFLGAAALALAVGEASAHYIFQQLTTGGTKHDVYQYIRKNTNYNSPVTDLSSNDLRCNVGATGAGTDTVEVRAGDSFTFTTDTPVYHQGPTSIYMSKAPGSASDYDGSGPWFKIKDWGADFSSGQATWTLTSDYTATIPSCIPPGDYLLRIQQLGIHNPWPAGIPQFYISCAQITVTGGGNVNPSPTVSIPGAFKETDPGYTVNIYDNFHNYTVPGPEVFTC

SEQ ID NO: 1510 - protein, 615 aa, Myriococcum thermophilum
MYLSRLALASLGLLLAGAEAAEPYRLRTPPLDTQWTKEVGTNPWPQHPRPLLRRDEWKNLNGIWTYQPTEGEPDAGSLPELPLEKEVLIPSCIESGISGIMDMSFQVTRMFFGTTFSVPSDWTKSGRRVLLNFESVDYEATVYVNGAKVGFNRGGYARFTFDITDHIAEDGDNELHVFVFDPTDDQSIPQGKQTKRPSHIFYTPCTGIWGTVWLESVPENYISGLDLAGDMHGELTVTVHSGAKEETPVEISVVDPQGDVVATHKSVSDRQFAFRVPNPKLWSPDEPTLYNVTVKLGEDEVSSYTGFRTISSGVVKGVKRTLLNGEFVFLFGPLDQGYWPDGIYTPPTLEAMVYDLRVIKSLGMNMLRKHIKIEPDLFYEACDRLGIMVFQDMPSMRVFTNAPPTDEDQREFERQLEIMVNEHKSHPSIITWVIYNEGWGQRTDYFPEFELTDRVRELDPTRLIDATSGWIDHGAGDFSDNHKYAEPQCGTPWHSQPSAPFDPNRIGLQGEFGGIGHRPADENLWPIEGAVRTINQTYEIHGGLESYHYRAHVLLGQLRDQVERYSCSGAIYTQTTDVEGEVNGLLTMDRRVIRIDVDQWREDIEALYKAARARA

SEQ ID NO: 1511 - protein, 561 aa, Myriococcum thermophilum
MLRGTIAVGVACLAQLVAGFNGPPFRTSLTLRDFREQLERRQTRDATSLEARKTDLEDLYPAHALQVPVDHFHNDSLYEPHSSDTFPLRYWFDASYYRKGGPIIVLQSGETSGVDRLPFLQKGIVAKLAQATHGLGVILEHRYYGESIPTPDFSTENLRFLTTEQALADMAYFAQHVVFEGFEHLDLTSAKNPYIAYGGSYAGAFVAFLRKIYPDVYWGAISSSGVPEAIYDYWQYYEAARIYAPHDCVVATQKLTHIVDNILLNNEADSDYVTRLKAGFGLGGVTRNDDFANAISWGIGGLQGLNWDPAENSTNFGEYCNNLTATETLYPTSPSLEQDARELVKVGGYSKEADTLTTQLLNYMGYVNATTVQTCRKDTQDECFTNYNSTFYQQDDKTQDWRLWSYQYCFEWGYLQTGSGVPADQLPLISRLIDLDFLSVICREAFNITTPSQVERINKYGGVNISYPRLAFVDGERDPWRYASPHRIGLPERKNTISEPFILIEDGVHHWDENGVFPNETRPGVPPKPVADAQRAEVKFVKAWLREWKEKEKYPYDGDDL

SEQ ID NO: 1512 - protein, 270 aa, Myriococcum thermophilum
MLYSLSRLCSCLRLPHGRRLRRRRMATLLLLFLILLLFFLPLYAIYKPPSPLVRYLSHRWTDVLFRIWLPPSKPLVALTIDDAPSDHTRAILAALAASGAHATFFVIGSQVAGREDVLREIVRGGHELANHGMHDEPARALPEAELEAQITRVQELIEAAYVAEGRPPPPAGRRRYYRPGSGFFSERIRSVTRRLGFRVVLGSIYPHDAQVPWAWLNARHILSMLHPGGIIICHDRRSWTEPMLRKALPELRRRGFQAVTLTELLSEVTG

SEQ ID NO: 1513 - protein, 368 aa, Myriococcum thermophilum
MALKLLCQSLLVLGALGSVLPPRADQCPALPTNYSPRPNPKLPDPFLQLDGTRITKKDEWTCQRDYLSQLIQKYELGDYPAPPESVTASLSGSTLSITVRDKEKSISFSVSIRAPSSGGSGPFPAIIAYGGPSIPIPSGIATIIFNNDEIAQQINTGSRGKGKFYDLYGSGATASAMLAWAWGGALVAGAFVDRIALTLPQESGSGGAACWRLSDEMKRRGINVQTASQIITENVWLSRSFEQFARNNNVPGLPIDHHELAGMVAPRALLVIENTSQVWLGNMATYGCMKTAHKIWEALGVPENMGFTQTGDHSHCQWSSSQSAELTAFIDKFLRGTGTANTNIIKTDNPNLGFVDSDWVDWYVPTLV

SEQ ID NO: 1514 - protein, 350 aa, Myriococcum thermophilum
MMLKRFVASLIGISAADAALTYKGVDWSSVLVEERAGVSYKNIDGSAQPLENILAANGVNTVRQRVWVNPSDGNYNLDYNIEIAKRAKAAGLDVYIDFHYSDTWADPAHQTTPAGWPSDIDNLSWMLYNYTLDVANKLQEAGIQPNIVSIGNEIRAGFLWPTGRTENWGNIARLLHSAAWGIKDSSLSPQPKIMIHLDNGWDWGTQNWWYSNVLGQGALEMSDFDMMGVSFYPFYSSSATLSALKSSLDNMARTWGKEIAVVETDWPISCPAPMYEFPADVRGIPFSPEGQTTFITQVAEVVASVSGGVGLFYWEPAWIHNANLGSSCADNTMFSQSGQALSSIAVFKNI

SEQ ID NO: 1515 - protein, 498 aa, Myriococcum thermophilum
MRKAAVMAAAAAVLANGATARVHGHRHAHALFQKRSDAGDVCTPSCTTIYSTITGEPTLLPPAPAPTPSTSTPVAEPTTSTSSGPVLVPTPIEQTLPTPGTYTIPATTVVLTKTTTVCGASSSEVPAGTHTLGGVTTVVETATTVVCPVATTETQDNGVVTSVIKTTTYVCPSAGTYTIAPITTEVPEATTVTIPVVETYPPGTYTAPEVVTTVTETSVIVTCPFTSATPAEPTSAPSPTEPAPAPPSTSKDAPAPPSSSKVAPSPSPSPSKGPNPDDHGKRWAITYTPYTPEGNCKGPAEVNEDVAAIAKAGFKALRVYSTDCDTLPNVGDAARNHGLRLIVGIFIGQFGCENGSPTVNEQINALKKWSQWDLVDLCVVGNEALFNGFCTVSELASLINRVKSELGSVGYNGAFTTTDVVSAWINNDVSAICDAIDVTACNAHAYFNPETKPADAGRFVAGQLSIVEKVCGKPGYVMETGWPSAALPDSFHARRQFI

SEQ ID NO: 1516 - protein, 394 aa, Myriococcum thermophilum
MVRLGSSLAVFTLAASTARADSYTLVDTFDASNFFDEFDFFTEPDPTHGFVQYVDGYTANRKGLAGFASGGIYLGVDFNSTTTTGRASVRLTSRKSYTKGLFVADIAHMPAGTAESSSCGLWPAFWMFGPDWPNSGEIDILEGVNSQTTNSVSLHTGPGCTVSNVGSLPGTELVSAECQADVGCTQNTSAPNNYGASFNAAGGGIYAVEWTDAAIKVWFLPRDSPVTNELSSSSSSSTTTSTSRVNDINTTTIITLDPSTFGTPLAVFAGGPECAIADHFANHNLVVDTTFCGDWAGRVWDSDATCAALADTCEEYVGAHPEAFADAYWIFRSIRVYQLQFDTDPRADGTGGGGSGEYNDQGSEERGGVGGREAARQRWLRGSLRPEMARKWRA

SEQ ID NO: 1517 - protein, 225 aa, Myriococcum thermophilum
MHLSTTAGLLALPALALAQASGNGETTRYWDCCKPSCAWPGKGSSAPVQTCDKSDNPLNDGGSTQSGCEPGGGAYMCSNQSPWAVDDQLSYGWAAVRIAGQTEEQWCCACYELTFTSGPVQGKKMIVQASNTGGDLGQNHFDLAIPGGGVGIFNACTDQYGAPPNGWGDRYGGIHSREECDSFPEALKDGCYWRFDWFQNADNPTVSFQEVACPSELTSRSGCSR

SEQ ID NO: 1518 - protein, 668 aa, Myriococcum thermophilum
MHLSGLLPLTLLPLCTSTVAATSGGGKHGIDGKHVGTNIITVRDDDGTLSVRARPDAPNGYAPAVVPCPQNKPTIRSASSLSRSERDWLAKRRPLTVEPMIQLLKRANIDGFDAEAYIKQVAEGVENLPNIGIAVSGGGYRALMNGAGFIAAADSRTPGSTDKGGIGGLLQASTYLSGLSGGGWLVSSIYANNFSTVTALRDGRKDSSIWRFDDDIFRGPDLPGILDTARYWGKVAGQVASKRDAGFEVSITDYWGRALSWQLIDAPDGGPSYTFSSIAEDDDFSNGRAPFPILVADGRAPGEKIISLNATVFEFNPYEMGSWDPTTYGFAPIRYLASNFSGGVIPSDGNCVRGFDSISYIFGTSSSLFNAFLLQNITSVDGVPDFLLEAATAVLENISEAENDVAQYVPNPFLGWNGQSNPAARSDSLDLVDGGMDLQNIPLHPLIQPMRAVDVVFAVDSSADTTFSWPNGTAMRATYDRTKGDIANGTLFPPVPDDRTFIAHGLNNNPTFFGCDVDNFTSDATPPPLIVYLPNAPYTAWSNVTTFTPSYSLGQRNAIIRNGYNIATQGNGTLDEHWTACVACAVLSRSLVRTGTPVPDRCRSCFDRYCWNGTVADASASIASGAGGEEYQPTFKIGNDSEDSAAIAGSRPAWVALVAGLVATIVML

SEQ ID NO: 1519 - protein, 455 aa, Myriococcum thermophilum
MKFAVFALAASLVAAAPRVVKVDPSDIKPRRLGGTKFKLPQIHNDFFRQHGRGPRALAKAYEKYNIELPPDLLHVIRGILRDLGIEPKAKKIPGLHSSHGDGAPYTNETDDSGEVSAIPQLFDIEYLAPVQIGTPPQTLMLNFDTGSSDLWVFSSETPKRMQKGQTIYKIEESVTARRLKNHTWSIQYGDGSRSSGNVYLDTVSVGGVNVFNQAIESATFVSSSFVTDAASSGLLGLGFDSINTVKPIKQKTFISNALESLEMGLFSANLKKAEPGNYNFGFIDETEFVGPLHFVDVDSSDGFWQFEASGYSIQPNDDPTGNSTGTPFRPVAHTAIADTGTTLLLLPPGIAQAYYWQVQGARQAPEVGGWVVPCNATMPDMTLHIGTYKAVVPGELMIYAPVDTDDMDTATICYGGIQSASGMPFSIYGDVFFKAQFTVFDVENKRLGFAPKPEL

SEQ ID NO: 1520 - protein, 389 aa, Myriococcum thermophilum
MKSSVLASVFATGAVAQSGAWQQCGGAGWQGSTDCVPGYHCVYQNEWYSQCVPDTASTTLQTSTTSRPSTTSTAPPSSTTSPSKGKLKWLGSNESGAEFGEGTYPGLWGKHFIFPSTSAIQTLINDGYNIFRIDFSMERLVPDQMTSAFDDGYLRNLTEVVNFVTNAGKWAVLDPHNYGRYYGNIITDTNAFQTFWTNLAKQFASNSLVIFDTNNEYNTMDQTLVLNLNQAAIDGIRAAGATSQYIFVEGNAWSGAWSWNTTNTNLAALTDPQDKIVYEMHQYLDSDSSGTHAECVSSDIGAQRVVGATNWLRANGKLGVIGEFAGGANAVCQQAVTGLLDHLQDNSDVWLGALWWAAGPWWGDYMYSFEPPSGTGYVNYNSILKKYLP

SEQ ID NO: 1521 - protein, 288 aa, Myriococcum thermophilum
MWSTFRSLLSLASLISSACIATAELSIVASVKQHGKHVDASSLSLIRTPPQEHRWHAPWPRRWRNHNNKTVERDAVSYSANWCGASQHATDSDGIKNVLGYFTAPDLTLRPGTPAPQFAAAWVGIDGAECNTTLLQAGVTTIVNADGGQSSSAWWQWYPEASFTIETLKVKPGEWVSVNITTKDDSSAILTMENTDTGLSVTLELNNGPQLCRRDAEWILEDFFDAGKQVALAHFADLWFVDSGATTKKGKKVGFDGATMVHLQDENGKVLCSPEPYDDSNFVVVSNP

SEQ ID NO: 1522 - protein, 481 aa, Myriococcum thermophilum
MARTLQYLLCGILALAAGTTNAAPAAHGSTRVAAAAEPSATTYEAEDAVLSGTTVETEQEGYTGTGYVTGFDEASDKITFEVESETTKLYDLSIRIAAIYGEKHTTVVLNGGANSDVSIPASDTWADIPAGQVLLNEGANTIEIVSNWGWYLVDSITLTPSTPRPEHQINAELNNPSADESAKVLYDYLRSIYGKKILSGQQDLTWADYVTEQTGKTPALVSVDLMDYSPSRVERGTQGTAVEEAITHAERGGIISVLWHWNAPTGLYDTEEQPWWRGFYTEATDFDVEAALSSTDNANYTLLVRDIDAIAVQLGRLRDAGVPVLWRPLHEAEGGWFWWGAKGPEPAKKLWALLYDRLVNHHGLNNLIWVWNSLEADWYPGDDTVDILSADVYAQGNGPMSTQYNQLIELGKDKKLIAAAEVGAAPLPDLLQAYEAHWLWFAVWGDTFINNAEWNSPEVLQTIYTSDYVLTLDEIQGWQDS

SEQ ID NO: 1523 - protein, 993 aa, Myriococcum thermophilum
MILLTSASLFFLAGFYLRTSSSARISEVPSQTSGHAPVFTVPASADWGQHVLPNIKDPQATDPQRVCPGYKASNVQDTKDGFTADLYLAGPACNVYGTDVEHLVLSVGFQGADRVHVEIRPRYIASENATWFLLPEELIPRPSVGQEHGSEPNDLTVSWSNDPSFSFTVKRRETGDILFSTEGKKLVYEDQFIEFISTLPEDYNLYGLGEVIHGFRLGNNLTRTLYAADVADTIDANIYGSHPVYLDTRYFATDESGKLTYIANATDTTAKYVSYTHGVFLRNAHAQEILLQSSGLTWRTMGGSIDLYFYSGPKAEDVIKSYQQTTIGLPAMQQYWTLGYHQCRWGYESWAVLQDVVDNFAKFEIPLETIWADIDYMKKYRDFENDPVRFSYEEGAQFLAKLHANHQHFVPIVDSAIYAPNPEDPEDAYPPYDRGVEANAFLMNPDGSIYYGAVWPGYTVFPDWVGAVLNGSGAIDWWIDELSRWSEKVAFDGLWIDMSEVASFCAGSCGAGNLTLNPVHPPFLLPGEPGNLILEYPEGFELTNSSEASSASSALSTQYPSSSTTASTTTAYVRTTPTPGVRNVDWPPYVINNIHGDLAVHAVSPNATHHGGYLEYDFHNIFGHQILNATYQALLKIYEGKRPFIIGRSTFAGSGKWAGHWGGDNAALWAYMYFSIPQALSFSIFGVPMFGVDTCGFGGNSDYELCARWMQLSAFFPFYRNHNILGAIPQEPYVWASVIDATKTAMRIRYALLPYLYTLMARASTDGSTVMRALAWEFPDEPWLAGADRQFMLGRAIMVTPCLEQGATTVGGVFPGVGDKNTVWYDWYTGKSVTNGIRPGQNVTIEAPLGHIPVYLRGGSVVPVQEPGMTTTESRRNPWGLLVALDREGFAEGELYLDDGESLEPAGVTWVQFTATSTSIKAVPQGNYVDTNTFANATVMGLAKSPKQVWLDKYVLDRANWKYDHDRAVLSLHGLNHLFPRGAWAEEWEISWE

SEQ ID NO: 1524 - protein, 414 aa, Myriococcum thermophilum
MKAFGFPLLAAVLLATAPAASTPVSHCPNGDSGPCYSVAVPDSSAEAGSGNIYFQIRAPTSFQWVALGTGSGMAGANIFLMYQDGNGNVTLSPRRGVGHTEPKLDTSSSAARLTLLAGSGVDGSVMTANVACANCESWDGGEMSLQSTSSNWIGAWREGPSLDTTDLDATIQQHDDNTRFRIDLTQATVSEDSNPFVSADGDEDGNGSESGTGQDGGSGSGSGSSGGVIESGGSSKPAILVAHGIIMALVMGLFYPLGSTIMPLVGKWWVHATWQIIAFCLMWAGFGLGVVSGRRLLSTEMWDKTHTVFGAVVVSLLGLQPVFGYLHHLHYLKFHRRGLISYVHIWWGRILMVLGVINGGLGLQLANEEDGPIIAYSVISGVVFLGYLAYKLCQFFRRGTSDNHKMASDSPAAA

SEQ ID NO: 1525 - protein, 2265 aa, Myriococcum thermophilum
MMRDHRRRSPESTRRRRAERRRSREQLAAAAAAALAERAMQSSSHSQRRARSDSSSSSTSSSSSSSSSTSSSLLNISRKSRFGIRSFFASSSVKKVKKRRSFRRKNTSSSSFDSDLAYGPGYVSRSSFERQEAEYLQRHPQKPQHQHQHQHQHQYQQQYQQYQHHQHHQPPYHPQQHPYPYPPSQHSYSHPPQHPQHPQHGQYPSQHGPSPPSHQHPHHPPEQDQLFGPDGRPALHRAETDEEILALGRKLSDLARAQNIRDLERVGKKRPSRLVAAATALSEFHHERKSRHGHTSKGHGSSKLHSRRDESDTEWESTSDSDSDSDSYSESSSDADSSLAYGPTPKFSDPTLPIDDRSQHRPLPEPVRPPHHKSSAVDPAGSRRGHTDSPHGFRPGDSPRSSHRETDPRASTYEIPPPESASIEARPMRRVYPVPAADDAARFEAAPGSSGAPAPVATSEGSSTPTGREKARERDNDGGGALYSSRPEPVPIQAPRPRTLVSPRVLEDSRQPVEREQLAEQAGSPPERRSKKSRDSDRRNAVEAVVSGALPAVAGAAAGAALASVIEERREKKREEHRFERREERRSYEDRHERQEAADWRSSADAAANAVPPSSAASDAIARRELEELRAKEASVREERLRYEREVQRLREARELEERESRREEEEEEEEEEKYRRRRRREEEEAERRRLEEEELDPRRIRDNPELAEVYERRVREVREIRYKEERRSREEQRIVRTERERMSRSAEKKLEREEKRKLESSEDQGERSREREERRRLKGKDVAPVVVDDERGRSRRPDREEVPTPGPEENKSGGLEPEESKSSREKRRAKREETLRKLREIQEQIELERKRLAELDAGKEPPPPPAAEKPVEAGPSTSRKDAVDPFKYQVPDDAFPTPAHSPPQRPLTPVIYTVESEPDWAREEARKSDDEPEERLSRRCSYEREQKAAQASTGQTLHSTIQDEKDSEARRARSRSREPPRPRDSEPVRDPVQEEANRLYRESRMAQRKAEEEIRSRTPSPTRSVVDKYEDDDDLNEDPIGRIVTPPEMKRASTKSKYDGPNADVRIDNIITPHDLHRFQPPPPDASGLVMVPIFKSRDPSCERERPMLNLVLPTPRTSPSLEKMKARQAAAQAAADEATSEDEKKTQEKKPAQDRKPNFIIDRHGQVVEAPEDYATGRVAESDSRDSSRERPAIKLRFSGARKKNAWSNLIAAAVADASAKSKGEKKSESIKEAIEKKKGGSAWRSLVAAAVANAGSKSKGEKSGDAKKEEREEEAVKDNNNNNNNNNKGDYTAGADQDNKPRDAPQPVSEGKPEKTAAPEVRPSSIEAVPEPAAFPAMVLIATPEQALEAVPDEALPDTQPDAAAPTKVSEEPSTPPRWSRVPYEFDDEPPQVGPKPSFSPESSSKVPGSYEEDAEFTATLAAGLQSSGFNPDIVIQDPTYRKRDSPPGSDEPKYVPPSCETVTDLGVETLHQESTSGKGHDAPLLERVAPVEEGSSATAEQGEKSGNTGDDSNTALTTEVVEPSVEPSVAEADDEWSMRSLTDSRKQESEHPGSFDSTTYSNPPSEVSVASSSSRKKKKNRRRSSTKDTYDIPEKDEPPDRPGDSFQWIDREVSSVASDPTGKTNGTSGHHDANSVVSLHTNGSGEHREQLTKNNGHSEEDSFLGNAGTFGAGAGYAGAVAVAAAAAQLFRPNATQDSVEEAQPFRRPRSFSYSSQIVDPEVVQREIKPAIDPQYRDLLPLPPSEPGSPKFLNNLDEEEEHFLPPLPDSDEEPPLVAPAHSPQQKRPRRATVAHPHARRRSIIEIPKTPSSSTAVPVQFRIGRTSLPSSPVFFRFSPTHSPVGSDKKKPESPDSASPRRGRFSRPTSWDSTRDFKPLYLLEKTAGRAEPEVYPELPPSEPSSRESPGPSESESESESNTDKDGQDDGLDYLDVGLRVAAGMGASAELLQALHIDTTVGKGLDHGAGESAFGEPLGSGDTTPRAAVPPSPPHSLDAPLKELSAQGEEVRPEQQQQQQQQQLVEELETLPPLPDSPADSPTWAPSSPAALAAVTSDVAPAPPPIFESLESLPPFPDSPPASPHVQDSPSALASAPVPAPTPFMDDDKALEQLPPLPESLPTSPPLAPSSPPTSAWPPVDEELEELPALPQSSPASPPLAPSPPVSAQLLPDENLEGLPALPESLPGTPRVHELSSVDTYLPTAEELEDLPPLPESLPTSPPLAPPSPPTSAWLPADEDLEELPALPESLPGTPCVQELRAAFD

SEQ ID NO: 1526 - protein, 456 aa, Myriococcum thermophilum
MYRQVATALSFASLVLGQQAGTVTEEVHPSLPIEVCTAPGSCTKEDTTVVLDANWRWTHTVDGYDNCYEGNSWDESVCPDGATCAANCAIDGADYEATYGISTPSEGALRLNFVTKNENGQNVGSRVYLMKDDETYRLFNLLNKEFTFDVDVSNLPCGLNGAVYFSEMDEDGGLSRFEGNQAGAKYGTGYCDSQCPQDIKFINGEANVEGWGGTDGNSGTGKYGTCCAEMDIWEANSDATAYTPHPCKVTEQTRCESEEECGAGDNRYAGLCDKDGCDFNSFRLGNQEFYGPGMTVDTNKPFTIVTQFITEDNTDTGALKEIRRFYVQDGTVIPNSETVVEGVDPTNSISDEFCEQQKTAFGDTNYFKTVGGMAAMGKSLEKMVLVLSIWDDHAASMNWLDSNYPVDGDPSVPGVARGRCDPEAGLPENVEAAHPDAYVIYSNIKIGAINSTFTAA

SEQ ID NO: 1527 - protein, 1331 aa, Myriococcum thermophilum
MSGESPLAVVAAVIRSLATDPTTTPPAVANACPSVRLPGPVTPEKLELERELAALVARVQDLEARANAAATGALPDTPNETSDSFSADDRGRPRPRFPSHLSRNGFIDEALEGLREHVDDQSKLLDSQRQELDGVNAQLLEQKQLQEKALAIIEQERVATLERELWKHQKANEAFQKALREIGEIITAVARGDLSKKVRMNNVEMDPEITTFKRTINTMMDQLQIFSSEVSRVAREVGTEGILGGQAQIEGVDGTWKELTDNVNVMAQNLTDQVREIASVTTAVAHGDLTKKIERPAKGEILQLQQTINTMVDQLRTFASEVTRVARDVGTEGILGGQADVEGVQGMWNELTVNVNAMANNLTTQVRDIIKVTTAVAKGDLTQKVQAECRGEIFELKKTINSMVDQLQQFAREVTKIAREVGTEGRLGGQATVHDVQGTWRDLTENVNGMAMNLTTQVREIAKVTTAVAKGDLTKKIGVEVQGEILDLKNTINTMVDRLGTFAFEVSKVAREVGTDGTLGGQAQVDNVEGKWKDLTENVNTMARNLTSQVRGISTVTQAIANGDMSRKIDVEAKGEILVLKETINNMVDRLSIFCNEVQRVAKDVGVDGIMGGQADVAGLKGRWKEITTDVNTMANNLTAQVRAFGDITNAATDGDFTKLVEVEASGEMDELKKKINQMVYNLRDSIQRNTQAREAAELANKTKSEFLANMSHEIRTPMNGIIGMTQLTLDTDLTQYQREMLNIVNSLANSLLTIIDDILDLSKIEARRMVIEEIPYTLRGTVFNALKTLAVKANEKFLDLTYRVDSSVPDHVVGDSFRLRQIILNLVGNAIKFTEHGEVSLTIQKATTMSPPNPGEYAIEFTVADTGIGIPEDKLDLIFDTFQQADGSMTRKFGGTGLGLSISKRLVNLMGGDVWVKSEYGKGSKFFFTCVVRLAEEDISFISKQLNPYKGHQVLFLDKGRTGHGAEIARMLKELGLVPVVVDSEKSPALDKIRGRGSAPYDVIIVDSIEDARRLRSVDDFKYLPIVLLAPVVHVSLKSCLDLGITSYMTTPCKLIDLGNGMVPALENRATPSLADNTRSFEILLAEDNTVNQRLAVKILEKYHHVVTVVGNGEEAVEAVKRKKFDVILMDVQMPIMGGFEATGKIREYERSLGTQRTPIIALTAHAMMGDREKCIQAQMDEYLSKPLQQNHLIQTILKCATLGGQLLEKNRERELARAADAVTGGRRDNHALAAAYQTAAAASTTGRGSSCNAPTTALKPASSSSSSSSSSSSSSDNGISRPSLSTRSVTADESHTSGADSPTLVTADQDDPMDRTHSSLSEPSMSTTE

SEQ ID NO: 1528 - protein, 463 aa, Myriococcum thermophilum
MRLNNLVWLPLCALAAGANTNPSIPKRNPQYQHPSQEVLSDWHNPHPQGGKRPGSGGDGSEGGLEGEGGGGVSAALFSSLERTSRLVDITYCVGTAGTGIMPPFSCLSRCKDFPSVRLVRTWNTGMLLSDSCGYIAVDHGHGHSHERRTPSSEKEKEEVVVVPVVAGDRGGTKEIIVAFRGTYSLTNTIVDLSTVPQEYVPYPAPPEDGDGDGNDGGSGKKCHNCTVHMGFMASWRNAREVVIPALKAAREQYPGYRVHLIGHSLGGAVAALAALELRVGLGWQDVVVTTFGEPRVGNAELADYINWAFGLGDDGSANEDLVYRRVTHAGDPVPQLPLSEWGYRPHAGEIYISKSDLPPAPEDLRLCHGNNDPRCLSEDETPDWLSWLFGRTRSGRVQGEAEALSSGLSRWLPTRFQLWQLLFAHRDYFWRLGLCVPGGDPTDWGKDRYNVTVDGDQDEMQDL

SEQ ID NO: 1529 - protein, 680 aa, Myriococcum thermophilum
MYATSLRYAARNPGGNGAKCAPTTTAALPLLISSLSSSSSSSSSSSSSSSSYLPPQSRSQQRRHYAVGNIYHPPQTIAVLGGGLTGLTTAWYLTRFLPEAKITIYEANKRLGGWIETEKAEVKTPDGQVGTVHFERAARMVKPLSAPGRVPRWDDLVFYDLVTKLNLTDQLVWAKQDEEAVSGFVYYPDHLVPLPKVTIRLSDPLGSLRQLAGLVSLLFEPLFRDLIPAIPNIFRTRNDPLRKDLFHGRRDMSVGEYYAHRLGGPAVVDKLMSAMVHGITGGDVWKLSMGSGFLADQLVPTDDEPITNVPVRSVDYEMMLQLARDKAVFDLASQHLDTNALWFRGGFSTLTDALADALKKNPNVSLVTGESVVRVEYMENKDKIGVLSTNSTEGKPVLYDKVVSTIPAKKLHKITDGKLPSLKKSPAVSIMLVNIWYPVPRANFPYNGFGYLIPQALPFEQNPECVLGVIFDSDREFPLPTPSDLDPIPRGSDTIQGTKLTVMMGGHYYTDWPPHAMAHTYRAKKAALAAVERHLRLSPELTEQAHASAKLCRDCIPQHVVGHAKRMRAAHTELELAFRGRLAVAGQSYQNPGVLNMLRAARDVAAQIAGHEEEHGTAAADDWPVGDTGLERFTRQPRYLSLQRLMLPLRYGSDAFVDESGKVRMGDGGGGPLGGAGGDS

SEQ ID NO: 1530 - protein, 583 aa, Myriococcum thermophilum
MWSPSLSSFSVLLAAALQPVAAIWPAPQSLSTGSEVLYLHQNIKITYNGESIPYTYGYTPSELTSKEVVQAGISRTLAGIFESKFVPWKLHKPGSKWEPDLSESQQWIETLEIVQTGKDKPSAFKPLAGQVDESYNLTVSAEGEAKLTAVSSIGVLRGLETFSQLFYQHSAGTFWYTPFAPVSVQDAPKFPHRGVLIDTARNFLPVPDILRTIDALAWSKLNRLHVHVTDSQSWPLVIPSLPEVSEKGAYHPSQTYSPEDIERIQKYGAERGVEVYFEIDMPGHIGVVSLSHPELIVAYNLQPYQWWCQEPPCGAFKLNNTAVDEFLEKLFDDLLPRVEPYSAYFHLGGDELNRNDSMLDEGVRSNDTEVLRPLLQKFIDAQHGRVRAAGLTPITWEEIPLEWEIELAKDTLVQAWLGGDSVKTLTSKGFPVIDSNYNFWYLDCGRGQWLSWGNGEAFAQGYPFNDWCGPTKSWQLVYQHDPTAGLTAEEAKLVLGGEVALWAETIDAVNLDTIAWPRASVAGEVLWSGRIDPATGQNRSAVDAAPRLNEFRERLVAKGVRASPIQMTFCTQGKAEECEFIVA

SEQ ID NO: 1531 - protein, 370 aa, Myriococcum thermophilum
MLSLNQGWRRAAATALALLSSPTFAQTWSACNPLTSTNCPPDTALGMTINVDFTEGEVNSFVPSGGEPTYGEDGVSFTVASSGDAPQLTSIFYIMFGRVEFTMKAAPGAGIVSSLVLLSDALDEIDMEWLGADSSEVQTNYFRKGETTTYNRGQFNPAPNNQAEFITYTVDWTADRIAWYVGGTLVRTLTFDEANGEYPQTPMQVKFGAWSGGDPSNAPGTIEWARGPTDYSQGPFTMVVRSISVTDYSTGKHYVYGDQSGTWQSIRSEGGEINGNQGAAGSVSVTASAPAPTDSASPTIPPGGIIGGGTAADGSPAPTRTVGSIPDGWVMTSEGKVVPVGSSTVNTPRLTTLLLPLAGALYFALNGWPR

SEQ ID NO: 1532 - protein, 294 aa, Myriococcum thermophilum
MSLRPVFLITGASSGFGEAIAHEALLRGHHVIATARKAAKLGALRSAGAAVLDLDVTSDEAALADVFAKAHAFHGRITHVVNCAGYLLEGAVEEASAKEAFDIFNTNVLGTCNIARTAAPYLREAAKTPGQTAALATFGSLGSWRSVPAAAYYCSTKYAVSGLTEGLAKELQPFGVDVYCFEPGYTRTGFLKNGAADGGDHRVKTARQMDVYRGTDVEKARAALDVYNGKQPGDVVKCARVIVDVLTKEGVAKGKDVPVRVVLGSDTVETVRTKCTETLKQVEAWGDIAASVMH

SEQ ID NO: 1533 - protein, 262 aa, Myriococcum thermophilum
MAFNYKCILLIGATSGIGAAMADKLVLEGAKVIAVGRRQERLDAFVQKHGSEKASGIRYDINDRAGMDAFVESVVTQYPDIDCVFLNSGFQQQIRLSRPEEVDLDAFHQEMSTNFSRLVDLSIKFLPHLKRKRDPTALVFTGSLLATIPAVTVPAYSASKAALNAYIMCLRRQNRGSSTKIIEIWPPSVQTELHDYMGPEVGRKMGMPVQEFVNKAWEQLAAGSELVAVGPLAAQASFKDMLETRHTTFENISSIMLMHYEL

SEQ ID NO: 1534 - protein, 434 aa, Myriococcum thermophilum
MRHLFFTSLVLSALTATQAYTPLSDASLRRLPRLFSSSSSSPSSSSSSSSSSSSSENQPDGFDPDFDPTRGALLAPILRPRVPGTEGHAAVQEHFAAFVRDRLHGGGGDGGDGDGDGDGDGDGGGGWAAEWHNTTSTTPATGDRPVPFRNLILRRDPPWTTGSGSGSGSGSREGDVARLTLAAHYDSLYRPEGFVGAIDSAVPCALLLFVARAVDPALARRWEAIERSGEAGLESEEKGLQILLLDGEEAWVQWSEQDSLYGSRALAESWEKTRYDDGSSFSTPLEAISLFVLLDLLGTAEPNIPSYFPKTHWAYQNLAKIEERLRKLDLLETKPRKPFLAESQKEATRFRGFVQDDHIPFMRRGVDVLHIIPTPFPSVWHTMDDDAAHLDLPTIRDWAKIMTVFVAEWMDLEGYFPEVEPSDAGDESTEKEEL

SEQ ID NO: 1535 - protein, 551 aa, Myriococcum thermophilum
MKQAAFLCALAGLALAAPEYAVPNSVESNDVFDGYVSYSIEFASFPDFAGNKSNPNTYSDILLDNLGKLQGHKPYIRVGGNTQDYALYNESLPYALNGTIDPNRAVDYPTTVFIGPSYFESYDTWKDVKFSHGFNLGLGGNRSSGWQTLLDTVPLACKALGTGKFYVLEYGNEPDLFSTSAQGPVRPANWTETTYVSQWYNGTRQIKALVQEHCPEMLESGNYGYMAPSFAGVNNHLKEPAAWAAGLDGDEDIKLFSTHNYISGATSPGVTLQGTLMNHAVTKRSVDAHIVEYNKIISQSSAPVPPLIFGETNSLFNQGRPGLSNTFGAALWGVDFNLYSASVGFKRVHMHMGTNFRYVAWQPIETDKATIGTKAPYYGSIAVAAALGPRPATVHEIPLSSQISGEELQPESAYAIYTENGTVLSRLMVLNLRSYNTTVDGAGLEPLPEPPARGAVEYAFRLEGVPAGAAVPVRRLAANGSDAITGITWDGWSYSHDLDGGRPVRLPNVTDTSETERVVVGEDGLVSVTVPDSSAALLDIEDAKAINAHLC

SEQ ID NO: 1536 - protein, 139 aa, Myriococcum thermophilum
MLLPAFTPLLALTATLFGTVSATPIESNRNPTNLAPRASGRFTWYNPGLGACGNWNGDGDLVAALNAADFDPYTPNGNPNNNSLCGRRLRVSYNGKSVDVTVVDRCPTCNAGDLDLSPAAFEALEPLSTGVIYGSWDWI

SEQ ID NO: 1537 - protein, 394 aa, Myriococcum thermophilum
MSPAKHLLAATAALAPGALGANLLVSHFSGTVYSLSFTNSNQTGTLSVTSETDGCGTTPAWLQLYSDIGKVYCFDESWFGFGTSAEYEIGEDGSLTLTGTLRTGGNSVHGALYGGADGKGFIATVEYTPSTLTTYKTPSNGGEQLALEKFTLEQPGPHPRQDAPHPHEAYVDPTGKYILVPDLGADLVRVFRINAETGELTGCSEGQADPGDGPRHIKFWKNAEGLQKAYVVNELGNSVSAWDVEYPTDEVSADGCLVLNKTQTVSTYAPGTSGGPNTKAAEIRIVDNFLYASNRADETFGSEQDSIAIYTIDEATGEIAWLGAANSYSYYPRTFEFNTDGTLVAVGGQTSSNVAIIARDPETGKLGELVANIEVGQKGRAGEEDGLSAVVWVQ

SEQ ID NO: 1538 - protein, 347 aa, Myriococcum thermophilum
MKVQTVVSAAALCAHQAAAQFAQAAMMRFQCSQLVIERLDPLVNPGLIGSPHMHQIVGGNSFNASMTPVEYDPSERSTCTTCSFSEDFSNYWTANMYFRAKNGSYKRVPQMVNLGLSGEGGVTVYYIPSYDGKTKVTAFKPGFRMLVGDAALRTQDGMQKQICHRCEHNIEQNPFGGAPCTGNDTAGFPTQMCPGGIRSTITFPTCWDGKNVDTPDHKSHVAYPETGSFETTGPCPASHPVRLPQLMYEVMWDTRQFNDPELWPEEGQPFVYSMGDATGYGQHGDYIFGWKGDALQRALDARCTGDRCSELKTQSVEEALACVKEQTVKEEVDKWLDSLPGGVHPDM

SEQ ID NO: 1539 - protein, 344 aa, Myriococcum thermophilum
MKYSTLFLGLLAQGAAAQQMIRFGCSQLVVGRMDPLVNPGVPQSPHVHQIAGGNSFNISMDPETHDLVRDSTCTTCTFSEDFSNYWTAVLYFRARNGTYKRVRQFPNVGLRTDGGLTVYYIPPYDGKSKVTAFKPGFRMLVGDASLRKEEGMQKQLCHRCLGAGYDQGGAPCTGSDSKTLPDHFCEGGIRTTVTFPTCWDGQNIDSPDHKSHVAYPETGSFETNGPCPASHPVKLPQLMYEVMWDTTEFNDPELWPEDGSQPFVWSTDDPVGYSQHGDYMFGWKGDSLQRALDARCGNAVCKELKTQTSEEAMRCTLPQYVPEDVDGWLDHIPGVIIDDGKKNN

SEQ ID NO: 1540 - protein, 850 aa, Myriococcum thermophilum
MRRPSFQSLLAVSALVSGITASADPDYQGYDASTTFVTKTLTTSSYSSTAYSNSTTKTLSSTSSQPPNPTSTACAPACTDFWLEKIKHQGVAPFAGRGYEVFRNVKDYGAKGDGVSDDTEAINRAISDGERCGPGCTGSTKTPALVYFPPGTYMVSTPIIDFYYTQLIGNPGCLPVIKATSDFEGRWVLDTNPYGESGLAWGATNVFWRQVANFIIDTTDVPAETLISGIHWPSSQATSLTNIVFKSSSAKGTQHQGLFIEEGSGGYMGDLVFFGGAQAMSIGNQQFTMRNITVYGAKTAIEQLWSWGWTYQGVSIHDCEVGFDFTAMVDGDLKVGSITIFDSEISNTKVGIKYGAANATSPDVPNNFVFENLRLDNVTTAIRGPKGTVLPGTSGQTVIEAWGRGHAYTPSSSGPTTFEGPIKPNKRPASLVVAGDASSSSSTPIYYQRSKPQYEDEPVSEFVSAREFGARGDGVTDDTLALNILFAWAAAAGKIAFLDAGMYVVTRTVRIPPGSRIVGEAFPVIISTGDFFADESAPQPVIQVGRSGGEAGRIEWSNTIISTRGSQPGAILIEYNLDSSSCSEPSGLWDVHARVGGFAGSELQLPQCAKTPETVITPENLPRECVAAFLTMHITQPAAGLYMENCWLWVADHDLEEGADNQQISIFAGRGLLVDGTRGPLWLVGTGVEHHQMYEYYLAGAANVYMGQIQTETAYYQPNPDARLPFASEVEAYHDPVFAEGESGWGLRVVDSEDVLIYGAGLYSFFDNYDVNCSQIGEGARCQKRIFSLENTSGGGGDGTGNGNRNVRLYNLNTVGTNKMITVDGVDVANYEDNIDGFVHTVALFELDEE

SEQ ID NO: 1541 - protein, 243 aa, Myriococcum thermophilum
MKSFTPAVFAAGLLAQQAAAHSIFQQAGSGSTDFDTLCTRMPPSNSPVTSVTSADMACNVGGTSPASGFCEVNAGDEFIVEMHAQPGDRSCANEAIGGNHFGPVLIYMSKVDDASTADGASAEWFKVSEFGYDSSTQTWGTDKLNENCGKYSFQIPSHIPAGDYLVRAEAIALHTASQPGGAQFYMSCYQVKVAGGEGGQLPAGVKIPGAYSANDPGILVDIWGNGFSEYVIPGPPVIDSSYF

SEQ ID NO: 1542 - protein, 528 aa, Myriococcum thermophilum
MYAKFATLAALVAGAAAQSACTLTTENHPSLTWSKCTSGGSCTTVQGSITIDANWRWTHQIDSATNCYEGNEWDTSYCDDGPSCAAKCCVDGADYSGTYGITTSGDTLSLKFVTKGQYSTNVGSRTYLMESETKYQTFELLGNEFTFDVDVSNIGCGLNGALYFVSMDADGGMSRYSGNKAGAKYGTGYCDAQCPRDLKFINGEANVENWQSSTNDANAGTGRYGSCCSEMDVWEANNMATAFTPHPCTIIGQSRCEGETCGGTYSSDRYAGVCDPDGCDFNAYRQGNKTFYGKGMTVDTTKKMTVVTQFHKNSAGELSEIKRFYVQDGQVIPNSESTIPGVEGNTITQDWCDRQKAAFGDVTDFQDKGGMVQMGKALAQPMVLVMSIWDDHAVNMLWLDSTWPIDGAGQPGAERGDCPTTSGVPAEIEAEAPDSNVVFSNIRFGPIGSTVAGLPDGGDGGNPPVSSSTTSVPSSTTTTTSSATTTPTGGAGTAPHYGQCGGNGWTGPTQCESPYTCTKVNDWYSQCL

SEQ ID NO: 1543 - protein, 353 aa, Myriococcum thermophilum
MLRHLNSLLIFFRLRRADPWDPRTPLDWLLASPLQWLTSLLYHHILLPLRGRPFHPPPRRSSSSRGRRGRGPIRVVCVSDTHNLVPGPGGRSGAIPDGDLLIHCGDLTMGGTPAEIQRQVDWLRGLGHRWKVVVGGNHDSWLDERVRKQMSQGGQVEEGKEEVVIDWSGIEYLCDRAVELEFDGGRRLNVYGFGAVPYCGEGFAYQYDRDKHPWQGRIPEETDVLVTHTPPAHHLDLGLGCAGLLDEVWRVKPKLHVFGHVHHGHGKEAIYYDECQRAYESLMAQPARGPLVDLVSVARWRDAFNVLRYGVASILWKWIMLGPGTNNGALMVNASLMYGNTGRLGNPAIVVDL

SEQ ID NO: 1544 - protein, 490 aa, Myriococcum thermophilum
MIRLSVCVSALLAGLSAAKYIVPGGRWRDTDGNLVNAHAGCVTVDKDTSKFWLFGEYKVEGQTEGGGVSVYSSDDLATWEYHGLALAPIEGHQYISPSHIIQRPKVVYSEVSKEYHMWWHADNSTYGLLLQGFARSPNISGPYTFVSATAPLGNWSQDFGIFTDYKDGRSYALYSNGDSAEGRDVYITAYNEDVSELDKVIHRFDKYDLEAPTIVQTDKSYYALMSHKTGYRPNNVVAFRADSLAGPWSQPFMVAPPNTRTFNSQSGYTLTIRGKNRTTYLYLGDQWDSNSLWESRYIWLPIEIDDRKKTLSLVWHDVYDLDVRTGEWSPVQGKTYYAADAKTAGNAFKQEANFASKGVIVTGIYDNHSTVTFEGIEGTGKPQWVSFYYQNTDDMGFGDQPGGTPDRIGGTWQLRRIASVVVNGNWEKVETLYQRDTHKGIILSTPLQLTLNKGKNNTITVGGLYNGFDYKGADLDRIVVYPPEPDHERQ

SEQ ID NO: 1545 - protein, 228 aa, Myriococcum thermophilum
MVSLKSLFLTAAAAVTAVTARPFDFDDGNSTELLGKRQVTPNAEGYHEGYFYSWWSDGGGQATFTLLEGSHYQVNWRNTGNFVGGKGWNPGTGRTINYGGSFNPSGNGYLAVYGWTRNPLVEYYVVESYGTYNPGSGGQYKGTFQSDGGTYDIYVSTRYNAPSIDGTQTFQQYWSVRTSKRVGGSVTMQNHFNAWAQHGMYLGNHYYQIVATEGYQSSGSSDIYVQTH

SEQ ID NO: 1546 - protein, 400 aa, Myriococcum thermophilum
MRTSYSAAIALSAGFRLATAAPTHGCGSNSPLLFVTTYPAGDGEGKLLTLKQTGSNLEVVGQSDACGPYPSWLTQDGDVLYCVDEAWGGESGTLFSLKINANHTFTKLSDKETIVGPVSTVIYGENGDGLAVADYAGGGINLFNIADPASIQEIDTIVYPPPGDELPDPQNSARPHEAILDPTGEFLVFPDLGADQIRVLKVNKETLEYEEKPSYTDFDRGTGPRHGAFFKSGDKTFFYLVGELANVLQGFSVTYNDDDSLTFTRIYNATTHGDDQPLPDETAAAELWIAPGSNFLTLSSRFERSLEYTISNGTKVPSDPLITFSIDEETGDLTHVQTAPAGGVNPRHFSFNSDGTRVISALQSDGRVVVFERDPATGKIGKTIASGNVEGSPNFAIYKQ

SEQ ID NO: 1547 - protein, 225 aa, Myriococcum thermophilum
MKYQLQLAAAAAFAVNSAAGHYIFQQLAVGGTTYQPWQYVRRNSNPDWLQNGPVTDLSSTDLRCNVGGQVSNGTETVTVNAGDEFTFILDTPVYHAGPTSIYMSKAPGAAADYDGSGPWFKIKDWGPQGTSWTLSDRYSGNIPKCIPDGEYLLRIQQIGLHNPGAEPQFYISCAQVNVVNGGSTNPTPTAQIPGAFQSNDPGLTVNIYNDPLTNYVVPGPQVFSC

SEQ ID NO: 1548 - protein, 458 aa, Myriococcum thermophilum
MVLLAFLALFWSAILELPFAAAANNSIPTVQQLLAQADADAAHFNVTAFAVNPLPPSLDPWYRAPYTYDWKEADPGQVLKIRQAPLLNRTIGHARVAYQLLYRTTDSRYEPSWAVTTLLIPRSFPLPSSSSGTSSSAAAAAADSVVPVLSYQLPYDSCDVDASPSFALHFGEPYGEIAAALAHGWLVAVPDYEGPLASYAAGVQAGHATLDGVRAVLAVAGVGTTGINARVALWGYSGGALASEWAAELTEEYATKLPIAGVALGGVTPNVTSVTGYLNRKEGAGLIPQGLLGISTQHPDARAWLLSRLKPALRDIFLSATKMTATQSILAFQYQDIFSYFIGGYEDLHTPVMEHMYNVDGYMGYHGVPRMPVFIYNAINDELIDIRDVDALVDRFCGVGANILYHRNTAGTHAQELFNGRQRAFTWLRSVLDGTYGQFYPSLGCTIQNVTLNYVPWI

SEQ ID NO: 1549 - protein, 505 aa, Myriococcum thermophilum
MYSLLIALLCAGTAVNAAAPRARSALHRGRQARGSQHAAHILQQRQAGTTLTVDLSTTYQRIDGFGTSEAFQRAVQMSQLPEEGQRRALDILFSTTNGAGLTILRNGIGSSPDMSSDHMVSIAPKSPGSPDNPLIYEWDGSDNKQLWVSQEAVHTYGVKTIYADAWSAPGYMKTNGNDANGGTLCGLSGAYCASGDWRQAYADYLTKYVEFYQQSNVTITHLGFINEPELTTSYASMRFSASQAAEFIRILYPTIQSSNLTHKPTIACCDAEGWNSQSGMLGALSSVNSMFGLVTAHAYTSQPTFAMNTPHPVWMTEAADLQGAWTSAWYQWGGAGEGWTWANNVYQAIVNANASAYLYWIGAQTGNTNSHMIHLDLNAGTVEPSKRLWALGQWSRFVRPGARRVAVSGGSGSLRTAAFRNEDGSVAVVVLNSGGDAALNVRLDAASSGDDQQPASAKTWVTDNSRAIEEIETSFADGAATVNVPSRSMATVVLYPAPEEENPEE

SEQ ID NO: 1550 - protein, 443 aa, Myriococcum thermophilum
MERLSARFGRLFASLPKPQTGTVLRSSALSVSTATAVAAAAAAAAASMAVYSSSVSKLDLAADVPDEARQAPHHVKDSNGKLIKFRNPHPSAGEPPRSVFHVMAKIFQAMIAGEWSNPDTSNVTIPAVKPDFRERRAGLDSLRATWLGHACYLVEFPSGLRVLFDPVFEARCAPVQWFGPKRYTPPPCSLSDLPPVDAVIISHSHYDHLSHTSVQELARRNPNAHFFVGLGLEKWFRNSGINNVTEMDWWQDADLVLKRQHDGQVQSPEKADPEAISARITCLPCQHSSGRSHQDQNHTLWASWAVKSGDKSVWFGGDTGYRRVPKLPVHVDDYGPEYDSLPRCPQFRQIGALRGPFDLGLIPIGAYKPRWMWSWMHANPYDAVEIFKETRCKRAMGIHWGTWVLTVEDVDEPPKLLKQALKASGIPETGVFDVCAIGESREF

SEQ ID NO: 1551 - protein, 168 aa, Myriococcum thermophilum
MLRTSALFLALAAMGLAQAPEGYSTVYITSKVDTNFVIVPKERVAGTTTIVKTANNLPEQQWYLKLGSTKIQLADSTLCMDGGPQENWRDMGQIFVEECSDAESQNWFVMDDGRIALEASNQQQCVDLVFMRAVENNDVGLFSCAGLGGSGAADAGINWPLVNVTDSA

SEQ ID NO: 1552 - protein, 406 aa, Myriococcum thermophilum
MKISNTSLLALLLPAVSSRFVEPGEADRVLLYPDGVPQPSASSEKYHIELAPGETRWVTEEEKWELRRQGRRFFDITDHPELGTLRARNAFNKKSVFPEGPKQQEKVSPLLENLSKKEMEDHLTTFTSFHTRYYKSDYGRQSSEWLLGQVRQTIKDAGAEDYVRAEHFEHPWGQNSIIATIPGKTNSTIVIGAHQDSINLWLPSILAAPGADDDGSGTVTILEAFRVLLQSEDVVKGNHENTVEFHWYSAEEGGLLGSQAIFSAYEKEGRDVKAMLQQDMTGFVARTLDAGEPESVGVIVDYVDPDLTEFIKRIIEEYCDIPYVETECGYACSDHASASKAGYPSAFVIESAFEYSDNHIHSTEDLIKYLSFDHMLQHARMTLAFGYELAFTDFDALERPDHSDAL

SEQ ID NO: 1553 - protein, 334 aa, Myriococcum thermophilum
MAVSLLVRGLLLLILGFYNHAAAACTRTVVAEQGDTCATIAAAAGITVADFLRLNPSVRSCTELVAGETYCVESSDDSSPPQTSTPPGLDVSIDGTCGQGVTCAGSRFGDCCSQHGFCGSTPAYCGEGCQPAFGICDDGGGSSSTSSPVTSVTVTVTTITSVTVTATSPPATTTKCTSIISLTTIITSTSVSTKTSTTTKISTTTKTSTTTKTSIDTLTSIVTSTSTHVITSGTCDGSSTPTKTTTTSSALPTGRPLLPGTPSNCRNYSRIQDGDTCRSIATRNNLSLLDFYALNPAVSGSIPNLSRDLIAYQSGPLQINCDALLPGYYVCVGK

SEQ ID NO: 1554 - protein, 241 aa, Myriococcum thermophilum
MKTLATLLVSAGLVAAHGYVDRATIGGEEYQFYQPYQDPYMGDNKPDRVSRSIPGNGPVEDVDSIDIQCHAGAEPAKLHAPAAAGSDVTLYWTLWPESHVGPVITYMARCPDSGCQDWSPGTEAVWFKIAEGGREGTSNVWADTPLMTEPSAYTYTIPSCLKSGYYLVRHEIIALHAAWEYPGAQFYPGCHQLEVTGGGSTVPSSNLVSFPGAYKGSDPGITYDAYKEQPYTIPGPPVFTC

SEQ ID NO: 1555 - protein, 281 aa, Myriococcum thermophilum
MHFASYLSILSVLGASGSGVLAWAPPNYDGYRLVWSDAFPGSPGQSPDEGRWNIITGNLGVNNELEVYTRDSRNVQMSGGDTLQLVPWLDGSTWTSGRIESKYTFTPTAGGRTMAEGQIRFGSNDPSTKQGIWPAFWLLGDSIRNGTPWPDCGELDILETVNGLLTGYGTAHCSTCNEPIGRGGSIGIPNQDWQRWRIVWDLTNGDWRAQTITWFMNDQQFHQLSGATIGDQGVWTALTNRPLFFILNVAVGGNWPGYPNDRTQGGWGAMMEVGYVAHYST

SEQ ID NO: 1556 - protein, 340 aa, Myriococcum thermophilum
MLSKVLVGFTSITGVLVAAAAAAPLQSRAARTSPPEGCLTVGGSGTYKTVQSAVDALSTTETSEQCIFIYGGTYQEQVYIPELRSPLVLYGETEDTSSFAANKVTITQSRSQDDSPNNDATATLRAHTPNLRVYNLNLVNTRGKGSQALAVSAQADRQGYYACQFLGYQDTVLANEGTQVYARSYIEGATDFIFGQRARAWFDGADIRVLAASKGYITANGRDSAENPSYYVIHNSAVSARDGDSVPAGAYYLGRPWRNYARVVFQNTRLSEVVNPAGWSVWNAGDERTDGVEFGEYGNTGAGASASSRAAFARQLSAPVSIETVLGSDYASWVDTSYLS

SEQ ID NO: 1557 - protein, 169 aa, Myriococcum thermophilum
MVSHLATLFLLPLGAIAAAVTNTGPGTLGLTRREVSPDNTCGGENEYTCPEELACCSQHGYCGITDEFCLTTAGCQADFSNSTDACHEPIPGESTSIDGTCGTEGAGTEGYRCPGNATVISCCSAAGYCGTTDDHCNPEKGCQSDFGNCTTDAEQPENPEDRGFSVKLF

SEQ ID NO: 1558 - protein, 330 aa, Myriococcum thermophilum
MKNLLALLPLASVALGAPSLVKRQAPLTDEELSNLELYVQWAAASGCNGDQAAGQPVICNANLCTRFASHGATVAASFIGEDTDIWGFIGVDPVDENIVISFRGSSSVQNWITDFDFIQVSCDDLVSGCQVHRGFNRAWEEVSGALLDGLAAATAAHPNYKIAVTGHSLGGAVATVTAAHIRAAGYAADLYTYGSPRVGNEAFVDFVTKQAGAEYRITHADDPVPRLPPIWLNYRHTSPEYWIDPDDKDQLVVGEIQVCTGYSNTDCNGGTGGLDTSAHSWYLQSLGGCAVETLSQPFEAFNDTKLENTLTQYAEMDIKVAANLNAAHHS

SEQ ID NO: 1559 - protein, 880 aa, Myriococcum thermophilum
MVYHASAVWLSLAFSLSAPTTFARAIGPRDKVPEGFYAAPYYPAPHGGWLDSWRDAYARAHALVSQMTLAEKTNITSGVGIFMGRQPCVGNTGSADRLGFPQLCLQDSALGVASADNVTAFPAGITTGATWDKALMYARGVAIGKEFRGKGANVHLGPSVGPIGRKPLGGRNWEGFGADPVLQAKAAALHIKGVQEQGVIATVKHLIGNEQEMFRMYNPFQPGYSANIDDRTLHELYLWPFAEAIHAGVGAVMTAYNAVNGSASSQNSYLINGLLKDELGFQGMVMSDWLSHISGVDSALAGLDLNMPGDTNIPLFGFSLWQYELTRSVLNGSVPVDRLNDMATRVVAAWYKMGQDKDFPRPNFSSNTRDKNGLLYPGAVISPIGQVNWFVNVQEDHYKIARQVAQDAITLLKNNGSLLPLTGSGKITVFGTDAQVNPNGPNACLNRACNKGTLGMGWGSGVADYPYFDDPITAIRKRVSDVEFHNTDTFPLFFKDEAPAPDDVAIVFISSDSGENSFTVENNHGDRDSDKLAAWHGGDKLVQKVADKFPNVVVVVHTVGPLILEPWIDHPSVKAVLFAHLPGQEAGESLAGVLFGDVSPSGHLPYSITRAETDYPDSIAKLKGFTFGQVQDTYSEGLYIDYRWLNKHSIKPRFAFGHGLSYAPFAFTNATIRAVNPPLDPVPPPRPSKLPTPSYSTDLPAASEAYFPDGFNRIWRYLYSWLPKSEADAAWEIGAAGEKKYAYPDGWRGRVTVTVANAAGADFSSSSSSNSSSSTPSRFFPGPARASVQAYVQYPPGIPYDTPPVQLRDFEKTDPLAPGESQTVTLRLTRKDVSVWDTELQNWVVPPGRYTVWIGDASDRLFLACYTDTGECEQGLEPPV

SEQ ID NO: 1560 - protein, 535 aa, Myriococcum thermophilum
MRLPVRSLAAFPVILSLVFPLPTAGAGLQPPAYHHLDRAEANSHVFPFLKWLRDSAVEAVFGKPTTKAKDQRPGPQLQSRYQNDVVVRFNVTSSEEEGAIAQAVGQMFLDVWAFTPDFVDVRLAKDDVPALLTLLPSSLEPSILIPDVAAAVWATYPSSSTGASWLEWSPADAAKMRRSLDGVGNIFFQDYQPLAVIENWMRLLEAMFPSVANMSSIGKSYEGHDIYALRVGAPSEDGETSGPRKTILITGGLHGREWISTSSANYLLWSAVTTYGTDSMMTKLLKHFDVVFIPVLNPDGYEYTWKVDRLWRKSRQPTKMRFCRGLDLDHTFSHGWDAGGQASDPCSESYGGEQPFQAVEAAALARWARNETEHGVNFVAFLDLHSYSQQVLYPYAYTCSLEPPNLENLEELAVGLAKAIRISSGEPYTVSSACEGAVARAYSANDPLQRIEVGGGAAIDWFYHELHARYSYQIKLRDTGSYGYLVPSDDIVPTGEETLNALKYLGDFLLGNNGIEKISAQEPLDHWKDLKRRRR

SEQ ID NO: 1561 - protein, 304 aa, Myriococcum thermophilum
MKPFSLIALATAVSGHTIFQRVSVNGQDQGQLKGVRAPSSNFPIQDVNDANMACNAVVYKDNTIIKVPAGARVGTWWQHVIGGPQGAFDPDNPIAASHKGPISVYLAKVDNAATASPSGLQWFKVAERGLNNGVWAVDELIANDGWHYFEMPSCVAPGQYLMRVELLALHSASSPGGAQFYIGCAQIEVTGSGTHSGSDFVSFPGAYSTNDPGIVISIYDTTGNPNNGGRPYPIPGPRPISCSGSGGNNGGGNDNGGGNNNGGGSSGGSVPLYGQCGGIGYTGPTSCAEGTCTATNEYYSQCLP

SEQ ID NO: 1562 - protein, 259 aa, Myriococcum thermophilum
MVPLTSKALILSSLASLVAGHGYLKSITVNGQDYLAWQVGQDDYVNPPPVRYARKLADNGPVPDFTTKDITCGAGGNEPAEGIIELKAGDTVTLNWDQWGSSHSGPVMNYLAHCTNDDCKSFKGDSGNVWVKIEQLAYNPSANPPWASDLLREQGAKWKVTIPSSLAPGEYLLRHEILGLHVAGTVMGAQFYPSCTQIRVTEGGSTQLPEGIALPGAYDPQDEGILVELWRVNQGQVNYTAPGGPVWSEAAPDPNRPGP

SEQ ID NO: 1563 - protein, 390 aa, Myriococcum thermophilum
MKLSAASSAAACAALLPGASATIYYAGVAQSGGEFGVWSDTATPGTGLPGTFGVDYQFISTSGVDVMVDENKVNLHRIAFLLERMCPLEYGLGAKFNETHFDLFKEAVDYVTVTKGAYAILDPHNYMRYNNPSQQPFSGSVIGNSSDPTAATTEQFAEFWGELAKRFADNEKVIFGLMNEPHDMPSSLLLDNLQAAVDAIRAAGATNLILAPGNSWSGGHSWTEGGSEASSEWLHKLVDPANNTAMDIHEYLDEDFSGGHTACTQDPVSNLEGVTAWLREHGLKAMITEFGGSNTTECATMLNDLLDYMAANDEWIGWTAWAAGPFWGSYSPCCTDDFQFGSLEPGSKAAGGSPSLYDTVWIPVIQKKVPAKLQWSGPSSVDGGELTEKP

SEQ ID NO: 1564 - protein, 621 aa, Myriococcum thermophilum
MVRNIFLTAALAALGQCGSTVFESVPSKPRGWTRLGDASADQPLRLRIALQQPNEELFERTLYEVSDPSHARYGQHLSRDELSALLAPRAESTAAVLNWLRGAGISPDNIEEDGEWINLRVTVREASELLDADFGVWAHEGTNVKRVRALKYSVPEEIVPHIRMVAPVVRFGQIRPERSQVFEVVDTPLPQVKTAAAIPPQELDVKACNTSVTPECLRALYKVGSYQAESTEGSLFGVAGYLEEWAKYDQLELFADAYAPYAADANFTSVGINGGENNQSPSNQDDIEANLDIQYAVALSYKTPITYYITGGRGPLVPDLDQPDPDDVSNEPYLEFFSYLLKLPDSELPQTLTTSYGEDEQSVPRAYAEKVCQMIGQLGARGVSVIFSSGDTGVGSACQTNDGKNTTRFLPIFPAACPYVTSIGATRYVEPEQAATFSSGGFSDIFKRPAYQEAAVSTYLDKHLGNRWEGLYNPEGRGFPDVSAQGVAYHVFSRDQDIRVSGTSASAPLFAALVSLLNNARLSQGRPPLGFLNPWLYSEEVRKAGALTDIVHGGSTGCTGKDMYSGLPTPYVPYASWNATPGWDPVTGLGTPIFDKLLEVSSPGKKLPHIGGGYGHLAGGR

SEQ ID NO: 1565 - protein, 340 aa, Myriococcum thermophilum
MPKTSALLAGLTGAALVAAHGHVSHIIVNGVYYRNYDPTTDSYQPNPPTVIGWAADQQDNGFVEPNSFGTADIICHKSATPGGGHATVAAGDKINIVWTPEWPESHIGPVIDYLAACNGDCETVDKSSLRWFKIDGAGYDKAAGRWAADALRANGNSWLVQIPSDLKAGNYVLRHEIIALHGASSPNGAQAYPQCINLRVTGGGSNLPSGVAGTSLYTASDPGILFNPYVADPDYPVPGPSLIAGAASSIAQSTSAITATGTATVPGNGGDSPATTTPTTAPSTTLETTTTTTTPTTTAAPSGDVQTKYGQCGGNGWTGPTACAPGSSCTVINEWYSQCV

SEQ ID NO: 1566 - protein, 485 aa, Myriococcum thermophilum
MQHIVRVGVSLSFLAATAVAAAAGKCTSTIQRDVAVIGGGASGAHAAVWLRDNGYSVVVVEKASQLGGHTNFYKDPVTGKEINVGVQAWMEYKDSYDFPKRMNVSTSGSMVFTPNTARFIDFKTGRPVPGYEAPADEEMYAALQRFLDVIEQYEDMVLPGFFNFPKPGAIPEDLLMPFGKFVAKYNLEAAVPQLWDATVQGLGDPMNVPTLCVIQASPIPMTRALLGQAAAAVPESGRLYDLYESVANFLGDDVLYSSTVVSSTRNGDRNAKKGVSLTVRGSGGKLTCVEAKRLLISIEPTLANMAPFDLDPSELMILSKFEYTTVYAGILRHPSLQISNAYTGRTTGPASLNYTDFPVAPQVGRIEYLGDTEDLFQFTVVGTAHDNTKSMQALLSKSIDRMIAAGILPAAPRGSGRIDYAIFADHGPMHSRVSAAQLRAGFIQQLYSLQGRRNTFYTGAAFSSGFSTVLWEFNKVLLPKVVEGL

SEQ ID NO: 1567 - protein, 248 aa, Myriococcum thermophilum
MLLLTLATLVSLLARHVSAHARLFRVSVNGKDQGDGLNKYIRSPATNDPVRDLSSAAIVCNTQGAKAAPEFVKAAAGDKLTFLWAHDSPDDPGDYVLDPSHKGAILTYIAPYPSSGGGDPTGPIWTKLAEEAFEGGKWATIRMIDNGGKVDVTLPEALAPGKYLIRQELLALHQADFACNDPAHPNRGAESYPNCVQVEVSGNGNKKPNQNFDFNKGYTCDNKGLYFNIYIGQDDQYVPPGPRPWNGN

SEQ ID NO: 1568 - protein, 1471 aa, Myriococcum thermophilum
MVGPPWLTVAFGALGLMPWAVAINPPVGMGAQAADVCPERCAVSGPQTGNWSVYPDFKVIKRCQQTMFFDFSIYDPVDDPNTTHRIHACSSFSSDFGNIVPSAPVAAKLVDSASSVEVEFELGWWHEGFGLAKAGIQSLVTQIRDYIDRGHGPPDRPFILYGQSGQATIGLYIGQGLLSQGLSASGLQIFQDNLDNIGVTTPSLAMQLCGPDHTSTHIFGVAVTSNGTFAPIQNAIKSWANATCLSFLGSKSFPGTAKFTKPLLKGASLSSSTLTNSTHDTGAKGFAPHSEHLQERAECRTVQAEAGEGCAELAVKCGISGDEFTKYNPGIRSSLRPKQHVCCSSGTLPDFRPRPNPDGSCFSYTVQNDDNCANLAAEYGLTNEEIESFNKKTWGWSGCELLYAGTIMCLSTGMPPFPAPIQNAVCGPQKPGTKPPTDGSDIAELNPCPLNACCNIWGQCGITKDFCIDTNTGAPGTAKPGTYGCISNCGLDVIKGKGDGSIRIAYLQGYGLNRKYLSQDTLQIDTSKYTHIHFGFAVLTPSYEVKFDDLLISYEFGEFKRIGEAKRILSFGGWDFSTSRDTYFIFREGVKPANRLKMASNLANFIKEHDLDGIDIDWEYPGAPDLPPDDPGKEEDGPNYLAFLAILKNLLPGKSVSITAPASYWYLKQFPIKEISRIVDYIVYMTYDLHGQWEGCDTGNCLRSQINLTETKQALAMITKAGVPGEKIVVGVASYGRSFEMEQPGCWGPECKFTGSRFEPRAKPGRCTDNTAGYIADAEIKEMIDGESGGSTAKRQSRVVAHFLDTSSNSDILLVSDDNQWAAYMSEDTKRVRTNLYANWGMAGTTDWASDLQEFHDPPKPAKDRASFIALAANGEDPKEDPMTLGHWKEFTCEHPAISDLYYYYPWERWEALDADSAWREILVKWFKTDRARGLLFSESVEQTLKSGPGMNCQTFAKDKDHCDHAITCPDSADSDKSGPAARLVWNALIEIHSIYHGYYDALLAAQGQLNSALDDLENTFAPISEPESNQWLLILIDLITIGSLTTAGPFFNGYLKTLDALNTEQTYDNVKGTSMNMINQVTALAKNMLENPEDDGWAPEKQDKFSHYIGQVIFGWRNATERAVQDLFRRPDQDRVNVLGKAMANGTLTEGRRDRIKPKINTQTELVANVLKTVFGFTIPALWRRSKTYAFVLDSGAGCGGNPASKYVNDTTADETSVCYNGRLYYLVHPDGDARECRCERVTDTGPCQTTCRDNTFSAPVGLSRLGDFGRVTKEELVKGAVRTWIKKGRTNEGEPPDPIKDESVKSGLVDMDITTPGFVRLPVCSADRAFRSWNTAEKGSSPNYPCDIPPGIDRCGASSFEDQTSDASPKVSDCRQIIRNIEGDASTEWTHRITGHREILSYGTCHFGIERTGGTGGAVEFKVGGQDVIDIINDSIKKFGGSGKIGAKGVMPCDGTTVGTTVNVLWGIY

SEQ ID NO: 1569 - protein, 418 aa, Myriococcum thermophilum
MKLNLLASSTLLALASAVAVRSPQWKSYDGYKVVRLTVGEDVAKVSDIISRLGLETWKGKVRAGAVADVVIPPSKISAFVNETAGMEAVTMHEDLGASIAAESTFHTYVAGSANETWFESYHSLDDHVQFLNDLQEQFSSQSEIVSSGKSLNGRDITGIHFWGQSGKGKPAVVFHGTVHAREWITTMVVEYIAYYLLNNQDSAEIAGFLDKYDFIFFPFVNPDGFAYTQTDDRLWRKNRQSTSGSSCLGHDINRNWDFKWDVSGGASTNPCAQDFRGSEPADAPETQALAAFLQKTQQSQGVKLYIDWHSYSQLFMTPYGYSCTDVAPNNSELQSLARGAAAAIREVHGTSFQTGPICSTIYKATGNSVDYVSDVIGADYVFTAELRDTGRYGFVLPANQMYPAARRLGLVSATCSRT

SEQ ID NO: 1570 - protein, 482 aa, Myriococcum thermophilum
MIHVSPLVRLALVLATSRLASADSTTTIDAGSNWGTWEGWGTSLAWWAAAFGDRDDLADAFFTMDSATVNSETLPGLGFNIVRYNAGASSWTPVGDERMVESPSIRRSRQMEGFWLDWHDTDPNSSAWDWSVDVKQRAALQKAIERGANRTELFSNSPMWWMCKNHNPSGSSDGSENIQSWNLEQHALYLANIAMVFRDRWDIHFESVDPFNEPSANWWKADGTQEGCHIDVPTQATIVNHLANHLSQRGLDTIITASDESYYDQALYTLQNIGSSALSHISRIHVHGYQYGSGNRKGLRDAAGAAGKPVWNSEYGDGVASGENMVRYMLQDLRELRPTAWVYWQVLDGGGWGLLDADNDEKWLGGPTQKYFLLAQFARHIRPGMRILDGGADNVVAAYDAAASKLVIVAVNWDAAQYINFDLSRFASIPADGTAVPRWNTQIGSGDRYVYHESDTVISGTRFWSYFEQNMVQTFEVTGVKL

SEQ ID NO: 1571 - protein, 340 aa, Myriococcum thermophilum
MHMKSLTALALAAPASALIRFGCSQLVVERLDPLVTPGSNPSPHLHQIIGGNAFNATMDPGSGDIAERATCTTCQFSEDFSNYWTAVLFFRARNGSYHRVPQIPNIGFEGQKGGMTVYYMQDGLANYEQTSKVTAFKTGFRMLIGDASYRTKEEANRFRQITYTCLQDLGTRFPETMDFPKEPCPAGIMANLRFPTCWDGKNLDSPDHMSHMSYPETGTFENGGPCPASHPVRVPQLMYETIWDTRQFNDKELWPEDGSQPFVWSMDDSTGFGSHGDYMFGWKGDALQRAMDSPCYVNCPTLKTQSIDEMNQCSVPDVVGEQIDGWLESLPGYPPQEKKA

SEQ ID NO: 1572 - protein, 237 aa, Myriococcum thermophilum
MKTLAPLILAGAASAHTIFTSLEVGGVNHGVGQGVRVPSYNGPIEDVTSNSIACNGPPNPTTPTDKVITVQAGETVTAIWRYMLSTTGSAPNDVMDSSHKGPTMAYLKKVDDATTDSGVGGGWFKIQEDGLNNGVWGTEKVINGQGRHEIKIPECIEPGQYLLRAEMLALHGASNYPGAQFYMECAQINVVGGTGTKTPSTVSFPGAYSGNDPGVKINIYYPPVTDYKVPGPSVFTC

SEQ ID NO: 1573 - protein, 1057 aa, Myriococcum thermophilum
MRLFGRRVGRGAMSTWAASAALISLFSSRFGLCTAASSSDPSPILDNGLQDEIQWDHRSIIIGGERLFLFGGEMHPFRLPVPEMWEDVLQKIKAMGLRMVSIYVHWGFHAPTPDTVDFSTGPRNITRFLEMARDVGLYVIVRPGPYINGELNAGGLALWATTGEHGSLRLNDSAFTEAWTPYQDGIAQVTRPFQLTEEGTVIMYQIENEYGNQWLDPEAKVPNPEAISYMEALEDNARRNGIVVPLIHNSPNLNSPVWSKDYDTVGAGGNVDIYGVDNYPQCWSCVLEECGNVTPWAVRDYFGHFEKVSPTQPSLMPEFQGGAMNPWAGPAGGCKERTGADFVNFYYRDNIGQKVSILNLYMIYGGTNWGWLAAPFIGSSYDYGAAISEDRSIDDKYYEIKSLGLFTRAANELASTDRVGTGLEYTNNSNLFTAELRNPETGAGFYVIRHDDTASDSEEWFVLRVNTSIGEFFVPKVSSAVVLSGHEAKILVADFHFGNHTLYYSTAEVLTYSIIDGERTVLVLWTPTGRSGEFFLKGAKEGKISSGPSVTLDAQEEGIIVAWYEQKEERTILEFDNGVTVVLVDRATAYKTWVPALTKDPKVPVDQTVIVIGPYLVRSASLTDDTISIQGDVKTATPIEVFTSSRIQSIRWNGRDMQTTPSNYSTLTTTIPAPKPVQNPVGIGTWRVHDALPERFLNYTDTGPAWVLANRTTTPNPVAGPDTATRPFLFADEYGFHTGIRLWRGHFFVPPSNTTTTSTSSSSTANSSEDEPRPTGVFLNVQGGTAHGWSAYLNGEFLGSWLGSTDTAASNRTLSFVLGDEENGRSAVREGENVLLVVHDDTGHDQLGAAVNPRGILNATLLGGGGDNIGFSSWKVAGTAGGSAPDKAGLDPVRTHYNEGGLVAERLGWHLRGFDDSDWETTSTVSFDGPGVRFYRAWVPLDIPPDIDLSLAFRFTPAAEDVERDTLGYRVLLFVNGWQYARYYPSIASEDTFPVPPGVLTYGGDNLISLAVWSLQEEGARVDLDILVRYVTDSSLDVHFDGDYLRPQWDPERLEYA

SEQ ID NO: 1574 - protein, 255 aa, Myriococcum thermophilum
MYRTLASVALLAGGAAAHGAVTSYNIAGKDYPGYNGFAPSGEPVIQWQWPDYNPIMDASDSKMRCNGGTGAELYAEAAPGDTITATWAQWTHAQGPILVWMYKCPGDFSSCDGSGAGWFKIDEAGFHGDGQTVFLDTENPSGWDIAKLVGGNKSWSSKIPEGLAPGNYLVRHELIALHQANNPQFYPECAQIKVTGSGTAEPDSSYKAAIPGYCSQSDPNISFNINDHSLPQEYEIPGPPVFKGTASAKARSFKA

SEQ ID NO: 1575 - protein, 608 aa, Myriococcum thermophilum
MRLKSALAGVLAWGTAATAAAAAENSTYYNPILPGWHSDPSCVQVEGIFYCVTSTFISFPGLPIYVSRDLISWKLVSHTWNRESQLPGYSWATENQQDGMYAATIRHRDGVFYVICEYLGIAGKDAGVIFRTTDPFDDLAWSDAVTFEAPKIDPDLFWDDDGTTWVATQGVQVQTIDLETGEVGPAIPLWNGTGGVWPEGPHIYRRPDHYYLMIAEGGTAEDHSITIARSKNLTGPYVSCPHNPILTNRGTNEYFQTVGHGDLFQDPEGNWWGVALATRSGPEYSIYPMGRETVLFPVTWPEDDWPILQPVRGEMSGWPLPAPVPTRDLPGEGPFNSDPDEYDFTDEGKPLPRNLVYWRVPREGAFTTTDRGLRVVLGRNRLDGWPGPVNDPAGRAVSFVGRRQTDSLFTFSVDLHFAPTDAGQEAGVTAFLTQLANHQLGIVSGGESGRMLLRLNATRHVNDTELPADWINKDDGSVQVRLEIRMTAEDPTQYRFAAMLATADDPESTRIEAGSASAQFLSGGSGSFVGTLLGVYATCNGAGLGIDCPDDTPPAYFTRWRYTGEGQFYTETDIRPSQPTDEGHGQGKGKGKGKGKGQTVAEKRRFVA

SEQ ID NO: 1576 - protein, 423 aa, Myriococcum thermophilum
MRFSTLFLTLCTAVLPSSADLVKEGSRCVVTSLSASAASSEAGELVARQGQVDDTPQILEAFSQCGQDGTIVLEEGTYHIRQVMDLTDLRNVSVEIYGTLIWSADNLDYWRRASPAVVYADRQTAWRIGGRDISIRGFGKALFDGNGQAWIDLANGAANLQGRPISLTIWYGTNVLIDGITWRMSQFWHTFVAYSENVTMTNLDMYTYSNNGRSSQNTDGTNTWNSKDIFIANWTVTCGDDCIAVKGNSTNVHVKNVTCNESGSTVIGSIGSNSWQPDYVENIVFEDIKANHSSNVAWIKTYPGNGYVRNVTFRNYQFTDVNQPIYLSSCIYSYNNCDSSRLRITDVTWQNITGTSRYNVAVAIHCSASAPCDGFHFENIDIKPKDGGTAKVLCSNIQNQNSMGITCTGPCPGSQPQQLNGNV

SEQ ID NO: 1577 - protein, 564 aa, Myriococcum thermophilum
MLWTSLLSAFLLTGVAEAAGRSIAHAGKRHVEHAAKRARPIISPGSYQPVVEREEKAPKFLTPKTKKFAVDGKGIPDVDFDIGESYAGLLPLSNDPADDKNLFFWFFPSTNPAAEKEILIWLNGGPGCSSFEGLLQENGPFLWQYGTYKPVKNPWSWHTLTNIVYVEQPVGTGFTTGTPTITNEEELAAEFMGFWKNFVDTFGMHGYKVYIAGESYAGYYCPYIAAAFLDAEDKTYFDMSGMTIYNPLLAADELQEPIPVVAFTEYWTGLFPFNDTFRADIKRREKKCGYDDYMAKYLVYPPRGPLPSRLPGTHPDGTTREECWNIYWDIFDAISLLNPCFDIYQGATIYFDREDVKRAIHAPVNKTWEECSSRDVFVNGTDRSEPPIFRALPRVIDGTKNVIVGHSALDMILLANGTLLALQNTTWGGKRGFQNRPDQPFYVPLNNITDLSTLAAAGVFGSLVSERGLTYVGVDLAGHMVPQYAPSAAYRHVEYMLGRVDCMNCTKPFTTDPFTPQSEGKLGKGTAPQGWSNAHGHGHDHGPGHGHAVLRPVMILRQSFHQSK

SEQ ID NO: 1578 - protein, 849 aa, Myriococcum thermophilum
MSANNTASKPLIANNGAATATASTTASARFPFLRTKRGIALVVVVAIVLIVGGGLSGLAALRTRGGGDGDSASADEYGEGVIRDDSWFYGLSPPVYPSPNITGSEGRWVEATRKARELVRRMALEEKISLTAGDGSFPGCSGSLPPIPRLKFPGMCLSDAGNGLRGTDFVSTWPSGIHVGASWNKALTRRRGSGMGGEFKTKGVNVLLGPVVGPAGRVVLGGRNWEGFSVDPYLSGVLVSETVTAVQAAGVITSTKHYIANEQETNRNPSGDIQSVSSNIDDRTMHEFYLWPFQDAIRAGSGNIMCSYQRLNNSYGCANSKALNGLLKTELGFQGWVVSDWGAQHAGVATALAGMDVVMPNGDAFWGPHLIEAVNNGSVAETRVDDMVVRTLATWYLLGQDRDFPRPGIGMATDLTRDHRIVDARNSSFRSTLFDGALEGHVLVKNARNALPLRRPKMLSVFGYSAKNPDHNNPSPGQSPWLWGSESFNYTEFSGRFFGFGGEYSSTPIAFNGTIYSGGGSGATSPATIVSPFDALIQRAYDDGTALFWDFVSGEPFVNPMSDACLVFGNAYATEAADRPGTRDDYTDGLIRHVADRCANTIVVIHNAGIRLVDQFIDHPNVTALMFAHLPGEASGRAVVSLLYGDENPSGKLPYTVARNESDYPVLGPDVEPEGSMFALFPQSNFTEGVFLDYRHFDARNITPRYEFGFGLSYTTFEYDKLVVRKVGSAGRFGEYPTGRIVEGGQEDLWDVLVEVSAEVTNTGEVDGAEVAQLYVGIPAEGAPVRQLRGFEKPFLNASATATVRFPLTRRDLSVWDVVAQKWRLVRGEYKIEVGSSSRNLPLVGTLTI

SEQ ID NO: 1579 - protein, 368 aa, Myriococcum thermophilum
MKISTPFFLASTLLLSPAAAQLHALARKAGLLYFGAATDTPGQRERAPYPESYPRYDAIFRNPAEFGQTTPTNGQKWLFTEPAPRLYNFTEGDVVADLAESTDKILRCHALVWHSQLAPWVEETEWTAEELRAAIVRHIKAVAGYYRGRCYAWDVVNEALDEDGSYRKSVFYNVLGEEYIRLAFRTAAEADPTAKLYYNDYGIERPDSPKTAGAVRLVRMLRRAGIRIDGVGMQAHLHADDHPSAEDLIRTSERYARLVPEVAFTELDVRIKLPVNETKLEWQADCYQKVVTACVKVKACVGITIWDFYDPFSWVPDTFPGQGASLLWFDDFSKHPAYYRMVKTFKKLIRERKKPWWWRRDEETVTAN

SEQ ID NO: 1580 - protein, 179 aa, Myriococcum thermophilum
MLPLTTLLWALAPSLAAATLTFQVQRTGNSADEQDAYGRIEAAMQAAVNRYNRLAPLAQKQITVQYVPSVPTADGNFNGNIRFGADRAYMTERTALHEISHTLGVGQTRAFDDRCAAGPSGWPTAIELLRSWDGPDAVINCGGGHFWPYGLNYENEMSETNAERHCLLVNAMLADGLAG

SEQ ID NO: 1581 - protein, 380 aa, Myriococcum thermophilum
MKLNQFLAGALLAAPVLAHPTHKEKVYAHRALPLERKSLAHCSAKFKEPEFVKRTVEHHGRELHRLKRARGIPVEEEPKVSPRDYLDVIRIDHQSNKTVTEGMDLSTLFDDYGACMLMPAVDQGPLYVKGEEIRKEITNGEAGIPLTLAIQVVDYNTCETVTDAYVDIWSCNATGIYTGVQGYPGMGDPNDASILQGTTLRGVQPVDDHGIASFDSLFPGHYDGRASHIHAIVYLGATKEPNNTITGGRAAHVGQIYFDQKLITQAEAASPYNTNTMRIVPNENDFLFRAGANGDDPIVRYAFVGDKIEDGLFAWIRFGIDQNADMPVNPAAFWTENGGVMNPTGPISQLPPGGFPGWPGWGMKKRVEALLAAAEEKNNA

SEQ ID NO: 1582 - protein, 297 aa, Myriococcum thermophilum
MTGYLGRLVATVGLTVASLRGVAAATPSSGCGKTPTLITDGSASTPLTLTSNGKQRQFYVKLPDDYDNSHPYRLIFTLHALGGTAEQVISGTGGYLPWYGIPDLASNDTVGAIYVAPNGLNNGWANQGGEDVAFLEAVIEAVEADVCVDQDLRFSTGFSYGAAMSWTLACALGQRIRAVAALSGSPFISGGCSGAGQTEPVAYYGQHGLSDSVLPVSGGREMRDHFAQNNGCDANQNIPEPAVGSGTHVKTTLTGCDPDYPVVWVAFDGDHTPQPMDRGATSTFSAVETWEFFSQFQ

SEQ ID NO: 1583 - protein, 294 aa, Myriococcum thermophilum
MRLLQLITKAAAMAGLAAGASLQPVSNFGDNPTGLQMYLYVPDNVAPNPAIIVALHPCGGSAQGWFSQTQLPSYADQLGFILIYAGTTQMSNCWDVQNPASLTHNGGGDAGGIVSMVKYTLQQYNGDASRVYVMGGSSGAMMTNVLAGSYPDVFEAGAAFSGVAHACFLGADSATPFSPNQTCAQGQIQRTPQEWGDLVRNSYPGYDGRRTRMQIFHGNADFLVRPECAHQALSQWANVLGLELTQTNQGVPSAEYTQEVYGDGTQLQGFFGEGVGHIAPVNEPVMLRFFGLLE

SEQ ID NO: 1584 - protein, 287 aa, Myriococcum thermophilum
MVSLSSLFVAAYAAAVAVAAPSEAALQKRQTYTSSQTGWHDGYYFSFWTDGGGNVRYTNEAGGRYSVTWSGNNGNWVGGKGWNPGAARNISYTGQYNPNGNSYLAVYGWTRNPLIEYYIVENFGTYDPSTGAQQLGSITVDGSTYRILKTTRINQPSIEGTRTFDQFWSVRTNKRSSGSVNVKAHFDAWAQLGLRLGTHDYQIMATEGYFSSGSATITVSEGSSNGGDDNGGGDNGGGDNGGGDNGGGNSGNCSPLYGQCGGQGWTGPTCCSQGTCRVSNEWYSQCL

SEQ ID NO: 1585 - protein, 392 aa, Myriococcum thermophilum
MHFSAALLALLPVALAAPAGEVLDKRAPLLAARSGQHIPGKYIIKLRENAADDILEKAIGKLRSKADHVYRGKFKGFAAHVDEDILDALRLLPEVEYVEEDAIVTINAYTSQSNAPWGIARLSSKSSGSRTYTYDSSAGEGTCAYVIDTGIYTGHSDFGGRATFAANFADSSNTDGNGHGTHVAGTIGGTTYGVAKKTKLYAVKVLGSDGSGTTSGVIAGINFVAEDAPKRSCPNGVVANMSLGGSYSSSLNRAAAALVDSGVFLAVAAGNENQDASNTSPSSEPSVCTVGATDSSDRKSSFSNYGSVVDIQAPGTNILSTWIGSSSATNTISGTSMASPHVAGLAAYLLGLNGPQSPASLCNYIKETGNAVVSGEPSGTTNRLAFNGNPSA

SEQ ID NO: 1586 - protein, 381 aa, Myriococcum thermophilum
MRVSSLVAALATGGLVAAAPKPKEQSQPRAVDVNPFKGKAQFVNPAWAAKLEQTRQAFLAKNDTVNAAKTAKVQQTSSFVWVSRIAELSNIDDAIEAAREAQRKTRRRQIVGLVLYDLPDRDCSAGESAGELKSDENGLEIYKNEFVKPFAEKVAAAKDLDFAIVLEPDSLANLVTNQHIEFCANAAPVYREGIAYAISSLQQPNVHLYIDAAHGGWLGWDDNLPLAAKEFAEVVKLAGEGKKIRGFATNVSNYNPFHAIVRENFTEWSNSWDESHYASSLAPFLEEEGLPAHFIVDQGRVALPGAREEWGDWCNVNPAGFGPAPTTRVNNTVVDALVWIKPGGESDGECGMAGAPRAGQWFDEYAQMLVKNAHPSVFRRW

SEQ ID NO: 1587 - protein, 1532 aa, Myriococcum thermophilum
MASLLALFLTLTAVQGSLVRSSSTIPVRGLSNKTKLDYDPRPAPSYMVDNQHNFYKTAPDKGRQNGPVWAYSGSLDTYLSNLQRGVVLRASSPGSNDTKQTSFRSDDRKRQSSDFWLSNLGPLGIQPFAGGDDYQFFRNVVEDFGADNTGETDTTEALNAASASWNMETVGDSRTRCGETCGNTFAQGAIVYFPGGTYKICRPVIQYYYTQFVGDPNDMPVIKGCDEFQGIALIDVDPYVPGGSGQQWYINQNQFFRQIRNFRFDLTDMPESTADNDQDLVPTGIHWQVSQATSLQNLVFDMPTTSTTTAVGIFTENGSGGFVSDIEFNGGNIGWRAGSQQYTARNLVFNECNTAVQMVWDWGWNWQQITVNGGTIAFNISGAGGDTGQGIGSVSIIDSTIRDVEVGVLTNSHSTSPNIVLDNTKFENVASPVRTEGGDTILSGNSDLWATGKRYNGSDGSTETGAVTAPGRGEGLNDSDGFLYVRSRPQYEKHSVDSFLVATTDGGCKNDASGDQASCINAFLRRAVDSGKIAYFPAGVYAVGSTVHIPTGSVVQGSSWSQILGSGFYFSDMKNPKVMVQVGNKGEIGTMEITDMLFSVRGATAGAILMEWNVAAVSQGAAAMWDSHFRVGGALGTNLDLTNCPKFSNNAECIAASLLFRVTAQANGYFENVWAWVSDHDNDESIYNQPDSSSTQISIFAARGMLIESEGPSWFYGGGSEHAVLYNYLISGAKSVFMGHIQTESPYYQPVPKPPEPFRAAASFPNDPDFSHCEVTAEVWDDRCNYAWGLQIIDSKDIMIHSAGLYSFFNEYYQDCVPTHNCQKRILEVKGSTGVVIYNLFTVGTVNIASGIDNTNIPQDANQRGFTTEVSVWVPLPGSDNVDIVWVGTDVWDTPTVSCPAQSCMLIIPTSSLGSSTTIRPSSYTTSLEYGGFSSTTIGGVPTTIFVTTTTTVTISVPPIVTDGIGFSNVNVSTSGAMPITIFPSVEIPPVVVTLPNGEGSETTRTVSLPPWPQIDGGPSIGYTDPATLPSNSSTGLPTSTTYFTPISTSITVPSATVTTVTFPGSTGAITISCPATTSIVFSTPAIAVATTCTDSADLTLNFACPTTRVLTFLGPATAVATVDCSLVTAWKTGSSSATTPLPTYTSWPPYVRIEPEEEERDEPEPDDDGVHVPCTAWFFFFCISWGEIRVRSWHWILPPGIYGPGPAPINNIRPPPGVEFRGTLPNWPRITIGPDHQLTTESEPECETQTAEACTTTDYVSDGTTTSSTTLCETITGCSISVSDSSTAVVVGSQTAAPVGSWGDERWATMTLGDAYTNSVYEAIESRMAREEVSSGGTTLSFTSGPTAGPTCAGASTACGGTICSGYWCNPTPTGAPPGYKDPKDPNSKGYSAPTTTIGGGGSSSSTSTAKPTTPLTRGPINCFDEADFPGHADIQPDDQDEFSVEFSSWQSDTGDDLIGPDDPPVKLHGIDLHGVNYDYSCSWVPGCVTEVEKQSFRFPLGMSNSLITAYLLVREDYTKCKWTLSRRTKP

SEQ ID NO: 1588 - protein, 218 aa, Myriococcum thermophilum
MRTTTIANAFSSLALLLGSPAAAAVVDKRQSKVGQYCNPTTQICYVEYSWGPTVPVFRIAVPDSASTGTDFQTLLQIVAPATLGWAGFSWGGGMTANPLTVAWPNGSGGVTVSSRWADSRTLPTVYSSATYRTISAENNGTHWIVETVCSGCSQWSGGRLSTTGVNTFAWAVSDQPVSNPADPSSTFQVHNNIGSFGTSLDDGKVPQATFDQYVQGAQ

SEQ ID NO: 1589 - protein, 417 aa, Myriococcum thermophilum
MKPVPAYTLIAAAVGSASRVPRIPRQSGGNGTIECAPVPSPFPTWQELPLQPSLPDPFLPLAYTTPDDAENVVAGRGKGRVQTPEEWYQCRRPEIIQLLQEYQYGYYPDPSEEIVEATRSGNTLNIVVTAGGKQGSFRATISLPSGASESNPAPVVINIGGMQNQPYLNAGIAIAQFDYTSVAPDSNAKTGAFWSIYNGRDIGVLTAWAWGFHRTLDAINMTVPEIDASRAGVTGCSRLGKAALAAGLFDERITLTMPMSSGVQGAGPYRYYDLSGQGENLENSKQGAGWWTNSKLGTFMNHAENLPYDAHTIVAAIAPRAVIIDQGTGDPFVNSKGTAIVVYPAAKVVYDWLGASENIGISVRGGGHCDLSGYSSILPYVQKIFFGTPTDKDYNDLGSYGSPMSSAYPWATAVPGA

SEQ ID NO: 1590 - protein, 221 aa, Myriococcum thermophilum
MVSVKAVLLGAAGALAFPFNVTQFQELAARAGTPSGTGTHDGFYYSFWTDNGGNVIYENGPGGSYTVQWQNCGNFVGGKGWNPGQARTITYSGNVDFMGGNGYLAIYGWTQNPLIEYYIVESFGSYDPSSQAQTFGTIEVDGGTYTLAKTTRVNQPSIEGTSTFDQFWSVRQQHRTSGSVDVGAHFEAWAQAGLQLGTHNYQIVATEGYQSSGSSSVTVEA

SEQ ID NO: 1591 - protein, 338 aa, Myriococcum thermophilum
MKWNVLTAATGLAAPAHALLRFGCSQLTVQRLDPLVTPGENPSPHLHQIIGGNSFNVSMPYPEHDLVTKSTCTSCQFTEDFSNYWTAVLFFRARNGTFKRVPQLAQAGMEGTNGGMVVYYMSDALFDTQQRSTVTAFKPGFRMLIGDASFSNREQAREFRQITYTCMENQASRHPETVGFPKTPCKLGIMANHRFPTCWDGVNLDSPNHRDHVAYPESGTFESGGPCPASHPVKLPQILLETVWDTSQFNNPDDWPEDGSQPFVWSTGDSTGYSSHADYVFGWEGDSLQRAMDAHTYVIAPMLKTQSIADQNRCTVKDMVGEDIDSWLPELPGGHEIY

SEQ ID NO: 1592 - protein, 301 aa, Myriococcum thermophilum
MGRFLKTTALAVLATVGAASAIPFRANSSTKYLITFGDSYSQTGFDVGGTKPSADNPLGNPPLPGWTASGGLNWVGFLVSEFNTSTLLSYNFAYGGATTNATIVPPYQSTVLSFIDQVAQFSDSIASKPDYAPWDANNALFGVWMGVNDVGNVWWDPNYDSLLEQIMASYFGQLQILYDAGARNFVLLSVPPIHRTPAVLLNNSPEDQEVEALAIDKYNEAIAANLEAFTEKNEGITAKIVDTGVPFNTALDNPTDYGAPDATCYNSDGKSCLWFNDYHPGVEINRLVAQAVAGAWEGSFF

SEQ ID NO: 1593 - protein, 323 aa, Myriococcum thermophilum
MKLLSRRIAMPLLGALTAVTSAASLTQITEDFGPNPRNVAFYIYVPDDLPANAPILVNPHWCHGTAQAAFQGSQWATLASQHGFIVIYPGTPASSTDQCWDVSSRETLTHEGGGDSLGIVSMVRWTVDRYEADASRVFVTGVSSGGMMTQVLVGAYPDVFAAGAAFAGVPFGCFAPPGNNTGQFGYWNADCATGTVTHTAKEWGDLVRAAYPEYDGWRPRLQIFHGTEDETVSYVNHEEAIKMWTNVLGLSENPAEVVQDTPLPGWTKSVYGPTGWFEAYSAAGVPHNIQVQENTALAFFQLNCTANCFSWGQGSPTGENSSA

SEQ ID NO: 1594 - protein, 388 aa, Myriococcum thermophilum
MKFSYSLLAAVAAEAAVIGRGRHVKPPGEDGRYTISSDGIKAQFIPYGATLTNLFVKDKNGEDIDVVLGYDDVDYYPEDPGHPVYNAIPGRYANRIGNGKYTLDGKTYLTEKNDGNNTLHSGTNNWSYRFWDVTEVTDDSITFSILDKANSSQGFPGDVKASVTYSVKGSTWNIKMTAEALDHKTPLLLTQHTYFNLDAYRNPDTAKIWDHGLYLPYSKRYLEADQGALPTGEILTAEPGSINDFASSPDLTVGHARDQPGFEGNCGADGACEGYNGYFLIEDKPADDAVVVRLSSAFSGVTAELRTDQPGVVLYSCNWMDGSADLKSTQGIEGVNEKVIRSSCIAIEAQDYPDGINHPEWERLDAQIWGPGETYTWESSWTFGLLDE

SEQ ID NO: 1595 - protein, 476 aa, Myriococcum thermophilum
MVFTLRLVGGLLATATTISGASWTPEVVIRDVAVIGGGASGAYAAIRLKEDFNKSVVVIEKAGRMGGHVSTYDDPKTGSSYDFGVQSFNDYGPAKAFFERMGVPIGSSPRVPLTSQYADFTTGAPVNFTAPSNDDRVVALGRFLNATEAYQEYILPGYWNFPAPDKIPGDLLLPFGEFVEKYQLHAAVNQVFEVTGLGVGDMINTLTLYVLGAFGHPMIRFFLGEAATFTPDSRRNIEIYEAIQSRLGSDVLLNTEVSYSLRTPIGHILWTKSASGKSTIILARRLLMAIEPTPENMAPFDLDPVEQKTLSKFSYSRLHAGIVSHPSLPVNVSLVNTPAAASPDNYVVLPKPNFNVRFDYMGGGSDLWRVVAVGDEQFTKDKAQDLIRENFAALVEAGTVQPKTANPAEELEFRAWADHGAMHMRVSAAELKDGFIQKLYALQGRRATWWTGGAFSVQFQAVLWAFDDILLPKMFA

SEQ ID NO: 1596 - protein, 336 aa, Myriococcum thermophilum
MRLSLLTIASVLAPLTAAFPLGTFGLASWDIEGFAKDNPIGITTGGKGGSTVTVDNAADFREAVAGDEPKTVLVKGEINLPSRPKIGSNKSVIGVGRTAHITGNGLDVFNSTNVIIRNLKISFIEDNDCITIRNSTRVWVDHNEFASDINKGPDAYDGQVDIIRGSDWITVSWNYFHDHWKSSLVGNDATFRDIDFGHLHVTYHHNYWRNEGTRGPAGRFGHQHVYNNLYVDFLYQAIHSRSDNQVLVEGNVFRGKTREALSTYGLVIPEDSPNTCTCGDEELDGYANLGAKNDWGKATVNITQVGNFHKAPYKFKLTPLPLVELIVKLGAGVGKI

SEQ ID NO: 1597 - protein, 873 aa, Myriococcum thermophilum
MRIRNLLAFAAIGLAAAEDGLDGWLRYARIKGALSYHHRLPSTVVALNATEGLPVYTAGQELVQGIEGIFGKKVDLDVDLATAGSGRGKGKGKGKGKGKGNNHGPGRHATITVGTVAAYAESDSGAAAAADKVPELDDDGFYLRVSRGNVLILGQNERGVLYGAFHYLSRLAQGKVSDYTLTSNPDAPLRWVNQWDNLQDGGTHGSVERGYGGDSIFFWDGKVRDDLTRARLYARLLASIGVNAVVVNNVNADPQTLTPENMDGLARIADAFRPYGVQLGISLNFASPETLGGLNTFDPLDKRVIKWWQDITDAIYERIPDMAGYLVKANSEGQPGPMTYNRTLADGANVFARALKPHGGRVLFRAFVYDHTSLDQDKDWKADRANAAVEYFDGLDGKFEDNVVVQIKYGPIDFQVREPASPLFSRLVQTASAIELQITQEYLGQQAHVVYLAPMWKEILDFDFRVDGRPSRTADILNGKRFGRPGGYAGVANVGTNTTWLGSHLAMSNLYAFGRFAWDPSSSPEGVLRDWIRLTFGNDPKVLDVITRISMESWPAYENYSGNLGIQTLTDILLGHYGPNPATHDGNPWGQWTRADGDSLGMDRTVWNGTGFAGQYPPEVAARFEKIETTPDELLLWFHHVPYTHVLKSGKTVIQHFYDAHYEGSATAQTFPRLWKTLRGRIDEERYQHVLFRLEYQAGHSLVWRDSINNFYFNKSGIPDAHGRVGHHPYRIEAEDMRLDGYEPYDVSPFEAASGTRCIVTRDNSTAATASVDLRHVRTGVYDVAVNYYDLAIGNSTWDLYLGHRRVGRWKGDLEYNLGRAPSPYIDGQTAARITFPRVFIKRGTTLKIVGQPDGLEPAPIDYVSILPLGIVD

SEQ ID NO: 1598 - protein, 383 aa, Myriococcum thermophilum
MKLSASLTALAAAMGASATFDIPAFEQFAIDSGLALAGLNGIALLQSATKYGGSCNLGNVKIRREWRTLSKEQRRSYIKAVQCVQDKPSRLEEGVAPGAKTLFDDFVYVHMNATPVIHYTGNFLIWHRNFIHAYEKELNACGYKDALPYWEWGFDVEAPHLSPVFDGSDTSMSGDGEFVDGPPLELAIPGNPEPVVLAKGTGGGCVKTGPFANMTVHLGPITQPDPTADNPRCLKRDLNADAGKRFASFRNTTELILNSPTIEYFRTVLEGDPAYAPMSLGVHGGGHFIISGDPGSDAFISPGDPAFYLHHAQVDRVYWIWQMLDFENRQGVFGTNTMLNYPPSENTTVEDTVDVGHLGGPIKIKNLMSTIGQNGSPLCYIYL

SEQ ID NO: 1599 - protein, 1064 aa, Myriococcum thermophilum
MFTAGVKGALWLAFSSVVAALGQEKIISTSPHGAHFQIAGGHVGKGQILVSSNDYWGVIRAAGDLAVDFGRVTGTNYTLSNGEKNAPPATYTYHPVDNMNNTHYSTTGTANFTGPAYADPDPEKVVIIAGTIGHSKVIDRLIEKRSLDVSRVKGKWESFTSQLVRNPVPGCKQALVIAGSDPRGTIYGIYDISEQIGVSPWYFWADSPPKKHENLYVTTRKKVQGPPSVKYRGFFLNDEQPALTNWVATHWEDTPYGPGYSAAFYGLIFELLLRLRANYLWPAVWATMFEVDDPANQPLADAFEVVIGSSHTEPLMRAQNEFGHFYEGPWAYNLNNKTIDEYFRYGVQRAKPYARNSLWTMGMRGTGDTAIEGLGVEYIVEMLQTLVKNQREIIAEGLGIEDITTVPQMWCLYKEVMSYLSAGLQVPDDVTLLWADDNWGNVRRLPLRNETQRHGGAGIYYHFDYVGGPRNYKWINTIQLSKTAEQMHLAYARGADRIWIVNVGDMKALEIPISHFFDLGYDAKRWHVDSTQEWAEAWAAREFGPAHAREIADVMMKYGMYAARRKYELLEPWVYSVINYNEAEAVLQQWAELVSEAQAIHDKLPDEAKPAFFQTVLHPALAGEIMHQINVAAARNMLYAGQKRNAANTAIQEVLAYSAADANLTRRWDALLDGKWKHFMDQTHLGYDGYWQQPMRNTLPPLVYVQTDFTSLGGEIGIGVEGSNATVRGDDRWHPNSGNDLTLPPLEPYGPATRYIDIFSRGSKECSWTLSASKPWLKLSQSTGVVGAGHPDKRILVSVDWESAPPAPYSEEVQINITTPCTGMDRYGFGEPHVFVPVTVRKAPKSFKRGFVESDGNVAFAAEHYSRVIEPASSRSKGRDKDEVTYHTFASYGRTSSGVGLVPLDTEKLTREEAPALEYDLYLFTNTSAANVTLYLSPALNYLGDATPLEYAISLFPASSDGEGIDIKYVKPVGVTVGGDMPAGWDGAVADGVWGLTGGYTTSSFEVPREGAYKLRVWTLMPGIVVQKVVVDLGGVRRSYLGPPESFLVGRDRIGARNGTSFLG

SEQ ID NO: 1600 - protein, 322 aa, Myriococcum thermophilum
MKPTRPSAVVLLAAATSVAGQSCDLPTSYRWTSSGVLAEPQYPWVSLKDFTIAPYQGQHLVYATTNDGTNWGSMGFGLFSDFSAMGSASQTGMSSGAVAPTLFYFEPKNVWILAHQWGPTAFSYRTSNDPANPNSWSSPQPLFTGSISDSDTGPIDQTVIGDDKNMYLFFCGDNGKIYRTSMPIENFPGNFGDQATVIMSDSRNNLFEAVQVYKIDGQQKYLMLVEAIGAQGRYFRSFTATSLDGQWTPNAVDEYSPFAGKANSGATWTNDISHGELVRLSADHTFPIDPCNLQLLYQGRDPNSGGDYNRLPYRPGLLTLQR

SEQ ID NO: 1601 - protein, 279 aa, Myriococcum thermophilum
MKLHLLSALFLLCTGIQGLPASATEDNATASSSPSSSSATATPTSYDFAAGAVTSYPIHPSCNSTLRRQLERALDETVALAAHARDHILRWGVDSPFVQKYFGVTNDTKPSADHEEAVLASTAAPLGWYSRVVAADKGGITFRCDDPDRNCATQDGWAGHWRGENATQETVICPLSFSNRRWLDSVCGLGYTVAGSPLNTFWATDLLHRIFHVPKISEGVVEHYAEDYEGVLELAATDPARAAIDSNTLQYFAIDVYAYDIAAPGKGCTGKPEKSEESE

SEQ ID NO: 1602 - protein, 397 aa, Myriococcum thermophilum
MVHLTSALLVAGAAFAVAAPMNHVFERQDTCSVNDEYPTVNEAKLPDPFTTSAGEKVTTKEQWECRKAEISKILQQYELGEYPGPPDSVEASLSGNGITVSVTVGGKSISFSASIRKPSGAGPFPAIIGVGGASIPIPSNVATITFNNDEFGAQMGAGSRGQGKFYDLFGRDHSAGSLTAWAWGIDRLIDGLEQVGAEASGIDTTRLGVTGCSRNGKGAFIAGALVDRIALTIPQESGAGGAACWRISDQQKAAGANIQTAAQIITENPWFSRNFDPHVNSIPTVPQDHHLLAALIAPRGLAVFENNIDWLGPVSTTGCMGAGRKIYEALGVPDNFGFSLVGGHNHCMFPGSQTQDLNSYINAFLLGEGSPSGVEYSDVSANVDEWAPWAADLPNLA

SEQ ID NO: 1603 - protein, 257 aa, Myriococcum thermophilum
MALQLLASLALLSVPAVAHGGLANYTVGDTWYRGYDPDLPPEVQLNQTWMIQRQWATIDPIFTVSEPYLACNNPGTAPPSYIPIRAGENITAVYWYWLHAIGPMSVWLARCGDAPDADCRAVDVNQLGWFKIWEAGLLEGPNLAEGLWYQKDFQRWDGSPSLWPVTIPEKLKSGTYIIRHEILSLHVALKPQFYPECAHLNITGGGDLLPPEEALVRFPGVYKEDDPSIFIDVYSEENANRTDYTVPGGPIWEGFAD

SEQ ID NO: 1604 - protein, 459 aa, Myriococcum thermophilum
MKSLALLVSVAASLASASAIALDGEALPAGASITFPRDESQFNPSVTPESRGHGKEKDNWGNAVEKDRKKVTIRASKDDRDDISDDFLWALKKANNGGLLHLQKGEKYVIGKKLDLSFLNDIYVKIDGELKFTNDIEYWQANNFYYDFQKSITFWVWGGKDIKIYGSGVINGNGQAWWDGFSGHEILDPDNDYYRPILFLTDNATNVEVRGLHMKDSPCWTNFFVRSKNIVFDDVYISAVSTNASTLPKNTDGFDSLNVAGLTVLNTRVNVGDDCFSPKPNTSDILVRNLWCNGTHGVSMGSIGQYPGVLDYIADAHIENVTLLNGENGARLKAWAGPDVGYGYIRNVTYKDIRVENTDFPIVLDQCYFNINETVCAQHPSRVNISDINFINIRGTSSGKEGRVVADLTCSPGATCTGIHLEDIDITSPKGSPPQIVCENIQGDIGVDCIPKDEADYSG

SEQ ID NO: 1605 - protein, 227 aa, Myriococcum thermophilum
MKLSATIAVLAAALAEAHYTFPSIANTPDWEYVRITTNFQSNGPVTDVYSDQIRCYERNPGTGAPSIYNVTAGTTLNYNAKASISHPGPMAFYIAKVPDGQSAATWDGKGAVWSKIYQEMPHFGASLTWDSNGKLSMPVTIPKCLQDGEYLLRAEHIALHSAGSPGGAQFYISCAQLSVTGGTGTWNPRNKVSFPGAYSPNDPGILINIYYPVPTSYTPAGPPVETC

SEQ ID NO: 1606 - protein, 422 aa, Myriococcum thermophilum
MGPQSTLAGVIALAAWLVADVSAQSCPGVTGRFQPKMGSGYRYSLLATGLRNPRHIAVDSAGNLLVAEGGTQSVRRLVLQDQGDIVCVQSESQLASGSTNHGIALSADGKTLFTSNLATVTAYDYDAATGQVGQGRQIVTGMAFQGTHPTRAIATSKWSPDTIMVVRGSQSNIDTLAVDQANARSMIKTFSISQGLQSPHDYAAGGEVLAWGLRNVVGLTEDPNYGGVWSVENQMDDVHVNGRDIHNDNPAERLSYHGVLNDTENKYKGLNYGYPSCVPAWDPQSVGIDGLLVGSLFKPDNVPNIDPSECANRMTGRLHFHAHTAPLDVKFNNNSTAAYIAFHGSWNRNPADGYRVMRVDFANGEPVADVTSTTAQIPVMENSDISGCPFNCFRPVGLAFDEKGRLFVSSDSSGEIYVIYGA

SEQ ID NO: 1607 - protein, 866 aa, Myriococcum thermophilum
MASTKGIILSLCLSALSAVANAADTPFLGYPSPWASGVENPDPSWAAAYAKAIDFVSNLTLTEKVNLTTGTGWEADRCIGNTGGVPRLGFRGFCLEDGPLGVRYTQNNSAFPAGINVAATFSRRLMRLRGEAIGAEFRGKGIDVMLGPVAGALGRTPQGGRYWEGFGPDPYLAGVAMAESIQGIQSRGVVATAKHYILNEQETFRGSIDVRIDDRTMHELYLWPFADAVRAGVGSVMCSYNKINGTYACENEWTSNYLLKNELAFPGFIMSDWGAQHTTLGSALGGLDMAMPGDSGPLPYGSFWGGGLAEAVLRGDVPQWRLDDMVVRIMAAYYKVHTGDYADRPDINFSAWTNQTIGPLHPSSNESITVVNEFVNVQGDHASLIREIGAKSIVLLKNENNILPLSHPASIAIIGEDARDPPGGPNACPDRACFGNGTVAMGYGSGTAEFPYLISPATALLAQAKRDNTTVVFDATSSNWDLAAAESAAASADIAIVFASVTSGEGYVEVAGQFGDRSNLTLWANGEALIAAAARANPNTIVVLHTPGPVLLGDVVANPNVSAVLWAGFPGQESGNSLVDVLYGRVNPQGRSPFTWAANNETDYGAELLVDVDDPRRPVQVFDEGIWVDYRWFQKNIKGVLFPFGFGLSYTSFRFSNLTVQLLDGGDDEGEGDEAEEDGDLTPPAPTYGVVDEDLEKHVTPEGFRRIWPYVYSWLNSSEGFVAGAPGNISEFPAAARNGSAQPVLPASGAPGGNPKLYEVLYTLTAYIENEGDVKGTAIPQLYLQLGGEDNPWGILRGFDEVELEPGETKMVTFNLTRRDVSNWNTTTQNWEITDLVKTVFVGSNIRDIHLNSTLPAPKGMTWRYG

SEQ ID NO: 1608 - protein, 235 aa, Myriococcum thermophilum
MKALSLLAAASAASAHTIFVQLEADGTRHPVSYGIRTPTYDGPITDVTSNDVACNGGPNPTTPSSDIITVTAGTTVKAIWRHTLDSGPDDVMDPSHLGPTLAYLKKVDDATTDSGVGDGWFKIQEDGYSNGEWGTLKVINNAGEHYIDIPSCIPEGQYLLRAEMIALHAAGSPNGAQLYMECAQINIVGGSGSLPSQTVSFPGAYSANDPGILINIYSMSPSDTYTIPGPPVFTC

SEQ ID NO: 1609 - protein, 319 aa, Myriococcum thermophilum
MKGSTLLALALGFGAYAHFPPEREGITVVESKFYNNVSISFKEPGICETTPGVKSYSGYVHLPPNLIEGADQDYPINLFFWFFEARKDPANAPLAIWLNGGPGGSSIIGLLEENGPCFVGPDSETTYLNRWSWNNEANILYIDQPVQTGFSYDVLTNVTIRLDVDDPFEPVITPTNFSDHDGVIPQTNNTFRIGTTGSQKLSQTTNTTELSAYAMWYFLQTWLFEFPHYRSDDGRISLWAESYGGTYGPIFFHFFQRQNERIAAGQLDARYLHLDTLGIINGAVDWLLLGESWIDYPHNNASLALPWSRRDEFAAAEWR

SEQ ID NO: 1610 - protein, 397 aa, Myriococcum thermophilum
MKGALLTAAVLLGSAQGAVHRMKLQKVPLSEQLETVPINTQLEHLGQKYMGMRPRESHVDAIFKGMVADVKGNHPVPISNFMNAQYFSEITIGTPPQSFKVVLDTGSSNLWVPSVECGSIACYLHSKYDSSASSTYKKNGTSFEIRYGSGSLSGFVSQDTVSIGDISIKGQDFAEATSEPGLAFAFGRFDGILGLGYDRISVNGIVPPFYKMVEQKLIDEPVFAFYLTDTNGQSEVVFGGVDHSKYKGKITTIPLRRKAYWEVDFDAISYGDDTAELENTGIILDTGTSLIALPSQLAEMLNAQIGAKKSYTGQYTIDCGKRGSLKDVTFNLAGYNFTLGPYDYILEAGQGSCISTFMGMDFPAPTGPLAILGDAFLRRYYSIYDLGADTVGLAEAK

SEQ ID NO: 1611 - protein, 589 aa, Myriococcum thermophilum
MRQPLLSSFLTLVTALSGSFGRSIPRDPEASLQPREECENTPTSRHCWGKYSIDTDYYDNYPTNNGPAKEFWLSVEEGPCSPDGYERTCKTFNGTVPGPTLFVDWGDEVIVHVTNNMVSNATSVHFHGVRMLNNSINDGVPGVTQCPIPPGHTMTYRFQVTQYGSTWYHSHLSLQYADGMFGGFVVRGPTTDNYDEDLGVLFLQDWSHVEAFTNWHVAMAGPPPPIDNWLINATNTYNCTGRNDDKCVGGGKKFEMVFEQDKKYLLRLFNVAMEGVFEFSIDGHSLEVVGNDLVPIVPYMTDSVQLSIGQRYDVIVHANADPGNYWLRAHWVKGCDGNSSANVDPYVHSTGIVRYDAGSTDDPETESHVTPTTSCLGEPPEKTIPYLSIDVANTKGGVVYEEMGSKQPSMPEEYFQWTINTSSLVLNWTLPTMDKIMKNENVFPTEYNVVPIKSSGTGPEWAALLIQDISEEKIPHPIHLHGHDFWVLAAGDGVFDGDKNKFNTNNPARRDVATLPGGGYIAVAFRLDNPGAWLIHCHIGWHASQGLALEFIENQSDITFDELSIREYEETCKAWGEWEPVWPQDDSGI

SEQ ID NO: 1612 - protein, 573 aa, Myriococcum thermophilum
MTRLLALVTSIVLFCALDALAVPFDLPHGIWPPVKALRCNRVFFSHVLPPGATLEKVAVVPEGESYGEGEANVAYPKNPKNLPALCAVTVRVKSSPTSSYRFGLFLPDEWNSRFLVVGNGGFAGGINWMEMAAGPRLGMASLSTDTGHNSTAEDSSWAWREPEKKTDWGWRALHGSTALGKSLVRAYYVHKPLTYSYYSGCSTGGRQGLKELQLSPGSFDGALIGAPSWWASHIGAYLTQAGLYNLPVDDPKRLSDAETALLADEVIRQCDLEDGVQDGIVSNLDRCNPDLTVLLCSDQDNGLKRAGASGKAHCLTPAQFQTARNIYSDWTLPPDNELLHPGLTYSSEREWYILINGTEPIPYGIGYARDFLFDNEGDGNDSSKWDWRTSFNESVVFYAEEHDPGNATADDYAALGAVRERGGKVVLYHGLSDALVPTKGTGVYWNRTLDALGGPAGVEDFMRLFLVPGMAHCYGTTVDAPWNFGAASQASLLGDEVRSVPGFEDAQHDILMALIEWVENGKPLDSIIATTWKEPKNPSSGVKRQRPICAWPQQAVWDGEGDIDNATSWRCSS

SEQ ID NO: 1613 - protein, 444 aa, Myriococcum thermophilum
MRVSFQSVLLLGVLSAQASAYAKLEYQQQTFVRSPGLHVRTWFSPREGPRGNTPSYRVPLLTLHRALVNVSSISDSEGLVGLLLAGLLKDFNYTVELQQVPPSNASQGLDLPPRYNVIAWPGRNSSRTLDKRTIITSHIDVVPPYIPYAINNKTVPPSEEVDFGALSPTTRISGRGSVDAKASVAAQITATNELLSEGAISPDSVVLLYVVGEENSGTGMKYFSSSLSNTTAYPVRPQFRAGVFGEPTENKLACGHKGGASGNITAIGKAGHSGYPSAGKSAIHVLIRALDRLLDEDLGSSERYGNTTVNVGLIEGGVAPNVIAPAASARILARVAVGNHTTGGQIVAERIKKVVEDVDPESLKVEIISARGPVETDCDVDGFETVVAHYGTDIPNLEGDHVKYLYGPGSILVAHADNEGLAVKDLEEAVEGYKRLIKHAVGSS

SEQ ID NO: 1614 - protein, 420 aa, Myriococcum thermophilum
MAGRLLLCLTAALSALGVSAAPAPDASGRPFLGLPISNPGIPNAIPNRYIVVYNNSFTDDDIDVHQSSVINTIAKRNIAKRSLTGKLLSTTVNTYKINNWRAMALEADDVTISEIFAAKEVSYIEQDAVISLNVRQMQSRATTGLARISHAQAGARTYVFDSSAGEGITAYVVDTGIRVTHEDFEGRATFAANFIDDVDTDEQGHGSHVAGTIGGKTFGVAKKVNLVAVKVLGADGAGSNSGVIAGMQFVANNATAMGLRGRAVMNMSLGGPASRAVNSAINQVEAAGVVPVVAAGNEAQDTANTSPGSAEAAITVGAIDQTNDRIASFSNFGELVDIFAPGVNVQSVGIRSDRSTNTLSGTSMAAPHVAGLAAYIMSFENITGVQAVSERLKELAQATGARARGVPRGTTTLIANNGFL

SEQ ID NO: 1615 - protein, 382 aa, Myriococcum thermophilum
MADKPKPKRELRCLMYYTGQHPVAPSIDELRHVTHVAVAFMSPGIFNEPGRTEWPLFTTVDEARAKFPEETKVIVAIGGWGDTVGFSEAALNDETRKTFAENVARMVEATGADGVDIDWEYPGGNGEDYKQVPNEAKAWEIAAYPLLLAELRAALGPHKIISAAVPGLKRDMLAFTPETVPRIMRYIDFLNVMTYDLMNRRDVVTKHHTGVELSLEAVDAYISAGAEPQRINLGFPFYVRYFKTEHDACALASPIGCPTLLLEDPETGEDLGRSGAFAWHDPVPEGMAESFARALEDGVYDEEGGGYYYWDAREDLWWTFDTPDSIKRKFPRVLDKRQLGGVFAWGLGEDAPLYEHFAALNDGLERYLEGKEPDCEEKEVST

SEQ ID NO: 1616 - protein, 232 aa, Myriococcum thermophilum
MKFASSLAVLAAAGAQAHYTFPRGGVGSSLSGEWEVVRMTENRYSHGPVTDVTSSEMTCYQSGVQGAPQTVQIKAGEKFTFSVDTSIGHPGPLQFYMAKVPSGQSASTFDGTGNVWFKIYHDGPNGLGTEQITWPSDGKTEVSVTIPSCIEDGEYLLRVEHIALHSAGSEGGAQFYIACAQLSVSGGSGTLNTGSLVALPGAYKSTDPGILFQLYWPIPTEYINPGPAPVSC

SEQ ID NO: 1617 - protein, 317 aa, Myriococcum thermophilum
MLRKTALLAVAALPALSSAQISNDFENGWDETAWPIYAPDCNQGGKVSLDTSTAHSGTNSIRVDGAGGYCGHIFFGTNQVPSGDLYVRVYLKASNALTSSHVTFITMPDPAQGTNKHLRIGGQNQIIMYNRESDDATLPELSPQGVATSTSLPTNSWECFEYHVGTDGTIETWLNDEAISGLTYGPGIDNPNAGAWSRSSIIPKPSGVYFGWESYGGDTNTFWYDDIVISSSRVGCSGSGNPPSSSTTTSSPTSAIPSTTFTTSTTSTTSSAPATSTTSSCTVPQYGQCGGINYTGCTTCAAPFECTFSNEYYSQCL

SEQ ID NO: 1618 - protein, 293 aa, Myriococcum thermophilum
MALLGSSAVLLLLTAAIAAAAPQGPSPFRNSTIPPWRGGGNSTIPGPWTTTAAAAPDPPKALPQRATANDLRWQPSLDFDTDGCYNVPAIDAEGNIAEGLPHEWVDLASDCRDASDLDNNNVYSRQRCNSGWCVYLYGYYFEKDVPVPFVPLGGHRHDWEHIAVWVSDASGRAEYVAASQHGNYEVRPAADVRWDGDHPKMVYHKDGSSTHCFRFANEADDKIENHKGVWFRGDLVSYNGFPSTEIRDKLFAHDFGAATIDFKDSTFPGAITKAMPAGITFDVNLDEGSPGTP

SEQ ID NO: 1619 - protein, 595 aa, Myriococcum thermophilum
MVRFMRWLAAMPASSWLGVVFASPTPARELHPRQAQTSFWYANIDHTSADVRGYAPDLDGDYVYEVYKAVAPGDGAGIQAAINAATNGTTRHGQWFASQPRVVYIPPGEYVVSETIFMNTDTILMGDATDPPVIKASSSFSRSGTLLNGQDPTTGISGELSFAVSLKNIILDTTDVPGDAPFVALYWGVAQAAHLQNVVIRMPPSVNGNGHSGIRMGRGSTLAVADVRIEGGQNGIWYNGHQQAVFRGVYFYQNTIGMLIDGGSTISLINPTFDTVGFGIMNTGGSPWIALVDAASKNSGVTLKTTSWPSYLIENLEKDTDSNIAEGPGDFVLPAQSHLAQFSYGNTVGRDPIYGPVSSDDADRPSALLTSSGRFPAISAPNYADVPVSEFLNVKDQNQNGGRRVLGDNTVDESEALNAILQLAADQGKIAYFPFGKYRVDSTLLIPVGSRIVGEGWATIVGHGSQFADASSPRPVVQVGNPGDVGVAQIQDMRFTISQPLPGAILVRWNMAGANPGDVAIWNSLITVGGTRGAAELTDTCRDASAPCRAAFLGMHLTESSSVFDGCRAGHGWKSVARTERLRVRCDASVSARPV

SEQ ID NO: 1620 - protein, 383 aa, Myriococcum thermophilum
MVLSKVWGAVLLAGVAVAQTYPPDVVDELAKESLPKLKEWLEKNPQGECTLETAVRRREWSDLTLEERKAYIDAVLCLQSKPALTSDQAPGAKSRFDDYVVIHMQQTPRNHGSTFFLPWHRYYIWHYENALREECGYTGYQPYWNWDRYAKDPVNSPLFDGSEGSMGSNGAYEEHQGIRFPGAPPPYDVIPPGEGGGCVTKGPFSNMTVNLGPLAPSLNVERNPRADGLGYNPRCLRRDINKNAAAVTTANYTYDLITNNHEIYWFQTVMEGQFPQGKWGVHAGGHYTVSGDPAGDFYVSPGDPVFWLHHSMIDRVWWIWQLQDLESRLTQVSMTKTMFNIPPSENGTLDDLSGLGVLAPDVTVRELMSTMGGLGGKFCYIYE

SEQ ID NO: 1621 - protein, 223 aa, Myriococcum thermophilum
MVKLSLIAASLVAPGVLAGPMIGPKTLTETTLNPRQGGYYDYFQNWSEGGSNIQCINGQGGSYTADWNSGGGFVCGKGWSYGGNRVITYTGEYNATGPGYLAVYGWTRNPLIEYYIIEAHADLAPNEPWESKGNFTFEEGEYEVFTSWRVNKPSIEGTRTFQQFWSLRKEQRVGGTITTQRHFEEWAKLGMQLGNHDYVIMATEGYTANGGSGSAGHSSITLQ

SEQ ID NO: 1622 - protein, 270 aa, Myriococcum thermophilum
MVALSTLARAVSVPALAGWKIVSTITFDGEAGKEVDKSAWEIMTNINFNNEVQEYTTSTDNMHLSGNGTLLIIPLKSETGEWTSARIESKESFTPEDGKTTRYQGELRFGDSPQDKQQGIWPAFWMLGQSSRDKGVPWPECGELDIMERKNGEPTGHGTPHCGTGDSCGGLTKSVPLDGNGWHTWAIEIDRTNKKWEDQTITWFLDDDEYNKIQGSDVQDEDTWKAIAHSPMYFILNVAVGGNWPGEPNDKTADGMDNMMEVKYIAVYSK

SEQ ID NO: 1623 - protein, 336 aa, Myriococcum thermophilum
MKWFALSLALAGQTQAALRFGCSTVSIQRLDPLVEPGKIPSSHVHQIVGGNSFNATMEGDRSEHATCTTCTFSENFSNYWTAVMFFKHSNGSYKRVPLMQNTALPNGINGGMTIYYTQQDFFSNGNQKITAFKPGFRMTVGSPTSNGEEGNPGLRFVCLQNKGTRFPELPTFPKEPCPGGIMTVHHFPACWDGKNLDSPDHQSHMYNTVREAFTPAGPCPASHPVRMPQLAFETLWDTTQFNSMWPEDGSQPFVLSYGDGVGYGTHADYVFGWKGDALQRAMDSPCMFNACENGNPLQSQSVAEMNACTVESQVNEDLDGWLDHLPGYENIENKKE

SEQ ID NO: 1624 - protein, 493 aa, Myriococcum thermophilum
MRLLRTTGAATLLLSRAAFATNNTLTPDKLAADIKTEELQNVLWNLNHIADTHGGNRAFGEPGFKASSDFILERAVTRFHNEFDTVVQAFNYTYAKTNQIKVTGPEGEDVIVVSPQYNPSTPLPDGVTAPLVDTPVDDERGSACFPDQWEGIDAKGKLVLVKRGTCAVADKSALAKERGALGVILYNDEPGTDIIVPTLGAESIGKTVPIGIIPSDVGENWKSRLADGEEVIVNLLVDAISDTRETWNILAETKQGDPDKVIMLGAHLDSVQAGPGINDDGSGTAALLEILTAVRRYDGFPHKIRFAWWAAEESGLVGSLYYTSHLTEEEADRIKYYFNYDMIGSPHPDFEIASDDNSGVGPQLLEEYLVEQGKEIVHGGFGSGSDFVGFLELGIPSTALHTGAGAPFDACYHQACDNLDNIHWEALTINAKAAARAAARLALSLEGVPPRRKTSLNLNTRQGVVQNFRKWAALAKEASHGHACSHKRKKVVV

SEQ ID NO: 1625 - protein, 304 aa, Myriococcum thermophilum
MWPTPRIAYLILAAHSLLVSGTPVEAEAVDGTVLAKRQCPQIHIFGARETTAPPGYGTAGTVVNMILNAFPGATAEAINYPACGGQGSCGGVQYGDSVRQGTDAVATAVNNFNQRCPNTQIVLVGYSQGGQIIDNAVCGGPDTGAGITSSTPPISAAALNQIKAVIEMGSPRYVAGLSYNVGTCAAQGFAARPPGYVCGSNSASKIQSYCDSTDPYCCTGNDANSHQQYGNKYGQQALAFVSARLSSGGDGGNGGTPTSSAGGSVPTGNCSPLYGQCGGQGWTGPTCCSQGTCTASNQWYSQCL

SEQ ID NO: 1626 - protein, 516 aa, Myriococcum thermophilum
MRFSHASGIASLATFGVASTLSGQKPLTDASLPQVPLEGDWPSSKSLVTSEALQATINVDALLSRAKQLFKIAHLSQDEYGRPTRVIGSKGHLGTLEYIYNSLVALGDYYVLSTQPFPAVTGTVFESRLLIDLSVAESALPMSLTPPTKGKQPVDGKLVLVANEGCDAADYPSDLKGNIAFIKRGTCPFGTKSELAGKAGAVAAVVFNNDSGPLSGTLGTPSEDHVATFGLSGSEAAPFVRRLEAGETVEASAYIDSEVKSIETTNIIAQTREGDPENCVMLGGHSDSVAEGPGINDDGSGSLALLEVATQLTNFSVNNCVRFAWWSAEEEGLLGSDYYVSVLSPEENKKIRLFMDYDMLASPNFAYQVYDARNDVNPVGSQELRDLYVDWYAAHGLNYTFIPFDGRSDYDGFIRNGIPGGGIATGAEGIKTEEEAAAFGGEAGVPYDVCYHAICDTINNLNLTAWELNTKLVAHSVATYARSFEGFPERTIDGLSAEVSNAYSENVKYHGSKLFI

SEQ ID NO: 1627 - protein, 320 aa, Myriococcum thermophilum
MKGSGLVRVAALLPAFVSAYELPGECTGICNNSHDPSIIRRADGTYFRFSTGGKIAIHTAPSLTGPWTYRGPALPDGSSINLDGNQDLWAPDVAQVGDQYYLYYSVSTFGVQNSAIGIARSSSLDAGTWIDLGSTGVTSSTGYAYNAIDGNLINEPGTSNYFLTFGSFWNGIHRVRMTPTQTNGNVYQVAFDPNDPAMEGPTVFKWGDYYYLFFSKGSCCGYDQNRPAPGQEYRIMVCRSTAPTGPFEDRDGRSCRSGGGTLVLPSHDWVYGPGGQGVYDDPEYGPVLYYHYVDTRIGYADGQKKFGWNRIDFSSGWPVV

SEQ ID NO: 1628 - protein, 320 aa, Myriococcum thermophilum
MKGVFIAGAFWGLFNLASAADFSNPLKPFNGSDPHMTYYDGYYYLMTTTWSDLQITRARTLEGLKDGETKVVWVDSNPSRCCNVWAPELHKVDDKWYIYYTAGNSQNLDGQRSHVLEGGSDPWGEYSYAGQLTQDWGIDGTILRVEDQNYFVWSCFADNIQSLCIAPLQSPTSIGSPWVLSQPLLDWERADTPVNEGPAPLYHDGRIFLAYSASFCWTPSYQLGLLTYNGGDPTAASSWTKTGPFFSSANGNYGPGHNSFVNSPDGTEIWNIYHATSISTGNCDGNRYTAAKKVTWNSDGTPNFGSPGPLGVVTPGPSGE

SEQ ID NO: 1629 - protein, 336 aa, Myriococcum thermophilum
MKFLNALLGAAAASTALAAPSCTKAKRAGKFKWVGVNQSCAEFGQNILPGQLDKEYTWPAKSSIDTLLGTGMNTIRIPFMMERLIPDQLTGTVNETYSAGLIDTVNYVTEKGAYAVIDPHNFGRYYEEIISDVDGFKAWWSTTAKLFADNELVIFDTNNEYHDMDQTLVVDLNQAAIDAIREAGATSQYIFVEGNSWTGAWTWVSSGNADTLINLTDPAGDDKLIYEMHQYLDEDGSGTHEECVSATIGQERLQEATEWLKQTGKKAILGETAGGPNDQCIQALTGMLSFMEENSDVWQGWLWWAAGPWWADYMYSLEPPSGTAYTQVFPSLQAYI

SEQ ID NO: 1630 - protein, 625 aa, Myriococcum thermophilum
MKPFIGAAALLVGVLSHIVAAAPPSTSEQRDLLAPITERDEPAVEPRQGCSSFSNNDRACWRGGYDLRTDWETDFPDTGVVRKYTLEITEKDNWTGPDGVVKEKVMLVNGNILGPTIFADWGDTVEVTVINNLEHNGTSIHWHGMHQKKTILNDGVNGILECPIPPKGGKKVYRFRAQQYGTSWYHSHFSAQYGNGVVGTIVFYGPASADYDIDLGVFPISDYYYQTADRLVEYTKQNGPPPANNILFNGTAKHPTTGEGEYANVTLTPGKRHRLRLINTSVEAHFQLSLVNHNMTIITADTVPVQPRTVDSLFIGVGQRYDVIIDANQTPGNYWFNVTFSESSGCGEVLSPDGETPVYPAAIFHYAGAPGDLPTNPGGPVRDHKCLDLIDLKPVVPRKVPVDGIGTVGSLDIHLETTPYFKWTINGSAIDVDWQNPVIDYVINQNTSFPPEYNVVEVEGKSNNHWTIWLIQNDMESGFSLPHPMHLHGHDFYILGRSPQGSVRRGRTFEFNPARDAAQLNGNLPLRRDTAMLPEGGWMVVAFMTDNPGAWLFHCHIAWHVSWGLSVTYLERPGEILKDIPQADLDQHNRICKEWREYWPTNPYPKIDSGLRHRWVEEGEWPVKI

SEQ ID NO: 1631 - protein, 375 aa, Myriococcum thermophilum
MRSAGLWSTALTALAHTAVAVTGAAEGFAKGVTGGGNATPVYPQTIDELVSYLGDSEPRVIMLDRTFDFTGTEGTATETGCAPWGTASGCQLALNKNDWCTREQPNAPKVSITYDKAGVLGITVKSNKSLIGVGDKGVIKGKGIRMVSGTSNVIIQNIHITNLNPQYVWGGDAITLDNTDMIWIDHVTTSLIGRQHVVLGNNPSGRVTISNSKFDGKTSWSATCDTYHYWGLYFTGSNDMITLKNNLITHMSGRSPKVAGNTLLHAVNNYWYDSQGHNFELDAGAMVLVEGSVFQNTEAPLQAGGAGRLFASSSDSSACAQYLGRACKANGFGSSGSLSGSDTSFLQYFQNKNIADATDYNTAKDVFNTAGFGKI

SEQ ID NO: 1632 - protein, 406 aa, Myriococcum thermophilum
MKPILGLIALLNFGVTTVSGHPVSGRADWPNGPLVTSGRWILDASGKNITYAGTNWPGHNDVMIPEGLQYQSIESIVEKVKSLGMNAVRLTFAIQMIDEIYDNGGEDITIEKAFVQALGQTNGIKVLNQVLEKNPQFNASTTRLQVFDAVAEELNKQQIYIHLDNHISKGMWCCSTNDGNSWWGDRGKSWPALMSIGLRNEPREPSSNPALVQSSYNWQSWYEYMRQGADAVHEANPDLLIFLSGMNFDTYLTPVVRGEPLAPGTARFDVADFAAGPANKLVLELHNYENGATSCDSLRGNLDRNGFEAMLSGGAAVNAFPVLMTEFGFQMDDRTWRGVYASCLAQYLPELKAGWTIWVLAGSYYIRSGTQDYDEGWGLLSHNWSDWRSPSYVDGALKTMVQETLR

SEQ ID NO: 1633 - protein, 253 aa, Myriococcum thermophilum
MLAKTVLGGLALASSAIAAPAPNPIEFVKRAPPAGVVIQKCSKPGVLALAYDDGPYQFTSRLVDILDAAGAKATFFWTGTLYGCIYNQADAVKKAFASGHQIASHTWTHPHWSGYSAAQIQQEMTRLEDAFVNLIGKKPAYVRPPYLETGGQVLSVLGQMGYKVITNDIDTGDWNNQSPQQSEQAFIQAGAGGNGHIPLMHETYDSTVNVLTPWIIDWAKQNNLQLVTIAECLDDPDGGYQPGNFEGNGQNFC

SEQ ID NO: 1634 - protein, 377 aa, Myriococcum thermophilum
MHLSSSLLFLAALPLGMAGRGNGHGPRTGLHALAKRAGLKYFGSATDSPGQRERAGYEDKYAQYDKIMWKSGEFGLTTPTNGQKWLFTEPERGVFNFTEGDIVTDLARKHGFMQRCHALVWHSQLAPWVETTEWTAEELRQVIVDHITHVAGYYKGRCYAWDVVNEALNEDGTYRESVFYQVLGEDYIKLAFETAARVDPHAKLYYNDYNLEWPSAKTEGARRIVKMLQDAGIRIDGVGLQAHLIAESHPTLDEHIAAIEGFAELGVEVALTELDIRLSTPANATNLAQQKEAYKNVVGACVQARGCIGVEIWDFYDPFSWVPYVFPGEGAALLWFEDFTKHPAYDGVVEALTNTTKGDGNGKGKGKGKGKGRLWQA

SEQ ID NO: 1635 - protein, 368 aa, Myriococcum thermophilum
MRSFSVAVAALFAGAVGALPARSYVTSPFPLNNGSEPVKLPNKFKWISTGPLIGPKDDERELAGIKDPSIVEIDGTYHVFASTAKAEGYNLVYLNFTSFDEAGEAPFFYLDQAPLGPGYRAAPQVFWFEPQKLWYLVYQNDNAAYSTNPDINDPAGWTAPKTFYPSRPQIIDDNIGEGYWVDMWVICDDDNCHLFSSDDNGHLYRSQTAVADFPEGMSDPVIALEDPDRFRLFEASCVYTIKGGTGKQKYLLLIEAIGTDEQRYFRSWTSDAIDGEWIPLADTEENPFARANNVEFADGEAWTRSISHGEVIRTLTDQTLTIDVSEPLRFLYQGLDPAKDEGDYNSLPWRLALLTQQTNVTAARWSRA

SEQ ID NO: 1636 - protein, 477 aa, Myriococcum thermophilum
MRLTGGFFSAVTAIAAWLAAPAVVASPAVSYHNTLIEQRADPHINKHTDGWYYFTATVPEYDRIVLRRAQSIQALQDAAETTIWRRKPYGVGSGQVWAPELHYIDGKWYIYVALGVANEWRIRAAVLEGTGDNPLTASWVEKGLIRTNWDTFSLDASTFVANGTRYLIWAQQEPSRPDENSSIMIAPLENPWTIRGTAVAISRPTLAWERIGYKVNEGPYVIQRNGKIFLTYSASATDANYCMGLLTAEEGSDLLDPASWSKSQEPILTSNEKTNQWGPGHNSFTVSEDGLSDILVYHDRGYRDIQGDPLNDPNRRTRVQKLYWKEDGTPDFGVPVPDGDTPVRLRSAAGSGQYVTYYTGSGSPTGTPASLPDTQFRIARPGLAGGDTVSLESTSNPGMFLRRADGGGAQFESSDTLDSASAKAAASFNLVPGLADEEAVSFEASDASGQYLLLEESGRLVTAPAEDTREQATFILE

SEQ ID NO: 1637 - protein, 229 aa, Myriococcum thermophilum
MKFLSLLTATGIAAALPTSPAEVSNAGEIEARQLSSTRNDLENGNSANCPKAIFIFARASTEPGNMGISAGPNVASVLELAYGDDIWVQGVGGPYEARLIDNALPAGTTRAAIDEAKRLFNLANSKCPDAAVVAGGYSQGTAVMSNAISELAGTATQEQIRGVVLFGYTKNLQNRGRIPNYPTDRTKVFCNIGDLVCAGTLIVAPSHFLYTTESLGEAPRFLRSQIDAA

SEQ ID NO: 1638 - protein, 326 aa, Myriococcum thermophilum
MKFLWTATIAALAGLVAASPTPTVNIDGQIYKRASPDDVCDIGYASTNGGTTGGSGGTTTTVSSFDELSAAAKGDDKKIIIVDGSISGSGSVRVGANTSILGKAGASLTGINLTIKGVSNVIVRNLKLSRVVDGDCITVQEATNVWLDHLDLSGDLNADKDEYDGLIDITHAADFVTVSNTHFHDHWKASLVGHSDSNADEDTGTLHVTYANNRWTNINSRTPSIRFGTGHIFNNYYENILASGINTRMGAVVLVESSAFVSAKRAITSIDSDINGSAAVVDVDLGGSTNDAPVANSPPSIPYQYSVVGSANVRDATAQSGATLSF

SEQ ID NO: 1639 - protein, 467 aa, Myriococcum thermophilum
MYPNLLTLAAAVLVAKATGQQVGTYTTETHPRMTRQRCSSGGSCTTVNGEVVIDSNWRWVHDKNGYTNCYTGNEWNSTICTDNNSCAANCAIDGADYSGTYGVTTSGDALTLKFVTEGSYSTNIGSRLYLMSGSEKYRMFTLLGNEFSFDVDVSKLGCGLNGALYFVSMDEDGGKSKYSSNKAGAKYGTGYCDAQCPRDLKFINGEANVSGWKPSSNDENAGVGNYGSCCSEMDVWQVVYPTSLFLLEANSISTTYTPHPCTTVGQHRCQGDSCGGTYSADRYGGTCDPDGCDFNAYRQGVKNFYGPDMTVDTKKKFTVVTQFIKGSDGNLAEIKRFYVQNGKTIANPSSTIQGNTGNSITPEFCRTQKTAFGDRDIFNAKGGFPQMSKALAAPMVLVMSVWDDHHANMLWLDSTYPVDAGPNVPGKARGTCSTSSGVPKDVESNQANDQVIFSNIKFGPIGSTFKQ

SEQ ID NO: 1640 - protein, 396 aa, Myriococcum thermophilum
MFSKLFTTVALAASLVSAQTFTDCDPTKRDDCPNPKAVGSKPVDIDFRQGASNFFKAADGTSLTYDKELGAVFSINKETDAPTITSSKYIFFGQVDVTVRAARGTGIVTSFVLQSDDLDEIDWEWLGADNTQVQTNYFSKGCTETYDRGGYSPVADPIGQFHTYTIKWTPEQLDWIIDGNVVRTLRNEGLEGCAGYPQTPMQIKLGTWVAGRKDAPQGTIDWAGGLTNFEEAPFDGYYQSLHIVDYMGGRGAKEATEYQYTDRSGTWQSIKVVNNGEESDDDDDDNTTTTTTTTSSKTSATSTTSKATSTSMSSSSSSSSSSRATPTTLSTVSTSATPSTSDIDSPTPTNGPTSTVGREVEATSAVSQTVSTGAAPTMGGNLAAVGAAALLGALAL

SEQ ID NO: 1641 - protein, 560 aa, Myriococcum thermophilum
MLFASLLLGFLAGVSASPAHGRNSTFYNPIFPGFYPDPSCIYVPERDHTFFCASSSFNAFPGIPIHASKDLQNWKLIGHVLNRKEQLPRLAETNRSTSGIWAPTLRFHDDTFWLVTTLVDDDRPQEDASRWDNIIFKAKDPYNPRSWSKAVHFNFTGYDTEPFWDDDGKVYITGAHAWQVGPYIQQAEVDLDTGAVGEWRTIWNGTGGMAPEGPHIYRKDGWYYLLAAEGGTGLGHMVTMARSRKISGPYESNPHNPVLTNANTTSYDVGTAVSWPKGEWPAFTPVSGKMSVWPMPRPHKDIRGVGPLVNSPDPEHLTFPRSGPLPAHLTYWRYPNPSSYTPSPPGHPNTLRLKPSRLNLTALNGNYAGDDQTFISRRQQHTLFTYSVTLDYAPQTAGEEAGVTAFLTQNHHLDLGIVLLPRGSATAPSLPGLGSDLDKDAEYESGSEGAREDLIPHVRFRGESYVPVPPPAVYPLPRAWRGEKLVLEIRACNSSHFSFSVGPAGRRSERRVVMEASNEAVSWGFTGTLLGIYATSNGGNGTTPAYFSDWRYTPLEQFRD

SEQ ID NO: 1642 - protein, 354 aa, Myriococcum thermophilum
MAWLRSVILGSFITLLLPWTGLVFGLAIDFTGHSGQVAARADPNLAGYLGVFFLGADPYVYFYLSNGNNPVSFKALNGGSPIIRPTKGTGGVRDPTIIPGGGSEAGKKWYIIGTDLDIGKTTWDAAQRTGSRGIFVWESTDLINWGNERLVEVEDATAGMVWAPEAIWDPEKGQYLVHWASKFYSTSDPGHTGSPSNIRIRYAYTSDFTTFTAPETLIDKNPTNIIDLTFLPLNGTESNSFLRFMKDETLKTVFVEVSDTGLFGTWTRPGGDSAIIQQGVEGPAAYWDNTTPGKAHLLLDFYGEDGYRPFESTDPGSNSGWTGSDRSAFPRNLRHGSVLPIDQAAYDALNAQWG

SEQ ID NO: 1643 - protein, 340 aa, Myriococcum thermophilum
MSSFTSKGFLSALMGAAMVAAHGHVTNIVINGVSYQGFDPFSHSYMQNPPTVVGWTASNTDNGFVDPASFSSPDIICHKSATNAGGHAVVAAGDKIFIQWDTWPESHHGPVIDYLADCGDEGCEKVDKTTLKFFKISEKGLIDGTNAPGKWASDELIANGNSWMVQIPSDIAPGNYVLRHEIIALHSAGQQNGAQNYPQCFNLQVTGSGTQKPSGVLGTELYKADDAGILANIYTSPVTYEIPGPAIIPGASAVEQTTSAITSSASAITGSATAAPPAATTTAAPTTTTAGSDVTATPSTGGSDSSAQPTATATSSTPRPTRCPGLKKRRRHARDVRVSL

SEQ ID NO: 1644 - protein, 756 aa, Myriococcum thermophilum
MKGTSVLRLLLAAVAAVAPADAATAWKNVNIGGGGGFVPGIIFHPKEKGVAYARTDIGGLYRLNPDDDSWTPLTDNLGTHENWGRWGIDAVAVDPQDADKVYAAVGMYTNDWDPNKGSIIRSSDRGATWEVSELPFKVGGNMPGRGMGERLAVDPANSDILYFGARSGNGLWKSTDGGVTWAQVESFTNVGTYVPDPSDASGLNSDVIGLAFVTFDSTSDVVDGATSRIFVGTADNETASVYVTEDAGATWSPVEGQPGTFFPHKCVLQPEEKALYLSYSDGAGPYDGTLGAVYRYDLASGNWTDITPASGEDLYFGFGGLSVDLQKPGTLIVATLNSWWPDAQIYRSTDSGATWSQIWEWTAYPDMNWYYGLYTDKAPWINAGFISQDTKRLGWMIEALEIDPHDSDHWLYGTGLTLYGGHDLTKWDTETRNVTISSLAAGIEEMAVLGLASAVNGSELLAAVGDDCGFTFQKSEDLDTPPQTPWMNPIWATATDVDYAGNEPDHVVRVGNSEGSPQVAVSEDGGVTWQAHPGADDTITGGTLAYSADGDTIVWSSGSAGVLRSQDQGSFAAVDSLSSGAVVAADRRNNTVFYAGSGASFYRSTDTGATFAEVPSAFGGDGSEVTAVKDIAAHPVVAGEVWVATDAGLFRSTDFGATFSAVGSDSITNVIQVSLGKGDGSAWNVYAFATGPEGTKLYASADEGATWVDIQGEQGFGSLTANRLVGSGNVANQVYVGTNGRGVFYAQASFSAAAKN

SEQ ID NO: 1645 - protein, 509 aa, Myriococcum thermophilum
MMPLTKRAAAAVALLLSGATAQESSTTTSPAPSACATLTPAYSPPVVAKGWKAQLIATGLTRPRGIKFDSNGGLLVIEQGVGLTHLTLDDNGGTCVSVAKNTTVIEDSRLNHGLELSEDGRTLYVSSFEYVDRYDYDPDAISVGEPTRLIVNMTNPGGGHSTRTLLLSKAQPDLLVVSRGSATNLDPLAIDQSTGVSHIRAFNISDAALGEEPYNYPSDGILVGWGLRNSVGVGEHPVTGGIWSVENSADNVARLGQDVHEDNPGEELNYHGLLNDTSLLGANYGYPLCFALWNTTDFPSQGDLVVGSQFSLDNDATANDTYCAESTTPPRLTFRAHTAPLDIKFLPGNGSRAFISFHGSWNRDVPAGYRLAYVPFSDEDGQPADESDSRAAARDILSPPDVTQCSNAGACFRPVGLAFDPPAQRLFVTSDATGEIWVVLRDGEEEEEEEEGREGLEERETATETSDQPGSTSEGAAMPRAALRGLDIKAWLIVALLTVWMMFVGTLVF

SEQ ID NO: 1646 - protein, 533 aa, Myriococcum thermophilum
MRGLVAFSLVACVSAAPSFTAETINGEHAPILSSSNAEVVPNSYIIKFKKHVDESSASAHHAWIQDIHASREQVRQDLKKRGQVPMLDDVFHGLKHTYKIGEEFLGYSGHFDEETIEQVRRHPDVEYIERDSIVHTMSVTEESCDGETEKTAPWGLARISHRETLGFSTFNKYLYAAEGGEGVDAYVIDTGTNIEHVDFEGRAKWGKTIPAGDADVDGNGHGTHCSGTIAGKKYGVAKKANVYAVKVLRSNGSGTMADVVAGVEWAAKSHLEQVQAAKDGKRKGFKGSVANMSLGGGKTRALDDTVNAAVSVGIHFAVAAGNDNADACNYSPAAAEKAITVGATAIDDSRAYFSNYGKCTDIFAPGLSILSTWIGSKYATNTISGTSMASPHIAGLLAYYLSLQPASDSEYSVAPITPEKMKSNLLKIATQDILTNMPKDTPNLLAWNGGGCNNYTAIVEAGGYKAKKAASDETDVEASVSELEKLIEDNFEVVSGKFVKGASSFAEKVEKFSEKMHELLEEELKEFFEDIAA

SEQ ID NO: 1647 - protein, 616 aa, Myriococcum thermophilum
MKNFVPFAALAAGVSATFIHAPPFTCPANTDNQCTDKQKPGFSWDDLDFGDFFDYGGFHFRGWKCEDAGGSRGRFAPRTFKKVIGGTCHADKSQSPSFGCGPDLDRFSLGSIHVKPEFDCDLEFHYDMPDGSICKHRSPCSRSGTTVHNTQCGGAKNVTIIYPPQPDKPKPTCSIQVPTISFDCSTASSTLPPKTKTSQTAGATTTPPAGDTTTTTSAVETTPTSDAEVSSTSTGQTGAPPVQTSVTLVPGNNTTIPIPGVSSTSTVSPGEETSSSDSSSVATPTPGESSSDSTVIVPPVTKTVTTSFDSTSTIFTTSTQTITSCAPEQSADCPANSVTTTVVTIAISTTVCPVTETRTTVRHRLGCVPPGDATTTAVGSDVVSSAAPVETLPCPAIVPSCLNTFLFSVGCSDNTDAACYCPDATFVKNVYDCLYAHGENDAIIAEAIAYFQGICGGWVSENPAIATGATITTYITVTATPTVAPVYTTVTVDVTTVVPCTNDAGEVIPSSSTTVTVSTSLTVPQVGFSPGPSDDGDVNVVPITTATGSPAVPTTVTPPAGNGPVFTGNGTVTGITTPTFTSSPSPTDTPVVVGGSGRVTASFGLAAAVALLAFAL

SEQ ID NO: 1648 - protein, 1015 aa, Myriococcum thermophilum
MLSRTLAVVAFAVAPTIATTPAVNVYWGQKGTASDRLSTFCDASSFEYVTVGFINKSPEKDPSALRYPGSDFSVHCTNIAKYQDTEGVDSNLLRKCGQIAADVRYCQKKGKKVLLSIGGEWNPPKTDYSISSPPEGEYFADFIWGAFGPYTENWKDKPRPFDDFFNADEGEEHFVFDGFDFDIEHKFEDQSGYVAMIRRLRALTEKDTTKQYLITAAPECPLNPDYFKMKTIIDTCQFDALFVQFYNNPVCAGVDNNNFDDWVEYLAKTPSKNAKIFIGLPGSPEAAGSGYLAPGPAFQLINKHKDKPAFGGVMVWDAVYGSQKFGGIPFYDLMHDFVCGAPSHTTTAPAPTATATVCVKWHTVVSGDTCYEIAGSYGISLDDLYKFNPGITCNLQVGDQVCVRFGVPILTSSLSSSLTSTETLASTSTTSSTSKSTSSTRGSAISTKPSTSSIRTSASSTGSSTSPTGTSTKTSASSIKSSSTTLASPTKAPTSSAKPSTSSIKTSASKTSTSSTKTSASPTKTTTSSTKAPTSSAKTSVSKTSVSSTTTSTSSVRTSASSTKTSASKTSASSTSSITSPTRTSTSSARPSTSSIKTSVSSTKTLTTSTSLSVRPTTSTKPSTSSSPSTSPVSVTSATSINSPSITSASATSTSTGVDDSCPDEETSTSTAATSTEPVTLSITESVTVSATETTTGSVTETTTGSATETTTGSVTETTTGSVTETTTGSATITLPPQSTSTSSEALASTSTNDDDSCPDDETSSSSATETATVTFTPGFTSTGGEAVTSTSAVDDEASTSAIVSATQITTSSGVTITGSSVSDISTTASSTASSESWTTSTIYTTTTYTVTSCPVTVTDCPGKIGQVVTETIAVSTTVCPITEGAEVGPSTSASSPPAPIESGSGAKPPFPTGGESENTDSTSTARVTATRFTTLTVPKSEATGSAVNTSSSPSSPSLPQSSSLSRSPSAGLPIKSGSPAPPSVTTIPVFAGAGRNAVTLGMPAVLAVVLVLAF

SEQ ID NO: 1649 - protein, 250 aa, Myriococcum thermophilum
MASKVVIVTGASRGIGLAVAQSLLASSQNVVLVSRSADRLQQLKDLFPSQVAFLAADMTAADTARRAAELAILTFGRIDGVVVNHGVLSPIARIENASIEEWKKLYDANFFSALALTKEAIPHLRASKGRIVFVSSGAATGAYTAWAAYGSSKAALNSLAKHIAVEEPDITAVAISPGRVDTDMQKELREKGSEMSKKDYDTFVADFNEGRLNKPELPGGVIAKLSLDAKPELSGKYFKWDASELAEYRR

SEQ ID NO: 1650 - protein, 276 aa, Myriococcum thermophilum
MISIRTLALALAAAVQVAESASPGCGKNPPSSGNKYVTVNGKQREYILQLPDNYDAQKPHRVVIGYHWLDGSMYDVANGGFYDLRSRAGDSTIFVAPNGLNRGWANMGGEDIAFTDQIVDTLLNDLCVDETQFFATGWSYGGAMSHSVACSRPDVFKAVAVISGAMLSGCDGGRTPVPYLGIHGAADDVLPIDFGRQLRDQWLQTNGCQYQAAQDPAPGQQAHIKTVYTCSNAPVTWIGHGGGHVPDPTGNNGVKFAPQETWDFFDAAVAAAKAKN

SEQ ID NO: 1651 - protein, 214 aa, Myriococcum thermophilum
MLRTSVFGLVAALLGTAFAANEVVQDPDTGLTFTSNYQLFSLSEGITFRVAIPDDAQPNTAFDAVVQVVAPNQAGWVGLAWGGSMTNNPLAVAWENGGSVVVSPRWASGHVMPTESSNGGTYRVFQTGTKSNGTHWQYTALCQGCTAWTTSSGGSRYLTPSGGNRLAFAYSSTKPSSPGSSSSSISIHSVHGYWDHDFAAARNPNFHDVVQNLV

SEQ ID NO: 1652 - protein, 332 aa, Myriococcum thermophilum
MKSTFAAALAALAAQKVAGHATFQQLWVDGTDYGSTCVRLPPSNSPITDVGSRDFVCNAGTRPVGGKCPVKAGGTVTIEMHQQPGDRSCNNEAIGGAHWGPVQVYLTKVDDASTADGSTGWFKIFSDSWSKNPSGGSGDDDYWGTRDLNACCGKMDVPIPADIASGDYLLRAEALALHTAGQSGGAQFYMSCYQITVEGGSGTASPATVRFPGAYSASDPGILVNIHAALSSYTAPGPAVYSGGTIREAGSPCTGCSQTCKVGESPSAIAPGSGSGDGSGDGNGDGSSPGGCTVQAYGQCGGEGYTGCTECAPGYTCTAISPPYYSQCAPSA

SEQ ID NO: 1653 - protein, 263 aa, Myriococcum thermophilum
MPSWSTIIAAGLATSGAYATPVEVARQATPTVYLAGDSTMARTGNGLMGWGEYLANYITLPVVNKAISGRSARSFTNEGRFAEIESLVQTNDIVVIEFGHNDGGSPNGADDNGRSDCPGEGDEICYSGKTGEIVYTFNHYVEAAARSYIAKGAQVIISSQTPNNMWEGGTYNNAPSRFVGYAAKAAQNVGSGASFVDHFQAVGTMFWRLGNEATNALYPQDHTHTSPEGADLVAQAFVQAVSLDFNGTTPLKEYLKTPVPEVF

SEQ ID NO: 1654 - protein, 250 aa, Myriococcum thermophilum
MKIPLITSLTSALLAVSATAAPAPAARQAKPAAFFLAGDSTTAVNGGWGDGFVALLRNGAIGENKGHSGATTASFVGGGDWASVLDLVESNKAQYDCYVTIQFGHNDQKSTSGISISQFQTNLENMARDVEQAGGTPVILTSLTRRTFTGGVLDDSLADVSEAARKAASAAGVALLDLNKASKDFVQAIGQDAADRYNLADGDRTHLNPHGEAVFARIVADLVVGWKEELGEYITPDPEMSDKIARGEYV

SEQ ID NO: 1655 - protein, 609 aa, Myriococcum thermophilum
MAKTLLWLLLCSCLSQVSWAAKARETLRLTWGEGAPNGRPREMIFVNDQFPGPNLIFDEDDDVEITVYNDMLRNATVHWHGIAQTGTPWSDGAIGLSQKPILPGESFVYRFKASPPGTHWYHSHERMSLEDGLYGGIFIRPKQKLNGLWPQISKNPKDIKAMERAARDPKLMVLSEWTSFTSEEWWKAVEESGMLIFCVDSILLNGQGEAYCPPHEFLINQTNPGPKQTSFPNQNVTDKGCFPITAEGIQGPWVRNQSDITKVPNHLQWGCLPSSGSNYTLEVDPADRWVSLNFIATGSNKQVDFSIDEHTMWLYEVDGAYVEPQEFVAAAISSGERFSVMVKLDKKPGRYTIRLPDSGATQVISGFGEMVYKGGENSTRQSIPYVTYGGMSALPITDEKSYTPYDLASDTMTPWPRVRPAPVADEEYLLVMGRANSSIRYTMNAKYLYPPGLQADRPLLFYPNDTLGTVDENLVIRTRNGSWVDLILEVATLPGDELAFQHVMHKHGSRTFKIGGGVGPWRWNSVAEAMAAEPESFNLENPGYRDTWMTPFVTEIAGGYWTIYRYQVTDPGPWLFHCHFELHMMGGMSMAILDGVDAWPTVPPEYQIT

SEQ ID NO: 1656 - protein, 194 aa, Myriococcum thermophilum
MVSFSSLAIFGLSLAARVSATILQNGQVRETSFPDTRIDPADYSFKTYPANATEISYKGRWDSKYVSWWSAPGIKFGFTGKTVAITFGSLTDNGVLVGYRIGGLDWIFTNITAGATHLLVSPETPCINETGPINPWTFEMRVSNWAYGVQIDSVHVAPGEKLVKIPDFGRRIEVIGDSLAAGMYTTYEGLSSWA

SEQ ID NO: 1657 - protein, 416 aa, Myriococcum thermophilum
MRLSLLLYGAALSLKEALATPPHDSPGEGPDENGKYWIYGEGIAAAFIPYGASISNLIIEDKNGIPRDLVMGFDKASDYANDESHPHLGGVPGRYANRIKNSTFEIDGKTYRVSANENPTAEHPDGLNTLHGGKEGWDWRDFEVVAHTNESITFSIVDPDGKEGFPGEVISYITYTMGKLTWDAKMVAIATTKKTPIMLSSHTYWNLDGFANDETDTILNHTFHLPYSGQRVDVDNILIPTGKILPNPKGSVNDFWSAPKQIGDGFNDPEIHGNCGFNCTGYDNCWLVNRPGAHDWRADGAYVASLSSAWSGIRLDIYSDQDAFQMYSCNGQDGTFPLKSTQGVRGHARRNTDDGHANEPARTVPKYGCIVLEVEDYIDGINHPEWGRLEKQVFGPGSDPYVLQISHRFSVDKGDA

SEQ ID NO: 1658 - protein, 708 aa, Myriococcum thermophilum
MRAVSLLLVLSSLAEAVPVGQRRRVVQSFNVHRNKSSDTTPLQVGNGNFAFGADVTGLQTFKPYAIMSTWGWHNFSLPTTPGQTSTDDYTGVQLWTHGRLVTYEIPNPNQSDISNWLRENPHRLNLGRVGFDFGRDNVTEDQLKFKSQELDIWAGKLSSFFVYDGHPVRVETWADPDSDTVAVNIKSSLLRKCLGLFFDFPYPDKEKFNAPFVGQFNLTSQHSTALERLSRDSARIRHTLQNMTYYVHISWDGHGRVTGPAEGSHRYFFTSPQTNVQLTITFSPSTRNPHPTTYHRVTSASRSWWRTFWSTGAFIDLTSVRHDPRARALQQRIILSQYLTAVNSASDYPPQESGLVNNGWHGKFHLEMALWHALPFARWNHFPLFWRSIPNTYARLLPSARARAKKQGYAGARWGKMMAPLSVAPGGPSAPGDINALLIWQQPHPLYFAETEWRAFPNRTTLERWDEVITATADFMASYAWRNATTGRYDLGPPMYPVSENTDPMATRNPTFELAYWRFGLDVAARWKERQGKPVPGEWVRVRDGLAPLPMVDGTYAVYEGVEGMWTSNATTNDHPAMAGIYGLLPPPASGEPLDMDALNKTAGKIRELWALDYSYGWDFSMLAMNSLRLGDPDQAVEYLLHPIFQFDDAGYPVGGSRVPTPYFPNSASLLIATAMMAGGWDGSEGSTGHWPKSWEKHVRVDGFTPAL

SEQ ID NO: 1659 - protein, 357 aa, Myriococcum thermophilum
MKWTELSLASASLFGVTAVAKLTTKVQVGQQVIYSYPGETPPDHLFDLIRAGEVGGIIIFGDNVNDALPSTVEQFFAAYRESPAYAELGSPFLIMTDQEGGQVRRLPGAPVESAKEVGQSADPAAAAEEAGAGAAATLSEYNMNANLAPVLAVYREAGDFTDRYERSFGNDTTVVGECAAGFVSGQQAGGVLATAKHFPGLGAASADENTDARPVTINVSLDELRAVDEAPYRDAIAAGVAMVMPSWAVYPAYDADWPAGLSSRWIRVELRGRLGFDGVIVTDAIEAGSLKSFGDDANRALLAKQAGVDLILAAGRNVTQGETIVAALAAAVESGELAQQDVDASSTRIQKVRAKLA

SEQ ID NO: 1660 - protein, 200 aa, Myriococcum thermophilum
MVTLNSLVTAAGMALLASQKAFAAQLTRVDYPNNATSRAEMYIYVPDNVVESPPLVVVVPQQYFQNAAIPWKQGSDSKGYITLWPSSPNPGTCWDVSSPQSLQRGGGGDSTAIANMVQHALDEYGADPARVYLTGGSSGAMMGNVLAATYPDLFQAVSIYSGVPAGCFVSSAGQVAAWNNTCSGGQSRASPEQWYVLISL

SEQ ID NO: 1661 - protein, 291 aa, Myriococcum thermophilum
MLARSLFWFATSAATCLAASLQEVTNFGDNPTNIQMYIYVPDQLAANPPVIVALHPCGGNAQQWFSGTQLPSYADSNGFILIYPSTPHMSNCWDIQNPDSLTHGQGGDALGVISMVNYTLDKYSGDSSRVFAMGFSSGGMMTNTLAGSYPDVFEAGAVYSGVAFGCAAGAESATPFSPNQTCAQGLQKTGEEWGNFVRNAYPGYTGRRPRLQIFHGLDDTLVRPQCAEESLKQWSNVLGVELTQEVSDVPSAGWTQRIYGDGTQLQGFFGRGIGHQSTVNEQLLLEWFGLL

SEQ ID NO: 1662 - protein, 220 aa, Myriococcum thermophilum
MVSFTALLTAVAAAVSTTASPLEALKRGIQPGTGTHDGYFYSFWTDGQGSVDFNPGPRGSYSVTWNNVNNWVGGKGWNPGPPRKVAYNGTWNNYNVNSYLALYGWTRNPLVEYYIVEAYGTYNPSTGAGRLGTIEDDGGVYDIYKTTRYNAPSIEGTSTFDQYWSVRREKRVGGTIDTGKHFDEWRRQGNLVLGDWNYMIMATEGYQSSGSANIEVREAS

SEQ ID NO: 1663 - protein, 343 aa, Myriococcum thermophilum
MRFSVLSGIITNALSVSAGTILWDGRFNDLSSSTDLEKWSWGNQVGPYQWYIHGPSSVTAYVNLSPDYKNPADSGSKQGAKITLDDTAYWNGQNMRRTELIPQTSAPINQGKVYYHFSLMRKDTNPPATTREHQIAFFESHFTELKSGLLSGAPGESDSLLRWCVGGQTQWSTEWEADVWHNVAYEIDFGANTVGFWHSTGSDPLTQKVAPVSASTSSNGADWHVGVLELPRSGYPDTVEDIYWSGVYIESGSITTNIAGPGAPSDGGNSTTSITTALPSTTFTTSTSSTTTSSAPATSTTSGSGGCTAAQWEQCGGINFTGCTTCAAPYTCNFINDYYSQCS

SEQ ID NO: 1664 - protein, 787 aa, Myriococcum thermophilum
MKLFSRIGATALAATLSLQQCAAQMTEGTYTDEATGITFKTWTAAEGAPFTFGLALPADALENDATEYIGLLRCQITDPSSPSWCGISHGQSGQMTQALLLVAWASEDVVYTSFRYATGYTLPALYTGDAKLTQISSSVSEDSFEVLFRCENCFSWDQDGATGSVSTSKGNLVLGRAAAKDGVEGATCPDTAEFGFHDNGFGQWGAALDGATSESYEEWAQLATIEPPTTCDGDGPGEKVCVPAPEDTYDYIVVGAGAGGITVADKLSEAGLKVLLIEKGPPSTGLWNGTMKPEWLEGTDLTRFDVPGLCNQIWVDSAGIACTDTDQMAGCVLGGGTAVNAGLWWKPHPGDWDDNFPDGWKSSDLAEATERVFSRIPGTWHPSQDGKLYRQEGFEVISTGLANDGWKEVDANAEPSEKNHTFAHSVFMFSGGERGGPLATYLASAAQRSNFNLWVNTSVRRAVRSGSKVTGVELECLTDGGFNGTVSLNEGGGVIFSAGTFGSAKLLLRSGIGPEDQLEIVASSKDSETFTAKSDWINLPVGYNLIDHLNTDLIITHPDVVFYDFYEAWDEPIPEDKEAYLEERSGILAQAAPNIGPMMWDQVTPSDGIPRQFQWTCRVEGDSSKTNSTHAMTLSQYLGRGVVSRGRMGITTGLTTTVAEHPYLHNDGDLEAVIQGIQNVVDSLSKVSDLEWVLPPPNSTVEEYVNSLIVSPANRRANHWMGTAKLGTDDGRNGGSSVVDLDTKVYGTDNLFVVDASIFPGMVTGNPSAMIVIVAEQAAQRILALRS

SEQ ID NO: 1665 - protein, 294 aa, Myriococcum thermophilum
MRFRIFSPLLRALLFAHRGQANIERQEPYYTDIHTNIRFYGHAEPGGYLFGLVISERPTTDFIAQLVVPLNHSKGWGGVSLGDSMIGPLLLVTWADGSDVMTAARIANAHSAASVVPYTTSPITISPIRAGAFANNTHVFSTFLCGGCINNHSFDPNGDGDVFFGYAYSRTAVADPSDIDTTLSDHTGKGGGYGGFSVALGRAKSAAYYRYAQMAEIGDYGVKPEPPRPPATPTTSTPAPIPNPTPTDEWRSGCNEDECGLATEPDYNHEKVSWPLLFGLVTIAVIYFLQPFIS

SEQ ID NO: 1666 - protein, 394 aa, Myriococcum thermophilum
MKYVQSAALALAATALAAPSRTTPQKPRQAAGCESAVTLDASTNVFQQYTLHPNNFYRAEVEAAVEAISDSSLAEKAAKVADIGTFLWLDTIENINRLEPALEDVPCENILGLVIYDLPGRDCAAKASNGELKVGEIDRYKTEYIDKIVSILKEHPNTAFALVIEPDSLPNLVTNIDLQTCQDSAAGYREGVAYALEQLNLPNVVMYIDAGHGGWLGWDANLKPGAEELASVYKAAGSPSQVRGISTNVAGWNAWDEEPGEFSDDSDAQYNKCQNEKIYINTFGAELQAAGMPNHAIIDTGRNGVTGLRDEWGDWCNVNGAGFGVRPTADTGDDLADAFVWVKPGGESDGTSDESAERYDDFCGKPDAFKPSPEAGTWNQAYFEMLVKNANPPL

SEQ ID NO: 1667 - protein, 539 aa, Myriococcum thermophilum
MELRSVVRLLVLSASIFAPGVLSAFGYTSSGNNYVIDAGSSNPLVFSVSKSSCDINSIKYRGTELQYSKTGTHIGSGLGSATVSVSQISGSSRYIKVTCVTSTLTHYMVVREGESIIYMATYITAEPSVGELRFIARLLPDKLPYEYPYGEVSTTSGSSATVEGSDVFIVNGQTRSKFYSSTRFIDEDSHCVYGGSDLIHVCIMTPQQESSSGGPFFRDINSNNAGDSTNLYNYMNSGHVQTEAFRMGLHGPYAMQFSRSGIPSVKNLDVSWFGEVSVTGYVPASGRGTVQGTASGVQSGMEGVVHWYNDNAQYWARTSSNGAFTSPLMKPGTYTMVLYQTEFKIATATVTVSAGQTTRQDIAGNFNTSRNTLFQIGEYDGQPTGFRNADKFLRMHPSDSRMDNWGPLTYTLGSSQLSDFPMAVFKEVNNPVTIKFDLASAPGAATLRIATTLSFAGSRPQATVNGWSGPIPAAPTKIDSRGVTRGAYRGYGEIYTVDIPAGTLVAGTNTITINSVSGSSGDGFLSPNFIFDAVELYTA

SEQ ID NO: 1668 - protein, 368 aa, Myriococcum thermophilum
MVAPSVLVLLAGLAWPAVAAPATESSRATKAGLRLIKTSPEDPGQWVTEEQKIRDFKSKRIGFIDITDITDPEVLAALSEPDSPNGNNTISTQAVSYPSSVSHQSEANPLVAAVSTTNPKSWLKTLTESSYGTEAGSWLFNTIKSVAAANPSITVTQFTHSFNQPSLIAKIPGTTSDLVIVSAHYDSTGGSSTARGPGADDNGSGVVVLLEALRVLASAGFKPKNTLEFHFYGGEEGGLLGSQAVFSNYKSAGKSVLAVVNQDMAGYSPSGKLSIYTDYVDSGLTAYTRVVANAYIGSTTSDACGYGCSDHASARSYGFPAAYVCDEPMDTSTPYIHTPNDAYSTIMWDAVLRHAKFTVAFLVEASYL

SEQ ID NO: 1669 - protein, 107 aa, Myriococcum thermophilum
MQLLQSVARVAAFLGLARRQFEPDSSPYEDPETGLTFASYTSDSGITYRVAIPDPVPEDKVYDTLLQVVAPKELGWVGWAWGGSMTYNPLTVVWADGDNVVLSSRIA

SEQ ID NO: 1670 - protein, 281 aa, Myriococcum thermophilum
MRWPLAALLVSALAAGQALAKLTFTVEATRNGVPIPASEIRMEPFEPGRTRMGPVKDAPRGRQQKMRRSNPQADSANWCGTVNRAPFGKGIQLAHGTFQHPSCYIRPEHPFPQAAASWVGIDGDTYRDALLQSGTVCKIENSTGVVIHEAWWQWVPEVAFTINSMPVAPNDWFEVTLNTTSTTSAEVTISNLSQGQTYSIRIQSGPVLARVDVDWVIERPYYGTALAGFPTFTDVWFDDARATLTDVPPSLLGVQGAKQYQIPGLCASQEWQSWQEVSWSL

SEQ ID NO: 1671 - protein, 762 aa, Myriococcum thermophilum
MRLLPALLAVAGFVETVKGHWLGEISHQGFAPFAGANYPVFRNVKDYGARGDGVTDDTAAINAAIEAGNPCNRGCASTTQTPAVIYFPAGTYLISSSIKPAYFTQLIGDASSPPTLKATSDFAGFGLIDTNPYYTEVLNWKSQNVFFRQIRNFVIDTTNIPPATAATGIHWPTSQATSLQNIVFNMPATSDVVHVGLFMEEGSGGFLTDLEFNGGATGASMGNQQFTMRNMRFNNCKTAIIQIWDWGWTYSGLSINNCQVGIDMSNGNTMNVGSVTLIDSTFTNVGVAILTSWTENPNPATVESLVLENVVLDNVPIAIQGPNGRTLLAGGSTTIDGWGIGHSYGSSGPNPFAGPITPNPRPGILLNNGRYFTRSKPQYEDLPVSSFLSVRSAGAKGDAATDDTAALQNAINTAVSENKILFLDYGIYRVTNTISIPPGARIVGETYPVIMSSGAFFDDIDNPKPVVQVGKPGEQGRVELTDFIVSTQGRQAGAVCVEWNLASDPGNPSGMWDVHVRIGGFTGTQQQVAQCPKTPGNPAVNDNCLVAYLGMHVTKGASGLYMENVWIWMADHDIDDAQNTQITIYAGRGLLVESENGPLWLWGTGSEHFVLYQYQFVNTKNIYMGQIQTETPYYQPTPNALVPFPAVSALHDPDFEAQCAGVEGNCAAAWGLRVVDSSDVLVYGAGLYSFFSDYSTACSTFDAGQTCQQRITSIEGDATNVNLYNLNTIGTREMLTRNGARIAWFADNQNTFASNVAVYKSN

SEQ ID NO: 1672 - protein, 362 aa, Myriococcum thermophilum
MMIRYVLLLFLTLAWPWVSQAFPDIDESLTGGFSPTDTQRPTGRLLADIRNLPDTSLSPAGWMIKNILLGNRAVVSPQDLTAIYTVPGPLNSTECRRETCCVWKHITEVMAASFRDGIGRCNELARQAIRLGFHDAGTWSSSSGDGGADGSILLAPKELARDDNHGLEVVGAQMAAWHGEWRIHGVGMADLVQMGAAVAAALCPMGPRPRVFVGRNDSATPAPRGRLPTADTSDAAALEALFSDKTISLSELVALVGAHTVSVQRFFDPLAAGSSQDSTPGVWDTLYFNQTARSDPPEGVFHFPSDLALSRYPAVRELWQTFANEQAMWNDNYAAAYLRLSLLGVEHINDLTECTGVLPLPS

SEQ ID NO: 1673 - protein, 303 aa, Myriococcum thermophilum
MLNNWRTLAPLGAILLPLASAITLPSTVTTTIPYIGTCTTTTTLNPCHGHVTVVIQTPIHVPACTTTTVSTTTSSTATPTPSAGGACLLINPFCRPEGLDIHYYPNPFYGYSHNLSSSYYITQGLSPKDSSLTNRTFFPQTTPADEGGRPRIFPDPAHPNGYYVVGLTRGTNGGVVVDANNFTVVYQGFYRAPETGTYNICSSADNRNEVFFGDDNAFDCLSGKTPAASKPIIISTGGSYQNRVVCRKVDLQAGFYYPIRSVMGNAQGPSAFNLTIQEPDVAFGQRTNNWAGHVYPHKCGFFL

SEQ ID NO: 1674 - protein, 409 aa, Myriococcum thermophilum
MRRLTSKLLAASLLAATSTAAPRRSDFVTVEGGIFKLSGKDFHFAGSNAYYFPFNGNQEDIEKGLTAAKEAGLSVFRTWGFNDKNSTYDPNGLPQYGGEGAGPTEVVFQRWYPNGTSIIDISGFDKVVEAAEKTGIKLLVALTNNWADYGGMDVYTVNLGGRYHDDFYTVPEIKEAFKRYVNAVVTRYKDSPTIFAWELANEPRCGADGVRNLPRSPNCTPEVLSSWISEMSAYIKSIDSNHLVTWGGEGGFNRESDDWSYNGGDGGDFDHELSIETIDFGVFHSYPDWWDKTVEWTHQWIRDHAAAGREAGKPVVHEEYGWMTPEKRLEYTGKVDNRTRVEVLGGWQKTTVEEKLAGSMYWQYGYSDYSYGRNHDDGFTIYLDDEEARPLVYGHAKDMNSLNVRRGRK

SEQ ID NO: 1675 - protein, 405 aa, Myriococcum thermophilum
MKHAYSTLLAGLYWSWIAKALDNGVGLTPHMGWSSWNVAQCNAASAKYALDTAEKFISLGLKDLGYEYINIDDCWSLPYRDGNGKLIPDPAKWPDGIKPVVDRIHELGLKFGLYGCAGEKTCAGYPGSDGDRYAASDVAQLVEWGVDFWKYDNCYTPCLDNPPPQTCGRPAGNTQQWYAPMRDAILSVQDTRKIHFNLCNWGRDNVWEWGYDYGHSWRMSVDNWGDWESVERIGSAAAGIYEYSKPGGFNDLDMLYLGSPKLNTNQERLHFGLWAITKSPLVLGLDLNTISDSTLEIIRNKGLIDINQDSLGKAATTFTPPGQPGPEYGKIYPYWAGPLSDGVVIGLCAAGGAGTYAVDFKDVPGLGDGSYSWEEMYTGETGTGTGISFNIDQYDMRVIKVKTDG

SEQ ID NO: 1676 - protein, 507 aa, Myriococcum thermophilum
MRTPAVSLLAFALPALATFGHGHGGPPVFRPLVSSGALQSLIKKDDLLAGAQELQDIADAHGGNRAFGSSGHNATVDFLYYTLKAWDYYDVKKQPFKEIFASGTASLSVDGEDIKAETLTYTPAGEAKDTPIVEVANVGCEAADFPAEVEGNIALIKRGECTFSQKSINAKAAGAVAAIIYNNEEGSLQGTLGEPFLEYAPVLGITLEAGKAILAKLADGTVTATLKIDAIVEERLTYNVIAETKEGDHDNVLIVGGHSDSVPAGPGINDDGSGIIGILAVAKALTKFRVKNAVRFAFWSAEEFGLLGSYAYMRSINSSATEISKIRAYLNFDMIASPNYVYAIYDGDGSAFNLTGPTGSDVIERNFERFFKSKHAPSVPTEFSGRSDYAAFIENGIPSGGLFTGAEVIKTEEEAKLFGGQAGVAYDVNYHQPGDTVENLDLDAFLLNTKAIADAVASYSVSFRGIPRVDAKKRRWDAFRARMLKRSTGSHGHAHFHSGPCGGGATI

SEQ ID NO: 1677 - protein, 356 aa, Myriococcum thermophilum
MAPNTLSFAAAALALASAAQAQCGAGSPDATVTGSGGSYTASVGSNQVYSGSDYREAIQSALDSISSGQRVAVMADGSIGASTITITSGKTFEGCGTIDVGNNAGRGAIEATDASDVSIPYLTMTGNPYFGLRFSGMRGLRLGTITMNLSGGLGIRFDRDRAPSSDVTMDVITVTGAGSHAVETWNIDGLEINKVIARDVGECGLLLQTTTNAHVGLVDGENVATGNGYATFRMANNNGQKSDGSYDTNVYVDKVVSRGGGRGIFCVSQSGGAEIAEVDLANNGNNAILIENCYNVNIKGGRVNGGGEVRIAARSEFPNTRDVSITLQVDGTSVRESPCGENIHWSITGNAQQNIC

SEQ ID NO: 1678 - protein, 326 aa, Myriococcum thermophilum
MKANLLFLAPLAVSAAPAVEKRQAAESIDELIKAKGKLYFGTCTDQGLLQQSQNADIIKANFGQVTPENSMKWQSIEPQQGQFTWGQADYLVDWATENNKTIRGHTLVWHSQLAGYVQNIGDPNTLTQTIQDHIAAVMGRYKGKIYAWDVINEMFDEDGSLRQSVFSNVLGEDFVEIAFNAAREADPDTKLYINDYNLDDPNYAKLTNGMVAHVTKWRQAGIPIDGIGTQGHLQANQGSSLAQAIKALAAVDVEEVAVTELDIQNHSTNDYTAVVQGCLDEPKCVGVTVWGVRDSDSWRPQGNPLLFDSNYQPKASYDAIVQLLKQ

SEQ ID NO: 1679 - protein, 250 aa, Myriococcum thermophilum
MHRYAFLALLPAALARVPHAVRAAVTTTLPPSAGATATSAPITVGAGQTFDGGMKNFDRSPRVCAEQNETGEDDAMFVLEDGATLSNVIIGPNQAEGVHCKGTCTLINVWFEDVCEDAITLKQSSGTSRIIGGGAFHADDKIVQFNGFGTVEISDFFASDYGKVARSCGNCENNGGARHIVINNVVAVDGGVLCGINTNYGDTCTISNSCQNDGKSCDRFNGNNNGDEPDKLGSGPDGQFCIATNLSESC

SEQ ID NO: 1680 - protein, 347 aa, Myriococcum thermophilum
MFLLGLLAAAPAAVQAQFSTTMLRFGCSQLTVDRIDPLVEPGNVPSAHVHQIVGGNAFNASMPTEDISKLASCTTCTFSQDLSNYWTANVYFRARNGSFKRVPQMVNEMIGDANAGITVYYTAPGPNTVTAFKPGFRMFSGDVNRRESTGLGSRIQSCFRCYDAPNFGGNIYAPCSDPERDTESFPTKPCPGGIRSSVIFPICWDGQNLDSPNHIDHVAHPIDGPAPFAIVDGQCPESHPVKIPQVHYEVVWDTTAFNDPAEWPEDGSQPFVLSTGDPTGYGQHGDYVFGWEGDALQHAMDNRCFGPTCNGLSTQGFDQANACTIPPVVNEDMEGWLDELPGGHQIM

SEQ ID NO: 1681 - protein, 359 aa, Myriococcum thermophilum
MFLSTLLLAALAEALPQFPGSGNGPTMLRFGCSQLVIDRIDPLVTPGQLPSPHMHQVVGGDVFNVSMPEDDIGALASCTTCSYAEDRSNYWTANMYFRARNGSYKRVPQIPNRLLFGDEFTTKTNGGFVVYYVSPGKGGVTAFKPGFRMLTGEASQREKIGEGRKSQSCFRCYTGPNWGGDDLAPCADPNLDSEELPNKPCHGIRSNVLYPTCWDGKNLDSPDHKSHVAYPIDGPHAFDGMGVGGQCPESHPVKIPQIMLEIVWDTTQFNNPEDWPEDGSQPFVLSMGDHTGYGQHGDYVFGWQGDSLQRAMDGGCLGATCADLKTQTVEEANKCTVPTRVNEDVDGWFDHLPGLPVPN

SEQ ID NO: 1682 - protein, 541 aa, Myriococcum thermophilum
MRLSFTALAASFAFAPLAAAFGGHGMRMDVGPDDVSDADLQKRAALRGWGTFDQLIDHSNKSLGTFKQRYWYGTEHWKGPGSPIYLISPGEQSGDGFNRTWLTSQRLSGLMAKETGGAIVILEHRYWGESSPYTNLTEENLKYLTLENALKDHIHFAKTFVPPFDKSGNSSADKAPWIFVGGSYSGALAGWLAAKEPGTFWAYYSSSGVVEAIGDFWQYFVPVQEATPKNCSSDVGLVIDYVDYVLTHGSKKKKQALKAKFGLKELNDADFAATLEWGPWQWQSGQFYSEYQPFYLFCDYVENVWPNSTHKVPGPHGVGLSKALDGYAKYIKEQIIPGACEAAGYPEWKGEYNIECFKNSDPDNVAYKDLSLDNWINRQWNWMLCNEPFEWWQDGAPRNRSTLVSRLVTADYWRKQCALHFPNGGYSLAEGKRAKDVNKWTGGWSVTNTTRAMHTNGQYDPWRDATLSSKFRPGGPVQSTEQLPVRVVKGGMHCSDLYGANWEVNDGVKNLALDATEQMTEWVKEWYEEKGLPVPWDRSRN

SEQ ID NO: 1683 - protein, 437 aa, Myriococcum thermophilum
MARGVAFLGLASLLAGAAKAQTPGEGEEVHPKITTYRCTKADGCKEQTNYIVLDALSHPVHQVDNSYNCGDWGQKPNETACPDLESCARNCIMDPVSDYSQHGVSTEGTSLRLKQLLNGNVVSPRVYLLEENKENYEMLKLTGNEFTFDVDATKLPCGMNSALYLSEMDASGARGELNPGGATFGTGYCDAQCYVTPFINGLGNIDGKGACCNEMDIWEANARSQHIAPHPCSVAGPYLCEGEECEFDGVCDKNGCAWNPYRVGVTDYYGEGGEFQVDTRRPFSVVTQFHANDEGKLESIYRLFVQDGQVIESYVVEQPGLPQTDRMTDEFCDATGSTRFMDLGAMEAMGDALSRGMVLAMSIWWSEGDNMNWLDSGEAGPCDPDEGNPSNIVVVQPDPEVVFSNIRWGEIGSTYESATGNTTASARKVKSRRFRRF

SEQ ID NO: 1684 - protein, 235 aa, Myriococcum thermophilum
MYISNLVSALGLAGLALASPMEVAKRQGEKLRIMPLGDSITEITCWRAFVWDQLAQAGLADQVQYVGSQNSNPVGCQPQTANWDQHHEGHSGWTAVDIANNWLAGWLQSTPADIVMFMLGTNDVVGGTSTDQIIAAYTKMVETMRASNPNIKIIIDLVIPLPFMNAPIEAINARIPEWAASLNSTESPIVIADCYQGFTNSMLRDGIHPNLQGDELIASRVGPLLLDYVKQSLGQ

SEQ ID NO: 1685 - protein, 285 aa, Myriococcum thermophilum
MRVALALLALYSSLACATPAPAYPGFKLVWSDTFPGAAGATPNKKKWNIITDVQTNDEVQHYSTSNKNLQISGGDTVQLVPFKNSKGRWTSARIETKKAFTPKKGKLTMFEATIRFGDTPAIHKQGMWPAFWLLGDSIHHGTPWPRCGELDIMETVNGLPTAYGTTHCGNGEKGGPCNEPFGRGGAVPLLDYDWHTWSLQIDRTNKEGGWKAETIRWLLDGNVFHEVRGSDIGDQAIWGTLAHSPMFIILNVAVGGTWPGAPNALTADGYGSMMEVEYVAVYTSS

SEQ ID NO: 1686 - protein, 396 aa, Myriococcum thermophilum
MKLLGLAALLHLALAAPVIKPQGLQLIPDEYIVKLKDGVSESILENAIRQLQGSKTKHVYRAGRFKGFAAKLNQQLVEKLSMLPEVEYIEQDTVITTQTIVTQEDAPWGLARISHRELGPTSYVYDDSAGEGTCAYVIDTGIYVDHNATTLTLQPQEFEGRATWLTNTIDSSDSDGNGHGTHVAGTIGGKTYGVAKKTKLFAVKVLNAGGSGTASSVIAGLEFVANDAPQRVASGECPNGTVGNMSLGGGRSDAINAAAAAAVDAGVFLAVAAGNNGGDVSLISPASEPSVCTVGATDDADIRAYFSNYGSLVDIFGPGVDVLSSWIGGPDATNTISGTSMATPHVAGLGAYFLALLGYKDPEALCEYIKETATIGTVTDIPSDTINAIAYNGATS

SEQ ID NO: 1687 - protein, 878 aa, Myriococcum thermophilum
MRDATGTASLFYRLTTTLLLTFLLAPGLVRARPHLVRQADDSGRQRISLNEGWRFSRFTTNPDSLSYDSLKSWILPSANNFIKGNKHEPPSGTPPGSNVEFVQPDFDDSDWEAVDLPHDWAIKGPFNAPGVSGGMGRLPSNGVGWYRRTLTKAPEDNGKAIYLDIDGAMSYAAVWLNGRLIGGWPYGYASFRLDLTPYLEDGDNQLAIRLDNALDNSRWYPGAGIYRNVWLVKVNPTHIGQYGTYITTPDVSEEEATVQLAVEVENSGSSDSTVDVVTEIHVLDPATGTPGEEVVAEFEKATVTVPAGGKESVNSSAVVTNPRLWGPLPDQKPNLYVATTKLTLNGTVIDTYETPFGIRTVTFDPNEGVSVNGKLVKIWGTCNHGDLGALGTALNKRALERQLEALQEMGSNALRTSHNPPAPEFLDMADRMGFLVLDEIFDTWADQKTTNDFHIIFPDWHEPDLRAFVRRDRNHPSIIAWSYGNEIPNQSGSAVGNIARELRGILREEDPTRPSTAAMNSAGPGDPLPDTLDIIGLNYQGEGYGTSTDGSFDRFHAAYPDKVVWSSESASTLSTRGTYLFPVTSGNHANVGDSPGQGGDGSNYRVSAYELYATSWGSSPDKVFAAHDAHPYVAGEFVWTGWDYIGEPTPYDSARSSYFGIIDLAGFKKDRFYIYQARWRPDLPMAHLLPHWTWPDRVGEVTPVHVFSSGDEAELFVNGESAGRQKRGQGEYRFRWDDVVYQPGNISVVVYKNGEEWARDAKWTVGEAAALNLTADRTEIGGDGLDLSFVTVAVVDENGDTVPQASNEITFSVSGPGQIVATDNGDPADMTEFPSLTRKAFSGLALAIVRADKGASGEITVTASAEGLESAEVVIQAA

SEQ ID NO: 1688 - protein, 250 aa, Myriococcum thermophilum
MKLRTLFGALLAAQPTVWAKQIFKNQGTLDGWGDKQTEHKGEIKEVSDVFYDEPPALVMTQTYDESYTGRYHSEVRVYDAYKHGDTRFYGFAFRLPADWQFEPAQSYDLAQFIAPFDQCDSYMPSTMFWAEGTKLFTRLKTGSVCDQKTTKLPLNVTLTAGEWHKVVIEAHWTSDSTGHFRLSYDGEQVVDVQNVPTTVSEDVPFQFRVGLYANGWHDDNGMKGTQGFRQVFYDKIAIATTKEEADPDSW

SEQ ID NO: 1689 - protein, 656 aa, Myriococcum thermophilum
MAPSMLRLGATALACASSTLAGEIYQLKESYNPSNFFDKFNFFSSPDPNQGFVQYRSREDAANLGLIQSTEDEVTMKVDSTNVAEGGRSSVRIESVNTYNSGLFIADFSHFPKPACGAWPAYWMVGPNWPGDGEVDIYEGWNLNTANKVVLHTDGPDAVGSCTVNPEDFTASMRYSNCWYEAPDQPGNTGCAADQADGTFGSADGAVYATEWSETGFRVWSWTHDAVPSDVKSGQPDPSTWGKPVFAAGGNTCDVTKAFKDMRIILNINFCGDAAGGLWGETCQAKTGEAQCAQYVQNNPKAYEQTYWKIRGIDVYQLETAEPSTTTVSSTSTTTSKSSTSTTAASSSTTTTDGTTSATSTKSTAQTSTTASETFTSDATTDSATETVTSTSTGGVATETATETESECSDDVSETATAGPTDTLTEGTVTATPTGSFTEVTATASTTEFTTSTIFSTVTSTITSCESTVVDCPGRTVTSVVVISTTVCPVTDVKPTETGVPDTSAPGAGTPSTDVPGTGVVPTSSVTAPGGSFGNETTFRTLTTASRTTTVVVPRPGNNTTTSGGSTTATTTTGGVPSFVTPPVASSSDALDEPVQPPQPTTDTEAPVPPVEIVTSPTPSPTTSGFPPIVTAGAGRVAARSAVLMGVGAVVALANL

SEQ ID NO: 1690 - protein, 246 aa, Myriococcum thermophilum
MKLSLFSVLAAALTVEGHCIFQKVSVNGADQGSLTGLRAPNNNNPVQDVSSEDMICGQPGTTSDTIIEVKAGDRIGAWYQHVIGGAQFPGDPDNPIAPSHKGPVMAYLAKVDNAATAAKTGLQWFKIFEDTFDPSSKVWGVDNLINNDGWVYFNIPECVADGNYLLRVEVLALHSAYTPGGAQFYQSCAQINVSGGGSFTPSQTVSFPGAYDANDPGITINIYGAAGEPDNNGQPYTAPGPAPISC

SEQ ID NO: 1691 - protein, 419 aa, Myriococcum thermophilum
MAVVIVVAIYLLVSQLFPSYSASLRAVRASRAKTPLLSVDFPDPCIVQDEHTGTWYAFATGGWWTPTTTTTTTMTVKSNSSRNRSIGSADGTTAAVYRNIQAASAPHPEGPWTYLASADPLPSAGAWALSGPEAQVWAPSVARLNGSAYVLYYAALLAPGYAAGRRGNGAGTDGNNHNNNNASSSSSSSSSPRVHCIGAATSTTASPLGPYRPQPEPLICPTADGGAIDPAAFTDPATGRRYVVYKVDGNALGHGGECNNGVSPSRRTPLMLQEIEEEKGVIRPVGPAVEMLDRDADVDGPLVEAPDLLYWDGDGGSGKYVLFYSNHCWDGPGYSVNYAVAEGNITGPYTRMAGGNDNSGSGSGTALIGTGDPFSVTAPGGAATVPGGDWLLFHANCPQGRCLFGAEMEVVDGRITIIK

SEQ ID NO: 1692 - protein, 343 aa, Myriococcum thermophilum
MRLSWVLVGAWIALAKSHKGHNFKTLVTFGDSYTDNGRLGYYINHGGKAPPPGTMHDETTTTASGGLSWAQFAARDAGATLMDYAVGGAVCSNKVVSRYFDAINRTFPAIFDDELPSFEADVFFRSLYPHRTAENTVYAVWIGTNDLGWGAFLSDSQTPGKTISDFVSCVFSVFDRVYKTGGRRFVILNAAPLELAPLYAPPENGGTLDSQFWDTKSKYNMTEYSQKIREYSTSVNTMLEYGVPVMASLKNRWPRATVDIFDVHSLFSDIYNEPTKYLDEPHNVNGYYHQCEPAGSPCVDQPGPLNGYMWFDELHPSNKTSSIIAQNFIDVVAGKSKYGRRFR

SEQ ID NO: 1693 - protein, 373 aa, Myriococcum thermophilum
MLFTKAVSGLALLAGLVAAHPGHDASKEAAERRAYLQNAKRTSLAHCADKLRARGTEARNIARRKAVVENARQKRGITKRDFGDVLDTNHNKTTEGYTPETDPATLFAGYNSCLLTPEVTQGPYYVAGEYVRENVVEDQAGLPLLVEYQVVDVATCEPVPEVYLEIWHCNATGVYGGVVAGGNGDSSDQSNLDNTWLRGIQPTDSEGVAQFETIFPGHYIGRTTHIHVMVHTNATLQANQTLGHENYASHVGQAFFDQALIDEVEKLEPYTSNQQPLTTNEGDFIMAQESATDGVDPVMEYTLLGDDLSDGLFAWLAFGIDTTRSEPVNPAVYLEEGGGRPNPNAGGPGGPFPTGFPTGGFPVPTGNARRAQN

SEQ ID NO: 1694 - protein, 795 aa, Myriococcum thermophilum
MLLNRRLLVAGVAGLWAATGVQADCSSDLVIDDFTEWLTGLNNLGSENGDDATMTAIAASPGRVVFIPKDDDSYFYESFPCQQAASEGYTAIEFPVLGPEGGSFAFELQTTFNCDQEGSYNSSWTEVADLTGEWQTITLPLEGWDNEPNYDGIVGLVWSTFSENGIEWSVGNVTLVCGGGGDGGGDDDDEGEQSSTVDTQPTATSATPTEDPTSSPTSPPDTCSNLLIDDWASQSRLTFLGYNALLQTSSDDASMSSVVVSDNRLTLTPGEEYSYFYSQFGCLDVSEQYGGISFSVKAERRTSFSVTLAYVTECGSQREESITKSTDELDWTFDGTEKLYSVPFSVFEDVDTSKLTMIYFDDFSGPVTFGPMSFYCGSKPSEYELPSETPTAPDVTVTTTAAPAPTKTMVIDTFGDPETNDLGQWHGADEEGITTDFGNNVMVIRTNDSDLAWYTQLTEDCLDLGAYAGGYLHIAYSGSNKFSIALQQHNADCDPDIKPYPETWDSLEAARYASDEDIYIPINHFNVDLSRVIGFALKGFYSAEPTELTRIEIVDELPGNWPDIPPKLASGRLVFSCTRPNSFAFAIDDGDPSLADRVMEIVQQADIPVTFFTVGLPLLDTSNGLADIYKTMAARGHQIAIHSYTHPPLEGLPSDAAIDWEYVNDLGAVRQVFQESNTPVTTRYFRPPFGTEGARMRQRLAANLDDADPYLVQWSVDVEDWLWAESDTPEKQLDAFKRDVAAGGNLVVMHYLYNSTVDLLPEFIEVAKATGKRLMRVDQCMEDPNAPPLDDEEEE

SEQ ID NO: 1695 - protein, 215 aa, Myriococcum thermophilum
MATGPATGTRSTTTTGAKTRPRAAASAPGSTAAAPAASPGTPPGTWQGGENNVKSFANCGLQVPQGRTISSINNLQTSISWSYSNTNIRANVAYDLFTAADPNHDHSSGDYELMIWLAKYGDVYPIGSSAGYVNVAGQDWELWTGYNGAMRVYSFIAPSPRNSFSANVKEFFNYLESAQGFPASSQYLLIFQAGTEPFTGGETTFTVNNFSASVA

SEQ ID NO: 1696 - protein, 813 aa, Myriococcum thermophilum
MKASVAWCLAGMIAVASGQNEPFQSYPDCTKPPLSEIKVCDRSLSDAERATALVEALTEEEKLQNLVSKSLGAPRIGLPAYNWWSEALHGVAYAPGTQFRNGPGDFNSSTSFPMPLLMAAAFDDALVEAIGHVIGTEARAFGNAGWSGLDYWTPNVNPFRDPRWGRGSETPGEDVLRLKRYAASIINGLEGRAPSSSPFPGEGGGEQQQQQQPPRIISTCKHYAANDFEDWGGHTRHDFDAVIGAQDLAEYYLAPFQQCARDSRVGSIMCAYNAVNGVPACANSYLMETVLREHWNWTEHDNYITSDCEAVYDVSAHHHYAETNAEGTGLCFEAGMDTSCEYEGSSDIPGAVAGGFLTWPTVDRALTRLYRNLVRVGYFDGPESPYASLSWADVNQPESQELALRAAVEGIVLLKNADDTLPLPTEEDEDGNAVLAGNVAMIGFWADAPQKLFGGYSGTPAFAHSPVYAAKQLGWNVTVADGPILEGDDAEDTWTGPALEAAADADYIVYFGGLDTSAAGETKDRTTVSWPAAQLALIKELAGLGKPVVVVQMGDQVDDTPLFELEGVGAILWANWPGQDGGTAVVRLLAGVESPAGRLPVTQYPANYTDAVPLTDMTLRPSETNPGRTYRWYPTPVRPFGFGLHYTTFKAEFGPHPFFPGGNGNETTASRIKARTRQAAASTPIEDLLSGCDRTYRDTCPLPPLTVRVTNEGERTSDFVALVFASGEYGPEPYPIKTLVSYARARAVEGRGGDATLSLDWTVGNLARHDENGNTVLYPGTYTLTLDEPTQASVQFTLEGEPVVLDEWPALPE

SEQ ID NO: 1697 - protein, 777 aa, Myriococcum thermophilum
MRFLASTLFLASAALAADHGRSSLEDAVYKNPKASIEDRVADLLSRMTIEEKASQLLQGDIRNWMNEATNELNQTGLEWSTRVRGSAFYVGVPVANEWLSKHIKAAQDYIQEETDLGIPAFVQTEGLHGLLAHNATIFNSPIGLGCSWNPSLIEEMAAAIAKEARALGVNQLFAPVADLARELRHGRVEEMFSEDGYLAGEFAHAYVKGAQSAGVSAMVKHFAAFGVAEQGLNTGPVHGGERELRTIYLPPYKRAIIDGGVYSIMTAYHSYDGIPAVSDPHLLTDILRDEWGYKYFTMTDAGASDRLCVDFKMCASSPIDKEAIVKYILPSGGDVEMGGGSYSFEKIPELVTSGTIKEELVDIAVARVLRAKFELGLFEDPFPGLPIEEANKVIHAPEHVSLARKIDEESIVLLENHNNVLPLSKNASVAVIGPMAHGYMNYGDYVIVNSSTRGITPLDGIKAASRGKVTYAKGCERWSNSQDGFSEAIAAAEAADVAVVVVGTWSRDQNELWQGLNATTGEHVDVNSLDLVGAQEALVRAIIETGKPTVVVFSSGKPVTAPWISEHAAALIQQFYPSEQGGAALASILFGDVNPSGRLSVSFPHSVGDLPVYYDHWNSGRSTSPDAGIAYENGTLVFGHQYVLGDPRPLYEFGYGLSYSKFEYSDVSVDKTTVGPEDTVTVTVSVKNVSNRDGQEVVQVYVKDLVASVVVPNIRLRGFQKVKLRAGESKQVSIEVKVQDLGVWDARMRYVVEPGDFLFLVGASSNDFRGNVTVTLK

SEQ ID NO: 1698 - protein, 851 aa, Myriococcum thermophilum
MLATAILLIVSYGAAEAAAKWDASRFAWYTTDAGDDFKSALPIGNGRLAAAVYGTGTEKLALNENSVWSGPWLDRVNPNSKDAFPRIREMLIAGNITGAGQEALDNMAGIPTSPRAYQPTANLTIDFGHNSGTSDYVRWLDTFQGTAGVNYTYNGISYSREYVASYPHGVLAFRLSADQPGKLNASFSLSRSQWVLSQSASVDDGEGWHTITLSADSGQASEAITFWSEARIVNAGGTVATDGSIISVVGADTVDVFFDAETTYRHQDAEAAGTELKQKLDAAVAAGYAAVREAAIEDFSGLMGRVSLDLGSSPPSVGEQPVPIRLNNFRQNPDADPELMTLVFNFGRHLLAASSRDTGPRSLPANLQGIWNDRYDPPWQSKYTININIQMNYWPALVTNLAETHEPLFDLLMGAAIPRGRAVASAMYGCEQGFVLHHNTDLWGDAAPVDRGTPYTVWPMGGAWLAMHAMEHYRFTRDRDFLAEVAWPILREAAHFYHCYLFEWDSYWTTGPSLSPEHEFIVPPSMATAGADEGLDISPEMDNQLLYQLFTDVTEACALLGLVSNSSSSDDAETCTTTAKTYLPRIHPPRIHPTTGRIQEWRSPEYSDTEPGHRHFSPLWGLYPGRQLTTSTDLLEAAAALLDHRIESGSGSTGWSRAWAAALYARLPGREGDAWRHAQQLVATYLLDNLWNSDSGPGSVFQIDGNFGFVATLAEMLLQSHETVPAPSLARGPPAQSSGGDGSDDVGRGRGLREEQEREEVYVVHLLPALPGDEVPDGQVDGLVARGGFVVQELLWRGGKFARASVVSQTGGMLKLKVQGRESGFAVDGVSYDAEKGIETTVGGVYEITPF

SEQ ID NO: 1699 - protein, 280 aa, Myriococcum thermophilum
MNRLRSMMPSATQTWTFAPLSRPYTPSPQRRRLEGIVFDVDGTLCEPQTYMFAEMRSVLGIPKSVDILEHIYNLPTEEEQHRAMEQIRNIERRAMEHQVAQPGLTELMAYLDSRGIRKGICTRNFETPVQNLLSKFLSGTVFAPIVTRDFRPPKPDPAGILHIARSWGLVRRSTGEAGIPSDPAAEEERRSAAEEGTRARSGEADHPNLVQTQVGEEVADASGLIMVGDSIDDITAGRRAGAKTVLLVNDVNRHLADHEHTDLTITRLDELIDILENGLL

SEQ ID NO: 1700 - protein, 300 aa, Myriococcum thermophilum
MKSAVFVASLLASLAAAQPHGHGHGHAHHHRRREHSHNKRGVITTWVTETVYETVTAYVDDTTTQLIMPSTKVTSTTISTETTPEPSPGVFIPEPETSSTSSSTTTTTTVQAPPTSKVVPPPPPPPPESPTPKPPKPSPTTLSVVVPPLPTSSLAPPTYGDGDDSDDGYGDSDDGYGDGDGDGDGGDDGSGGSGGQVIRTGEITYFALGLGSCGFDDSGKDHSENIVAVSSSLMGAQSNGNPLCGKTITVKANGNTAQAVVHDKCPSCSVNDIDASEHLFLDLFGSLDIGRGEIEWYFNE

SEQ ID NO: 1701 - protein, 439 aa, Myriococcum thermophilum
MRLIQIAASAAALLFTGANADIPQLPVPQSCSGVTNSRFQYTTASGWSAFKIAGGLKQVRTIVWDTEGNMLVAESGRGISVHSFGEDGCINSTSMLIQANQLNHGLALSPDGKTMYASGETGVYSWSYDPVTRSISNQKTLITGISTGIHFTRTIAAVPDSDLILVQVGSNSNLDMATQDPSAGRAIIKVFDAAAAPANGYNYNTDGEVFAYGLRNTIGFVPDPSGVYWGVENSGDDFARTENGQRIDIHQDNPAEELNNLGNPLDPERRNVWYGYPTCFTVWDPSPFSGLKTGDQFVLSPSATFNDASCVENGSVPPRLSFQAHSAPIWNTFNADGTKMYVSFHGSWDRQPPTGFKVVEIPFQKLDDGSYEPVAAADSQDGYTEIFGAPNPESCTANGLTMSNCLRLTAAAWDPSGRGLFVGSDNSAEGEIFILTPSA

SEQ ID NO: 1702 - protein, 471 aa, Myriococcum thermophilum
MAKKLFINAALAAAVLAAPVIEERQNCASAWAQCGGSGWQGPTCCASGSTCVAQNEWYSQCIPDSQVTSTSTTQGTTSTTSTITTPTTTTTPPITTSWSSIPGGATSTASYSGNPFSGVQLWANDYYRSEVHNIAIPSMTGSLAVKASAVAEVPSFQWLDRNVTVDTLMVQTLSEIREANAAGANPPYAAQLVVYDLPDRDCAAAASNGEWAIADGGADNYRGYINRIREILIEYSDIRTILVIEPDSMANMVTNMDVAKCSNAASTYHELTVYALKQLNLPHVAMYLDAGHAGWLGWPANIQPAADLFAGIYNDAGKPAAVRGLATNVANYNAWSIDSAPAYTSPNPNYDEKHYVEAFSPLLNSAGFPARFIVDTGRNGKQPTGQEEWGHWCNVRDTGFGVRPTTNTGHDLVDAFVWIKPGGESDGTSDTSAARYDYHCGLSDALKPAPEAGQWFQAYFEQLLVNANPPF

SEQ ID NO: 1703 - protein, 480 aa, Myriococcum thermophilum
MVFPTRASSLLILLGAASVQAQQRQSLWGQCGGEGWTGPTLCVEGAYCYEQNPWYHQCIPGTGPSTTSSLPSQPSTTQSQPSATLSTSTVTSSPPTSTTSAPGGGTTCPSIPSGLGTPVSNALNDPFTFHGGGKVSTKADWTCRQSEISELLQRYELGTLPPKPSSVTASFSGSTLSITVSENGKTISFSVTINNRPSGSGPHPAIINFGLFGGLPVPSGVATIMFNNDEIAQQQGQSSRGQGKFYDLYGSGHSAGALTAWAWGVSRIIDALELTQAQTNIDPIRIGVTGCSRNGKGAMVAGALEPRIALTLPEESGAGGSGCWRIANYQKSQGQNVQTSTQIVQENVWFSPNFNNYVNNVDALPFDHHLLAGLIAPRAIYIMENSDMEWLGKVSTYGCMGIARKQWEALGALDHFGYSQVGGNSHCSFPSSQQGSELNAFIGKFLLNNPNAGNTNIFRSTGNPNFNIDSWSPWSVPTLS

SEQ ID NO: 1704 - protein, 245 aa, Myriococcum thermophilum
MSRMLLQLLLFLPSLVLGHGGIWNYSIANEWRPGFFPYYPAEGQSSIQRHWIDFSPIKDLKAPWLVCNNPGDYAEEYATIDAGTEIGAYYKGWPHDIGPIVVWMAYCGSEPASCSSFNGTGNHWFKIAEAGLLSGTIHEGVWAQKEMISNNYTWTVTIPEQLKSGAYLIRHELIALHVPFEPEFYPECAHLYVQGSGDALPGEEYLASIPGVWKEGEPELHLSVYEEPTASRTEWTIPGPPVWRG

SEQ ID NO: 1705 - protein, 305 aa, Myriococcum thermophilum
MRSIYLRLAAAAALCWTGALSAKPAVANDDAELAAALARRRIPRSNDRNRLASSNLSALGVRQEASQCGPEYGRCPGDLCCSEYGWCGDSIDHCHPLFRCQPDYGYCGWPRDPPQTSTTTPPDSSTTSSSSTTEPPSSSTTSSGSGPTPTGDLEVTPDGTCGGNYSCIGNPDFGPCCSQFGWCGSTNEFCGPGCQPDFGACIGGGLPADPPGNITTTTTPPSSTTTSTSTTTSSSSTTTSSDPAVTLPPGQTPSTDGRCGGTQNCLGSEFGRCCSQFGWCGEGDTYCGYIAGCQPDFGYCDPAPS

SEQ ID NO: 1706 - protein, 190 aa, Myriococcum thermophilum
MKFFTAALSLAAAACAAPTSTRSYTGEFGIIALRSASPIHFATLSATGNSLRLNLPQDKVDSQCVDGETHVPATLYIEDEELYLYGPEDKPKQIVYLDRSGMGQGVIQYTTKTDDPLGGRLETKGWRVDEVGNLFFKDNGLLACPLEADQGYVVRLDVGISNPHGYKDCLGFTARTVSLEEPVPCWYSSH

SEQ ID NO: 1707 - protein, 906 aa, Myriococcum thermophilum
MWVKRAAIALFLAWPTLTRAVPLVSHPGETAAIPWWDLQSSAEVGTDIEGLSQTGIETKPWHHVKTSRCTLMGCLVEAGVYNEDELFYSETLRDVDETQFLVPWIYRNEFSLHPGPGKHFFLQTHGISSRADIFLNGKQVANSSEQAGSYVGRIYDITKLVHRENALAIQVYPTNYYYDLALGWVDWNPWPADNGTGVWRDVEIKQTGPVMLEPLRVVTHLGPALGDEPANVTLKAKAHNLENHPVTITATGHIELDPHSDIREERLHHPITRHRKYTLPPRSTTEIALSVTIAKPQIWWPRQWGDQPLYTATLTVTTHNSIAPSDRSTATFGLRTVEARLDPTYEDTTFYVNSRPFQVLGAGYAPNIFLRSPPQTAAADYTTMLEYVLDLGHNTIRLEGKDEHAELYAAADRLGVMVLAGWECCDKWEAWSYNGDLAVDPVPVWDDADHAVARASMAHEARLLQPHPCVLGFLIGSDFWPDDRATAGYLDALEAADWAAPVLASASKRGYPEQTGPGGLKMDGPYDWVPPVYWWDTEPSEERLGAAFGFGSELGAGVGTPELGSLRRFLSEEDLEDLWKKPNKSLFHMSRETSQFTTREIYNAGLWNRWGAPTNLEDYLMKAQLMDYEATRAQFDAYTAMWSAERPATGLIYWMLNNAWPSLHWNLWDYYMRPAGSYFGAKAGSRVENVVFDYVRKAVWLVNRSLDKGGKRKVQVDVMDAHGKVLHKDTIVDKTVPNTSKNILSLAGPLGNVTDVVFLRLTLHDEEEPGHALSRNVYWIAKELDVLDWDGSDWYFTPVTSYSDYTALNNMTQADVAVRNVWHRTGVDVILENKSKVPAFFVGLTLVDAHGNEVLPVTWDDNYVTLWPGEKLRLRGRPLSSHAKPWEVIVKGKNVEEKKVRHRSHA

SEQ ID NO: 1708 - protein, 81 aa, Myriococcum thermophilum
MKWSTLVPSVLVPLAFAASKERRQVPDTFSQRVIFTPPEDYTDPRVLYARTAQFQDGTLLATWENYSPEPPPVYLPHLPLY

SEQ ID NO: 1709 - protein, 431 aa, Myriococcum thermophilum
MVLLLRSLTATLVVAAVTATAAAAAATAATLPALPLHSSSRWILDANNKRVKLRCVNWAGHMETNIPEGLQHRSMDAIADWIAGQGFNCVRLTYSIDHALDPTVPVSTSFAKAASAAGVPADEMAALFERVAANNPWIRAGETTTRDVLAAAVDGLYERGVLTVLDNHVSRASWCCSLTDGNGWWDEAAGYNDWNSRFFDTAAWVAGLEAMATWARDHPGVAAMSLRNELREFPLLQNLDPARPDWYTFVGRAGAAVHAANPDVLVIVGGVQSSTDLSHLRLVGGPLDTSAWPGKHVWEMHAYSFTVTFPDVFNSCDVVRVEYGALSGFVLEQDKPYTGPLFLSEFGVGMEGGDKDGLSEEDDRYLRCLVSYMENNDADWAVWALQGSYYVRDAQVDRDETWGLLNHDWTDWRNPAFPAMLGKMWNMTQEP

SEQ ID NO: 1710 - protein, 509 aa, Myriococcum thermophilum
MLILAAQLSLFAVFLVICLAYFAFLVPPRHPTNIPAVPFWVALIPFFKDVDQSDIFRKYIERPLRTHGAVKLFFGAQWNILVHKPSYLAMIFKEEDIYQKSGNQKKIPHSVLAHFLGDNIISSHGEVWRKYRSVVQPGLQRDFDARVIARNAERLCGLLRDAQFRARDGGVPVQELLQRYSVANCSEVVLQIKLTTLTSASAPIHLLQTEVKREIFKPIFMNFPVLDRFPFPSRTRARRIVDGFKHELRRALVESHAKGAAPVSSASSDGLGQRMLDARESGLWNEKQLLDNLTVTFVAGQENPQLCMISTLYLMAKHPESQAKLYTEVQSKGLLESADPDPEVLQDMPYLTSLIYESLRLFPPIGQLVNRKASEDIVLGNNIFIPKGTYLGYNCYSTNRDPAVWGPRADEFDPARWGDSTSAIQKQYRLRRARAEFISFHGGRRACLGEKFAMLEMRVTLVALVREFRWKLDPSWVDRMTPAGPLYPRALRLVFFDRRKDFGEATYSR

SEQ ID NO: 1711 - protein, 134 aa, Myriococcum thermophilum
MMLFRATIAGFLLGSLAQGSPVPTERNNIGGVLICNGPNGKGNCKYAVYELEKCYNLPPEFAKGAATFAPDNAPFYCYPYIMECGGICMSPTGCTMGAVSSDYEHKYNLTEVGWNKYITSFECHLNKTSDAYSQ

SEQ ID NO: 1712 - protein, 678 aa, Myriococcum thermophilum
MWPAGLILALAGLAAGESLKNLDTSLTILTKNDLQGPSSPDADTAVILTDAHPYRHVSDVCNKLGEQLWRPGRDTGEKNETGAPVVPFAEYLAYESAADASSKVWVNGSDFAAVDLSGRRLSVDSVSHLRLPGLCTNTAPFSNPSTQDTSPRWQISLEVNNQTLTGFRDRLAFRFLGIRYAPQPQRFAYSTLFQGSGEEVSALSYGPQCAQSGGGSEDCLFLNIWTPYLPNPNTAPQKDKKLRPVGVWIHGGGFVGGTANDPTFDGANIVSRGDMVLVAINYRVLAFGFLALKDGKSNGNYGLADQITALDWVRNNIHHFGGDKDRITIFGQSAGAGSVRALMASPEAAGKFSGAIMLSNLGGISYGNSFSEYYTIDEEIEISAKSILAATNCTNAASQVDCLRSVPASKLAAFDEARYIVIDGTYLKTRSLPVTGPRLPIRLMMGITRDDGAPFISFPTTANESTYFDRIGLPRPSRELFPITSTGNATLDLYTTASRVATDGMLRCVDQATASSLLTHGRLDHIYYYEFDRTYQLQSWPGRDVCEPPRTPSHPAGDPSKPYLRCHSGELYYVFGNLHREGLPMRDEGDLEFEQSVLDSFASFIRTGDPNPDDAWLRARGYYQQQRRHGRKGDRWEPSTKRGGLKLRVLDWPASRMSGFRDEKQCESLGLGLDYYEE

SEQ ID NO: 1713 - protein, 563 aa, Myriococcum thermophilum
MIFTVIVATVLSVLFGIRVSHVILSRREEKRRRNLEAARRGCSPAPTMPKKGILGFGRLLEGLRATHNDRGPQYVIEAIDGEMGKDVHTVVVPIHDYELLVSRDPLNIQTVLVTQAADWDVSEHRTASWEPMVGHGIFTSRGENWKHSRALIRPQFAMEQINDFDMYERHVQQLFIAIDKHHGGSRSQGWTEAFDLQPLFYNLALDVMTEMLYGYSVHSQNPSERVELPVIDGYETPDREHIGIHMDAGKAWVETRGAMWKYRWLLPSSQFRRHCAAIHKYAAWFVQLRLQQGDQYLDNLLQQGGLPNRDRYVLLHELSKATQDPVELRSQTLNVLTAGRDTTAALLGWIVYFLARHPSVTKKLREEVLRLFGPYVPGQSSGIEFKKVRDAMPYMNAVINETLRMAPVVPLNDRISLRDTVLPRGGGPKRDQPVFVPVGTQVLIPVYALAQRPDLWGPDVTIFRPERWTEDGGCKPGFEYIPFGGGPRQCLGQQLARLKSAYIITRLLQRYDDIANAEVPPDAAVKFHHTIENRSGTGVQVRLHVSNWGVTTGGVAPNPANRE

SEQ ID NO: 1714 - protein, 522 aa, Myriococcum thermophilum
MLGILALSIGLAATVAYLVLEFPRLQQSWRLWSHRSQLPPGPKTIKTGIRKPWLWFRELHKEYGDVVFLQMGPTPTVVLGSAQAAWDLLEKRGAIYSSRPRFIMGGELLSNGLRGLMAPYSAFWRRWRKLLHSGFMQRQSESYRPIQSLESKVLMHDLLTNPKDYRTHLERYAASVIVTVVYGRRVEDVRTDAVVRMNAEAMERLTSVNIPGRYAVERYPALKYIPSLFAPWKAQVLEQRKKDIKTYTGLMDDVKKRMAAGTLPDCFAKHILEEQGKLGMTDLEAAYTAGSPFSAGVETSAGSLASFLLACVKFGDNFVPKAQAELDRVVGSDRLPTFDDLLSLEYVRAVMSETLRWRPVAVLGGTPHASTADDVYKGMFIPKGSTIIAPLWSIHLNEADFPDPHNFQPERFLGQRGYPGNLGHSAFGWGRRICPGMHLASASVAINIARILWAFDVKPAKNEKGEMIDVDIFAFSDGFNSTPLPFECSITPRSEKHARVVEDEYQRALGELQQYSAAVNGA

SEQ ID NO: 1715 - protein, 421 aa, Myriococcum thermophilum
MQGLVKTALAAALVASAAAQPHHHGHRHLHAKKHDHQQLGKRDTVVVTKVVEGPTVTEYVDKAGNKIDAAEAKSELEKGEWIVVGETEPTFSAPPLIVSTSIAKPPHGGQFYEKTSSAAPTTSSSVAPKPSASSSPSPKPNGPTGLNAEFPSGKVPCDKVPTEYGAIEVPWLDTNGWTTLAKFGKWIKGVAINNIETPTDGKCGPGIMCSYACPPGYEKTQWPEEQGATGQSVGGLWCNEDGFLELTRPNATRLCQPGAGGVYVVNKLPGDACVCRTDYPGNEAMVIPLVTSPGGKYPLTNPDSATSYWWDGKPTTAQYYVNNLDVEVEEACTWRSKKFPNSAGNWAPVNIGVGKSLTGETFISIFPNKPTSDAVLDFNIKIEGEGLSGDCWLKDGKYSDGPNGCTVGMKSGGTANIVFYK

SEQ ID NO: 1716 - protein, 488 aa, Myriococcum thermophilum
MRISSFQAAIGSASVLLSAQPTSASIRHRHAHVEFARRHLHGHGHIADTRQVEEAVNATEVVARKATCTLPDHPDLVYIPGKDNNGFAMSPDQSCNDGDYCPIACVPGKVMAQWKPGTTYTYPESMYGGLYCNGGKAEKPFENRPYCVDGTGTVKAVNEAGKIVSFCQTVLPGNEAMIIPTDVTDTETLAVPGPDYWDGTAAHYYVNPPGISSAVGCVWGVITKAIGNWTPYVAGANTMANGETYVKIAWNPEYLKTPLTKIVPNYGLKIECPDGGCKGLPCTIDPSKGGINALESPVGTSGVDDANFCVVTVPKGKTANIVVFNTDSSSGGDDDDDDENDDSDDENDSDDEPESESSPEPLPSPSKTPEPPKTTRDADVPTTTAEPSSSRPESSFTTSVLSPSTTTRSFSTSTSEAFYGGMFHEQEVHGSTVSHGTTLTTAPVKAPTTSDPAKDPVLATSKNEGAAAEGGSAIAGLVVALVAAAALL

SEQ ID NO: 1717 - protein, 421 aa, Myriococcum thermophilum
MKPTALLGAALAAAAIPAGVHAHCSSATQQPIPVVDDLTEPKELTDLFETAKKAIIEHLRVEEKAARARGETPRCTADKLIFRREYGSLSKEERLAYINAVKCLQSKPPRTPASVAPGARSRFDDFVVTHIQQTLDIHYSGIFQPWHRWFVYQYERALRDECGYEGYQPYWDWPKYASAPQDSPLFNGDPYSLGGNGEYVPHDGPVIVPPEGVSGGNISLPAGEGGGYVRTGPFANMTVNLGPVGGLADTAPGPQGGLGYNPRGLKRDLGGAMNMRYANYTTVLKLLAQPDIDAFRTVSEGVPYTIEIGPHGGIHYTIGGDPGGDLFTSPGDPAFWVHHAQMDRVWAVWQALGLVFPDVDDPARRYTDLGKGEYAHRTWQNNPPSPFAELSDVIDMGYAAPSTAIGEVMSTTQGELCYFYL

SEQ ID NO: 1718 - protein, 255 aa, Myriococcum thermophilum
MKFFSTLAAAFMAGSALAAPAVPVDCDCGDGYDIPVPTHVTKTLTATATGYPIPINTSLPGSQIPGHNAPVDPDVVVVVKTVVATAVDVEAKVKAHLKLITDLCADVNANIDAQALLKVIIDLKADINVLVGLLPELKGLLVHADALVAADVKLILDLLVRVEALVAEVQAVLGLVAKLKAEVLAVVGVELRAVLDLVVGLVGGIVAFATDLVAKIGAIVDLKVLVGEITSVCAKLNAHVGVIVKILGLVLKLIL

SEQ ID NO: 1719 - protein, 374 aa, Myriococcum thermophilum
MRLTRCAPALLAAVSARALSIPAPGNLAITKDLAHDTKKDMDSFTVLTWSELDAIMSGDSDTGKNSGSHGDSDNDRVGLLDGPAATPCENPKVRVEWDRLKESKKEEFLKAVRCLMNKKEPFDGVPELPSIWHTLAWVHNEGKALIHGTDQFLPWHRYYIYMLETLLKDQCSYGGPIPWWYEPDYAGDLADASLFSPEYFGTLHPKINGRTTCVTDGWFANTTVIVGTSKTCLSRGEDKAYSNLVTTNYEERCHGDKNTSYESHRSCVEGTIHAATHNAIGGAMASLSASPHDPIFFLHHGYVDWQWARWQNVDSDRKRTISGCAVPRDELTRVCNEYLTLDTVLKGYGVIPDMKVRDVLDTKNQIMCYTYDKA

SEQ ID NO: 1720 - protein, 535 aa, Myriococcum thermophilum
MASPLFILFATTIGYVLFRLSKVGRRPKGIPPGPPTVPILGNLHLMPKDDPPTQFKKWADEYGPIYSLILGTNVTIVLSSDVVVKELLDKRSSIYSSRPESYLSSLSSDFRRMVLMEYGSQWRRIRKFFHAFLQLKSVKAYVPYIELESTSVMVDLLDKPQIIFEHVRRYSTSIASQLVYGFRMPKVDDPRLLHVYEIMEGFSEITGPGAAALLDIFPILRYLPPALQPLRGFAIYLRKISIDLAIKLWLEVKQQMQDKTAKPCFCVGLADAQAKEGLDDLDLGFAASTGLEAAADTTANSLSGLVLALVIHRDVQKKAQEAIDRACGDRLPTIADMENPDAQYIKACVKEVLRWFPTAPLGVPHAVTQDDEYMGYRIPKGATVVINAWGIHMDEKRYKNPRVFDPDRYMDDTTTSSESAMGPDPTKRDHFSFGAGRRICEGMHLVDRTMFLFISRLVWAFDLLPAKDAKGNDVIPDQNDLLGNFLRRPRPFPLEVKPRSEARAAALRQAWKEAQELLDKDQQWKVIPEGMPFTL

SEQ ID NO: 1721 - protein, 278 aa, Myriococcum thermophilum
MKPTRPSAVVLLAAATSVAGQSCDLPTSYRWTSSGVLAEPQYPWVSLKDFTIAPYQGQHLVYATTNDGTNWGSMGFGLFSDFSAMGSASQTGMSSGAVAPTLFYFEPKNVWILAHQWGPTAFSYRTSNDPANPNSWSSPQPLFTGSISDSDTGPIDQTVIGDDKNMYLFFCGDNGKIYRTSMPIENFPGNFGDQATVIMSDSRNNLFEAVQVYKIDGQQKYLMLVEAIGAQGRYFRSFTATSLDGQWTPNAVDEYSPFAGKANSGATWTNDISHGELR

SEQ ID NO: 1722 - protein, 694 aa, Myriococcum thermophilum
MKASVAWCLAGMIAVASGQNEPFQSYPDCTKPPLSEIKVCDRSLSDAERATALVEALTEEEKLQNLVSKSLGAPRIGLPAYNWWSEALHGVAYAPGTQFRNGPGDFNSSTSFPMPLLMAAAFDDALVEAIGHVIGTEARAFGNAGWSGLDYWTPNVNPFRDPRWGRGSETPGEDVLRLKRYAASIINGLEGRAPSSSPFPGEGGGEQQQQQQPPRIISTCKHYAANDFEDWGGHTRHDFDAVIGAQDLAEYYLAPFQQCARDSRVGSIMCAYNAVNGVPACANSYLMETVLREHWNWTEHDNYITSDCEAVYDVSAHHHYAETNAEGTGLCFEAGMDTSCEYEGSSDIPGAVAGGFLTWPTVDRALTRLYRNLVRVGYFDGPESPYASLSWADVNQPESQELALRAAVEGIVLLKNADDTLPLPTEEDEDGNAMGDQVDDTPLFELEGVGAILWANWPGQDGGTAVVRLLAGVESPAGRLPVTQYPANYTDAVPLTDMTLRPSETNPGRTYRWYPTPVRPFGFGLHYTTFKAEFGPHPFFPGGNGNETTASRIKARTRQAAASTPIEDLLSGCDRTYRDTCPLPPLTVRVTNEGERTSDFVALVFASGEYGPEPYPIKTLVSYARARAVEGRGGDATLSLDWTVGNLARHDENGNTVLYPGTYTLTLDEPTQASVQFTLEGEPVVLDEWPALPE

SEQ ID NO: 1723 - protein, 485 aa, Myriococcum thermophilum
MKSLALLVSVAASLASASAIALDGEALPAGASITFPRDESQFNPSVTPESRGHGKEKDNWGNAVEKDRKKVTIRASKDDRDDISDDFLWALKKANNGGLLHLQKGEKYVIGKKLDLSFLNDIYVKIDGELKFTNDIEYWQANNFYYDFQKSITFWVWGGKYASFLPLLFEFVNHFYREPASHTLPRDIKIYGSGVINGNGQAWWDGFSGHEILDPDNDYYRPILFLTDNATNVEVRGLHMKDSPCWTNFFVRSKNIVFDDVYISAVSTNASTLPKNTDGFDSLNVAGLTVLNTRVNVGDDCFSPKPNTSDILVRNLWCNGTHGVSMGSIGQYPGVLDYIADAHIENVTLLNGENGARLKAWAGPDVGYGYIRNVTYKDIRVENTDFPIVLDQCYFNINETVCAQHPSRVNISDINFINIRGTSSGKEGRVVADLTCSPGATCTGIHLEDIDITSPKGSPPQIVCENIQGDIGVDCIPKDEADYSG

SEQ ID NO: 1724 - protein, 497 aa, Myriococcum thermophilum
MIRLSVCVSALLAGLSAAKYIVPGGRWRDTDGNLVNAHAGCVTVDKDTSKFWLFGEYKVEGQTEGGGVSVYSSDDLATWEYHGLALERLTAPIEGHQYISPSHIIQRPKVVYSEVSKEYHVQQMWWHADNSTYGLLLQGFARSPNISGPYTFVSATAPLGNWSQDFGIFTDYKDGRSYALYSNGDSAEGRDVYITAYNEDVSELDKVIHRFDKYDLEAPTIVQTDKSYYALMSHKTGYRPNNVVAFRADSLAGPWSQPFMVAPPNTRTFNSQSGYTLTIRGKNRTTYLYLGDQWDSNSLWESRYIWLPIEIDDRKKTLSLVWHDVYDLDVRTGEWSPVQGKTYYAADAKTAGNAFKQEANFASKGVIVTGIYDNHSTVTFEGIEGTGKPQWVSFYYQNTDDMGFGDQPGGTPDRIGGTWQLRRIASVVVNGNWEKVETLYQRDTHKGIILSTPLQLTLNKGKNNTITVGGLYNGFDYKGADLDRIVVYPPEPDHERQ

SEQ ID NO: 1725 - protein, 497 aa, Myriococcum thermophilum
MILQASALLAAAALVRASPTKVRRDAPVGAAAWEAAHSSAAAALGRLSQQDKVNIVTGVGWDQGPCVGNTPAINSINYPMLCLQDGPLGVRFGSSITAFTPGIQAASTWDVELIRQRGEYMGEEFRGCGIHVQLGPVAGALGKIPHGGRNWEGFGVDPYLAGIAMAETIEGIQSAGVQATAKHYIVNEQELNRETMSSNVDDRTMHELYVWPFADAVHSNVAAVMCSYNKINGTWACENEWVLNTILKEELGFPGYVMTDWNAQHSTEDSANNGLDMTMPGTDFNGGNILWGPQLDSAVNSGRVPRERLDDMVERILAAWYLLGQDSNYPSINIGANVQGNHKENVRAVARDGIVLLKNDDGILPLKQPSKLALVGSAAVTNPQGINACQDQGCNNGALGMGWGSGAVNYPYLVSPYDALKERAGQDGTTLSLHDRDDTNGLKLEPGASGTATFSLRRRDLSYWDSGSSQWVVPEGEFGVSVGASSRDIRLTGTFQV

SEQ ID NO: 1726 - protein, 302 aa, Myriococcum thermophilum
MHLSSSLLFLAALPLGMAGRGNGHGPRTGLHALAKRAGLKYFGSATDSPGQRERAGYEDKYAQYDKIMWKSGEFGLTTPTNGQKWLFTEPERGVFNFTEGDIVTDLARKHGFMQRCHALVWHSQLAPWVETTEWTAEELRQVIVDHITHVAGYYKGRCYAWDVVNEALNEDGTYRESVFYQVLGEDYIKLAFETAARVDPHAKLYYNDYNLEWPSAKTEGARRIVKMLQDAGIRIDGVGLQAHLIAESHPTLDEHIAAIEGFAELGVEVALTELDIRLSTPANATNLAQQKEAYKNSDLPLP

SEQ ID NO: 1727 - protein, 770 aa, Myriococcum thermophilum
MRLFGRRVGRGAMSTWAASAALISLFSSRFGLCTAASSSDPSPILDNGLQDEIQWDHRSIIIGGERLFLFGGEMHPFRLPVPEMWEDVLQKIKAMGLRMVSIYVHWGFHAPTPDTVDFSTGPRNITRFLEMARDVGLYVIVRPGPYINGELNAGGLALWATTGEHGSLRLNDSAFTEAWTPYQDGIAQVTRPFQLTEEGTVIMYQIENEYGNQWLDPEAKVPNPEAISYMEALEDNARRNGIVVPLIHNSPNLNSPVWSKDYDTVGAGGNVDIYGVDNYPQCWSCVLEECGNVTPWAVRDYFGHFEKVSPTQPSLMPEFQGGAMNPWAGPAGGCKERTGADFVNFYYRDNIGQKVSILNLYMIYGGTNWGWLAAPFIGSSYDYGAAISEDRSIDDKYYEIKSLGLFTRAANELASTDRVGTGLEYTNNSNLFTAELRNPETGAGFYVIRHDDTASDSEEWFVLRVNTSIGEFFVPKVSSAVVLSGHEAKILVADFHFGNHTLYYSTAEVLTYSIIDGERTVLVLWTPTGRSGEFFLKGAKEGKISSGPSVTLDAQEEGIIVAWYEQKEERTILEFDNGVTVVLVDRATAYKTWVPALTKDPKVPVDQTVIVIGPYLVRSASLTDDTISIQGDVKTATPIEVFTSSRIQSIRWNGRDMQTTPSNYSTLTTTIPAPKPVQNPVGIGTWRVHDALPERFLNYTDTGPAWVLANRTTTPNPVAGPDTATRPFLFADEYGFHTGIRLWRGHFFVPPSNTTTTSTSAARRTGGRRT

SEQ ID NO: 1728 - protein, 758 aa, Myriococcum thermophilum
MSTWAASAALISLFSSRFGLCTAASSSDPSPILDNGLQDEIQWDHRSIIIGGERLFLFGGEMHPFRLPVPEMWEDVLQKIKAMGLRMVSIYVHWGFHAPTPDTVDFSTGPRNITRFLEMARDVGLYVIVRPGPYINGELNAGGLALWATTGEHGSLRLNDSAFTEAWTPYQDGIAQVTRPFQLTEEGTVIMYQIENEYGNQWLDPEAKVPNPEAISYMEALEDNARRNGIVVPLIHNSPNLNSPVWSKDYDTVGAGGNVDIYGVDNYPQCWSCVLEECGNVTPWAVRDYFGHFEKVSPTQPSLMPEFQGGAMNPWAGPAGGCKERTGADFVNFYYRDNIGQKVSILNLYMIYGGTNWGWLAAPFIGSSYDYGAAISEDRSIDDKYYEIKSLGLFTRAANELASTDRVGTGLEYTNNSNLFTAELRNPETGAGFYVIRHDDTASDSEEWFVLRVNTSIGEFFVPKVSSAVVLSGHEAKILVADFHFGNHTLYYSTAEVLTYSIIDGERTVLVLWTPTGRSGEFFLKGAKEGKISSGPSVTLDAQEEGIIVAWYEQKEERTILEFDNGVTVVLVDRATAYKTWVPALTKDPKVPVDQTVIVIGPYLVRSASLTDDTISIQGDVKTATPIEVFTSSRIQSIRWNGRDMQTTPSNYSTLTTTIPAPKPVQNPVGIGTWRVHDALPERFLNYTDTGPAWVLANRTTTPNPVAGPDTATRPFLFADEYGFHTGIRLWRGHFFVPPSNTTTTSTSAARRTGGRRT

SEQ ID NO: 1729 - protein, 256 aa, Myriococcum thermophilum
MRLTGGFFSAVTAIAAWLAAPAVVASPAVSYHNTLIEQRADPHINKHTDGWYYFTATVPEYDRIVLRRAQSIQALQDAAETTIWRRKPYGVGSGQVWAPELHYIDGKWYIYVALGVANEWRIRAAVLEGTGDNPLTASWVEKGLIRTNWDTFSLDASTFVANGTRYLIWAQQEPSRPDENSSIMIAPLENPWTIRGTAVAISRPTLAWERIGYKVNEGPYRDRRQLLHGPADGGGGIGPVGPGLVEQVTGAHPHQQ

SEQ ID NO: 1730 - protein, 544 aa, Myriococcum thermophilum
MVFLFLPFFIFSIPYTYGYTPSELTSKEVVQAGISRTLAGIFESKFVPWKLHKPGSKWEPDLSESQQWIETLEIVQTGKDKPSAFKPLAGQVDESYNLTVSAEGEAKLTAVSSIGVLRGLETFSQLFYQHSAGTFWYTPFAPVSVQDAPKFPHRGVLIDTARNFLPVPDILRTIDALAWSKLNRLHVHVTDSQSWPLVIPSLPEVSEKGAYHPSQTYSPEDIERIQKYGAERGVEVYFEIDMPGHIGVVSLSHPELIVAYNLQPYQWWCQEPPCGAFKLNNTAVDEFLEKLFDDLLPRVEPYSAYFHLGGDELNRNDSMLDEGVRSNDTEVLRPLLQKFIDAQHGRVRAAGLTPITWEEIPLEWEIELAKDTLVQAWLGGDSVKTLTSKGFPVIDSNYNFWYLDCGRGQWLSWGNGEAFAQGYPFNDWCGPTKSWQLVYQHDPTAGLTAEEAKLVLGGEVALWAETIDAVNLDTIAWPRASVAGEVLWSGRIDPATGQNRSAVDAAPRLNEFRERLVAKGVRASPIQMTFCTQGKAEECEFIVA

SEQ ID NO: 1731 - protein, 247 aa, Myriococcum thermophilum
MYISNLVSALGLAGLALASPMEVAKRQGEKLRIMPLGDSITEITCWRAFVWDQLAQAGLADQVQYVGSQNSNPVGCQPQTANWDQHHEGHSGWTAVDIANNWLAGWLQSTPADIVMFMLGTNDVVGGTSTDQIIAAYTKMVETMRASNPNIKIIKRSSPTIYLTRQIDLVIPLPFMNAPIEAINARIPEWAASLNSTESPIVIADCYQGFTNSMLRDGIHPNLQGDELIASRVGPLLLDYVKQSLGQ

SEQ ID NO: 1732 - protein, 491 aa, Myriococcum thermophilum
MYSLLIALLCAGTAVNAAAPRARSALHRGRQARGSQHAAHILQQRQAGTTLTVDLSTTYQRIDGFGTSEAFQRAVQMSQLPEEGQRRALDILFSTTNGAGLTILRNGIGSSPDMSSDHMVSIAPKSPGSPDNPLIYEWDGSDNKQLWVSQEAVHTYGVKTIYADAWSAPGYMKTNGNDANGGTLCGLSGAYCASGDWRQAYADYLTKYVEFYQQSNVTITHLGFINEPELTTSYASMRFSASQAAEFIRILYPTIQSSNLTHKPTIACCDAEGWNSQSGMLGALSSVNSMFGLVTAHAYTSQPTFAMNTPHPVWMTEAADLREGWTWANNVYQAIVNANASAYLYWIGAQTGNTNSHMIHLDLNAGTVEPSKRLWALGQWSRFVRPGARRVAVSGGSGSLRTAAFRNEDGSVAVVVLNSGGDAALNVRLDAASSGDDQQPASAKTWVTDNSRAIEEIETSFADGAATVNVPSRSMATVVLYPAPEEENPEE

SEQ ID NO: 1733 - protein, 867 aa, Myriococcum thermophilum
MSANNTASKPLIANNGAATATASTTASARFPFLRTKRGIALVVVVAIVLIVGGGLSGLAALRTRGGGDGDSASADEYGEGVIRDDSWFYGLSPPVYPSPNITGSEGRWVEATRKARELVRRMALEEKISLTAGDGSFPGCSGSLPPIPRLKFPGMCLSDAGNGLRGTDFVSTWPSGIHVGASWNKALTRRRGSGMGGEFKTKGVNVLLGPVVGPAGRVVLGGRNWEGKISFPQQRSRDQSLNLTGFSVDPYLSGVLVSETVTAVQAAGVITSTKHYIANEQETNRNPSGDIQSVSSNIDDRTMHEFYLWPFQDAIRAGSGNIMCSYQRLNNSYGCANSKALNGLLKTELGFQGWVVSDWGAQHAGVATALAGMDVVMPNGDAFWGPHLIEAVNNGSVAETRVDDMVVRTLATWYLLGQDRDFPRPGIGMATDLTRDHRIVDARNSSFRSTLFDGALEGHVLVKNARNALPLRRPKMLSVFGYSAKNPDHNNPSPGQSPWLWGSESFNYTEFSGRFFGFGGEYSSTPIAFNGTIYSGGGSGATSPATIVSPFDALIQRAYDDGTALFWDFVSGEPFVNPMSDACLVFGNAYATEAADRPGTRDDYTDGLIRHVADRCANTIVVIHNAGIRLVDQFIDHPNVTALMFAHLPGEASGRAVVSLLYGDENPSGKLPYTVARNESDYPVLGPDVEPEGSMFALFPQSNFTEGVFLDYRHFDARNITPRYEFGFGLSYTTFEYDKLVVRKVGSAGRFGEYPTGRIVEGGQEDLWDVLVEVSAEVTNTGEVDGAEVAQLYVGIPAEGAPVRQLRGFEKPFLNASATATVRFPLTRRDLSVWDVVAQKWRLVRGEYKIEVGSSSRNLPLVGTLTI

SEQ ID NO: 1734 - protein, 356 aa, Myriococcum thermophilum
MFSKLFTTVALAASLVSAQTFTDCDPTKRDDCPNPKAVGSKPVDIDFRQGASNFFKAADGTSLTYDKELGAVFSINKETDAPTITSSKYIFFGQVDVTVRAARGTGIVTSFVLQSDDLDEIDWEWLGADNTQLDWIIDGNVVRTLRNEGLEGCAGYPQTPMQIKLGTWVAGRKDAPQGTIDWAGGLTNFEEAPFDGYYQSLHIVDYMGGRGAKEATEYQYTDRSGTWQSIKVVNNGEESDDDDDDNTTTTTTTTSSKTSATSTTSKATSTSMSSSSSSSSSSRATPTTLSTVSTSATPSTSDIDSPTPTNGPTSTVGREVEATSAVSQTVSTGAAPTMGGNLAAVGAAALLGALAL

SEQ ID NO: 1735 - protein, 247 aa, Myriococcum thermophilum
MQPSLLLFLSSLVAASPLTALDKRQQATLCEQYGYWSGNGYEVNNNNWGKDSASSGSQCTWVDSSSSGGVSWHTTWTWQGGENNVKSFANCGLQVPQGRTISSINNLQTSISWSYSNTNIRANVAYDLFTAADPNHDHSSGDYELMIWLAKYGDVYPIGSSAGYVNVAGQDWELWTGYNGAMRVYSFIAPSPRNSFSANVKEFFNYLEWAQGFPASSQYLLIFQAGTEPFTGGETTFTVNNFSASVA

SEQ ID NO: 1736 - protein, 1015 aa, Myriococcum thermophilum
MLSRTLAVVAFAVAPTIATTPAVNVYWGQKGTASDRLSTFCDASSFEYVTVGFINKSPEKDPSALRYPGSDFSVHCTNIAKYQDTEGVDSNLLRKCGQIAADVRYCQKKGKKVLLSIGGEWNPPKTDYSISSPPEGEYFADFIWGAFGPYTENWKDKPRPFDDFFNADEGEEHFVFDGFDFDIEHKFEDQSGYVAMIRRLRALTEKDTTKQYLITAAPECPLNPDYFKMKTIIDTCQFDALFVQFYNNPVCAGVDNNNFDDWVEYLAKTPSKNAKIFIGLPGSPEAAGSGYLAPGPAFQLINKHKDKPAFGGVMVWDAVYGSQKFGGIPFYDLMHDFVCGAPSHTTTAPAPTATATVCVKWHTVVSGDTCYEIAGSYGISLDDLYKFNPGITCNLQVGDQVCVRFGVPILTSSLSSSLTSTETLASTSTTSSTSKSTSSTRGSAISTKPSTSSIRTSASSTGSSTSPTGTSTKTSASSIKSSSTTLASPTKAPTSSAKPSTSSIKTSASKTSTSSTKTSASPTKTTTSSTKAPTSSAKTSVSKTSVSSTTTSTSSVRTSASSTKTSASKTSASSTSSITSPTRTSTSSARPSTSSIKTSVSSTKTLTTSTSLSVRPTTSTKPSTSSSPSTSPVSVTSATSINSPSITSASATSTSTGVDDSCPDEETSTSTAATSTEPVTLSITESVTVSATETTTGSVTETTTGSATETTTGSVTETTTGSVTETTTGSATITLPPQSTSTSSEALASTSTNDDDSCPDDETSSSSATETATVTFTPGFTSTGGEAVTSTSAVDDEASTSAIVSATQITTSSGVTITGSSVSDISTTASSTASSESWTTSTIYMTTTYTITSCPVTVTDCPGKIGQVTTETIVVSTTVCPITEGAEVGPSTSASSPPAPIESGSGAKPPFPTGGESENTDSTSTARVTATRFTTLTVPKSEATGSAVNTSSSPSSPSLPQSSSLSRSPSAGLPIKSGSPAPPSVTTIPVFAGAGRNAVTLGMPAVLAVVLVLAF

SEQ ID NO: 1737 - protein, 429 aa, Myriococcum thermophilum
MAKDSTRRRLAAVFTAAAALVAVTRGDDDLVAVTDAECQCYKTNGTAASYFKHHLFYDFGSLSRYVNVTDPIDTFRGNKEAPPTSSYFLRPEFVDVWDIQNWDNTALMALHDPDINDATVRMVNSPNNIYIEYDDDDDDDDDDDDDSEERDHRPTHLTLRTVRHEAGFQSAAEIESLSKDFHYLSMRMRARTLGSRGAVTAMFTYRDPPEGEEEVLSAMQEADLEILTREEGREGTPRWVQYTNQPSWNDDGDVPESTRNVSLPAGKRWTDWINYRMDWTPDRGSTWYVDGEQAAHIAFQAPRDPLQVIFNSWSDGGSWSGRMPKGGQAYLQIKWIEIVYNTTRDHSRHHHHHEDDRRRRSIGSIKARENDNDDDDDDGEEKGCHKVCSIDETNKIGTPVLLSTGARAAVAVSTLPWLSIFLTVCLAML

SEQ ID NO: 1738 - protein, 558 aa, Myriococcum thermophilum
MRHLNDFALLFTLLSGSATSAAVRGSTYHQARADEFNNPVLWEDYPDLDVFRIGSTYYYSSSTFAYSPGAPVLKSYDLVNWTPVTHSVPTLNFGDRYNLTSGTPAAYVKGIWASTLRYRPSNDKFYWYGCIEFGQTYIWTSSGTRAGDKDGEVDPADWAWEPHPPINKCYYDSGLLIDDDDKMYIAYGNPNIEVAELSDDGLSEVSSRVVYSPPSGTTIEGARMYKVGGAYYILVTRPADAEWVLKSTSGPFGPYEMRELVTRISGPLSNAGFAHQGGMVDTPDGNNWYYVAFMDAYPGGRIPVVAPLRWTDDGWPELVTDDRGGWATSYPVPVQAAKTVPDDGLDLDEFTGGQLSHHWEWNHNPDTARFSLGGEGEGGLTLQTATVTEDLFAARNTLTRRVRGPKSSGTFRLDVSKMRDGDRAGAVLFRDTAAYIGVWKQGDQASIVVVDGLELSQGSWNTVSTGRLAETGPTLSNTEDVWLRIEADITPAFGTNTARTTTFSYSVDGGQTFVPLGPAFSMSNTWQYFTGYRFGVFNFATRELGGEVKVKSFQMQPL

SEQ ID NO: 1739 - protein, 399 aa, Myriococcum thermophilum
MAVLRMFWLFLCFFSLTMADKPKPKRELRCLMYYTGQHPVAPSIDELRHVTHVAVAFMSPGIFNEPGRTEWPLFTTVDEARAKFPEETKVIVAIGGWGDTVGFSEAALNDETRKTFAENVARMVEATGADGVDIDWEYPGGNGEDYKQVPNEAKAWEIAAYPLLLAELRAALGPHKIISAAVPGLKRDMLAFTPETVPRIMRYIDFLNVMTYDLMNRRDVVTKHHTGVELSLEAVDAYISAGAEPQRINLGFPFYVRYFKTEHDACALASPIGCPTLLLEDPETGEDLGRSGAFAWHDPVPEGMAESFARALEDGVYDEEGGGYYYWDAREDLWWTFDTPDSIKRKFPRVLDKRQLGGVFAWGLGEDAPLYEHFAALNDGLERYLEGKEPDCEEKEVST

SEQ ID NO: 1740 - protein, 394 aa, Myriococcum thermophilum
MFWLFLCFFSLTMADKPKPKRELRCLMYYTGQHPVAPSIDELRHVTHVAVAFMSPGIFNEPGRTEWPLFTTVDEARAKFPEETKVIVAIGGWGDTVGFSEAALNDETRKTFAENVARMVEATGADGVDIDWEYPGGNGEDYKQVPNEAKAWEIAAYPLLLAELRAALGPHKIISAAVPGLKRDMLAFTPETVPRIMRYIDFLNVMTYDLMNRRDVVTKHHTGVELSLEAVDAYISAGAEPQRINLGFPFYVRYFKTEHDACALASPIGCPTLLLEDPETGEDLGRSGAFAWHDPVPEGMAESFARALEDGVYDEEGGGYYYWDAREDLWWTFDTPDSIKRKFPRVLDKRQLGGVFAWGLGEDAPLYEHFAALNDGLERYLEGKEPDCEEKEVST

SEQ ID NO: 1741 - protein, 489 aa, Myriococcum thermophilum
MYAKFATLAALVAGAAAQSACTLTTENHPSLTWSKCTSGGSCTTVQGSITIDANWRWTHQIDSATNCYEGNEWDTSYCDDGPSCAAKCCVDGADYSGTYGITTSGDTLSLKFVTKGQYSTNVGSRTYLMESETKYQTFELLGNEFTFDVDVSNIGCGLNGALYFVSMDADGGMSRYSGNKAGAKYGTGYCDAQCPRDLKFINGEANVENWQSSTNDANAGTGRYGSCCSEMDVWEANNMATAFTPHPCTIIGQSRCEGETCGGTYSSDRYAGVCDPDGCDFNAYRQGNKTFYGKGMTVDTTKKMTVVTQFHKNSAGELSEIKRFYVQDGQVIPNSESTIPGVEGNTITQDWCDRQKAAFGDVTDFQDKGGMVQMGKALAQPMVLVMSIWDDHAVNMLWLDSTWPIDGAGQPGAERGDCPTTSGVPAEIEAEAPDSNVVFSNIRFGPIGSTVAGLPDGGDGGNPPVSSSTTSVPSSTTTTTSSPTYLLVA

SEQ ID NO: 1742 - protein, 764 aa, Myriococcum thermophilum
MHDPMAFVSSLAFAALGALIVPARGGVTYPDCANGPLRSNTVCDTSASPAARAAALVEAMNTNEKLANLINNSPGVSRLGLSAYQWWNEALHGVAHNRGITWGGEFSAATQFPQAITTSATFDDALIELMGTIISTEARAFANNGRAHLDFWTPNVNPFRDPRWGRGHETPGEDAFRNKKWAEAFIKGMQGPGPTHRVIATCKHYAAYDLENSGSTTRFNFDAKVSTQDLAEYYLPPFQQCARDSKVGSIMCSYNAVNGVPACANSYLMDTILRKHWNWTDQNQYIVSDCDAVYYLGNANGGHRYQPSYAAAIGASLKAGCDNMCWATGGTAPDPTSAFYSGQFDETTLDTAMLRQMQGLVLAGYFDGPDGMYRNLSASDLNTQAAQDAALKAAEEGIVLLKNDGILPLSVNGSNSQLAMIGFWANAADKMLGGYSGTPPFNHDPVTAARSMGISVNYVNGPLTQPYGDTSAAVNAAQRSDAVIFFGGIDNTVEKESQDRTSIEWPSGQLAMIRALAETGKPIIVVRLGTHVDDTPLLSIPNVRAILWAGYPGQDGGTAVMNIITGLASPAGRLSATVYPASYTNQAPYTNMALRPSSSYPGRTYRWYKDAVFPFGHGLHYTNFSVSVQDFPESFEIADLLDSCGDSVPYLDLCPFPSVPLNVTNTGSRASDYVALGFLSGEFGPSPYPIKTLATYKRLFNIEPGQSQEVELEWKLESLARVDENGNRVLYPGTYTLLVDQPTLANITFTLTGEEAVLDSWPQP

SEQ ID NO: 1743 - protein, 760 aa, Myriococcum thermophilum
MAFVSSLAFAALGALIVPARGGVTYPDCANGPLRSNTVCDTSASPAARAAALVEAMNTNEKLANLINNSPGVSRLGLSAYQWWNEALHGVAHNRGITWGGEFSAATQFPQAITTSATFDDALIELMGTIISTEARAFANNGRAHLDFWTPNVNPFRDPRWGRGHETPGEDAFRNKKWAEAFIKGMQGPGPTHRVIATCKHYAAYDLENSGSTTRFNFDAKVSTQDLAEYYLPPFQQCARDSKVGSIMCSYNAVNGVPACANSYLMDTILRKHWNWTDQNQYIVSDCDAVYYLGNANGGHRYQPSYAAAIGASLKAGCDNMCWATGGTAPDPTSAFYSGQFDETTLDTAMLRQMQGLVLAGYFDGPDGMYRNLSASDLNTQAAQDAALKAAEEGIVLLKNDGILPLSVNGSNSQLAMIGFWANAADKMLGGYSGTPPFNHDPVTAARSMGISVNYVNGPLTQPYGDTSAAVNAAQRSDAVIFFGGIDNTVEKESQDRTSIEWPSGQLAMIRALAETGKPIIVVRLGTHVDDTPLLSIPNVRAILWAGYPGQDGGTAVMNIITGLASPAGRLSATVYPASYTNQAPYTNMALRPSSSYPGRTYRWYKDAVFPFGHGLHYTNFSVSVQDFPESFEIADLLDSCGDSVPYLDLCPFPSVPLNVTNTGSRASDYVALGFLSGEFGPSPYPIKTLATYKRLFNIEPGQSQEVELEWKLESLARVDENGNRVLYPGTYTLLVDQPTLANITFTLTGEEAVLDSWPQP

SEQ ID NO: 1744 - protein, 777 aa, Myriococcum thermophilum
MRFLASTLFLASAALAADHGRSSLEDAVYKNPKASIEDRVADLLSRMTIEEKASQLLQGDIRNWMNEATNELNQTGLEWSTRVRGSAFYVGVPVANEWLSKHIKAAQDYIQEETDLGIPAFVQTEGLHGLLAHNATIFNSPIGLGCSWNPSLIEEMAAAIAKEARGLGVNQLFAPVADLARELRHGRVEEMFSEDGYLAGEFAHAYVKGAQSAGVSAMVKHFAAFGVAEQGLNTGPVHGGERELRTIYLPPYKRAIIDGGVYSIMTAYHSYDGIPAVSDPHLLTDILRDEWGYKYFTMTDAGASDRLCVDFKMCASSPIDKEAIVKYILPSGGDVEMGGGSYSFEKIPELVTSGTIKEELVDIAVARVLRAKFELGLFEDPFPGLPIEEANKVIHAPEHVSLARKIDEESIVLLENHNNVLPLSKNASVAVIGPMAHGYMNYGDYVIVNSSTRGITPLDGIKAASRGKVTYAKGCERWSNSQDGFSEAIAAAEAADVAVVVVGTWSRDQNELWQGLNATTGEHVDVNSLDLVGAQEALVRAIIETGKPTVVVFSSGKPVTAPWISEHAAALIQQFYPSEQGGAALASILFGDVNPSGRLSVSFPHSVGDLPVYYDHWNSGRSTSPDAGIAYENGTLVFGHQYVLGDPRPLYEFGYGLSYSKFEYSDVSVDKTTVGPEDTVTVTVSVKNVSNRDGQEVVQVYVKDLVASVVVPNIRLRGFQKVKLRAGESKQVSIEVKVQDLGVWDARMRYVVEPGDFLFLVGASSNDFRGNVTVTLK

SEQ ID NO: 1745 - protein, 376 aa, Myriococcum thermophilum
MRTLGFVLAAAPAAVLAQSPLWGQCGGIGWSGPTTCVSGAVCEVINDYYHQCVPGSGNPPATTTGSGSNPSATGGLHERFVARGKQYFGAEIDHYHLGNGALTDIVKRDFGQVTHENSLKWDATEPNRGQFSFSNADQVVDFATANGKYIRGHTLLWHSQLPQWVSQINDRNTLTQVIQNHVTTLVTRYKGKILHWDVVNEIFAEDGSLRDSVFSRVLGEDFVGIAFRAARAADPDAKLYINDYNLDIANYAKVTTGMVEHVNKWVSQGIPIDGIGSQCHLAAPGGWNPASGVPDALKVLASANVSEIAITELDIAGASANDYLTVVNGCLQVSKCVGITVWGVSDRDSWRSNDYPLLFDGNYQPKEAYNALINAL

SEQ ID NO: 1746 - protein, 437 aa, Myriococcum thermophilum
MARGVAFLGLASLLAGAAKAQTPGEGEEVHPKITTYRCTKADGCKEQTNYIVLDALSHPVHQVDNSYNCGDWGQKPNETACPDLESCARNCIMDPVSDYSQHGVSTEGTSLRLKQLLNGNVVSPRVYLLEENKQNYEMLKLTGNEFTFDVDTTKLPCGMNSALYLSEMDASGARGELNPGGATFGTGYCDAQCYVTPFINGLGNIDGKGACCNEMDIWEANARSQHIAPHPCSVAGPYLCEGEECEFDGVCDKNGCAWNPYRVGVTDYYGEGDEFKVDTRRPFSVVTQFHANDAGKLESIYRLFVQDGEVIESYVVQQPGLPETDRMTDEFCAATGSTRFMDLGAMEAMGDALSRGMVLAMSIWWSEGDNMNWLDSGEAGPCDPDEGNPSNIVVVQPDPEVVFSNIRWGEIGSTYESATGNTTASARKVKSRRFRRF

SEQ ID NO: 1747 - protein, 381 aa, Myriococcum thermophilum
MRVSSLVAALATGGLVAAAPKPKEQSQPRAVDVNPFKGKAQFVNPAWAAKLEQTRQAFLAKNDTVNAAKTAKVQQTSSFVWVSRIAELSNIDDAIEAAREAQRKTRRRQIVGLVLYDLPDRDCSAGESAGELKSDENGLEIYKNEFVKPFAEKVAAAKDLDFAIVLEPDSLANLVTNQHIEFCANAAPVYREGIAYAISSLQQPNVHLYIDAAHGGWLGWGDNLPLAAKEFAEVVKLAGEGKKIRGFATNVSNYNPFHAIVRENFTEWSNSWDESHYASSLAPFLEEEGLPAHFIVDQGRVALPGAREEWGDWCNVNPAGFGPAPTTRVNNTVVDALVWIKPGGESDGECGMAGAPRAGQWFDEYAQMLVKNAHPSVFRRW

SEQ ID NO: 1748 - protein, 501 aa, Myriococcum thermophilum
MWSPSLSSFSVLLAAALQPVAAIWPAPQSLSTGSEVLYLHQNIKITYNGESIPYTYGYTPSELTSKEVVQAGISRTLAGIFESKFVPWKLHKPGSKWEPDLSESQQWIETLEIVQTGKDKPSAFKPLAGQVDESYNLTVSAEGEAKLTAVSSIGVLRGLETFSQLFYQHSAGTFWYTPFAPVSVQDAPKFPHRGVLIDTARNFLPVPDILRTIDALAWSKLNRLHVHVTDSQSWPLVIPSLPEVSEKGAYHPSQTYSPEDIERIQKYGAERGVEVYFEIDMPGHIGVVSLSHPELIVAYNLQPYQWWCQEPPCGAFKLNNTAVDEFLEKLFDDLLPRVEPYSAYFHLGGDELNRNDSMLDEGVRSNDTEVLRPLLQKFIDAQHGRVRAAGLTPITWEEIPLEWEIELAKDTLVQAWLGGDSVKTLTSKGFPVIDSNYNFWYLDCGRGQWLSWGNGEAFAQGYPFNDWCGPTKSWQLVYQHDPTAGLTAEEAKLVLGGEVAL

SEQ ID NO: 1749 - protein, 487 aa, Myriococcum thermophilum
MTTNHIMARTLQYLLCGILALAAGTTNAAPAAHGSTRVAAAAEPSATTYEAEDAVLSGTTVETEQEGYTGTGYVTGFDEASDKITFEVESETTKLYDLSIRIAAIYGEKHTTVVLNGGANSDVSIPASDTWADIPAGQVLLNEGANTIEIVSNWGWYLVDSITLTPSTPRPEHQINAELNNPSADESAKVLYDYLRSIYGKKILSGQQDLTWADYVTEQTGKTPALVSVDLMDYSPSRVERGTQGTAVEEAITHAERGGIISVLWHWNAPTGLYDTEEQPWWRGFYTEATDFDVEAALSSTDNANYTLLVRDIDAIAVQLGRLRDAGVPVLWRPLHEAEGGWFWWGAKGPEPAKKLWALLYDRLVNHHGLNNLIWVWNSLEADWYPGDDTVDILSADVYAQGNGPMSTQYNQLIELGKDKKLIAAAEVGAAPLPDLLQAYEAHWLWFAVWGDTFINNAEWNSPEVLQTIYTSDYVLTLDEIQGWQDS

SEQ ID NO: 1750 - protein, 370 aa, Myriococcum thermophilum
MRRLTSKLLAASLLAATSTAAPRRSDFVTVEGGIFKLSGKDFHFAGSNAYYFPFNGYGGEGAGPTEVVFQRWYPNGTSIIDISGFDKVVEAAEKTGIKLLVALTNNWADYGGMDVYTVNLGGRYHDDFYTVPEIKEAFKRYVNAVVTRYKDSPTIFAWELANEPRCGADGVRNLPRSPNCTPEVLSSWISEMSAYIKSIDSNHLVTWGGEGGFNRESDDWSYNGGDGGDFDHELSIETIDFGVFHSYPDWWDKTVEWTHQWIRDHAAAGREAGKPVVHEEYGWMTPEKRLEYTGKVDNRTRVEVLGGWQKTTVEEKLAGSMYWQYGYSDYSYGRNHDDGFTIYLDDEEARPLVYGHAKDMNSLNVRRGRK

SEQ ID NO: 1751 - protein, 429 aa, Myriococcum thermophilum
MAKDSTRRRLAAVFTAAAALVAVTRGDDDLVAVTDAECQCYKTNGTAASYFKHHLFYDFGSLSRYVNVTDPIDTFRGNKEAPPTSSYFLRPEFVDVWDIQNWDNTALMALHDPDINDATVRMVNSPNNIYIEYDDDDDDDDDDDDDSEERDHRPTHLTLRTVRHEAGFQSAAEIESLSKDFHYLSMRMRARTLGSRGAVTAMFTYRDPPEGEEEVLSAMQEADLEILTREEGREGTPRWVQYTNQPSWNDDGDVPESTRNVSLPAGKRWTDWINYRMDWTPDRGSTWYVDGEQAAHIAFQAPRDPLQVIFNSWSDGGSWSGRMPKGGQAYLQIKWIEIVYNTTRDHSRHHHHHEDDRRRRSIGSIKARENDNDDDDDDGEEKGCHKVCSIDETNKIGTPVLLSTGARAAVAVSTLPWLSIFLTATSFEH

SEQ ID NO: 1752 - protein, 494 aa, Myriococcum thermophilum
MIRLSVCVSALLAGLSAAKYIVPGGRWRDTDGNLVNAHAGCVTVDKDTSKFWLFGEYKVEGQTEGGGVSVYSSDDLATWEYHGLALERLTAPIEGHQYISPSHIIQRPKVVYSEVSKEYHMWWHADNSTYGLLLQGFARSPNISGPYTFVSATAPLGNWSQDFGIFTDYKDGRSYALYSNGDSAEGRDVYITAYNEDVSELDKVIHRFDKYDLEAPTIVQTDKSYYALMSHKTGYRPNNVVAFRADSLAGPWSQPFMVAPPNTRTFNSQSGYTLTIRGKNRTTYLYLGDQWDSNSLWESRYIWLPIEIDDRKKTLSLVWHDVYDLDVRTGEWSPVQGKTYYAADAKTAGNAFKQEANFASKGVIVTGIYDNHSTVTFEGIEGTGKPQWVSFYYQNTDDMGFGDQPGGTPDRIGGTWQLRRIASVVVNGNWEKVETLYQRDTHKGIILSTPLQLTLNKGKNNTITVGGLYNGFDYKGADLDRIVVYPPEPDHERQ

SEQ ID NO: 1753 - protein, 251 aa, Myriococcum thermophilum
MVPLTSKALILSSLASLVAGHGYLKSITVNGQDYLAWQVGQDDYVNPPPVRYARKLADNGPVPDFTTKDITYVPMTVGTGCGAGGNEPAEGIIELKAGDTVYLAHCTNDDCKSFKGDSGNVWVKIEQLAYNPSANPPWASDLLREQGAKWKVTIPSSLAPGEYLLRHEILGLHVAGTVMGAQFYPSCTQIRVTEGGSTQLPEGIALPGAYDPQDEGILVELWRVNQGQVNYTAPGGPVWSEAAPDPNRPGP

SEQ ID NO: 1754 - protein, 327 aa, Myriococcum thermophilum
MKSTFAAALAALAAQKVAGHATFQQLWHGSTCVRLPPSNSPITDVGSRDFVCNAGTRPVGGKCPVKAGGTVTIEMHQQPGDRSCNNEAIGGAHWGPVQVYLTKVDDASTADGSTGWFKIFSDSWSKNPSGGSGDDDYWGTRDLNACCGKMDVPIPADIASGDYLLRAEALALHTAGQSGGAQFYMSCYQITVEGGSGTASPATVRFPGAYSASDPGILVNIHAALSSYTAPGPAVYSGGTIREAGSPCTGCSQTCKVGESPSAIAPGSGSGDGSGDGNGDGSSPGGCTVQAYGQCGGEGYTGCTECAPGYTCTAISPPYYSQCAPSA

SEQ ID NO: 1755 - protein, 254 aa, Myriococcum thermophilum
MALQLLASLALLSVPAVAHGGLANYTVGDTWYRGYDPDLPPEVQLNQTWMIQRQWATIDPIFTVSEPYLACNNPGTAPPSYIPIRAGENITAVYWYWLHAIGPMSVWLARCGDAPDADCRAVDVNQLGWFKIWEAGLLEGPNLAEGLWYQKDFQRWDGSPSLWPVTIPEKLKSGTYIIRHEILSLHVALKPQFYPECAHLNITGGGDLLPPEEALVRFPGVYKEDDPSIFIDVYSEENANRTDYTVPGGPIWEG

SEQ ID NO: 1756 - protein, 377 aa, Myriococcum thermophilum
MRSFSVAVAALFAGAVGALPARSYVTSPFPLNNGSEPVKLPNKFKWISTGPLIGPKDDERELAGIKDPSIVEIDGTYHVFASTAKAEGYNLVYLNFTSFDEAGEAPFFYLDQAPLGPGYRAAPQVFWFEPQKLWYLVYQNDNAAYSTNPDINDPAGWTAPKTFYPSRPQIIDDNIGEGYWVDMWVICDDDNCHLFSSDDNGHLYRSQTAVADFPEGMSDPVIALEDPDRFRLFEASCVYTIKGGTGKQKYLLLIEAIGTDEQRYFRSWTSDAIDGEWIPLADTEENPFARANNVEFADGEAWTRSISHGEVIRTLTDQTLTIDVSEPLRFLYQGLDPAKDEGDYNSPALAPGPAHSADQRDGCPLVASVICTSISVP

SEQ ID NO: 1757 - protein, 368 aa, Myriococcum thermophilum
MRSFSVAVAALFAGAVGALPARSYVTSPFPLNNGSEPVKLPNKFKWISTGPLIGPKDDERELAGIKDPSIVEIDGTYHVFASTAKAEGYNLVYLNFTSFDEAGEAPFFYLDHAPLGPGYRAAPQVFWFEPQKLWYLVYQNDNAAYSTNPDINDPAGWTAPKTFYPSRPQIIDDNIGEGYWVDMWVICDDDNCHLFSSDDNGHLYRSQTAVADFPEGMSDPVIALEDPDRFRLFEASCVYTIKGGTGKQKYLLLIEAIGTDEQRYFRSWTSDAIDGEWIPLADTEENPFARANNVEFADGEAWTRSISHGEVIRTLTDQTLTIDVSEPLRFLYQGLDPAKDDGDYNSLPWRLALLTQQTNVTAARWSRA

SEQ ID NO: 1758 - protein, 376 aa, Myriococcum thermophilum
MRTLGFVLAAAPAAVLAQSPLWGQCGGIGWSGPTTCVSGAVCEVINDYYHQCVPGSGNPPATTTGSGSNPSATGGLHERFVARGKQYFGAEIDHYHLGNGALTDIVKRDFGQVTHENSLKWDATEPNRGQFSFSNADQVVDFATANGKYIRGHTLLWHSQLPQWVQNINDRDTLTQVIENHVTTLVTRYKGKILQWDVVNEIFAEDGSLRDSVFSRVLGEDFVGIAFRAARAADPDAKLYINDYNLDIANYAKVTTGMVEHVNKWVSQGIPIDGIGSQCHLAAPGGWNPASGVPDALKVLASANVSEIAITELDIAGASANDYLTVVNGCLQVEKCVGITVWGVSDRDSWRSNDYPLLFDGNYQPKEAYNALINAL

SEQ ID NO: 1759 - protein, 247 aa, Myriococcum thermophilum
MQPSLLLFLSSLVAASPLTALDKRQQATLCEQYGYWSGNGYEVNNNNWGKDSASSGSQCTWVDSSSSGGVSWHTTWTWQGGENNVKSFANCGLQVPQGRTISSINNLQTSISWSYSNTNIRANVAYDLFTAADPNHDHSSGDYELMIWLAKYGDVYPIGSSAGYVNVAGQDWELWTGYNGAMRVYSFIAPSPRNSFSANVKEFFNYLESAQGFPASSQYLLIFQAGTEPFTGGETTFTVNNFSASVA

SEQ ID NO: 1760 - protein, 661 aa, Myriococcum thermophilum
MMLRWLLIGLGVLTHKGCADSNSDKEYDYIVVGSGPGGGPLASNLARAGYSVLLLEAGSDQSNNTNSEIVSLFTVAYTDPALRWDFFVFNFANETRNLQHNYLTWRRPDGSFYVGRDPPPNSTLLGIHYPRGGTLGGSSAVNAMSTIYPSESDWQNIVDLTGDTSWGPEHMREIFERIERNHYLKPDTPGHGFNGYLDTFMSNETSWTGQDDLLTALGAVSGHLGQNPSDIAINLLADPNALLPERDQIEGIFGGPLHATPVLRRFSSRDYILETARAVDPDGQKRYQLTVQLETLATRVLFTDLDDKEKKPRANGVEYLQGQSVYRADPRHTDSNSSQGTIGRAYARKEVIISGGTFNSPQLLKLSGIGPASELAKFDIDVVVDLPGVGTNLQDNYEVPVVGHAARDFQQPAPDPDAPTCTYGAPDDPCVELWKQGRGPYTVGPVLNSIFRKSAHAAYDERDFYLVGGNFALRGFWPPTDSIPVDPPNMFGLSTVKINPQSRLGTVLLKSADPRDTPEINFHLFEEEDAGTELDLSAELDTVKWARRAFADVPAPLGPIVPVEPPCPGTPAADGTCDDESDREWIKNQIFGHHPTSTCAIGADSDPMAVLDSKFRVRGVRGLRVVDASAFPRVPGPFPVLPTFMLSEKATESVLEDAEQW

SEQ ID NO: 1761 - protein, 575 aa, Myriococcum thermophilum
MKLQRYLGATLLCLGVADARPRVFDRKHQISYHGLDRNGIEVFLGIQYGQDTSGANRFKPPKKHVPAPGTEIEAISYGPSCPQQFGQWAPPVSLGDTTEISEDCLRLNVARPRGTRPWDRLPVMVYIHGGSFWAGSNNDPTILPDGLVLESERNGYPVIHVAMNYRLGFFGFAQSRALESEGSENAGLRDQRLAIEWVRDNIEEFGGDPDNITIFGQSSGGLAVGLHIMAYGGTKPVPFQQGICQSQALEPGITKNFTINAMQAVVDYVSCNKTDLHSQETIACLRALDTETLLNASLATYRDDLNVGDIWLPVVDNGFLPAAPSTLIREGRFANVTTMMGWCENDLTFFTDPEIQTPDDTRDFISSYAVGLTSENVDKLLSLYPVSEFEGAATDTLSAEFFRASRIFRDILMACEPLFYAEHIARAGNTVYLYDWNQTILEPILEQMTGRAGWGPIHTAEFAYIFGNLSHYDLDGFPFNPTRVDYQLEARGSRSWSAFAATGQPGNLRGHHTFKGFGPAFPRGDNSTYIFVAGGPSEGLSAIDGPHSAPAVRVQKLRERCAFINSPEIIEQLGF

SEQ ID NO: 1762 - protein, 800 aa, Myriococcum thermophilum
MRQLFSLCVAAVLASAIEPARFPHPPRGHGHKRLTYNITTANPGELTPSRRSVTWVQSDKDGDFITTDEDGSLVFENVESGDRTTFLAADNIPADYWDYQISPDGSRVLWAVNYTKQYRHSYFADYLVQDVATGETEPLVADSTGDIQYATWNPASSSQIAFVRGNDLFLWNDGDIGRITDDGGPDLFHAVPDWVYEEEIFGTNYALWYSPDGEYIAFLTFNETGVQTFTVPYYMDGQDVAPSYPRELELRYPKVGTKNPTVALSLLDVKTQSVTPVPVDSTWPADDLIIGEIAWVTDDHDKLLYRAFNRVQDHEKVVLVDTETGGSTITRERDGSDGWLDNNAAVTYVGSRGKKKDEGERYYLDLSDASGWNHLYLFSLDGRTNVTLTSGEWEVASILKVDRERGLVYYSSTERHPTERHLYSVSIETGEKTPLVDPDVPAVWTASFSTGGGYYILTYSGPDVPYQELYSVKQGPNKPIRTIEANSRVHEALKEYRLPHIIYFDLPHPSGVNLSAMLRLPVSLGDDVEGRRNRKHKKYPVLLTPYGGPGAQEVSKAFQPLDWNSYIASDPELEYATLTVDNRGTGYRGRAFRAAVAGRLGELEAQDQIWAARWLAERYRSWVDADRIGIWGWSYGGYLTAKVVEAGGGKDGRRGPIAFGLSTAPVADWRLYDSMYTERYMKTPELNPDGYNRSAVWLLDGFRSLHGTFLIQHGTGDDNVHFQNTAALGDRLIGGGLGPDKLELSFFTDSDHSIRYHGQNAFLYKQLTTRLWEEKRRGKKAEKHQWSKKALGEGAWGWRA

SEQ ID NO: 1763 - protein, 634 aa, Myriococcum thermophilum
MELVRASVAVVALFPFLCGVATAHPTARSIARSTILDRADDLLPEYDYIIIGGGTAGLTVADRLTENERHSILVLERGPFQNSSAVTTISLGGRAYTDPSLTFNISSVPQAGLNNRTIGVTGGLILGGSSGVNGLQVLRGQKEDYDRWGLYFGPESEWSWEGLLPYFKKAWNFHPPRPELVSQFGIKYDQSYWGNTSDLHASFPTTFWPVLKLEMEAFGDLPGIEYPSDSGSGETGAYWHPASVDPATVLRSFARTAHWDDIEATRPNYHTLTGQRVLKVAFDGDRATSVVFVPADATDQSNARSVKAKKEIILAAGAIHTPQILQASGVGPKQLLEEAGVPLVVDAPGVGSNFQDQPFVVAPTFNFSHYPFHPDFYDLILNETFIAEAQAQFEKDRTGPLTIAAGYCGSWLPLQVIAPNSWEDIAKRYESQDPAAYLPPDTDKTVIDGYRAQQKALAKAMKSKQSATYNFFLRGGFQESSCVYLHPTSRGTVRINRDDPFFSPPEVDYRALSNPTDLEVLLEFTPFTRKYFLETRLKTLEPVELSPGANVTAPADIEAWLRSVMIPSSFHPVGTAAMLPRHLGGVVDEKLLVYGVKGLSVVDASVMPDLPGSYTQQTVYAIAEKAADLIKSRA

SEQ ID NO: 1764 - protein, 638 aa, Myriococcum thermophilum
MRGIAYLLPAFGQLAIAGSLKRHASDLLDSYDFVIAGGGTSGLTVADRLTEAFPEKNVLVIEYGEVEYARGIFDPPMIVWGGNSNTASTWALFSTPSPELNNNSAIVMVGKVVGGSSAVNGQFFDRGSRFDYDAWNKLQESGRGSGKSGIDWSWEGIYPFFRKSVTFTPPAPEVVEKYNYTWDLSAFENTTPIHASLPPFLWGDHFVGREAWKEMGIWVSEECANGNKEGLCWIPISQHPVTARRSYSGIGHYADVVDSRPNYHLLVKHQVARVLYPEGDAKSGPPTVEVRPLDGSPFFNISVKNEVILSAGVFGTPTILQRSGIGPASFLRKAEIPVVLDLPGVGSNLHDHSGPRVAWNYTKPLPFSPLPSDMFNRTFASQAAAAFNQTPAQGPYTLAMSNSAIWVPLPNITANYTAIVNQIRALANSSDPSALRLPPAYEGDESLVAGYRAQLHQLADLYANPRCPSLESTFATGGSVAAILLHPLSRGTARLNLTDPFEPPVLDYRSASNPVDMAVHVAHTRYLRRMVGTRTLRELGAVEVAPGPAVASDDEIEAFVRRAATQSYMHPCCTSAMLPRELGGVIGSDLKVHGAEGLRVVDMSALPMLPAAHLSATAYAVGEKAADIIIKQWSEEDA

SEQ ID NO: 1765 - protein, 557 aa, Myriococcum thermophilum
MKVSARTILAFAPWIGANAAVIRSMPDGSPLTPSARAVIDLAGPAATCEWFTQPIDHKNESSRTWEQIYCVDPQWWTPGAPVVVMTPGGEPITWNVNSARGFSFLKNTTLPGKYAQELGAAAVVVEHRYFGGSSPYDGFDARTLQWLTLEQSAADLVNFAQNVKFPFDKEQTSVASKVPWIYFGAAYSATLGSWIEHLHPGVFHAYHLSSATVQANQENWYYYDTIRKGIDALRGDRLCTKALQTVVEFVDRFVLASPVNETEMDALKEFFGAVFPIENDDFAYALATPFRYWEERGGYQRVLDMCDDIVSTNKTEKHEILGTIPSAAVAFSAHFQEHFRDNTCTYLDVWGQKDPLWCLDTHDPLNPFIEARTLGNPWRTRIWFLCNEPLASWATGAPLDDPSIVSRRINSDYYQAQCEIHFPAVGDNKYGSADGVRTPDMLNEVTGGWTRESKRVIWTVGEFDPWRATSMASELRPGGPLESSGDVHVFIIKNAMTADDALTEAGLTNLGLPINPDVLKVQEQTIEIIKEWVAHFEPGDGGDDGGDDEEEDGGSEE

SEQ ID NO: 1766 - protein, 647 aa, Myriococcum thermophilum
MGFLAATLVSCAALASGVSIPRSHAKREVSQLREDYDFVVVGGGTSGLTVADRLTEAFPAKNVLVIEYGDVQYAPGTFDPPTDWITPQPDAPPSWDFISLPNPDMANTTAFVRAGQVVGGSSAVNGMFFDRASKHDYDTWPAVGGSEFEQSSHKWDWEGLFPFFQKSVTFTEPTAEMVQKYHYTWDLSAYGNGSTPIHSSYSVFQWGDQPLLNQTWQEMGINPVTECAGGDKEGICWVPSSQHPITARRSHAGLGHYADVLPRANYDLLIRHQAVRVVFPDGPSHGPPLVETRSLADDQLFNVTVKSEVIISAGALHTPTVLQRSGIGPAAFLNDAGIPVTLDLPGVGANLQDHCGPPVSWNYTEPYTGFFPLPSEMVNNATFKADAIAGFNETPARGPYTLTGGNSAIFVSLPHLTTDYSTITAKIRAMVAEGTAASYLPAGQRTIPAMVAGYEAQLLVLADLLDNSEAPSLETPWATSEAPAASSALAFLLHPLSRGSVRLNLSDPLAQPVLDYRSGSNPADIDLHIAHVRFLRRLLDTPTMQARGALETAPGRDVAESDEALADYVRSNSILSFMHPCCTAAMLPEDRGGVVGPDLKVHGAKGLRVVDMSVMPLLPGTHLSATAYAVGEKAADIIIQEWRDKEQ

SEQ ID NO: 1767 - protein, 279 aa, Myriococcum thermophilum
MFSLKSLLFAAGLAVLTEAHIKLVSPAPFTSPDQSSSPLSADGSDYPCHGGSGYQGTPTQMAKGSKQQLAFQGSAVHGGGSCQVSITYDENPTAQSSFKVIHSIQGGCPARAQSIPDCSESNIEACNIKPDDAAMDTPDKYEFMIPEDLPSGKATIAWTWLNTIGNREFYMACAPVEITGEGGSESALDALPDMVVANIPSIGGDCATEPGQYYEFPNPGASVETNEGWTMLGPLTGQCGAASGSGGSSGSGGSAGSPTAAAGAAMTPAVRGRRPTWRA

SEQ ID NO: 1768 - protein, 436 aa, Myriococcum thermophilum
MMSLARWAAAAASFLLLCPSTLAVPTQGNGKPNQDTVLPRQDDDWHWVATWTSMPQLVEPNNMPPAPFTGGGAVFRDATLRQTLHVSIGAERLRLQISNTFGGSDLPITAATIALPQGGRAGVAGIDSATVKPLTFNNGSSSITIPQGEVAYTDPIDFTVEPQANIAVSIYSQQGQSGSSITGHPGSRTTSWMQSGNQVEAASLSGSNTKHWYFLSAVEAWAPPTTSAFVILGDSITDGRGSTDDGNDRWPDLLLARMQAEGGNLSEIAVNNQAAGGNAVLSGGLGPTLLSRYRRDALQVAGAKYVMIFEGVNDIGGGPTDAGSQAGIGSGLQDAFAQIVADCKAAGIKTIGGTITPFSGNGQPYSDPTREQTRVQVNDWILNSGTFDATVDFASIVADPGISSQLAPQYDGGDHLHPNVAGYQAMADGFPLDIFD

SEQ ID NO: 1769 - protein, 293 aa, Myriococcum thermophilum
MRFTPIALAAAAVHGVVAAPQREVRPAPGEQVFSCGAPEPDAEHIKISQQFAAQEAELLASGNLTTQATINVDLYFHVVATSTDLSGGYIPDSQLSAQLQVLNQAYAPYGFQFVHKGTTRTVNANWAYDSRGYEMEMKRSLRKGSYSALNLYFLYEMGSNLGYCYFPESGGANSGSTVHIRDGCTILYSTVPGGSATNYNLGHTATHETGHWFGLYHTFQGGCTGTGDAVSDTPAQASASSGCPIGRDSCPSQPGLDPIHNYMDYSIDSCYEEFTAGQQARMLSFWNNYRAGK

SEQ ID NO: 1770 - protein, 273 aa, Myriococcum thermophilum
MAFPYKKVLLIGATSGIGLEAAKQLVAKGVNVIAVGRRQDRLDSFVSSSAGAPGKAWGEPLDIAEIDQIPAFAKRITDAHPDLDCVFLNAGIQYVMDFSKPWTVDISKIQREITVNYISMVALTHAFVPFFQEKAAKQEKVAFIFTTTSLMSLPYPMVLNYSASKAALHAFILSIREQFKLAGQDIGTLELVTPLVQTELHDGQPGWGPDFNPGMPVDVFVKEALAGFEAGEETVAVGPAKAVFDEFEAEKGRRVGPVWANIRKAMGKAHTFD

SEQ ID NO: 1771 - protein, 576 aa, Myriococcum thermophilum
MKGFTTLVIAALLGRVVAAPPEPPSRTVEKRAAPTVTIASGSIVGVSRLATEAFNGIPFAEPPVGPLRLKPPVRLNSSLGVFDATGIAPACPQFFADTDSNEFLARVIDFVTDLPFFQKALKVSEDCLTVNVIRPKGTKAGDNLPVLFWIYGGGFELGWSSMYDGGPLVTNAIDMGKPFIFVAVNYRVGGFGFMPGKEILADGSANLGHLDQRMGLEWVADNIAAFGGDPNKVTIWGESAGAISVFNQMALYDGDNTYNGKPLFRGAIMNSGSIVPAAPVDCPKGQAVYDQVVAKAGCAGASDTLACLRELPYDKFLEAANSVPAILSYHSVALSYLPRPDGKVITQSPDILVKERKYAAVPMIIGDQEDEGTLFALFQPNITNTNKLVDYLGSLFFHEATTNQIEGLVNTYSTSILDGSPFRSGILNEIYPGFKRLAAILGDLVFTLTRRVFLETATAVNPDVPAWSYLASYDEGTPILGTFHGSDILQVFYGILPNYASRSIQSYYANFVYNLDPNDASGGTSAKSKVREDWPRWTATERKLINFFSNRSGYLKDDFRSKSAGYISENVGALYF

SEQ ID NO: 1772 - protein, 419 aa, Myriococcum thermophilum
MSSSTVILGAGIIGVSTAYYLSQHQDPTSIQLVEPSPELFSSASGYAGGFLAKDWFGPSVTALGALSFNEHRRLAEEHNGREKWGYSLSTSVSYTASASARNSSSRGDDWLRHGTSRADAAPVTQDSLYENTPGWLRRLEGDHIELISEEGSTAQLDPLLLCQFLLQECLRRGVKLHHPATPVSVNTDAKGELTAIHIKNTDPSATETTELPCTRLIITAGAWTGQVFQSLFPKSDLRVPIQSLAGHSLVLKSPRWHAGLESKGCHAVFTTHRQGFCPEIFSRLGGHIYISGLNSSTLPLPDAAAGKAAPYRADLAQLRQAAREILGTGAEDDNDDDLEVVREGLCFRPVTPWGAPIISRIRDEHLGAGVATRPGVEGGVYIAAGHGPWGITMSLGTGIVLAEMVQGRELSVDVSGLAL

SEQ ID NO: 1773 - protein, 508 aa, Myriococcum thermophilum
MHPLGSLRLASLLGLLATAAPAAVQASPFRHGIRANNQTDPLIECLTEAGVPVDEAGTEDYRLDVSTFNLRLNYTPAAVVGASTAEHVRDAVACAARTGVKTTAKCGGHSYASFGLGGEDGHLVIEMSRMNEVVLDTETGIATVQGGTRLGHLAVELWDQGKRAISHGTCPGVGVGGHALHGGYGMSSHTHGLALDWIVGATVVLANGTVVEASETENPDLFWALRGAGSSMGVVTEFRFNTFQPPENLTYFVVSVQWTTEERALSGLAAVQEFAKTMPAELNMRVYITSRFVNLEGLYYGDKAGLEETLAPLIEQVNGVLALAQTGSWLDQLKHYGGSNLDQGYGHEEHENFHSTSLYTHELSEAQLQSFVGYWFNSAKNNTRNWHVQIDLHGGENSGVAVGDRDISGVPSAYAHRDFLLMFLLYDRSDRGAFPDDGTASMDDFAAAITDGLEPDQWGMYINYPNPLLDQAAAQQSYWGPNLARLQAIKKEVDPDDLFHYPQGVLPA

SEQ ID NO: 1774 - DNA, 1865 bp, Aureobasidium pullulans
atgcgtctggaagtgttgaccatatcagccgtggctgtcttcggcctaggcacatcagtcgcagctcatccaggacctgatgctaagaaacagagttcggtacagaggcctatttcatggacccttctaggagctgaccaattccagagcacctcgacttcttctgttgcaagcgacacagcattcagctacactcaagtcaccagtgatcgatacgcgaccccgatcgcatcgcccgtcaagtaccaaagcgcgttcgcaccaccgtattcgaaggcgaagagtctgctgccatcgggcatcacgtacacgacctattctctgaacccctcggccacctcagatggaagatatggacaaagcgcgtatgccgctctttgggctgggtacagctacctgcataccgtacctttcacaaccactgctctaccgacactcgtcgcaaccagcgagctcgtcttccctcccgccctccctttcgaaacgagctctgcctcgatgaagtttgacaaagactttgtctggggagtcgctggcagtgcatggcagatcgaaggcgcattgcagcaagaaggtcgtggccccggcggtttagacatcttcggcaaccagaaaataccagctttggccggtcaaaacgactctgccgtgacagacatgaactactacctgtacaagcaggacatcgctcgcttggctgctatgggtgtgccctactactctttctccatctcctggagtcgcatcgtaccctttggcaatgccaacactcctatcaaccaacaaggcttggatcactacgacgatgttatcaacacgtgtttgcagtacggcatcaagccgattgtgactcttgttcatgccgacacgcctccttcggtcgactacgacaacgccacatcttcgacagcggattacttgtattatgccaagcaagtaatgacgagatacgccgaccgagtgccttactgggtcactttcaatgagatcaacaccggcataaacctccaatacgacacatatcaagccaacacaaatcttttgctcgttcatttgccatctacaggtggtacaagcagactttgaagggtacgggcaaagtgactgtcaagtttgccaacaaccttgctgtccctcgagacccagccaacaaagacgacgtcgccgctgccttgaggtatcaagatttcatcctcggagtctggggcaatcctctcttcctcggaaaacaatatccctccagcgtgctcaatacagctgtcaatctcactgccttgactcctcagcagatcgactctatcaagggctcggttgacttctgggcattcgacccttacgtttctcagctcgcttctgcccctgacgatggcctggcctcgtgtatcaacaactccagccacactctcttcccttactgcgccaacctcacacaaaatggcattcagcaaaatggttggcagttcggacaaaagtcgaacgactacgcatacatcgcacctcagtacgtccgccagcaactcggctatgtctggaagaccttccagcctgccggcggaatcatgattacagaattcggcttcaaccctttcaaagacgcagaaaagacattgcccgagcagcgctatgatttggaaaggacgttatacttccaagcattcttgacagagactttgaaagccatgtaccttgacggcgtgaaagtcattggtgcgctggcgtggagtttcgtcgacaacaatgaattcggatcgtatgagaatcagtatgggttgcagactgtcaatcgtacgagtggaaagtttgagagacactacaagcgcagcttcttcgaccttgtggatttcttccacaatcatatcgcataa

SEQ ID NO: 1775 - DNA, 1820 bp, Aureobasidium pullulans
atgaagttgcctttcatagcgccactggtgcttacaatctcctcgtccatcctccattgttcagcgcaactcgttggtccagtaggaccgactacctccttgacccaaaagactcacatctgcaacatcctcgactacggggccgtcgctgacaatgtgactgacatatcgtctgccctgcacgctgccttcgataattgcgttcagaggaatcaagggtctcgactttacgttccaacgggaaactacctgctcaagcagtctgtggtgttaagcaacgcaacatcctgggcattgcaattggacggtctgatcacggcggcatatggtggtgactggaacgttgaacgtgagctcattcttcaaggttttgctggtaggcagaagcttggtgaacttattgatggagagggtgacaagaattttctcttagatgtccttgtcatcgtcaacggtatgtttccaacctttgctttgagaaggagaaatgctgatgctgtttctttcttcctcgtagctgttgatttcgagttctattcgtcgaacggactcggagctattcaaggtcagggatatctctatcgaaacttgaacaagtttgtgatgtccgttctcttctcaagtgactattgaagctgattgtgtggcagcaacgaccgaccacgactcgtacgactgatctcgcccaccaacgcgtctgtccacgacttgatcctggttgatagccccaaattccactttgtttttgactacggtctcaatattgaggtctaccatcttacaatccgtggcgcaaatctgggaagctacgatggcatcgatgctgttggcacgaactattggattcacgacaacgaggcaatttcctgtaattcacacgccgcttctcttaaagctgacgactgctcaggtgactaaccgtgacgaatgtgtctctgtaaagagcccgtctaatcacgcactcgtcgaaaacctgctgtgtaaccaggctggctccggcatatccatcggaagcttgaatgtctctgcacaaatctcgaatattgtgagttgtcgcttacctctctcttgcaagattagtactgacgctatctcaagcacgcaagaaacatctccatcctgaacggcaacaatgtcgccttcatcaagacttatccggggggctccggctacgtgaccaacgtgacttgggagaacttccgcagtaaagccagtctatacgggttgagtatcaaccaatactggcaaaacacattcactcccgacacaggcgctgtagccctgagtaatctcgtattcaagaacttcacaggtcactcccctgagacaatcatgcctattctcctcgcaaaccccagaagctaatactgtacaggatctgtcgcaaacggagtacaaagaccaccgctttacctggttgcgaatgatcttacgttcgcgctgaacgtcacggttcaagacatcaaactctggaccgaggcaggaagcagtgtggtgaaccacatcaacaatatttttggcagaggcgacaacatttatagcccaggagatggcataagaacgtcacctgccaacggaacgccgacctcatatagtagcactatcaccgtcacgcaagcaccaacaggttgggtggggccaggttatcctgcttgggctgttccgacaactggatatggcagtgagttcctctttcgggttccagggaacagagcagatactaatgttagatagcgaatgtgccgataccagtgtatacgcctgctgtgttgtggaagcctactggtgattatgacaagcattattggggctctttctga

SEQ ID NO: 1776 - DNA, 1376 bp, Aureobasidium pullulans
atgaagtactccactttcgttgtcgctgccgcagctggtactgccgcagccgcttctgctcccgcatacggccaatgtgtatgtgcagacttcttgcattgttccattacctgaatactaactcctctcagggtggccaaggatggactggtgccactgcctgtgtctctggctaccactgcgccgcccagaatgactggtactcccagtgtgtccccggtgctggcagctctgctccccagaccaccaaggtcgttacttctgtcaagcctaccaccaccaaggccgcgacctccatcaaggctaccactaccgccgctgcaagcaaggcccccgtcaccactgccgccagccgtgcctcgaccaccagcaaggctgccaccagctcggtcgcttcttcaaagggcaaggtgaagtacgccggtgtcaacatcgctggcttcgacttcggtattgataccaacggcggctcgggtacttaccaagaccccggcaccactggtcagtcccagatgaaccacttcgtcaaggatgataagctcaatgccttccgtctccccgtcggctggcaatacctcgttggcaataccctcggcggcaacctcgacagctcgttcttttcgaagtacgacgcccaagttacctactgcctgaactccggcgctgagctgtgtatcatcgacctccacaactacgcccgctggaacggtgccatcgtcggcagcagcggcggccccaccaacgcccaattcgcctccgtctggtcgcaattggccaccaagtacgcttctaagcccaaggtcgctttcggtatcatgaacgagccccatgatctccaggacatcaacacctgggccaccaccgtccaggctgctgtcaccgccatccgcaaggccggagccacccagaacttgattctgctgcccggcaatgactggacccacgctgcccagtttgtcgacaacggctctgctgctgctctcaacaagatcaccaacttggacggcagcaagaccaacctcgtcttcgatgttcaccagtactccgactccgacggctctggcactaacagcgcttgcaccaccgataacgtcgccggattcaccaccctcgccacctggctccgtgccaacggccgtcaagccatcttgaccgaggccggtggctccaacgaccagtcttgcttgaccaacgtttgcaccatgctcaactacctcatgaccaactctgacgtctacctcggttggaccggctggtctgccggcatgttcgcttccaactacgtcctttccgaggttcctaccggcagtgctggttcgtacaccgatcaggctattctcaccaagtgtattgctggtgtcttcaactccaaataa

SEQ ID NO: 1777 - DNA, 2572 bp, Aureobasidium pullulans
atgttcatcaagacagcgagcaccgcatgtcttgcagtaacttttccgttcgcttttggcctcgatgtacctccaaggaacaactcaggtacgttcattgtctcgctgcttatgcttcaggttaagagtctggctggctgaccattcgaaagctcaacatatagcgttaggaaaggccaaagtcttcctctctcagcttgatacagccgaaaagataggtctggtaactggaagttacggtcccggtccagtgctaccctgtgttggtacgatcgcgggtattccacgtctcaacttcagcggtctttgttactccgatgggccgactgggtatgctcgctctgatggcgtcagcgtgtttccttcgggtgtcactgtggccgcgacatgggatagggatctcatgtaccaacgcgctttagctattggagaggagttcagagctaagggtgctcatgtacacctggggtatgatccacctgacgcgatacgtacatctcgtccgagctaatcaccattcaggccttctcctgggcctctgggtcgcagcattgttgccgggaggaactgggaagggttcggccccgatccgtacttagccggtgtcgcgacgaacgcttcggtcaccggtatacaagccgctggcgtccaggcgtcttcaaaacattatatcggcaatgagcaagagacccagcgcgggtcttctaccctcagcggtggactcacagtcagcaacggaaccgtcatagatgcggtatcggccaatattgatgaccgcacgctacacgagctatatctgtggcctttcgtaagtgtcaagtctgtgactcgatacggcgcctaatatatcttgctgaatcttttcgttcgtttggaacaggccaacgcggtgcatgctgggactgcatcagtcatgtgtggctacaaccgcgtcaacggtaattacacgtgcgcgaatccggatatacttaacaggattctcaaagatgagctagcattctcagggtatgttctatccgactgggatgccacacactcaacagaactatccgcaaatggaggactggacatggaaatgccagggacgcagagtgtttctgaagtctcgtactttggcgattcgctccttgcggcagtcaacaatggtaccgtgtcgttggatcggctcaacgatatggtgacacgggtcatgatgccatactatcttctcggccaagaccaggactttcccgaaccagatcctgcaagtggaggtgtcttcttgaactatcaatatggctacaactcgcctctgtcaagtgtatatcctgctgtcgatgctcgagatgttcgtgcagatcatgcaaagatcattcgcagaattggtgctgctggcactgtgttgctcaaaaacacgaatggtgcgttgcctctgactcacgagaccaacatagggcttttaggaaacgatgtgtcctatccaacaatcggctccgtttacttggactacgacaatgcggaaggttacgagatgggcacacttgacatcggcggaggatccggaaccgttagacatacgagcttctctactccagaggaagctatcgagagaaaggcgcgcaagttgggtatccgggtgcaaaagctgttcgacaataaagaggtcgccgagggtctattccgaaccatatacccaagacctcaggcctgcttggtctttctaaaagctttcgccaccgaaggaacggatcgagcgtccccagatcttcaatggaacgctacagcagtggtggaaagtacagcggcattctgtccgaacaccattgtcgtgactcatggaccaggcgttgtagccatgccttgggcggacaacccaaatgtgacggccatcctggcagcgcattatccaggagaggagtcaggaaacgccctggtggacgtgctttggggcgctgtcgagccctctggtcggcttccgtactcgatccctcgaaactcttcagattatggtccaccaatcctcagttctgtagccaatgcaacagatccgaacgcatggcaagtcgattttaccgagggccaaatgatcgattacaggcaattcgacgcaaacggcacagaggcgctatatgaattcggatttggcctctcgtactccaactttacgatgtcgagtgatacgtcattcgagctcattgatggccccttgagtgcgctccctgatcaatctcaagggatggttccaggcggattggcggatttatggaaagttgttgctgtgttgaaggttgaagtgacaaattcaggccacagagctagctcagcagtaccgcagctttacgtctcacttcctcaagacaccactcctcccggtacgccacacaaggtcttgagaggatttgaaaagctgcatctcaaggctggagagagaagagaagcgagattcgaactgatgagaagagacctcagctattgggacctagaaaacagacaatgggttgttcctgaaggcattgtccaattctcggcgggctttagttcgcgcaatctcgttgcaagaactcacgcacgacttgtgtacgatcagaactag

SEQ ID NO: 1778 - DNA, 798 bp, Aureobasidium pullulans
atgaagttccttactgctgctgccgtcatgctgggcgttgcctcggctgcccctactgccaccattgagaagcgcgcccagcagtgcggtcagtgggacagcaaggtcactggcgcctacaccctgtaccaggacctctggggcatctccggctacactggctcccagtgctccgacatcaactccctcagcggcactactctgaactggtggacgtaagtcgacgattctgctcccaacagcaagcagaacaatcccactaacatactttccagcacctggtcatgggccggcggttcaagccaagtcaagtcctacgccaacgtcgtcaccaagaccaacgccgtccagatcagcaagatcaagtccctcgccactagctggaagtgggtccaaaccggcagcaacgtcgtcgccgacgtcgcgtacgacatcttcacctcctcgaccgcaggcggcaaaaacgaatacgaaatcatggtctggctggccgcactcggcggcgccggccccatttccgccaccggctcccccatcgccaccgtcaccgtcgccggccactcttggaagttgtggtatggcaacaacggtgtcaatgaggtttactccttcacccccaacggcagcaacgtcagcagcttcaatggcgatttgatggatttctttgcgtacttgatcaagagtcagggattcaaggatagccagtaccttatttctgttggtgctggtactgagccttttactggatctaacgccaagctcacctctgcttacagcttggttcctgcttacaagtaa

SEQ ID NO: 1779 - DNA, 1321 bp, Aureobasidium pullulans
atgtcgtcggcgtcaacctcgtccgctctgtatgcaaccgtctcgtcttcttcgcgagcaaccggtgccgtgccaaagaacaccaaggaattgcgccatcataacaagaatggaaagggcttcatcaacccttgggactcttatgtcgacagaactgctccacaaattatctcggctttgatctggtagacacatccgttgtccaattcaccatcgcaaatcccattgctgaccattgcgactcaggcgaaagctctcgggcaagcagaacacgcccgatacgaccccacccaccgtcccagttcagaaacccgacttcctacccacacgcgagaccaagacgttacgagcaacatggctaggacacgcctgctactacgtcgagttccctagtggcttaagagttctcttcgatcctgtctttgagccgagatgcagtcccttgagcttcatgggcccgaagagatatactcccgctcctgtcgacgtggccgacattcccataatagacgccgtcgtcatttcacacagtcattacgatcatctttcataccctaccatcctcaagatcaaagaaaagcacccgaatgcccacttctgggctccgttgggaaacaagccatggttctcgaaatgcggcatcgagaacatgaccgagttggactggtgggagtcgagggacttcactctgtctgcgaagaagcaagatgcggaaaccacacacaccgagaccgggtcgactgtgaacgctggaggtgccgaggacatcaaggctgtcatcggctgcctcccttgccaacatacaagtgctcgtactccattcgacaagtcacacaccctatggggctcatggagcattgagagcggcggcaagaagatctggtttggaggagatactggctaccgctctgtccctgaccttcccgaagaggagaacgactacgacgagaagcacaactacccaacatgtcctgctttcaaggagattggtgagctcaggggtccattcgatctcgggttgatccctatcggcgcatacgaccctcgtttcatcatgtctcctatgcacgccaatcctttcgacagtgttaacatctttattgatacgcaatgtaagaaggcgcttggaatccactggggtaaggacttatacatcgaccttcgaagatgtgttcactaacaaataccaggcacatgggtactgacagaagaggaagtccttgagcctccgaagctactcaaaaaggcaatggcctggaaaagccttcccgagactggcgtgtttgacgtctgcaatattggcgagagccgcgagtattga

SEQ ID NO: 1780 - DNA, 1215 bp, Aureobasidium pullulans
atgcatttctcttcgctcattgctcccgtctttgcccttttgggtgcggtgtctggtaactcgctcgctggtcgtgcggcccagctcacccaggttcaaaactttggcgacaacccttccggcactggaatgtacatctatgtgcctcagaagctggccgctaagcctgctgttatcgtagccattcacttttgcaccggtaccgctcaggcatactatcagcaatctccctattccaagttggccgatcaaaaaggattcatcgttatctacccttcttctccccatgtaagtaaacaaccacatgtactattgcaaggttgtgttcaggttcggagattgtcccttgggttgtacgtcgggccagacacattcaaaaaatgactttccgtcgaagaggtcccccaaactcgaatcttgcttgtgagcacgaccttacatgaatcatgctgaccattcttccattcaaggcaggtacatgctgggacgtctcgtcgcagaagtctctcaagcataatggtggcggagatagcaatgcaattgccaacatggtcacctacactttgaagaagtacaacgccgatcctaagcgtgttttcgtcactggctccagctcgggtgccatgatgaccgtaagttcttcccagtatgattctgtgcacttgaaggaagctaacaggccgtagaatgtcatggcaagtacttatccggagttgttcgctgcggctactgcctactccggcgttcccgccggttgcttcgtctcctcctccggccaagtcgatgcctggaactccacttgtgcccaaggaaacgtcgatcagtctgccgcctactggaccaacgtagtcaagaacatgtaccccggttacaacggtgctcgtcctcgtttccaaatctaccacggtagcatcgacaccacccttcgccccaacaactacagagaatctgtcaaggaatggaccggcgtcttcggctttgatgcaaacaagcctcagactgtcaagaacaacttcccggccaacggatacaccactgatatctggggtgttgactcggccaacccgctcggcaaggttcagggtatctacgctcttaacgtcggacacaccgttcccatcaacgggtaagtagatccgaggtattggtagtttcataattagattgctgacaatgtttcacagtgctcaagacatggcttggtttggtctctaa

SEQ ID NO: 1781 - DNA, 781 bp, Aureobasidium pullulans
atgttcttctctacttcttccactgcgctggccgctctggtgcttgcacctttggcacttgctgcccctgccacctcccccaaccctgccatttttgagagatctttgaactctggcaagggtacctggtatggcatgagctgtggcgaggaagcttgctggcaacaaggcgcttgcgctttcaccgactacgtccttccctcctccattgccggctctacttgcgtttctgagaccatctggaacaacggtcagaactgtggtggctgtgtctccattacctacaagggcggtgctaagaagattgccatggtaagactttcgaccggacatgtatagtgagcattgaactgatcttctccgtcaggttaccaacaagaccggtggcgacaagaaccacttggacatgtcgcccaacatgttctccaagatcgccaacaagaacctcggcgaaatccccatcgagtgggagttcgttccttgccccatcaccgatggtcttcagatcaagatgcacggcggaagctctcaatactggtttgctgccactgtcatgaacgctcggctgcgtaccttcaagctcgaggtcagtggcgacagcggtaagacctggaagcccaccaccagaaacgtcaacaacttcttcgagatcaccggcggtactggcaccaagactgcttgggtcagagccacttccgagaagggtgacactgtcatcgtcaaggatgtcgacatgtcctctggtaagaccaccaagagcactgtcaactacaaggcttag

SEQ ID NO: 1782 - DNA, 1110 bp, Aureobasidium pullulans
atgaaaactgctttccttctcggtggggcactcgccgtcggagtttattctgctaccacctcaggatgtgggaaatctttgcctgcacggatagaccgcggaggtgccaaccagaccaattctctgaaattcacaacgtccggtggaacagtccgtgaatatggtctacatatcccgacatcctacgacagcgatgaatcaacacctctggccttctctttccatggccgaacacggatctggcaggaggaggaggagatttctggaatgtccaatgaaacactgaacccaaattacatcgtggtatatccacagggagtagacatgcaatggcaaggcgacccggaggctgtgggatacgacgatgtcagtttcactttgcaactcctggccgatctctccagtacctattgcctggacacgaacaagatctatgctgcaggaaaatcaaatggcggtgccttctctgcgaatatcctggcttgccatcctgaggcttcgcgtaccttcgcggcgttcggaggcatatcgggcgcctactatcagggaaacagcgatgccgactgcaatgctgcgactgtacccattccttgcaatgccagccgaccagtccctatttttacgacacatggcgatgctgatgagacgatcccttacgacggtggacctcgtcgcgatcgctgtctacccaaccttccgcacttcatgacacaatggtcagaccgcaatggctttggcacttccaacacgtcgacttcactctatcacaagaacgtggtacagtacgagtacggcaacgaaacatacccaggcttcaacactcatctacgcgtgcacggcctcggtcactactggccttctctagctaatggaagctcattcgacgcgacaccgctcctccttgacttcttcaacaaatggacgttggatgccgtcaacaccacatcgtctgccacaagttcatcgtcaggaacgccaccagtatctagtacatcgtcgaccagctctgctgctgcctcaacatctagtgctggagagatcaatgctgtcggtcaacaacaatggttccttggtggccttcttggtgttgtcggttggttgttcatctag

SEQ ID NO: 1783 - DNA, 1638 bp, Aureobasidium pullulans
atgaggctggcttcctatacaagtgtcctcctggcagcccgtgctgtcgtctctcaaccgactgggggtcacagcgatgctgtctctctgaacataccaagaattgcatctggcgcatccatagaacacgacccttccttcgcatctttctcgttcgaacctgcgttttgggtagagttctttggcaactctagcagccccaaccagctcgctttcaacctactcaatcgtatcgtggatcatggtggccaaccaacgatccggcccggaggcattacaatggactctatgatattcgacccagcaggtgcagacccagttcgcaccacaaatccgaaaggtggcgtctatcgtactacagtcggacctgcctactacgagagctggtcgaacttcccaaagggtaccaagttcgtctccacgctgaattttggcaacaattccctcgacattgccagagacatggcggttgcctctgtgaaatatgcaagcaatgatagtatcagcttcttcgagcttggcaatgagcctacaaactacccgagctcgagatggaagaatagtaccgcagcatacgtccagcaatggaagaattggacaaaccagatcgatgcagccgtcaacagaactttgggcaacgattcagctgctgaatttggcagtgagcgctggtgggcatcatctgcgactactgacaagagtggtctggaagttcgacctgctgctcttattcctgccggtatcaattcggacgatcaggtggccgactactccatacactcatatccattctcgacctgcgacccagctcgagcggtgttggctaccacccagaacatccttaatcagaccgagcttgcacgctatgctgatgaagagatctatccctctgccaaggctgcacttgacgcaggcaaccgctggatcattggcgagttcaactccatctcgtgctccggcaaccctaacgtatccgacactttcgcacaagctctgtgggtaattcagagcgagctgatatatgccgcacgtaatgcttcagctgtttacctgcatcaaggagcagcgctagtgttccagagcagtcagcaggtcaactccgcgggccaagatggttctccaggctactcaacctacgacatgttctaccctcgcaacagtgaaaaacgtggtcccgcaagagtcctgcccagcttctccagccagctcttcatggccgaagcatttgccattcaagacacgcgcatacgtcaggttgggactccctcaggtgttgacaaggattatttcgcggcatacgctttctatgtcaagaacaaactcaacaagctggccatcattaattcgaagccttactacgccaattcgactagtgacttcactgtcacattggacatctccaagtatggacactcgaagaaggggaccagagcttggctgaagagattgactgctcctcatgtcgatgaaggaagcgcgaacaagaccacctttgctgggcagtcgttcccgcagggcaatgccaccggtgatctggatgtagagagtgttggacgtgatggtatcatcaaagttagaggaagcgaggcagtgctggtctttttcgataagcgtgatgcaaacatgaatgcatgctag

SEQ ID NO: 1784 - DNA, 2361 bp, Aureobasidium pullulans
atgaagtctttctcgattctcgcaggccttgttggtcttgcgtctgccagcaactggaacgaaacttggactcactcttcctcttccacttcctggtctgctactgacgtgacctcatcctcatcttgggtccccgagcacaagcccactggctggtcatctgagtctagctcttcttccgtccctgcccacaagcctactggatgggttcctgagtcgagctcttcgtctgttcccgttcacaagcctactggatgggttcctgaatcgagctcatcagcctcggtccacaagcctagcggttgggtccctgagtcgagctcttctgctccttcctggaaacctaccggatgggttcctgagcacagttcctcggtttctaccgtcacaaaggacaacgctacctccaccctggtcacctacgttaccaccacagtttgccctgctaccactgttgtcaacggacacacctcgatctacactaccacatcgaccttgactgtcacctcttgcaagggcggctgcaagcccacccaggctccctcgacctgggttgcatctcctaccaagcctgctgagcacaacattactagcaccgaggttgtctacaccactacctcgctctgccccgttactaccgtcaagcaaggacacaccttcacctacactactaccagcactttcgttgtcacttcttgcaagggtggatgcaccaagcctactcagtccgttcctgatgtcacaaagactgaggaagtctacaccaccaccaccgtctgccctgctactacggtcgtcaatggacacacctctgtctacactaccacttcgactttgactctgacctcgtgcaagggtggctgcactaagcctactgagacccacaccgtccccgttgccccctaccctcagcacaacaccactgctgccactactcagggtcaccacgtcccttctggtcttgttccttccggctgggtccctgttcccgttccttctgtcaagactaagactgtctccgaggtcatcaccgttatcaccacctgctcgtctggtgaggttattaccactggcggtgttaagactaccctgaccactccctcggttattaccaccactcttacccagactagccagaagaccatcactcctcctactcagggccacgctgttcccaccgcccctgtctaccagaatggaaccaccaagtatgtcactgacatcaccaccacctacttgaccacttgccctgtcaccactgagatcaagactggcggtaccaccaagaccagcgtttacaccaccgtctccactgccaccactgtcatcaagatctccaagaccggatcaattgagacccccgctacttctgctcccgaggcacccaagcccactaccctgaccagatacagcactaccgagatcaccaagtcatgcaaggagtgcgcctccggcacccaggtcctgactacctcctaccctgtcgtcattgtcgaaactcccagcaagcccgtccagattcccgcctcttcgcccgtctctcccgtcggcaccggcaaggttaccgtcgttgttcctgtcactcagtacacgactacctgtccctacactacgactgataagcacggctcgacctccgtcttcatgactacatcgattgttagccaccccgttgagagcaccactgtccctgttgttcccgtcgtgccttccagcaagcccgtcgagtctgcaccggtccagagctccaagcctgtcgagtcccaccccgtcgctcctaccaccgctgttgagactcacccggttgctcctaccaccgctcccgtcgagtcgcaccctgttgctcctactaccgctcccgtcgagtcgcaccctattgctcctactaccgctctcgtcgagtcgcaccctgttgctcctactaccgcagttgagacccaccctgctgcaccatccagcaagcccgtcgagtctgcccccgttgagagccaccccgcctcatctcccgtctctcctgtccagtcgaccaagcccgtcgagagcgcacccgcaaccacccctgccgccagctctcccgcttccaagccttcgggtcaggttgtcacccagatcagcgacggtcagatccaggcccccggcccctcatctgctcccgctgttcccgcaaccagcggccccattgcctcctcggttgcctctgtcctgagcagctccgtccaggtcaacgttcccagcagcaccagcggctccatcgcctctgccaccacctcgactcctgcccagtacactggtgccgccagcaagaccaacgccagcttcatggctgccattgctgccgtcgccgccgccttcttcttctag

SEQ ID NO: 1785 - DNA, 1362 bp, Aureobasidium pullulans
atgtttttcaaacacacattagccgcattgagtgcggtagcaactgcattcgctgcacctcagtaagaattcatgatatgctgtacgaagtcacaatgaggctgacaatgctgctacagcatgaagcgtgccagtggcttcaactgggggaacgaagtcatgcgtggagtcaatctcggtggatggctggtcctcgagccgtgagtcaagctctcttcatctatgaccacacggttctaacgttagctcaggtggattactccctcaattttccaagcctacccaaactcacagggcatcattgacgaatacacactcggcgagaagcttggtagcgatgctgcctacaacgttctgaagcctcactgggactcctgggtgcagcttgccgatttcgaaaagattgcaaagtccggctttaacgttgtccgtatcccgataggttactgggcatacgacaatgccaacagtccctacgtatctggagctgctccgtatatggatcaagccattgcgtgggcaagacaaaccggactcaaggtcatcgtagatttgcatggtgcacctggctctcagaacggtttcgacaactctggtcaaaagacaaacaacgtcgacttccagcaaggagataatgtgcagcgcactttggccgtcttgcagacaatccagaacaagtacgcagattcatcctacgacgacgttgttgcaggtattgagcttctcaacgagcctctgtccacggtgatgaacctggacgacctcaagcagttcgagcgcaacggcttcggtcagcaacgcaccgtgtctaagaagcgcgttgtgattatccaagacggcttccagccacctaacacctacaacggctggttgacaccttcggacaacaatgcccagaatgtcgctctcgaccaccacgaataccaagtcttcaacaacgagctggtctcaatgcaaccctggcaacaccgtcagtacgtctgtaacaacgccaagacttacggtggtgccgacaagtggactttcgtcggcgagtggtcagcagctatgactgattgtgcggctgcattaaacggctatggcattggtgcccgttacgacggtacataccctggcagcaactatgttggatcttgtggcagcatcaactacatcgatcagtggtcgcagaccatgaaagacgacacccgtggctacattgaggcccagatggaggcttttgagagaaacaccatcggatgggtcttctggaacttcaagaccgagggctcacccgaatgggatgccttccgcctgatcgatgccggcgtcttccctcaacctcttaccgacagaaagttcaaccagatctgctcttcatga

SEQ ID NO: 1786 - DNA, 2403 bp, Aureobasidium pullulans
atgcgcgcttttagcccgctctcgctatttagcgtcgtaaccgccgtgtttaccttgctcctggtgcttgcgccatcccagacgtcggcctctcccgtcacatcggtcaagagagccacgtcttcaaactattggctcgcaaacatcaaacgtcaaggatctgtggcatacggtagcgattcctcgtacgcagtctaccgcaatgtcatggactacggcgccaagggtgatggctctacagatgataccgccgccatcaacgccgcaattgctgcaggcagcaggtgcggctggggctgtgacagcagcacagtcaagccggcactcgtctacttccctcctggtacctacatggtatcccaacccattgtcatgttgtactacactcagctcgtcggagacgcgctcaacttgcctgttctgaaggccactgctggtttccaaggcatggccgttcttgactcggacccctacgacagcagtggtgccaacatgttcaccaaccagaacaacttcttccgtcaagtccgcaacttcaagattgatctgactggcatgcctcagacagccggtgctggtattcactggcaggtcgcccaagccacttctctccagaacattgtttttaacatgattcctggctctgcctccaagcaagtcggtatcttcatggacaatggttccggtggtttcatgagcgacttggtcttcaacggcggtaactacggtgctttcttgggcaaccagcaattcacctctcgtaactggacattcaacaactgcaacaccgccatcttcatgaactggaactgggcctggactttgaagtctgtctcgatcaacaactgcggcgtcggtctcgacatgtccaacggtggatcaacaaacatcctgattggctccgtcattctcatggactccaagttgacaaacactcccatcggtgtcaagacttcgttcacctccaacagcgcccctgccaccgcaggcactctcatcatcgacaatgttgacttctcaggctcgcctatcgctgtcgcctcggccgatggtagctccattctcgcaggtggcaaggttgttacttcttggggtgagggccgtcaatacgccggtacctccggctctcgtgtccaaggtcctctcgcagctccttccaagcctgctgcccttctcgatgcttctggcaagttcttcgagcgttccaagcctcagtacgagtctctgcccgccagctccttcatcagtgtcaagtccttcggtgccaagggtgacggtgtcaccgatgacactgctgccatccagaaggccatggccggtacaacttccaaccagattctgtacttcgaccacggtgcctatgttgtcagcaagactatcaacgtccccaacaagatcaagatgactggtgagatctggcccctgatcatggcaactggcagcttctttgccgaccctagcaacccccaacccgtcttcgacattggaaaggctggtgaggccggcgctgtcgagattaccgatctaatgttcgagactaagggcccagcccctggtgctatcatgctcaagtggaacatggcttccgcccaaggtgcgtcaggcatctgggatgctcacgtacgtattggcggtagtgcaggcactggactgcagagcgacaagtgctccaagaacccctcatcgaccgctgtcaacaccgcatgcgagggtgcttacatgctcttctgggctggcaccaagtctgccggcgtctacctcgagaacacttggttctgggtcgctgatcacgagcttgatcttcctgaccataaccagatcaacatctacaatggtcgtggtgtctacatcgagtctcaaggtcctgtctggctttacggtacctcatctgagcacaatgtgttctacaactacgaaattcgcaacgcaaagaacgtcttcatgggcatgatccaatctgagacaccctacttccagtcgaacccgaaggcacccgctcccttcgtgccccagcgtccctcagaccccaccttctcgatctgttcttcccagaacccttcagcaccctgctacaagtcatggggtcttcgtgtcattgacagtaccaacgtcttcatccacggcctcggcctctactcgttcttcgagaactacagccaagactgcgtcgccaccaataactgtcaacagaatatgattggtctccagggtagtaacaacaacctcaacatgtatgccgtcaccacaaaggcatctgtcaacatgattaccctggacaatggtgtcgccgccgctctcgacgcagacaacagaaacgtgttcggtgccacagtcgcctactatcgcaagggtggctcatcagcacgcgactgtgacgacgaagacgaggaggatgaccaataa

SEQ ID NO: 1787 - DNA, 1215 bp, Aureobasidium pullulans
atgtatatctctaccgccactctttcctccattgtcctcgcggcatctctggcctccgctgcccctgctcacatcaagagagctgatgcctacgctcagtgcggtggccaaggcttcaccggtgcctctacctgtgtttctggctaccactgcgttgcctcaaacgactggtactctcagtgcgttcccggatccggctccggctctgcccctgtcgtgacctccgccgctgccgctgtcaagaccacctcggttgctgccaaggcccctgtcgctaccagcaacaaggcctctactcagcccgccgacagtcttaacagactcttccaggccaagggcaagaagtactttggtactgccgctgatcagggcactctcagcaactctcaaacttctgccattgtcaaggccgacttcggtcaggtcacccctgagaacagcatgaagtgggatgccaccgagtcctccaacggcaacttcaacttcaacggtggtgactacctcgtcaacttcgcctcccagaacggccagctcgtccgtggccacacccttgtctggtactctcaactccccaactgggtacagcagatcaccgacaagacccagctcaccaacgtgatgaagaaccacatcaccaaggtcatgacccacttcaagggcaagatctacgcctgggacgttgtcaacgaggccttcaacgaggacggtaccctccgccagaacgtcttcatgaaggttctcggcgaggactacatccgtatcgccttcgagaccgcccgcgctgccgaccccaacgccaagctctacatcaacgactacaacctggactctgcctcctactccaagaccaccggtttcatttcccacgtcaagaagtggatcgccgccggcatccccatcgacggtgtcggttcccagacccatctcggcaagtccggctccttcaacaaccccgacaacgtccccgccgccttcaaggccgtctgcgccgccgcccccgagtgcgccatgaccgagctcgatctcgccggtgccgacgctacttcctacgtcaaggtcgtcaacgcctgtgtccagaccaagaactgcgtcggtatcaccgagtggggtatttccgacagccagtcctggagaaagagcgacagcccccttctcttcgacagcaacttccagaagaaggctgcttacaccgccattgtcaacgcgctcaagtaa

SEQ ID NO: 1788 - DNA, 882 bp, Aureobasidium pullulans
atgaaattctcccatattatcatctcggccctcagcgtcggcagcgcagtcaacgcagctgccattcccgaagaagcagcaaactcgctctccgtccgttcaagctatgatatcgctacatcgcccgaacccagcaacacgctcgagaagcgcaaaggaggtggtggtggtggaagaggcggtggcggcagctcttcaggttcgtcctctggtggtcgcggctcaagctccggcagctcaggttcttcatcaggcagctccggctcatcaggctcttccggctcatcaggctcttccggctcgtcaggttcttcaggcagtcgaggctctggaagttcctcaggcagctcaggtgtgagaccatcatacggcagcggcggcaactactatgcaggtggtgcttccactccctacagagctggaggccgttcgccaggcggtgtcgctccttacgtccttggaggtgccgcccttggtatcggcgcctacgctttgtacggtgccggcgcctacgcatacccttacgcccatccttactacttccacaaccgcaccgaggctgcccagaaccagtcatacaccaactctaccaacacaacccttcccgtccagtgtgtctgcgctcaaaactcagagtgcagttgcgaggaccagcaagacgattcatacctcgcctctatcatcggcaatggctcaaactccgacatcaactcgactgttgctcgcatcgccaatgtcaacggcaccgacactctcatcatcaacggtactcttcctgaaggtaccggctccacaagtgccgcagctgccatgagagtacctgagtcggctggtatgtggctgattgccgctggtgtcggcgcatttgtctacgccatgtaa

SEQ ID NO: 1789 - DNA, 2013 bp, Aureobasidium pullulans
atgtcaacacctgtctcatgccgaaaactgcttctgcttatcgtttttcaacatgagggttgctcagagcctcagatctatacggctctgacacctcttattcttgctagagagattttggcccaaaactataccaatgccacgaatagtgctgtaccaagctctaccactgtcaatggcactgctgtggccaacccgagtgcttttgtaacaaacttgcagttgtctgttgaaggtaggccaagtgcttctttgccggcacaacctgcacaatacaagtttgtgaggctaacgcctgtctagatctttgggacttctttgttgggccagtcgacacagcgaatacgactacgactatcgaggcgactccagtgccatctagctcttcgataccccctccgtttataggaagctatggattcccacctggacgtcaagtacctctcgtcacaaagaacgagtcctggagctttcccaaagacttctaccttggtgttgctggtgtttctttccagattgaaggtgccgccagagccgatggaaaagggccgtcgacgtgggatgtgaacatgcaccgtgtgcctggatttgccaccgataacagcaccggagacatcacggacaacaactactacatgtacaagcagggtaagtcctaatatcttgcccatacctagaaatataatgaggttgacacaatcatcaaatgtagacattgcacgcttatcagctatgggaattaatgcctactcgttctccattgcatggacatgtctcttcccattcggtaccggaccagtcaacgaactaggcatcgctcactacaacgatattattgatacgtgcatccaatacaacatcaccccgatggctactttatatcattgggacatgccggcattactacaaaaccaatatggtggttggttgggcgagcagatcattggagacttcaccgagtacgcgcgtatagcatacagtcgtttcggcgacagagtcaagcattggttcactatcaacgagcgtaagagaattagagacactgtcagtatgacgacgctgacgccttgaacagcaatcgtgatttgtacatcacagtatccaatgccagcaggctattggcgcaatttttccattccgaacgtcgagcagccatttgtttgtggtcgaaacatcttgctggcacatgcagcagcgtatcgactaggaaagtccatcattccggacagctccatcacattcaagaacaacggtggttacaaagtccccctgaccaacagctctgccgatgccgaagctgtgcagcgagcatgggacttcaacgaagggtggtttgcggaccccgtctacctcactggagattggccatcgactgtcaacgactatgtgtcttccttcctgcctcctattacatctcaacagaaacaattgattcttggttccgccgacttcttcgcccatgacgcctacacggctcaattctacatggctcctgatgcaggcattgaatcttgcgtagtaaatgctagcaaccctctgtacccgtcatgtgcgaacagcagctacacctatggaccagctcaaggaaattggatcatcggtcctgctgccgattctcactccccttggctacatctagctaccgactggttcccagcattcatgtcctacatcaacaccacttggccatctccacacattcaaatcacagaattcggttttgccgagcccttcgagtcttcaaagacgctgttacaagacatactctgggacctcatccgaacatcatactaccacgactacatggaggcgattctgatatcgttgagtgaaggcatcaagatcactgcagctctggcgtggagtttcgtggacaatcttgagtggaactctggcttcagtgtgaggtttggattgcaacatgtcaactttacagatccggctctcgagagacactataaggctagcttcttcgagtataccaacatgtatcagacgtatgtagagaagtag

SEQ ID NO: 1790 - DNA, 2027 bp, Aureobasidium pullulans
atggccctcctcgcaggcctcgcggctttgcctactttgacattcgcttctccaactctacacaagagactggccaatggattggcattgacacctcctatgggttggaacagttacaaccactacaattgtgccccaaaccaaagcatcatccactctaatgccgaagcactggtttctcttggtcttgcagacttgggctacacatacgtgactaccgactgcggatggacactccctcaccgtacagcagacaacgagttgacatggaatgaaacactcttccctgctggctttcccgcgctaggtcaatacatccacgatcttggcctcggcttcggcgtctacagtgatggtggcatcttgatgtgcatgaatactgagttgggtacgaaccagactggtagcttgggctatgagaccactgatgcagagaccttcgtatcttggggtgctgatctactcaagtacgacaactgctggtcgtctcaagagagaggcttcccgaacgtggattacgagcccctgacttctcctcatcagaactatgtgaacatgcgaaacgccctcgatgctaccggcaaggatatgctcttccagatctgtgattggggtgttgatttcccttctgcatgggcaccggatctaggtaatacttggcgcgtcaccaacgacatcattcccaattggagaaccatcttccgcattgtcaatcaagtcgtgcctcaaacagattatgccgcacctggcagatggctagacttggacatgatggagattggcaacgatattttcacccacgcggaagagcagactcactttgcactctggagcattttgaagagtccattgaccatcgggtgtgcattgaatgactccatcacttcggtatctgcagagtcgctggccatcatgaaaaatgagaacgttattagcttcaatcaggacacgcttggtgtgtctgccaacttgacccgcagatacagtgatgaggggtatgacatttggtcaggacccttgagcggcaatcgtaccgtcgccgcattggtcaactggaacaacttctccattgacgcaacgtttgacttgccggacgcagggttgcagagtgctgggtgggtcagagatgcttggaccaacgagacaaggaagaatgtcatgaccagctacaaggcaagtgtggaagctcatggtaccttgttgctcgaactagacgacactataccagccggtgtctatcagcttgatgggtatgttcgtccgaagctccgaaggataacttgctgacatgctacagacaaagtggagacatcaatcttgagaatgtgtatgctctaaccacaagtgatgcatatactgtgaccatccattttagcagccccgttccgtcagcctgtgatctcggcatacacaatcaacaccagagatcctctcaccaagtacagcaaggtcaatctagcatcaccctacccgtctccctcatcgcagggaacagcaacaccctctccatttcaaacaccaattctataagctcaatcactgtgactccaccaaccggaaagttctatcccaataccgcttttgccatctctggtagcggtaacgctagccatataacttgtgtacccggtctctgctctccgctcggaaccaagattggcgacctgtctccgaacaactctgcctctctcaacattcctgcctcagcaaccaccactggatcaaggtacgtcgagcttacctacatcaacaacgatgttgccattggcacaagctggggagaaggccgtaatgcacgaaacattacaattactgtcaacaatcagaccactagattggaggttccattgagtggaaggagtagcgagttgtattcatcgatgaagggctggggagacagtgctgtgttgggtgtcttggttgatggttggaagcaaggtgataatgatgtcgtgattggtaatattggtggtgagaagggtgtgcagcctctaggtgccgattttgttggtctgaaggtcttctag

SEQ ID NO: 1791 - DNA, 1575 bp, Aureobasidium pullulans
atgatggaaaaacttgctagtacattgatgatgtgcggcattgtcaatgcagctctgtatgacggtgtcatatcgactagccatggccaagttcaaggccatcctgccttcaactccactcccaacggtaatctgaccaactggaaggatatcactgtttggagaggcattccttttgctgcttcaactgcaggcgaaaatcgttggaaggctcccaagccagcgggaagatggaatggtacatttgacgccaagaactatggtgacatctgtccatctacatcatccaactcggagtatacaatctctgaagactgcctcaacctcaacatctggacctcggctacctcgaccaagcaaaagcgtcccgttgtcatgtggagctatccagcctattccacagctgcggacgctctcttcgacggtgctggcatggccgatgctggtgtcgtctatgtcaactacaactaccgtacaggtgccttgggttggctggctcatccggagctctctcaagagcgtgtcaacactgtcggattcaacagctccgggaactacggaatgctcgatcaatttgccgctctcaaatggattcacgataacatcgaggcattcggaggtgacccaaaccgcattacagtcatgggccagagtgccggctctgctgctacgcagcatatcctcaacagtcctttgactaagggtcttattgtcggtgccatcattgagagtggtgtacgcgatccccatgaccctttgtgcgagactcttgccgagaactatcgcaaccttacctttgccttgaaccaaggcctggattacttggccgacaagaacacttcctccattgccaacgctcgcaaactggattacacaacttttgttgactctgactttcctcctacctcgtctagctggactttcacagccacactagaccactatgctttgcccgacacttacgaaaacacccttcgtaaaggcgccgcaaatgatgtccctatcatcactggtaatactcgcgacgaaagtggtgccacatacggcctcaatatcacaattgccgagtatctcgccgatttgaacgaaacatactccggtcagtgggtggacaaattcttggagctatacccaggcaacaacgcttctcaagcctccgaaagtgagaaccagcaattcaccgatcgttcaatcatcggcacctggatctgggcccagaagtggaagcaggctgccaagagcccaatctacacatacatctgggaccacgcccctcctggccagagtcaaggtgcttaccacgagtctgagatcaactatgtcttgaataatctgtacggtaccgactccccgtggaccgatgaagactacgagattgccgccaccatgaactcctactgggtcaactttatcaagaccggagatccgaatggtcaggggttgactcgttgggataagagcaacagtaaagagattactcagcgtcttggtgatggattcggacctgtcccgctggctctcgccgatcgtgtgaagctcatggaagagtggcttctcacccagcccgtctggtaa

SEQ ID NO: 1792 - DNA, 1380 bp, Aureobasidium pullulans
atgcatcacatttcacatcttgccctggcggcatcgctcatcagctcagctctgacatcgccggtcgatgtcactggcaagaagactgtgtctattgcagacatcaagggcaagaaaactttctccgtcgaacaggttctggcgaagaaacaacagatgcaagcacctgcactttcgatgctgaagacatacgccaaattctctggcacagctcctgttcagctcaaggccgccgcagcagcaatccaagcaggaaccgttcaagcaacaccacagaacgtgtgtaactctcagactgctttccagtacttcgctgaccttggtccagtatgacatgtcctacctatgtccagtctctgttggtgggcagacactgaatctcaatttcgacagtggtagtgcagacctgtgggtctactccacattgcaacctacctcacagcaaagcgggcactcaatatacgaccccagcaagagttcgacatcacagctattggttggcaatacctggtcaatcaaatatggcgacggctccagcgcaagtggcaatgtctatgccgataaggtcatcattggagcagtgacagcgacatcacaggctgttgaagcagccacttcggtgtcggattcgttcctgaaggatgttaacaacgatggtctggttggcttatcgttcagcaacatcaacactgtttcgcccaaccaacaaaagactttcttcgatacagtcaagagcacgcttgcattgcctctctggactgccaacctcaagaagggagctcccggcacctacgatttcggttacatcgactcttcaaagtattcaggcaagatcacttacgtcgatgtgaacagcgccagcgggttctggcagttcacagccgatggttatcagattgggtcctcttcgaccgtcagctcttcattcgtagccatcgccgacactggtactaccctcatgtaccttccctcgagcagtgttacggcatactgggctcaagtgactggctctggatacgacaagaatcaaggtggatacacattcccttgcagctcaacattgccagacttcaatctggttgttggaggcaataagttcactgtggtatgtatcgtctcctcctgatgtcagggctcaatagctaacgaacgacgcagcctggcagctacatgaactacgctcaaatttcgtacacgacttgcttcggtggtctgcaacaaaacacgggacttagcttcagcattcttggagacattttcttgaagtcacagtttgtcgtgttctcggaagttggaggcaaggcgtcacttggaattgctgcaatgtacaatggcacccctggtgaagatgatggcgacgagtgggagtgtgaggactag

SEQ ID NO: 1793 - DNA, 1589 bp, Aureobasidium pullulans
atgtctcgcacatctctgcctaaagatttcctatggggcttcgcaacagcaaggtcagtagacaaataaccatacacgactacctaatacttaaacagcttccagttaccaggtagaaggtgctcccgcagaagatgccagaggagactcgatatgggacgtcttctgccgcattcctggaaagattgccggcaacgaaaatggagacatcgcttgtgactcttaccaccggtacaaagaagacgtaaagcttttgaaggatatgggtgcacgtgcatatcgattcagcatctcctggtctagggttatccctcttggtggtcgcgaagacccagtcaaccagaaaggtctccagtactatatcgatctcgtggacgaattacttgccaacggaatcgagcccatggtcactttgttccattgggacctgcctcagggtttagagagatatggaggcctcttgaacaaggaagaatttgtggccgactatgcgcaatattctcgaatcaccttccaagcactaggggacaaggtcaagtattgggtgactttcaacgagccttggtgcagttctattcttggatataacgagggcgtcttcgcgccaggaagaaccagcaatcgctccaagagttcggtcggcgacagcagcactgaaccctggttggtaggacacaatcttctgattgcacatggtgcggccgtgaagatctaccgggaagaattcaaaccaactcaaaagggacagattggaattaccttgaatggtaggcgaagaatatagagaaaccggtgttcaacttgctgactcttgcaggtgattgggtcgagccttgggaccccgaagatcccaaggatattgaagcttgtcaacgcaagctcgagtttgcaataagttggttcggtgacgtggtgtatttcggtgactatcctgaaagcatgcgcaagcaacttggagatcgtctaccaagatttactccggaagaaaagaacttggttcaaggcagtaacgatttctacggtatgaaccactactgtgcaaattacatcaagcacaggtccggcgagccggagccagaagactatctcggcaacctcgaatccttgctcgtcaacaaggagggtcaggaaataggacccgttacccaaagtccttggttgaggccacatgctgtcggcttcagaaaactgctcaaatggatctctgaccgttacggacgccctgtcatctatgtcacggagaacggtacgagcttgaagggcgagaatgatctctcgaaggaggagattcttgaagacgacttcagagtatggtatttcaaggagtacgttaccgccatggcagaggcatacactcatgacgatgtagacgtcaggggatacatggcttggagcttgatggacaagtaagatcagccttcatcgaggtctttcatctgctaacggtgtgcagtttcgagtgggctgaaggtttcgagactagatttggagttacttttgtcgactaccacaatggtcagcaaagatttcccaagaagagtgcgaaggctatgaaaggactgttcgattcgctcatgcgcgagtcgtaa

SEQ ID NO: 1794 - DNA, 1727 bp, Aureobasidium pullulans
atgaaggtcgccgcatacgcctctctgatcggagccgccacggctgctgtcactcctggccagtccatcctcaaggcccccaagcaggcttctgaggcgtggtctaagcctctgcacaacttgcaggagtctctcaagtccttgaccggcgaggctcgccaggtttgggatgaggtcgccctcatgttccccgaagccatggaccagaccagcttcttttcgctgcccaagccccactcccgcaagcatgacaacgagtgggaccatatcatgaagggtgccgacgtccagagcgtctgggtcgagaacgccaagggccagaaggagagagagattgagggcaagctcgagaactacagcctgagaaccaagaaggttgaccccagccatctcaatgttgacaaggtcaagcaatacagcggttaccttgacgatgaggaggatgacaagcacttgttctactgtaagtggcgatcgctcattcgcctttcaagctagcttagctctaacacgatctagggttcttcgagtcccgcaacgaccccaagaacgatcccgtcattctttggctcaacggtggccctggttgctcgtccttgaccggtctctttatggagcttggcccttcatccatcaacaaggatggcagcctcaagtacaacccttcgtcatggaacgccaacgcctcggtcatcttccttgaccagcccgtcaacgtcggctattcttacagtggcggctctgtcaccaacactgtcgctgccggcaaggatgtctacgctctgttgaccctcttcttcaagcagttccccgagtacgctagccagcctttccacatctctggcgagtcctacgctggtcactacattcccgtcttcgcctccgagatcctttctcacaagaagcgtaacattaaccttcagtccgttctcatcggcaacggtcttaccgatggccttactcagtatcctgagtaccgtcctatggcttgtggcgagggtggctctcccgccgttctcgacgctcaacagtgccaggccatggacaatgccctgccccgttgcttgagcttgatccagagctgctacgacagcgagagcgtttggtcttgtgtccctgcctccatctactgtaacaacgccatgatcggtccttaccaaaagaccggtcgcaacccttacgacatcaccaagaagtgcggtagtaacagcctctgctacgacgagctcgactggattagcgagtacctcaacaagcccgaggtcatgaaggctctcggcgctgaggttagcaagtacgattcctgcaactttgacattaacagaaacttcctcttcgccggtgactggatgcaacccttccaccgtctcgtccctggcatccttaaggagatccctgtcctcatctatgcaggtagcctagacttcatctgtgtattttttaccctgctctgtgctcttccgtacaaatcgctgacatatttacagaactggctcggaaaccaagcctggaccgaggcgctcgagtggcccggccacaaggatttcaagaagacccctctcgaggactatgttctcaaggacggcagcaccgctggagctgtcaagagcagcggaaacttcaccttcatgagaatcgatggtggtggtcacatggtcccttacgatcagcccgttgcgtccctcgagatggtcaaccgctgggtcgctggcgagtggctcgcttaa

SEQ ID NO: 1795 - DNA, 1526 bp, Aureobasidium pullulans
atgaagtacactggttttgctgcttctgccaccgccttgatggctggtgtggcctctgccgctgtcactggtgtcaccggtaagcctgaaggtttcgccagcggaaccactggaggtggtgatactgctgctgtctacccctcgacaaccgatgagcttgtcagctaccttggtgactcttcgcctcgtgtcatcgtcctcacaaagacttttgactttaccggtaccgagggaaccactacctcttctggatgctctccttggggcacaggcgctgcctgccagcaggctatcaacaagtaagaaccaaggagttctatctgctctgttctttttctaatcttgaacagggatgactggtgtaccaactaccagcccgatgctcctaccgtttccagcatcacttacgacgctgccggtactcttggcatcactgtcgcctctgacaagtcaatcgtcggtgatggctccaagggaatcatcaagggcaaaggtctccgtgttgttaatggcgcatccaatgtgatcctccaggttcgtatggagtctccttaacgttagctcggtctaacaaaacgacagaacatccagatctccgacatcaaccctcactacgtctggggtggtgatgctattactttggatggtgagtcaaacctgaatatcagtgatgaatctagagttcatctcttcatcatctatctctcacaacttctttttcttcttttggacaacacaccaccaccaaacagttatactaatgcacgtctctcttcaggtaccgacaacgtctggattgaccacgtcaccgtaagtgattcctgatacgaagctgggagtcggatttgagcgtgctcaggcgagttctggtgaagaatgcgatgatctgaacagcacccacccttgtcttctatccaactaaacctcgaatgccttgactgacaaccccttagacctccaacatcgccagacaacacatcgtcctcggcaccgatgcgtgcggaaatgtcacaatctcgaactcttacatcgatggctcgggcgactactccgccacctgcgatggacaccaatactgggccctttatttcgatggtgccggagataaaatttccttcaagaacaactacatctaccaaacctctggtcgtgctcccaaggtccagaccgacactcttctccacgctgtcaacaactactggaacgacaactccggccacgccttcgagattggtgagggtggctacgttctcgctgagggtaatgtcttcgagaacgtcgaggctcctctcgaggcctcttccttcaagggcgaacttttcaccgctgactctggctctgcttgctcttctgctcttggccgctcttgcgaggccaactctctcagcggttctggcactttcagcgagagcaacactgatttcttgagcaagttcgctggtgcttctattgctactgctggtcctgcttctgagatcaagtcttatgtcacttccaacgctggtattggcaagctcgctcagtaa

SEQ ID NO: 1796 - DNA, 2676 bp, Aureobasidium pullulans
atggctggcaaattcagtcgtcttcttggtcttgccgcattgatcggattggcaagcgccaaatcaaccaccactgcgatccccacagctagtgcgtgccccaaagcaaatggccgcactatctatgacagcaatggcgccggctatctcgtcacttgctcggccgacaatgaccgtggttcgtacaccaacgttcgagccgaaacttcatacttggactgtatgacagcctgcgatgctgacacgtcgaaaccttgtgtcggattcacttacgtcggcggggacaatggcacaaattcggggacttgttggttgaaagagaagatgacgacctacccatccgccaacgcaaacgtgatttctgccgtccgagtctctgatgcccctaacgatgaccgcggctcaaaatcctcatcctcctctagcagcagtattccaagttccatccgatcatctgcagcttcgtcagctcgaagcagtgcagctagctcctcttctaagcaatcctcaacatcgagtctggtttcgaccatcgcctcttcggccaggagcagtgccattagtactacaaccaaatcgtcctcctctacagcacagagtttatcctcgtcgtctgcagtaccgtcaacttcgggcaacctctgcccctcgtacaacttcacgacatatgcagataccgaagacaacaactggcagattctctgtggctttgacacctcgcctgcctcctttggtgtcgtcgacgtttctagctttgcactgtgtcttgaagcatgcaatgcacaagacggttgtgtctcagtatcctactttggaactgcctgttacttcaaaaaaggctttgaaaattcgacaccttcaaagaacgtcaacagcgcctatatcatcaacagagcgaattaccctgtcccatcacgcaacgatatctatgcgggtcgcggctgtggcgcatccttgcccgccggagttcaagctggaggtcgaactacgcatttcagcatcaattctggcggcctcaatcgttccttcagtatccatgttccttcttcgtatgatatcaagagcgcagctcctttgatcatggctttccatggccgcagcgagaccccagtcaatatcgagagatattccgacctttctagcgaagtctggaacccctatggtatcgttgtataccctctcggttttggaagttaccctcagtggcaaagcgacccggacgctgttgaacagactccctatgtggatgatcaaaccttcgtacaagatttgcttgttcacatgacatccaactattgtatcgacaccactcgtatccttgctacaggttactccaatggcggtggtcttgcaggaatcttagcctgcaactcttcattatcgaatcaattcagtgctttcgcgattagttctggcgctcagtacacgaaccttacttctgcgaactgccctcaaaacagcagcgtcccctctaccattctcaccaacactattttgcagcccgtgtgctcccccggcagacgtaatgttccaatgttggagttccatggcgatgcagatggtacagtgtcttatgacggtggtccacgtcgcggctactgcctaccaactattcctcactggatctctgactggtcagttcgcaatggttattccactgccaatgtcgccacgccgctagcagatggacaagtgactagatacgagtatggcacggcaaacaaccagggtatcgtgacccactataagattgcaggcggtaaacacgcttggttcagtcaggatactggttcaccaatagatgctacacccatcatcttggagttcttgtaccgttacagaaactacaatgctttgcgctatattcctgcaccggcaagccccccagttgtctctagcgcagcagcaagctcaacttcagccgctgtagctccatcattcacggcttcatctccgtcggctgcatttccctctgcctcaaactcttctagcatcgtttggcccacgtcctacagaccctctgctgcagccccttcggtctcggtcaatgtttctttgtcattcaacacttcctcaagtattgccattcctctcaccacaactgctagctctctaccgctcatcgtgtcattacctctaaacacttcgacaagcgttgccatcccacttactaccgcggccagctctccgccagtcaacatctctttgccgctgaacacctcatctgttgccgctgtctcgactgcaactatcaacattacttcaaccataatctcagcaggaactgctggcttgtcttccaccttctccaccatctccacccaagctcctttcgcaaacacgaccgtgcccacgaatacaactcttccagctcctgctgcaactgggatctcttgcccagctagtaacaacactttgtacaccgacccatctacaggatcaacctttgaagtccaatgcaatgacggcaacactacgactgcaagtcttgtcaacctggacgccatcacagtggaaggagcaactttccagcagtgtatgagcttctgcgctatgatggcacccacttgccaaggtgtgaccatgtccggcgacacttgctaccttgagcgtactagcgctggcagaactcctggtgtccaaggtgcgagattggtcagtcatgccacaagatag

SEQ ID NO: 1797 - DNA, 1791 bp, Aureobasidium pullulans
atgaagagtgttttggcgtatttttcggcattcttactcggcagtgtgccgcttgtgcaggcgtacaataaagatcatcatcaggtgtataagggaaatgatgcacgattgaacaaatggcgtactttccatgtggctggtgaagaagagcatgcgctttctgttcagtcgactcctaccacagggaatgcaaccttcagacaatacatcgatcatgaaaacaaggatgtgggaactttcgagcagttctacttttactcgactgaattctatggcggacctggctcgcctattatcctgttcacccctggagaagtcaatgctagcgcgtgagtggagtttgtcataacattctatgattctccggttactgacaatttactcacagctatacctcttatctcaccctcaatagaactactggtgtccttgcaaaggagattggtgctgccattgtgtgtattgagcacagatactggggatattcttcgccttacgccgacctgaccactgagaaccttcaatacctcacacttgacaactcaatcgtaagtgaattcttctcgatcatttcctatcattctgtttttcttgcaaagaaattttaatctgacttctcgacagagtgacttgacaaacttcgcaaagcatgtgcgtctgccatttgactaccacaggaaatcaagcccgaaccgtgcgccctgggtcatgatgggtggtagctattctggcgctctcgccgcttggactgcttcgactcaacccaacacctattgggcatactgggcatccagtgcccccgtcgagtccatcattgattactggcaatactttgtacctatccagcaaggaatgcccaagaactgctcttctgatgtctcacttgtcatcgatcacattgacaacatcttgctcaatggaacgacctcagagatcgctgctctcaagacaaagttcggcttggaaggtctcgagcacaatgatgatttcgcagctgccctccagaacggtccttggttgtggcaaggcaatcaattctacagaaacactggcttcttcgacttttgcgatgccgtggagaatgtcaagcctaacaccactaacaccactttgcctggcgccgagggtgtaggtcttgagaaggcacttgctggttacgctagctggttcaacactacttaccttcccggttcgtgtgctagttatggctacgatgagtggcaaggcgagcgtaacatcaagtgctttgacacctacgacgtcaccagcccaatgtataccgatacctccctatccaacgctttcgatcgtcaatgggtatggatgacctgcaacgagcccttcggatactatcagaccggcgctcccgaagacagacccacaataatctcacgcctttcaacccccgaatactggatccgccaatgccccctcatgttccccgcttccaacaacacagtcgtcggtctcagcagaggcgccaccgccgcacaagtcaacgccaaaacaaagggttggaacaattactctcccggccttctctacgtcaacggcgactacgatccttggagggaagccagtgtgtcttctgatttcagaccagagggcaagcttcaatccaccacaaagaaccctgttgtcatcgtccccggcggcttccacactagtgatttggtcacgcagaatgcaaaggctaatgctggggctaaagctgctatcgatgaggctgtgggtattatgagggggtgggttggcgagtttgagcatggcaagcattggtttgaggggtag

SEQ ID NO: 1798 - DNA, 2241 bp, Aureobasidium pullulans
atgcttggtttcgtaactctcgcccttgccggcgctggcatggtcagtgccagaagattgcctcatgttgctccacgccaattcaataacgatactgctctttcttcatctttaccttcttaccaggcttacatcaatgccactcgcaatgacaactctcctgtcgtcctacacattgacacccaagacaccagcaagcgcaatgctacttctccctacctgtatggtatcatgcatgaggatatcaaccattccggtgatggtggtatctatgccgagatgattgccaaccgtgccttccaaggtatgtataatcagtttgcgtctgtgaatcattactgatatgagccaggatccaactcgattatttctaccctcgatggctatgttggcacctacgtaactgattccgagaatgatgtcgttccgttcgaccccgtcatgactgcttgggcacccattggccacggagttcgcatgactctcgatatccttcatcctctttcggatgctcttgagacctctttgcagatcgacttcccgttgaatgctactggcgaggttggattccaaaactttggctggtggggtttcgacattcaccctcagcaatacaacacctcgctgtggtatctgaacaactaccctcgtaacacccaaggcaatgccagcgacatcactgtttccttccgctcgaacgttacgggtgagacatgggcaagctcgactttcaaaaacgtcacacctacctacatcgatttcaagcagctggagaccactctgcaccccaatgcaactgcgcctgatgccaacaacactttcgccatcacttttgatggtgctcaggttgctggacagactttctacttcaacctggtttcggtgttccccgaaactttcaagggttaccagaatggtcttcgtcctgacatcgctcaaggcttctatgatctcaacccgaccttcttgcgcttcccgggtggtaacaacctcgaaggctatagtcccgctcagaggtggaagtggtgggagactttgggccctctgcagaaccgccctggtcgtgtcggcgattggaactattacaacactcagggtcttggtttgctcgagtatcttgaatggactgaagccatgaacattgaacctgttctcgccgtgtatgctggtttctcattggatgtctatgggcagaacggtgcctcataccctcccgagcagatgcccgagatcctgcaagaggctttggacgagcttgagtactgtatgggcgacaactcgaccaagtggggtgctcagcgtattgctgacggccacccggagcccttcaagatcaactttgttgagattggtaacgaggattggttcagtgtcacttacccttaccgcttccagatcatgtatgacggtctgaagaaggcatacccgaatatcacctacatcagcactgccttcaatgagaatgccgccaactacaacatctctatccctgatggtaacatgtgggattggcacggttaccaggagcccagttggttcctggccaacttcgacttgtgggacaactggcaagaggagaccaacaacaccggcgtcaccgtcttgttgggcgagtactcggtcatccagatcgataccccctccggcattgtcaactactcctatcccctcgacgtccatgtccagtaccctcgtcttctttccgccattgcagaaggtgtctatgcacttggtgctgagcgcaatcctaacactgttagaatgtcctcttatgcaccttcgctccagaaccgtaacttcactaattggactcccgatatgatttcttacgatgctctgcatgacaacaccgtacttagtgccagctactggcagcagtggctgttcgcacactaccgcggtaccgagaccttacctgtcactgccactgagggtgagattaaccctctgtattgggctgccagcatagacgaggagaataatgctatctacctcaaggtcatcaacaccttgaactctaccgtttcgcttagcgtcaacattccgagcgcttactcaggcgtcaacggcaccagtatcactgccagcgacctcaactcttacaactatgttggcaacaagacagaggttgttcctcgccctgcggaggtcgagtcgactgctagctccgcgaatggatctgcctggtcttgggatgtgcccaagttcagtatcactgttctccagtttgatctgtgttaa

SEQ ID NO: 1799 - DNA, 1487 bp, Aureobasidium pullulans
atgttgctgctactttgctgccttttggtattcttcttggggtctcatgcatcgcctgcatctaaccaagcgggaggtgtcacttgtgttgtcaaagcggcctccaatggacgggactctgcaaaagtcatccgagatgccttcaagacttgtggaaaggccaaatctggacaacggaatcgtatcgtgtttgagaacacaacttataccattgccagtgttctggatactactggtttgaaggatgttgacatcgagctgcatggaacactctcctggaacaattccaacctcaactattggctggaaaactcattaccgatgggttatcaaaatcagagtaccgcttggcgacttggtggcgatggtatcacattccaaggatatggctccggtacctttaacggaaatggtgacgcgtggtatcggttcatcaatggaaggtcgaactaccccagacgtccgcatcaattgacgatcactggtaccacgaactcggtattcgaagggttgatctttctccaaagtcagatgtggacgatgacgttgatccattcatcgaatgtgttgctgcaggacatctatgtcaataacacctccaagaccggcgtaagttgcgtatccactcctaaccaggcatggagctgacgtagtgcataggcgccaacagtcaataccgatggagccgacacaatcttcgcaaacaacatcaccttccgtcgatggactgtagacaatggcgacgatgccatttcgccaaaagcgaattcgacaaacatcctcattgaggattcggcattctatcgtggttcaggtattgctttgggaagcattggccagtatgatgatacattcgaaacgattcaaaatgtgacatgtcggaacatcacatctcaccgaacgaaatatggtgcttacatcaagacgtcagtggcctctgtccgtcctaccacccgattgctaacacagtaacagatggacaggagtgaacaagggatacccgccaaacggcggtggcggtggttatggctacgcttcgaacctcaccttcgaggacttcaggctgatagatgttcaaaaagcattttcgagtgagtactgatcgacggttttgaccaaacactagctgaatatccttaagttacccaatgcacgaacttcgaaggcaatcaaggtaaggcatctttaggactcctggttaggcttgaactgacataaacataggcgattgcgatacatcgaagttcaacatccatgatgtctacctgagcgacttctcgggtacgattcgtggagacgttgtgacaacactgcaatgtagcgcagcatctccttgccgcaacatccagttgttggacgtggctgttataaacagcttgaacaacacagcgccaaggcagtaccaatgcgacagtgttaagcgaacagtaggtttcaattgtacaggtccacctgacggagaggacaatgcctttaagaagttatga

SEQ ID NO: 1800 - DNA, 1381 bp, Aureobasidium pullulans
atgtacgcctctcttctcgcggcactcagtgtgccggtgttagcacttgctcaaacagtggtcaccgttcccgaacgtgtttgtatcgtcgagccatgtgcaaatggcggtgactcggctccagccatcattgaagccttcgagagatgcggtcacaatgagagcccttctcgaggaaaggttgtcttccgcaacgagacctacaacatccatagtgtcatgaacactacgggcctgaagaatgtcgacgttgatctgaatggacttttgctctgggacactaacattccttactggctcaaccactcgcttcctgtgggttaccaaaaccagtcgagtgcttggttgtttggtggagagaacatcaattgggatggtcatggatacgccactcttaatggatctggacaagcttggtataccttcgtcaatggaaccaacaactagtaagtatcggaagacgccgtattgacaagacatagactgatatcgaattagcccgggtagacctcaccagatcacaatcaccggaaccaaagacagcaacttcttgggtacccgtttcttggactcgcagatgtggaccttgactgttatccatagcgaaaatgtccttcttgaagacatctatgtgaacagcaccggtaacgaacccgtcggctttgacttctcctctctcaacactgacggtaagcgagaagactctcctacgctaggttgattactaatagcgttattaggtgccgacaccgtgtatgcggacaatattaccttccgtcgctggagcgtgaccaacggagatgactcaatcgccatgaaggccaacagtaccaacattctgatcgaagactgtgacttctatatgggtctgggcgttgctattggcagtatcagtcagtacgatgacactttcgagtacattgaaaacgtcactgctcgtaacatccgctcttacaacatgagatacggcgcatacgtaaagacatggactggcaactcgactggatatcctcccaatggcggaggtggtggcattggctatgcagccaacatcaccttctcggactttgtcttggagaacaacaccggcatctatgctgtcacccaatgcaccagctacaatggcgcatccggaggctgtgactctagcaagttcaaccttcgcgatattcgcctgcagaactggaccggcactgctgtcagcgatgtggtagggagtatgcagtgcagcggatctagtccttgcacgggtatggagatcactggcatcgacattgtcgacactgtcaatggaactgctcccagccagtacctgtgtgacaacttgtcttctgttggattcaactgcactggtcccacctgggaggagaatagcagatag

SEQ ID NO: 1801 - DNA, 1896 bp, Aureobasidium pullulans
atgaagagctcttttgctctcaccggcctcatgggcgccactgcgctcggccaggcattgaccgctgatatgatcgactccatgggcaacaacactctcttcacccgctggagaccccagaaccacttcattgctcccgctggctggatgaacgatccttgtggtctcatgtatgaccctaccgaggacatttaccacgctttttaccagtggcaccctgagcatattaactggggaaatatctcttggggtcacgcaacatccaaggacatgatctcttggaccgacgttggtagttgggagggcactgatgccctggcattgggtcctgccggcaatggcagctacgacggccttggtatcttctccggtactgcccaacctgtcaacatgaccggtggtatcgatggtaccctcctcatcttttacacctccgtttccaagcttcccacgagttggactcttccctacttgaacggcactgagagccagagcttggccatgtcccacgatggcggcaagacctgggaacagtacgagaacaaccctgtgatcgagggtcctcctggtgactggaacattactggtttccgtgatcccttcttcgagcccatgcctgcccttgatgctatcctcggccagcaagaaccccattactacgctgtatttggtagtggtatcaagggcgttggccctcgtatgcctctctggagcgcgcctgcatccaacttggccaactggactttccttggctcgcttttcgagcccgctgataacacctctctgggcgccgtgctccctactggctcttacggttttaacttcgaggtctctggtttcttcactcttcctgatgaagatggccacctccactacttcgtcaacatgggttccgaaggtggcaatgtctctttccacgaatctgcccactgggcactctggaacgagggtcacgtcactcgccacgccaacggttctgctcagttcacacccatctctggcggtgccggagactggggtaacctttacgctctcaccagtttcaacgacaccaagaacgatcgccgtgttcagtacggatgggcacctgaagacatcaccggaggcggtggtctgttctctgccaagcagcaaggtttccagggtgctctttcccttcctcgcgagctattcgtccacaccgtgaagaacgttgtgaacatggatggtgttcttggtgaaatgggcaactcctacctttctcaaaaccttgatggtagcttcaccgctcagactcttggtgtcaagcctctcgaggatgttgtcactggtctccgcaatgggtcgacccagcacagctggcccggccgcacctacaacggcagtcaaactctcgtcgcaaacggcagtgctcacatggagctcagcgccgtcgtttccagcgccactggcccttgcggtgtcagaatcggtgtcagccccgacggtcgcgagtataccaacatctactacgagcccgccaacaacactgtcgtcgttgatcgcactcactcctctttgatcgacggcttcgccaactcttctgtcattggttacttctacccttacaccatccagggcgagtacggcaacgctactcaggagcctcttgtttgggacatcttcgtcgatggatctttggtcgaggtttacatcaacgaccgctttgctcttacaaccagaatctaccctagcatgcagagcagcactggtgtcggcatttacgttgctagtggcgcctctgccactttcgatagcattgactcctggtcctctctctacaatgtcttccctgagagacctttgaactcctccagccagcttgtctgggacactgttgagcagaccaacaaccgcacctggtggactggcaactaa

SEQ ID NO: 1802 - DNA, 1863 bp, Aureobasidium pullulans
atgcttcgtacttcggctattctgtcctctttgctttgtgctggctctgtgttcgcacagaatggaaccactctttcgacattgggaacacccataggagcacccgtaaccggtgactacagtggtgcactgagaccgcaagtacatttctcgccgcctaagggcttcatggtatgattgaatcattcttctctacgtgacatttaattctaacgtgaccatctagaacgatcccaatggcctgttcgtcgacgctgatggcctttaccatatctactaccaatgttagtaattttactcgcagatcatcaagcacagcattgacacgcataccacagacaacccgacaggcctcgtcgctggcaatcaatcatggggtcacgctagtgagtttaacgtcagcaatatgcaggagattacgccgtgtgcttattatattcatagcaaccaccgacggctataccttccagaatcagcccgttgctctctttcctccaaacaacgagactttcgtgttcagcggctccgcagtggtcgatgtgaacaacactagtggctacttccctggtcaagacaatggtgtagttgccatctacactctgaacaacagcacttcgcagaaccagaacatcgctttctccaaagatggtggttactcattcgagcctttcgagggcaatccggtcattgatattggctcgactcaattccgtgatcctcaggtaaggaacaaaagttccaagaatctaccgcgtgcagcggctgaatgcattacaggtcttctggcatgctcagactgagtcatgggttatggtcaccgtctatgccgcagaattcgctgtcggcatctacacctcacccaacctcaaaaactggacccacgcttccaacttctctaaccatggtcttctcggcactcaatacgaatgccccaacttggtcgagatgcccgttgaaggctcagatgagaccatgtggctcatgttcatttccatcaaccctggcgctcccctcggcggctcgatctcccagtacttccccggttccttcaacggtactcacttcgaggctgtcgaccccgtcgctcgcatctccgatttcgccaaggacaactacgccggtcaattcttctccggtatccctggtactgagaagcgtctgagtatcgactgggccagcaactggcaatacaccaatgtcgtccccaccggcaacgagggctggcgcagcgcaatgaccgtcttccgccaaaaccatctcaagaagcttcctggagttggttgggatctcgtcagcactcccttcaacatcagctcgcagttctcacaagtccttgcttccaactcttcattgggtaatagcagtatcttgcttgattactcaaccgtgccttctagtgcactttactttgaagcaaacgttaccggtttgactcctagcacattggccggatctctcaacttcaccttcacctcatccatcagcggcgagaatgtccaaggtggcaccgtccccggcggtgccacatgggtatcacgcagaaacgcaggctggggtgccgagaacccctacttcaccgataaattctcctccaacggcgtctacagcggtagcgacaatggcacttggacattaagtggcgttctcgaccgcactattctcgaattgttcgtcaatggaggcgagcagagtgctactctggtgttcttccccgagtacccattggacacgcttagaatcggggctgcgaatattccagagggcgctggtgtcagtgtggctgtttggggtctgagagatgcttggtctggtcaggcgaactctgatggtcttgttttgggaaatactactgcttcggcttga

SEQ ID NO: 1803 - DNA, 2609 bp, Aureobasidium pullulans
atgcatcccaaagttctctcgcggctctttgccagtctcatcttgacatggaccctcggttttgtagtggtaaatggacaaagtactacccaaccttctcttgctcaaatcacaagcgcattggcatctggatctggtagtacctccttaggcagtgctttggcagaagctgggagtactctggaaagcatcatctctgacaccatcgctcaactcgcaagatggacgactctcattctatttcctgagcgctactattcgtatggacgctctcctgatgtgtatccgtcgccacagggccaaggcagtggagactggtcgcaagcgtatagtcaggcaaaagctttggttgctcagatgaccgttcaggagaaagcaaacatcactttgggctcttcggagacacacgactgtagcggcttcacaggtagcgttcctcgtcttgggttcccgggtatgtgcctgaacgatgccgaaagtggtgttcgcaccgcaagcaaagtcaatggttatccagctcaactacacattggcgcttcctggaatagatctctagcatacgatagggctcttcatctcggccaggagttcaagacaaagggtgtgaatgttcttctcggtccagtagctggtccccttggcagaattgcgactggtggaagaaactgggaaggcttttcaaacgatccatatctcgccggctctctgatcgctcctacaatttcaggcatgcagaagtccgtcattgcttgtgtgaagcacttcatcgccaacgaacaagagaccaatcgcagtcctttcctccaaggatttctcagtggcttgatcaacctgaacaattctgtctcgtcgaatgtcaatgataggaccatgcacgagttgtatctttggccgttctatgatgctgtcaaggcaggtgctggaagcacaatgtgcagttaccaacgagtcaacaacagctatggtgtgagtgtaaacaagtcaagatgtccatatctgaatgctgatcagttcagtgccaaaacagtaagaccatgaacggccttttaaagacagaactaggattcgaaggcttcgttgtaagcgattggtatgcgcaacatactggtgtcgctagcgtgaacgcagggctagacatggtcatgcccaactccatgtatctggatgtcaacagcttcgctaccgccgttaagaatggctctgtcaacagtactcgtctggatgatatggccactcgtatcctcgcaacctggtatcgcttcgccaacctacaaaatcctggcttgaacgatgctgaagcacgtcaggcggcggcagaaacaacactcttccagggtgccgtcgaaggccatgtcctggtcaagaacgtgaacaatgcacttccactcagaaagccgacagttctttcactgttcggatacgatgctcccggcggaaccaacacatccgccactagtttccagcttaagccaaacggaaagctcaatacacaggcatatactagtggtaagccctacactgatcttgatgacctgatcaactcggctcaggtgcttccggccggcttcgctggtcccgaggtcgctttgaacggaacactctatactggaggtggatcaggtgccatcacacccgtatcgtctatctctcctgaggacgcattccgcaatcaagctgccatcgatggcacgactttgtacgccgatttcacgtcacaagatcccaccgtcaaggctccgaacaatccatgcttggtcttcatcaactcccaatccagcgagacatgggaccgtagcacactagcagacatctactccgacactctggtcaccaacgtcgcttccagatgcaaaaacacaatggtcatcatccacagcgcaggcatccgcctcgtcgaccgctggatcgaccaccccaacatcacagccgttatctacgccaatctaccaggccaatacagcggaacctcgctgacggaaataatatacggacgccaatcaccctcgggtcgtctccccttcaccgtcgcaaagaatgaatccgattatggaagtttgctgcggccaacattgccggataggattaatcctcaatacttgcagtcggactttaccgaagggttgtttatcgactataaacgatttatacagcagaatgttactccgcgctttgcgtttgggtatggattgacgtattcgaatttcagctattcggggctgcagatgtctgctaatggtagtgcggttacatcgtcttctccacctggtacggttgctggtattgctgctgagggaggtacgacgtcgctttacgatatcatcgctaccgtgtcgattgccgtcaagaataccggcaatgttgctgctgccgaagtcgctcaactgtatctaggtatccctggcagtggcgtgcctaaagtgcttcgtgaatttgagaagcagttgattcagccaggtgcgagtgtcactatgacattcccgttgagaagaagggatatgagtatttgggatgcggtgaaacagcagtgggtgttgccttctggtgcattcaacgttatggttggaaagagtgttttggatattcagttacaaggtactttgacgttgtag

SEQ ID NO: 1804 - DNA, 1104 bp, Aureobasidium pullulans
atgttcactaaatatttcgcaactgcagccttggctgccactaccgccctcggcaatagctaccaactcgttgaggagagtcgtggagtcacattctttgacaacttcgacttccaaaccgattcgagtccaacacacggtacatcaaagtatatgcccagagcgtatgctgcccaacacaagctcattggcgttgtcaacaacaatggctcagcaggcccttccgcatatatcggtgttggctcgaccaacgttactgaggctcgactttccattcgtttggagagcaagaactcatataaccacgctcttgtgctggctgatataaagcacatgccatccggtcctggtttatggccagctctttggatggtcaacccaaccaattggcccgccggtggtgaaatagacatcatcgagcaggtcaacaataatccatataacactgccaccttgtacgtaatccccctcctccttttctttatcagaactatgctaacttggtttctttctaggcacacttcggcaaactgcgcgataaccggcgactacatcagaagcggtcaatccgatctgttcagcggtacactcgagacccccgattgtgacgtaaacagccctttgcagtccaagaacgcagggtgcggcatccgcgcccctgaaaacgacacctacatggtcggtaacgagagctgtgtacactccaccgcaggctccggcttcaacgcccaaggcggaggtgtatacgccaccctctggacctcagcaggcgtcagcgtctacttcttccctcgcgagtacatcccctccgacatcaaagccaacaagcccgaccccagcacctggacctccaaacctcaagccgtattctctggcaactgctgcaactttgactctcacctcaaggacatgaagctcgtcatcaacactgaattgtgtggtgattgggcaggcaacacctgggaggccgacggagctgccgctgaaactggagtcaagacttgtgctgagtatgtgcaaaacaaccctcaggccttcaagactgcttattggttgatcaactcgatcagcatcttttcgaatgagactgttggtgcaaactaa

SEQ ID NO: 1805 - DNA, 1828 bp, Aureobasidium pullulans
atgttcagacaactatcgatagccgctgtggccttgtcactaggtacgttaatcaccgatacaactcccatgcaagagcgttcctttttaacatctgtacagcatcctctcaagtatcagccaagcccattcagcgtagggcagctggcgattcgtccttcgactacattgttgttggatcaggacctggcggtgtcacagtcgccgacaagctttccgaaagtggtgcatcagtacttttggtcgagcgtggtcaggcaaccactggccaatggggtggcaacaacaagcctcaatggctggacaactccggaatgaccgtctatgatgttcccgctctcgacgaccagatctggaccaagggcggtgacttcacaaatgatattttctgcgacgacattgttggcggtatctctggttgtgtgctcggtggcagtggcgctatcaactcgggactctggtggaagcctacgtcctgggactgggacactatgttccctgagaagtggaacagcaccaacatggccaacgtgaccgaccgtgtcttctcccgtctgcccggcactgaagtcccttctcaggatggacagctctactatcagcagggtgctgatatgcttgagggcgctctggatgctgccaactggacactggtcagtgccaacgaagtccctaaccagaaggacagagtctactccaacaccacgtacatgttccagaacggcgaacgcagcggacccatgtctgtataccttggatctgcatactcccgccccaacttctcactttacaccaacgccattgtcgagagagtcatcagagagggatccaagatcactggagttgagatttcgaacactgccgacgatggcttcagaggaaccgtcaaggccaacaaggctgtcgtccttgctgccggtgcattcggtacccctaaggtccttttcagaagtggaattggcccaagagaccagctcgaaactgtccgcaacactgagggctccaagatgatcggagaggatcaatggattgatctgcctgttggccacaatcttatggacaatatcaacgtaagtacacttgcaagatcgcaacatagcataagctgacttttggctcatagactgatatcgtcatctctcaccctgatgtcgtttactacgacttcgctggtctctgggaccaccccaaccaaggcgacgtcgactcttacctcaatggacgtaccggcatgcttgctcagtccgcttccaacctgaaccccatgatctgggagctgttgaacggcaccgacggtctccaaggtctgcagtggactgctcgtgttgatacttccctcgacatcaacaatgatgctaagcacaacatggttcttgctcagtacatcaccatcggtcaggccgcccgtggcagaaccaccattactcccgacttgaagatgaacgtctcgaccggtgttgacgttatgcagcacgagtccgaccaggtcgccatcgcccagggtctcgacgacatgagaaacatcctcaagaacgtccctggccttgagattctctctcctgctgctgacgtttcttctctggattacgtcaagtcgaccacccacctctacgtcaaccactggttgggcagctgcaagatgggcaacgatgatggtcgtgacaacggtagttcggttgttgacgccgactccaaggtctacggtaccgacaacttgttcattgccgacggctccatcttccctggccagaccacttcaaaccctcaggccgccatcaccatcgtcggcgagcgtgttgccgagctcattcttgcactcaaccaatag

SEQ ID NO: 1806 - DNA, 3426 bp, Aureobasidium pullulans
atgcagctcacatctgccacccttctcgtggctggcctcgctgctcagcaggccactgcccactggcccatcaacgccggcaagttcagcacttgtgacaacgcagacaccaagtgttcgactgagcaacacaagggttacgactggtccggtcttcaacttggctcttctgtcaccaactacggtgccaacaccttctcaggtggctggacctgcaacagcctcaagtcaaagcgtgatgagttgaccaagcgtaccttcaacaacaagtgcatctccggtaagctcccttcgtggggtgcttctggctcctcatccaagcagggcgctggtagcctttccattggatgcagcggcgagaagaacaagttctctatctccgagatgcacatttcttcctcttacagcaccaacgttgactgccactacaacatgcccgacggctctgtctgcaagcacactgttccttgcagcgctggtggctctatcgtcaagaacacccagtgtggtggtgccatctcggtctcgttctctcacggcaagggcagctcaggcagctcgtctggcagcagctcaagccagggcgactgcgatctcaacatccactccgttggatttgcttgtggttcgggctcgtcctctactagtctgtctctgccttcgtctgtcttcactccctcttcttcggccgtctactcctcgtcagcctttgtttctttcagcaccgctgtccccgagaccacatctgccgagttgacctccaccgctccttctttctctatcgagtacaccagcagcagtgtcgtcgtttctagcagcagcgtttacgttcctgccagctcttcggctcctttccccagcggctaccaaaaccagactgccagccttcctaccgtcggtagcagctcagtctacgttcccagcagctccgaggtctctcccgtcgagtcttcgtcctcatcctcggtcgttgttccctcaattcccgttggtaccggctactacccctcagcttccgtccctgtcggcactggctactacccttcgagctctgctagcagctccgttgtcgtccctgtcggtactggctactacccttcgagctctgctagcagctccgttgtcgtccctgtcggcactggttcttcaccttcaagcagcactatcattcctgtcggaactggttcttacccctcctccactggtggagtctacgtcaacagcactgttgtctcttctgcttcgacctcatctgccagcagccctgctccttctgccaactgccctggagtcgttcccagctgcttgaacacctacctctccagcactggctgtgccgacaacgccgatgctgactgctactgcaagagcgaagacttcatcaacagtgtctacaagtgtatcgatgcctacggcggttctgatgagaacgtttctcaggctatgtcctacatggtcggtatctgcgccaaggctattccctccaaccctgctattgtcactgcggttccttcttccatcgacatcaagccttcttcgtcaaccgtcaaccccgtcaccggctctcttagcgcagtcacctctgcaagctctgccactgactcgattgtttacgttaccgacgttgtcaagagcaccacaacttactgcccggccggccagacgatctcaatctctggtagcaccaccgtcctcaccgcacctaccaccatccctactgtgtacaccacacagtctactatcactgcttcgatcatctcctcagtgaccggtgctctgccttcgggcgagtcggcttacgagacctcccccgtcgagacttcgtctggtgctccttctgcttccgagacttcccctgttgagaccactcctgcatctgtccacgtccaggttcctcacaccgttactctgtacagcacccaggttgctaccatcactagctgcgcagctgatgtcacgaattgccctgcccgcacctcgcttgttcctactggcagcaccatcagcaacatctggattcccgtcacttctgcccacgagacttcccctgccgagactactcctgctgcttcttcaggtgtttcctctggcgtctcctccggtgtcgtctcatctgctgtcgaggttccttcagcctccaagcccgcttcatccgcttacgagacctctcccgccgagaccacttccgctgctgtctcttccggtgtttcttccggtgtctcatctggcattgtctcctccgctgtcgaggttccatccatgtccagccctgcttcatctgcttacgaaacctcgcctgccgagaccacccctgccgtctctagcgccccttcagtccccaagaccgtgactctttactctactaagattgataccatcacaagctgcgccgccgacgttacaaactgccccgcctcatcgaccgttcattctacttctctcatcgccactggtgtgaccaccgtttcttccgctttcgagactggagccgtacctgccacttcttcggtccctgtcgttcctgaggttcagagcaccgtcatcgtcactgatgtcgtcaagactaccgtcacgacgtgccctgtaggcgagacaatcacctcggctggaaagaccaccgttctgaccagcgcctcggtcatcacttcccagatcaccgtcaagagcaccatctcgaccaccgtccctgcccagacccagactgttgtttctcacgagtcctcttcagctgttgctgcaattccttcgtccgcagagatcacttcggcccctgctgcacctaagactttgaccatctactcctcggttgttgctactatcactagctgcgcagcagacgtcacgaactgccccgcctcatcgactgtcaagagcacctcgttctacgctgtaggcaccaccgtctcaagcgagtcggtccctgccgtcactggaccttccgaggttgcacctgcaactaccgcccctgcagtcgtccccagctccactcagcccatgaccaccatcacctactcctcggtcatgactgtccctgctacctacactgctggtgaatcccagggtgctcccgtccccagctcttcggtcacttccacgatccacatgactttgactgttcctcaggttcagttcatcactgcaactatcaacggaaagcccagtgttggtctgagctacccttcggccgtccccgccaccactactcctgaggctgctgctaccactcctgtcgccggcgctgctacacccgcagtctcagctgccagctcaggcttcgctcctcactcatccactttggcatcgacctacaacacccctgccctccccactggcagccccatctcctacactggagctggtgccaaggttggcggctcattcgccggcctcgcccttggtgccgtcgccgccatccttgttctgtaa

SEQ ID NO: 1807 - DNA, 1469 bp, Aureobasidium pullulans
atgtttttctctaccaatctgctcgctgcaattgctggcgtgtctacattctgtgtagaagtatctggcgcattgttgccggaaagagatggggtttcgtcttttgtctatggacgtcaagaatcgacaaatacgtcgacatcatggccatatggacctttcagtactcaaggtcgcgatatcgtcaacaccagaggcgaggctcaaacctttgctggagtcaactggcctggcagcggtgagaccatggtccctgaaggtcttgagtgggcatctatcgaggacattctatctcaagtcgagagtgtagggttcaacttcattcgcctgacatatgctattgagatggtggaccagatctacgagagaaatggctccgacgtgggcttggaaattgctatgatcaacggtctgggctatgagaatgggtaagtcataccgaacccaagcactaagaaccatactaacatgagaacagtaccaaggtaaccaacgagatcatcgccaagaaccctactttcaacaaagacaccacccgcttcgagatctgggaccacattgctcaagtcgcccagtccaagaacatcttcatccatcctgacgtgcacgtcggtaaagcacaatggtgctgcaacaacacagatggtaacgcctggttcgacgactacaacttccccgtcgcgaactggaagcgtggtcttcaatacgtagcccaatgggctacgaaacataacaacgtcgtctccatgtccctacgcaacgaactccgccgcgctatcaacgagaccgctcccacttctaccctcggctacaactgggtaacgcttgtaggcaactacacagcagccaccgacgccatccacgaatcaaacccagacctgttggtaacgtggtcaggaatgcaatacgaccaagatctctccgccctaatccaaggcaaaaacctcaacactgcgccttgctacaaatgcgatgccatccgcgacggcctccgcagagaacccatcatcttcgatctagccagccacccctgggccaacaaagtagtctacgaactccacttatacagcatgtccgaagacctcgacacgggatcctgccccatcgtattcgcagaactctacaatgccggtttcaacgcaatcggaatggccccaccacccgcctgcaacattacccaaaactgccatcctgctgtcagaaatactcctgttattatctccgaattcggagctgcgcaggatgtcacgctgctgaacaatactttgatgaattgtttgaaggatttcacggtgcagaataatgtttcttgggctatgtggagtctggctggaagttataggattcgcagtggtggacagggtgtcggtgatacttgggcgctgggcaactacaactggaccggttggaattaccctgaaggtgtagagtcgtggtggaagccttgggttagctcaatgtttgattag

SEQ ID NO: 1808 - DNA, 1435 bp, Aureobasidium pullulans
atgcgtgtttcggctgctatcgctgccactatcctggctggctctgccactgccgcacctactcccagtctcttgagcagcattctcggcctactcaccaacgacttgaactcccttctcaattccttgggcatcaagttgcagaccaacgccaacatccacggtgctaccgtcaactaccagcagcagtgccccttcaccatcgacacttcggtctctgtctctaccaacgtgttcagccacgacattacctggcccctcggtgtcaacggcggcaactacatcgactggaagaccttcaaggccaacggtgccaaccttggtggatggctggagaaggagcgaactcacgaccccatctggtggtcccaggttggcggtgacagcgctcccgatgagtggaccttgtgccagactcttgggtctcaatgtggtcccattctcgaggctcgctacgcctcgttcctgaacaccaccaccatcgatcagctcgccagtgttggtgttaacaccctccgtatccctaccacctacgccgcttgggtcaaggtccctggctcccagttatactctggtaaccagcaaaagtggctcaagatcattaccgactatgcagtgcgcaagtacaacatgcacatcattgttggcctccactctctgcccggtggtgttaacaacctcgatatcggcgaggccctcttccacgatgactggttctacaacgccaccaacctcgactacagtttccaggctatcgacggtgtcttgaacttcatcaagtcatctggctaccagaacgccttcaccattgcccctatcaacgaggcttctgacaacctctccggcttcggttccgctgctggtctttctgacaacgccaccaactggatcaacacctacatcaacggtgttctcaagaagattgctgtcgttgacaagcgtattcctctccagctccaggactgcttcaagggcgctagcttctgggctcctttctacgatgctagcaccaacatcgtcatggattcccacgtctactacttcgccgctgccggaacctacgccaactacgtcaaccctgctgtctgtggccaggcccagtacattgctcaggaaaccaagttccctgtcttcatcggcgaatggtctcttcaggtatttttttttcattttttcctctttttgattgaacacgcactaactttggacataggctatgtacaacaacaccttgaacgtcgctacccgcaagaccttgttcgacactcagcgctacgcatggcagaagtatgttgccggcggatccttctggactgctgtttcctactccactgccaccgttgatggtgagggcacacagagagattattggtcatacgtcgacctcatcgctgctggagttatcactaagcagacaaatgcctcttactgctag

SEQ ID NO: 1809 - DNA, 6009 bp, Aureobasidium pullulans
atgaggacttcattcttgtccagcattgctggtcttgcagctcttgcagtctgccaaagctcaacagatggttcctcaacctcatcttcagcattcgtttcatccagcagctcgcttgttgcaacaagttcatcgagttcttctctcgccacatcaagctcttccctcgctatatcagattcatcgagctcttccctcgttgcaacaagttcctcgagctcttctcttgttacgtcacgttcatcgagctcttctctcgtttcctcgagctcgtcgacagtcgtttcttccgcatcctcttcagtcactgctttgaccgtcgctactgatgcttcgggtcagtacacggctatcaacgctgctatctctgctgctcaaaactctggcatccctactgttgtcgtaaaggcgggtacatattccgaggccatcgccgtcagcggtacccagacggtgactgtcgtcggaccttccgctagctcagttgcccaaaatcaggtcaacgtcattgccagcggcagcaatggtgtcgtcaacatcgctacatctagcaccaagggtgtcactttcaagaacttgaacttgaccaatgctgccaccgatggaaccgcccctgccgtctatattagaggaagcaagcatggattctacaactgcgccctcatttccggcagtactggcgtctatttctcctcctatggaactgctctcattgccaactcctacatcgagggtgtggataagctctttaccaacttccccactgtctacgtctatgggtcaactattgtgcctaccaacagcagcgctctgattgtgtatgctaagggtgtggctgccggtatgatgaacgctggcaactccactgtggttatcgattccagttcagtggctcagaaagctgggttggtcaacaccaacgtcttccttgcagcagccaatggtaacttcacacaagttgtttaccgtaacaccaaccttggaaacttggtcgcttctagtggtttccaccccacctcttgcaaatacatcaatttcttcggtgaattctccaacgttggacctagttcttactcggccaacgccatcagcagatccaaggtttgcgacattcagatgactgtcgaccaggccaatgcctttactattgatcaagtatttgggtatacttttgcaggctacaactcctttgacacaacctgggttgactcggatgtactgagcgtgattcagaagtccgactccgctcaagttgcagcagtctcgagctctgttgtcacctcttcagtctcatcaactgtatcatccgcatcatccttgtcgaccagcagtgtcgtctctggcagtatcagcgtctctggcagcagtagcatcgcgtccagcggcagtgtatctagcagcggccttgtctctgccagcagcaccctgtcggtttccagctcgagcacttgtgccacacctactccttcggctactttgattgtctctcagaatgccacggcttgccagtacggcaacatctctgctgccatcgctgctcttcccaacgatagcaagccttacaccatttacatcatgcctggtacctataatgagcagatcagcatcaccagaaacggcaaagtcactcttattggtgagaccaacttcaaaaacgactacagtcaaaaccaggtcaaagttcaattctcgagcggtcgtctcacctcattgagccagaacgagcagactcccgtcatcaactccaagaagaccaatgacaactctggtctggcaatgtacaacattgacttcatcaacttgtaccctcaaactgccaacaccgctgctcttgctgctgatttctatggtaacaacatggctgcttatggatgttctttcattggcttccaggatactcttctggccaataaaggtgttcaagttttctcgaactcgtacgtcgagggatctattgacttcgtgtggggcttctcgacagcttatttctacaagtgtgtgatcgccaccaacaccaagggtgcatgtattgctgctcaaggccgtaccgtcggagtgaattctgcatacatcttcgactcgtcttacattacctacacctccacctatggcagcacgtttggagccagttaccttggtcgtccttacagcaactactccaccgttgtgtacaagaacagctatctcgacaagcacatcaacgctgctggttggcaagtttggtcgacaggtaaccctcaaacgtcgaacgttttcctcggagaatataacaatactggaccaggagcatgggtctcaggaaccgctcgtgcttcatttgcgaccaacatgaccgatgatcaggttgcagcttacagccttgcaagctgggttggagacactagcttcattgatcaggctgcttggaactatgagacgtcttggaaattccctgcatcaactactactagcggtgctagcagcacttcttctggtgtctctggtcctaccagcactgcttctatcaatgctcaccctgacagcggcaccgttcctcctcagtatgcagtcattgtctcagcagatggtcagcacaatgcttcgttcaccaatttgaccgccgctcttgctgccctgcccaatgacaacaccaatcagaccatcttcttgtacgctggtacatacaacgagcagatcccttcaatcaaccgccctggtgctgttcgtgttattggttacacctctggcaatcctggacaaagctacaaagacaactctgtcactgtcacttttgctcgtggtctctctgtttctcctctacccagtggtcacagcgatgcagaaactgcgaccctcgcaactgcctcgaacagaatctccttctacaacatcaacttcatcaactctgataaccttgatggtctggaggcaagttacgtcacattggctgcctctatctatggcaatgatattggtttctacggatgcgccttcgagggttggcaggacactctcctgactggcgcaactgcaggctatcagtactacgagtcttgctacatctcaggtgccattgacttcatttggggttacagcaagtcctacttcaagggatgcactattggtgccaagaaggccaaatctgccatgactgctcagagtcgtgcttctgcttctgctattggcggctacatctttgatcagacacttttcacttctgctacagatgcgacagtcgatctcacaggcactgtctacctgggtcgtccttattctgcttacgcactggttgttgttaagaactcttatcttgatgacattatcaacccatcaggttggaaggtttggtcagccactgaccctcgtactgaccacattacattcgctgaattcgccaatgttggtcctggcgcttggcaaaacaatgttgcagcccgtcaagcctttggtaatgccactcttttgacatctgacacttactcccttgcatctgttatggataacacagcttggattgattctacctactggaactcgattgtcactcctgagcccgctgtcgtcaacactactgctcccaacaatgtcactgtttcaggatcaagctcttacaacggtaccgttccccctaccggtgctatcatcgtttccaagaacgccattgatggtatgaccacctacgacacaatccaagctgctctcaacgctgcacccacctcgagcaagacaaatgctaccatcttcatctaccccggtacatacaacgagcagttgattgtcaacaagagcggcacaaccatcttcatgggctattctgactcgaccgatgactacagcaagaaccaggtcacaattcagcaatcctatggcgaggatactcagggcactggaagcgatgttgatgccgccaccgtctatgctactggcaattacttctatgcgtacaacgtaaacttcagaaacaacaacggcacacaacagaacattgcttctttgggtttcgcagttaagagcagcaagtatgccttcatgcacggttgtcagatctacggtaaccaggataccttgtacatctctggaaacatgttcaccttcaagacttacatcgagggtaacgtcgatttcatcttcggtgctggctctggttacttcctcaactcgaccatctcgcctaatgaagacggtgattctattactgctgctaagcgtgcaaccaacactacagcggcaggattcgtcttcgatcagtgcacaatcgtacctgctgctggatcttctgggttcaagaatgtctcgctaggacgtccatggaacaatttcgcccgtgttctttatgctggctgctaccttgatggatcagttggatctgctggatggactcaatggagcaagtcatcacctcagactgatggtgtgacctttgctgagtaccacaattacggacctggaagcagtacttgcaagcgtgccagtttctcagagcagttgtctgattctgatgctgctcagttccagttggccaacttcttccctaccacatcctggattgacttctccgttgttgatgttcagcctttcactgctgggttcggttctgctcctgctgcatgtgtcagctcttcttctttgtcgtccttcatgctctcgacgatctcttccaccagcagcagctctgttactctgcccctcgttaccacacaggtcaccactactatcatccagaaggcaactacattcaccacactcactcaaggagacattacttcgacttctgtaacttatgtcacagagaatgatggccttactgtcactcctccggctgttttgaagacttcaatcatcaaggcaaccagcgttctgacttcgactactacaaaggcagccaagaccgcaactttgaagtctacttctgtcgtcattgctactgtgactgcctctgctaaggatgtcactgttcagcaaatctcgaccgtctcgggcgaaactaccgtctctggcaaggatacgactatcaagagcactgaaaccgactattacactgtatctgtcgctggaaagacctcgagcgtcaaggctactagcactgtcattgcaacttcgacttcttctcccaagccggtcacaatcactgagaaccttggctctgtcgtaactgtctaccagacttcgacattgaagggtgcaacagtcagcagtgtgactacagttcaaggcgcagatgtcaccagctcgacgactcttaaggcctcaactgtgactatttcaagctactcggtcaagacaaccaccaagggaaccactatcactgcttcatgtgtccccactgcagcagctgctagactcttcagaagaggtcttgaggctcgtgctgctggaacaaccaccatctttgttagcactactctgacctcctacatcaagacttcggtggtcaccagcgcaggatcaaccctctacaccagtgtaacgagcaccagcactatcggtggaaccagcactctcaaggctgctacttctacgatcttgagcacttcatacgcaacttcgactgatctcatcactgagagtgccgccgccgcaactaccacatcagtcattctgtcttcttcggcgactactgtgactgctgctggctcgacagtgacaaaccttgcgtacactaccgtttacagcactgtttctctgcctgcaagcacctactacagcgtcgcaactgtgaagtctacacaaacagtttccgctgatgctgccaccgtgaccagcctcaagctcgtttccagcaccactgtcgttactgctgctcaatcaactgtgaccatcacaaacgctgcagactcgacaacaactatcctgaccacacttcctgcatccacagcaactgtctacaagactagctcgctcaagggaagcacagtcaaggtcactgtcactcctgctcctgccaccaagacgacaaccgtgaagagcacttccactgtcttctcgactgtcactaagactgctaagaacgcacctgcttgcacggattag

SEQ ID NO: 1810 - DNA, 1372 bp, Aureobasidium pullulans
atgaagacatcagccattctcgcagcttgtgcttctggccttgccgtacaggcattcagtgtcccaagaatcgcccaaaatgccgctcagcaagtccaaggcttcatgtcgcctgagcagtacctgatcgaacttgccccaggcgagaccaaatgggtgacagacgctgagaagtgggctctgagaagggtatgccacagtaaaatcactctccaaggctacgctgaccagattacagggaggcatctcgttcttcgatatcaccgacacgcctgaccttggttccgtgctcaagtccaatgccgcagtcaagttcccggaacatacccactacaactcgaccgtgaagagccttgcccgtaatttgaccaaatcgaacatgcacgatcacctcgagaccttcaccgccttccacacacgctactacaagagtgaatacggcgccaagtcatcattctggctgttgggccaggtcaatgacaccctcgcacacgcaggagctctgaagcatggagcaagtgtcaaacatttcgagcatgcttggggtcagaactcgatcattgccacacttcccggcaagaccaacaagacggttgttatcggtgcccaccaggacagcatcaacctcttcttcccttcgctccttgctgcgtaagtacattcaagacatgacgagccaacgatcacttcccactagtggggactatatggtgctccactttgtactcgagaaacatgctaatcttaccttctgatgcagacctggtgccgacgacgatggcagcggtaccgtcactattctcgaggcattgcgtgttctgcttcttgaccaggatatcatcgagggcaagcaagagaacactgtcgaattccactggtacagcgctgaggagggtggtcttcttggatctcaagccatcttccagacctacgagaagactggccgtgatgtcaaggctatgctgcaacaagacatgaccggttacgtccagaagactcttgacgctggagagcccgagagtgttggcgtcattaccgatttcgttgatcccggccttaccgagttcatcaagaaggtcgtcaccacctactgcgacattccttatgtccttaccaagtgtggttacgcatgctctgatcatgccagtgctagcaaggctgggtacccaagtgctttcgtaagtcatggtttcttatccggtctcgagacacgactgacaaatttcaggtgatcgagagtgatttcaagtacagtgacaacaagattcacaccaccgaggataagatcgaatatctcaacttcgatcatatgctacagcacgcaaagctgacccttggtctggccttcgaacttgcgtttgctaaattctaa

SEQ ID NO: 1811 - DNA, 802 bp, Aureobasidium pullulans
atggtctctttcaagtctttcttctgcgccttgatggccgctacttcggtgctggccgcccctttcgacttccttaccgacgaggttgatggaaacgcaactctcgccaagcgtcagagcacccccagtgctgagggtactcacaacggctacttctactcctggtggactgacggcggcggttctgctcagttcactctgggtgagggcagtcgctactctgtcaagtggaccaacactggcaacttcgtcggtggaaagggctggaaccctggtaccggccggtaagttgacgaaagtgcttctgttgatccaacttcactgacaatacctcaagcaccatcaactacggtggaagcttcagccccagtggcaatggctacctcgctgtatacggatggacccgcaacccgcttgtaattaactcggtgtcttcccttctgaaccaaacctatcatactaactccgcaaataggtcgaatactacgtgatcgaatcctacggaacctacaaccccagccagggcgcccaattcaaaggcagcttctccaccgacggcggcacctacaacgtctacgtctccacccgcaccaaccaaccctccatcgatggcactcgcaccttccagcaatactggtccgtccgcaccagcaagcgtgtcggcggaaccgtgaccatgcagaaccacttcaacgcgtggcagaagaatggacttaaccttggaactcactactaccagatcgttgctactgaaggctaccagagcagtggttcttctgatatttatgttcagactaagtag

SEQ ID NO: 1812 - DNA, 1949 bp, Aureobasidium pullulans
atggcctctctagcaactaccgcaaccgctctgctcgctctcgctgtgccatatgcctccgctatcaatctcaaggtatcctcatctggtggcaatgcttcaagtcctctgctctatggcttgatgattgaggacatcagcaacagtatcgacggtggtctttatggccagactctacaaaacaatggtttccaaggagacagtccaggccttactgcatggacagccattggttcatccaccatttcacaagacaactcctcagctctttctgacgccttgccttcgtcacttctgatcaagtctaacggaacgagtggtactgttggtgcatcgaactcaggatacggtggcatcagaggtaactatcattgaaatgatacggtatcgtaacaccgaatgctaaccattctacagtcttacctgatcactacgccaactacttttatgtcaagggaagctacactggaaacgtcactctttccctcgtcggttcagacggtggtgtacttgcctcgacgcacgtttccgtcaacagcaactcgtcggcctttgggtactacgagacctatgacatgtatgccggaaaggctgctgctaatgggaacaatacctggcaattcacttttgatgcttcgctcgctaccgatggccagctgaacctcggtctgcctcagctattcccaacgacatacaagggccgcttcaatggtatgaacaacgagattgcaaccgtcattgatgagattggtggcaaatttttgagactgcctggtggcaacaacttggaaggagcctcgatcccggatcgatggatctggaacaacaccattggccctttgattgatcgtcctggaagacaaggtgactggacttaccctaacacggatggcatgggtcttatcgagtacctttactggtgtcaggacatgagtctcgaacctgttctcgcagtctgggatggcctggtcttggccgattcgggagccatttctggcgatgaattgaagccatacgtgcaggactcgctgaacgagcttgagtatttgacgggcgatacaagtactgagtggggcgctcttcgtgcatcccacggtcaccctgatcctttccacatcaactatgttgagatcggaaacgaagatatgttgaacaagggtcttgacaactatcaatcgcgcttcgacatgtattacgaggctgtccatgctgcataccccaacatcaccatcatttcatccgtggctccaggatcaactggcggcaatggtagtggcattaacgttccagaaggcgcgtaccaggatttgcatcagtacttgcctcccaaggacttcatcgccaacttcaacacctttgacaactgggaccgctcgcagcccttgttggtgggtgagtacgcatcgaccaccttcgacaacggcagtgcgaccatctggaccaacatgatgggttctgtctctgaagctgtctacatgatcggtatggagcgcaactctgacgtcgtcaagatggcttgctatgcgcctcttctcgagcatttcgaccgcgcagagtggtcgcctgacctcattggctttgacgcaactaccggtgtcactcgctcgacgagctacttcgtgcagcagatgtttgcatccaacaagggtgacaccatcttgtctgtagaatctgataccggctttggtcctgtgtactgggttgctagcagcgcaggcagcacgaactttgtcaagctggccaattacggtggtgatgagcagaatgttacattgaccctggacgggaagacatctggctcattggcagtcctaagcggagggcagtacgagtcaaactatcccggccaggagaacgtgaagcctgtagtgacagaggtgactggttcgaatggaacattctcaatcagcctgcctggctggtccgtggcagtgttgtcagccgagtag

SEQ ID NO: 1813 - DNA, 1493 bp, Aureobasidium pullulans
atgatccgcgctctcttgcttgcactgatcccctctgctcttgccatctccgaatggggacagtgcggcggcaccaactggtcaggctccggctcttgtgatgcaggattggcttgttcaagtgtcaacccctgtgcgtggatttgatggatgaatctcaagtcttagtactgacataccccagactacttccagtgtgtctctggcgcagctggaccgacatcgacctcgacctcgacaaagcctgtcacaacctctgcccgacccaccacgactacttctggtgcaggcacaaccttgattacgtctcgcacctctactgctacatcacctaccacctcagctgctggtgctaccaatgccgctggaaatttctttgctggcagacagctctacgcaaaccctttctacgcgtctgagattgccgccgccattccttctcttccagccagtctaaagccaaaagctagtgcagttgcaaagattggaacctttgtctggctgtaagtttttgtgtcaagataacaacattgacagatactgacatccaatcaagtgacactgctgccaaagtacccaccatggatacatacctgaccgacatcgaaaagcagaacgctgctggagccagtcccgaaatcattggtggcttcgtcgtctacgatcttcccaaccgtgattgcgctgctctggcttccaacggtgaactgactgtcgcaaacgatggtctcaccaagtacaaggcatacgtcgattcaatcgcagccattgtcaagaaacactccaagaccaagattgttctcctcatcgagcctgacagtctcggtaatctcgtgaccaatctgggagtggccaagtgtcaagaagcccacgatacctacatcagtggtgttgagtatgccctcaagaccttgaacttcgacaatgtctccatgtacatcgacggtgctcacagcggatggctcggatggcccgccaacattggacctgccgctgatctctatgcaagtgtctacgcaggtgcaggcaagccaaaggctcttcgtggtcttgtcactgacgtctccaactacaacggtttcgatcttgccagcaagcccgtttacaccgagagcaatcccaactacgacgagaagcactacatcaacgctattgctcctcttctcaccgcccaaggcttcccagcacacttcattgtcgaccaaggccgttcaggcgttcagcctactgctcaattgcagcaaggtgactggtgcaacgtcattggcactggctttggtgtccgcccaaatacaaacaccggagatgcgcttgtggatgcctttgtctgggtcaagccaggtggtgaatcagacggaacttcggacacttctgctgccagatatgacgcccactgtggatatgcagatgctctcaagcctgcccctgaagctggtacttggttccaggcctacttcgagcaactactcagaaacgcaaaccccgctctctag

SEQ ID NO: 1814 - DNA, 1658 bp, Aureobasidium pullulans
atgatctctgcctctgcctctactttggcagccatcctggctcttggccatggagtcctcggtcaacaggctggcacctcgactgctgagaaccaccctcccatgagctaccaacgctgcactactggaggaacttgcacaactgtcaacaccaacattgtgcttgatgccaactggcgctggctccactctaccagtggatacaccaactgctacactggcaacactttcgacgcgtcgctgtgtcccaacaatgtagcatgtgctgccaactgtgctctggatggagcaggtgagtggccgtcaattgcctgtgcgagatacacttactgatcttcttcttcattagactacactggaacctacggcattcaggccagtggaaactctgtcagcctgaagctcaagcaaggcaacaacattggatctcgtgtctacctgatcaacggcgacaagtacgagttgttcaaactgaagaaccaagagttcactttcgatgttgatgtgtctggacttggtaagctcttgttctggtcagtatctcgctgaaacatactgatcatctctcaggctgcggtatcaacggtgccttgtactttgtcaagatggacgccgatggtggtcttgccaagtacccaaccaacaaggctggtgccaagcttggtaccggttactgtgatgctcagtgccccagagacctcaagttcatcgccggaaaggtgtgtcaatacgtactggtcgctttcagaaaggctactaactcgctctacaggccaacgtcgagggatggaagccatcgaacggtgacgccaactccggagaaggtaacaccggctcctgctgtgccgagatggatatctgggaggctgtaagttatattttcccttttctccttttctttttccttttcatttttcgacttttactgacactcaccacagaactccatctccactgctcttactcctcatgcttgctccaccaacggcccttgcactggcaacactacttgcggttctggcgagtcccgctacgacggctactgcgacaaggatggatgcgatctcaacccctacagattcggtgcacccaactttttcggacctggcaagactgttgactctaaatcgaagctcagcgtagtcacacaattcattactgcagtccgtcataacctccctgtatagcgagagaatagcaggaaatgctgacaaagtgtacaggacaacaccgctactggtaccctgaccgccatccgccgtatctacgttcagaacggcaaggtcattcagcaagccgacaccaacatccccggaatcacaaagaccaaccagatcaccgacaagttctgcaaggaacagaagaaggtcaccggtgaccccgacgagttctccgagaagggtggtcttgccgccttcggtaaggacctcgatgctggtatggctcttgtcttctctgtctgggatgaccacactgccaacatgctctggctcgactctacctaccccgttggatccaacaaggttggtgctgctcgcggtacttgtgccaccacctcaggcaagcctagcgatgtcgagtcccagcaagccaacgctgccgttaccttcagcaacgtcaagttcggtgccattaactccacctacaaagcttcgtaa

SEQ ID NO: 1815 - DNA, 1663 bp, Aureobasidium pullulans
atgcttttctcaagcattcttcttccggctcttacactttttacccccttggcttccgcagcctttggcctcaccagcaacaccgacagttatgttgtcgacgctggagcatcaaatacgctggtcgtgaccgtcaacaagaagagctgcgatatcacgtccattctctaccgtggcgaggagcttcagtacaaaagcacaggatcccacatcagctcaggtcttggatctgctaccgtgactggagaagtcatcgccagtcaatatgccaagatcacttgtaagaccagcacgttgactcattacatcgttgtcaagagtggcgacagcgccctgtacatggccacatataccacagcggaacctactattggcgaattacgattcatcgctcgtctcaactccaagtctttgcctctggagtatcctttcggtgccgcttcgaccattgctgggagtacttctaccgttgaagggtcggacgtgtttgttgttaacggcgagacacgaagcaagttctactccagtcagcgcttcatcgatgaccaggtgcattgcgtctatcgagatggttcggatccaatccatgcgtgtatggttcttcccaatcccgcgtatgaagcttctagtggtggacctttccacagagacatcaactccaacaacgttggcgattacactggtctctacttctacatgaactctgggcatgtgcagacagagtctttccgtcaaggccttcatggtccttatgctattgtgtttagtcgctcgggtatcccagcagtcagcagcgtcgatacatccttcttctcagacatccaagtcactggatatgtagctgactctggtcgtggtcgagtctccggtacagcctctggtattggaagctccttccagactgttgttcactggtacaacacaaacaatcagtactggacatatgcaaactctggcggcagctttacctccccacccatgcgaccgggtacctacacgatggtcctctatcagaccgagttcaaggtagctgagactactgtagccgtcactgctggatcaacagcaagtaagaacatcgcatctggagttactgcacgcaagaccatctggacgatcggtagctgggatggtcagcctactggattcctcaatgccgacaagcaacttcgtatgcatccatctgacaagcgcatgtccagttggggacctcttacatataccgtcggtacaagtaaattgacagacgtcccaatggcactgttcaaaggtgtcaatgaccccttcacgatcaaattcaccttatcagcagctcaggccggagccgctactctgcgcatcggtaccaccctggcgtttgcgagtggcagacctcaagccaagatcaacagctacagcgctgctgctcccgccgctccagtgaaaattgattctcgtggcgtgacgagaggagcgtatcgtggatttggcgaagtttatgatgtcaagatccctgccggtactctggttgccggagcaaacaccattaccataaccgttgcatcaggttcgagtggtgcctcatacttggcgccgaacttcgtaagccatatcctcgagccatttcctcagaacaacatactgacattaatagatcctggacgccatagagttgtttcaatag

SEQ ID NO: 1816 - DNA, 2249 bp, Aureobasidium pullulans
atggcacccatcaagcaacttgccgccctgacggtagcggctgcctaccttccatatgcttcagcagcagcgatcgctccttcttctctttcgaatggacaaacttccttgacactgctttaccaaaacaacctcaatttcaccgatgatgtcaatcacatcagtgccatattgttggacccgtcaaccgcttccaatggagctgctggctgtgcagccttgaatgaaacgttgattccacagtctgctctgcaagcacactcccaagacttcatcaaccagctctcgtatgcattctacgccggtcgttcgacacaggatcaaaagtggcacattgctagcggccaaacagtgcaagtttccaacaaggggctcaaattcgccaaagcaggccctggcaatgtgttgccagtcctgtgcacgcagtccagccagagcaacactcccagcaatgccgttgcctctgcagccaacgagatcaagatctcctcttccggcaatacctttgtaggcttccgtaacaagaagtctttccgtttccagggcattcctttcgcggatccaccagccagattcgcgtactcgactgtgtactccaagactggccagacgattgatgcaacaaagtacggacctgactgcgcgcaaccgtacgagagttccagcagtgagaactgcttattcgtcaacatccagacaccttacatccccaaggctggatccaaaaagaaccttcgtcctgttcacttctggatttacggtggtggattcactggtggctccggtgccagttcaggtagcgatggaggtcaattggcttcgagagaggatattgttgtcgttgagatcaactaccgtttgaccactctcggcttcctcgcgattcccggaaccaacatcaccggcaactacggtatctctgaccaggtcactggtctcgacgtaagtttcgctgtgtgtactgatatcgacgtctgctaacaaacttcagtgggtcctcaagaacattgccagctttggtggtgatcctaacaagattgtgatcaatggcgagtctgcaggtgccggctccgtgcgtacacttctgggctcccctaaagccatcggaaagttcagaggctccattgccatgtcaaacctcggcggtggtgtcgatctgggtctgactggcaactacgcaaccacgtactcttcgtacttgacacctgcccagtcctatgcaaggagcgaggccttgtttgaggagattggctgcaatcagaccactcttgatgctcgtatctcttgcttgagagctacgcctgcacagacgattgtcaatgctgccaccgtcgccagatatgtcgttcaggatggtgtctacgtcaataccgaggatttggacgtatacaaccgcaacggcagtgctgctaatgttaacacaatttggggaatagttgcaaatgatggcgcatccttctcgacctaccccaagactcctgtcaccagcgagcttgcaggtattcaagcggcattaggcatatcacaagccgaggcacaatcaatcatcgactctggactcttccctctctacaacactggcaacatcacgttggactcgttcaatgtttcgcagagagtggctactgacaaccaattccgttgcatcgatcaagccaccgtgtatgctggcgtagagtctggagcgttcaagacatcctacttctaccagatgcagagaagtgcgggtggttacgatcccaacaacctcggtggccctccggtcgagcctggatatccttatggcaatcccgagaagccgtacttcaagcttcacggttcagatatgccatgggttttcgtgagtgctgttgatacattagtggtgaggatgacgtactgacgtggcattacagggaaacctcaaccctctgcgtgatgccaatgacctcaagtctgtgcagctggagagtggctactttgcctctttcgtccgctcgctggaccctaaccctccggccaactacctccaagttcgcggctacaccaacaccacccaaggagtccagcaaagtggaccctggcagcccgtcaccagcgaccagggtccgatgaagctgctagacttcccttcggtcactgccgatttccaggatctgccacaggtgagtttgagagtcgatctaggtttcccacgaccaaagctgacgatttcacagtgcgccttcctcaactatcctatcagctactatgtcaacggtggtctgtaa

SEQ ID NO: 1817 - DNA, 1752 bp, Aureobasidium pullulans
atgcgcaactccattctggccgcttcggccacagccgccattgctcaggctgcgtcgctggaccaagtctgcaccgctgctcacgttcgcaactcgctccctgagaacggaacctacctcttttatccctcctctgtcaccgccaacgccgtctacaacacctcggtcagtggccagaccttcttccctgacagcaccttcaactactgcaacgtcaccttcgcctatggtcatgccggaaaagatgacagagtgcttcaggagtactggctccctagcccaagcaatttcaaaaacagatggatgagcactggaggtggtggttttgccatcaactcaggctcaaactcactcccgggtggcatcatctacggtgcagcagcaggtatcaccgatgctggctttggagatttcaccaccaactacgacactgtctcgctctacgcaaacggcactcttgaccacgacgctctctacatgttcggatacaagggtataagagagctgactgtcatcggtcgcgagttcaccgcaaacttcttcgacaccaaggaaaaggtctacacctactatcagggttgctccgagggcggtcgtgatggttggagtcaggtccagcgcttcagcgacgctttcgatggtgccattattggagcacctgccatccgctacggtcagcagcaagccaaccatctgttcgccaatgtcgttgagcagactctcgattattatcctcctccttgcgagcttcagaagattgtcaacgagacgatcgctttctgtgaccctcttgacggcaagaccgacggtgtcatcgctcgttctgacctgtgccagattcacttcgatctcaactctactattggaaagccataccactgtgacgccatacaagcttccagccttggcttcggcttcggcagtaagcgcaagagacagattatgggcagcaccagctatgagcccgagcagaacggcactgtttccgcacaaggcgttgagctcgttcgcaccattctcaatggtcttcatgactcggagggtcgtcgtgcctacatcaattaccagatcggcgcttcgttcgaagacgcctttactacctacaacaccaacaccggcgcttgggagcttgacatcgcctctactggcggtgaatggatcgctcgcttcatcaacctggtcgaagcctccaacctcgacactctcgcaaacgtcacctacgacactgtcaaggagtggatgattcaaggctggtacatgtacgaagatgttctccagaccacaaaccctgacctctccgccttccacggcggtggcggcaaaatcctcaccgtccacggcgaacaagacgactccatccccaccggctcgtccgtccacttctacgaatccgttcgcaagacaatgtaccccaagcagtcctacaacaacagtgtcgccgccatgaacgactggtacagactctatctcgtgcccggcgccgcccactgctccaccaacactctacaagccaacggtccttggccgcaaaccaccatggctcaaatgattgactgggttgagaacggcaatgctcccaagactttgaacgctactgctattactggtgacatggccaattggcaattgtgcagctggcctttgcgtcccatgtacaagaacaatggtaccgagcttgtgtgcgagtatgatcaggctagtatcgatacttggatgtatgactttgatgcatacaagttgcctttgtactag

SEQ ID NO: 1818 - DNA, 1728 bp, Aureobasidium pullulans
atgcatctattgtccttggcctgcacggccacctctttgctctcattactaccatcaccggtactagctcgctctccgaagtctgccaagtacgagaggatccagcatgagcgtcgcatcgagatgtttgctgctcagaaggagcaacaacaagatcaaaggcttcaaaagcgtgcgaatcatgcttacttgacgaataacacagcaccttttgcggtcaatgggtctgggttacctgaagttgactttgacatcggagagagttatgccggatcaatgccaataggaaacagtacaaccgacagtcttttcttctggttcatgccgaccacaaacccattggctagcgatgagattgtcatctggctcaatggtgggcctggatgctcgagtctggatggcttctttcacgaaaacggtcctgtcaactgggcttctggtacataccgtcctgtcaaaaacacatattcctggtcgaacctgaccaatgttatttggatcgaccaacctatttcgactggcttcagtacgggaaatgctactgcgaccaatgaggatattgtagcaacacagtttctaggcttttggcgtaacttcatggacgcattcgacctcaaaggacgcaaaatctacatcacaggagagtcgtatgccggcatgtacacaccttacatcgcttctgctatgctcaggcacaacgacacaagttactacaacgtgaacggactcatggtttacgatccgtcaattggctacgacggtgtcatctctcaggcacccgccctctcttttgtggaccaaaaccgcaacttctttcccctcaacgacaccattaacgctcaagtgaacaatatctccgaatcatgcggcctcaacaccttcatggaaacagccatgaccttccctcccaaaggacctcttcccccgcctccctccacctacgatgaagtctacgactacggtaattgcgacatttacgatatcctgttcaccgccattttcgaaatcaacccctgcttcgacatctaccagctaggtcaacaatgtcctctcctctgggactccctcggcttcccctactcctacgatcagttctatctccccgacggttactctcaaccctacttcaaccgcacagatgtcaagaaagccatccacgctcctttggatgtagattgggagttctgtctccctggcgaagaaaatcctttcgtcggtgacgactctgatacttcgccaccttctggcttgcaagatggacctctacagcatgtcattgaacgcaccaataacgtcatcatcggccatggaactcttgatttcgtccttttcgccaatggcactcttgccactctacagaatttgacttggaatggtgtacaaggattcagcgaatacccaaagaacccattctatgttccttaccatgatcatcctatggacagtatggctggcgctggtattttcggttcttgggtcgaggaaagaggattgacttttgtgcttacgcaattggctggacactttttgcctcagggcgcgccgtctgctgcgtatagacatctggagaagttgctcggaaggattgaggatttgtcagaggtatcgccgtatactacgcagaggaatattactcaacctgaagagatattgggcaatggaactgcgtgggggaagagagagattgacggtattgtgagacgtggtcaggtagagctcaaagcgtag

SEQ ID NO: 1819 - DNA, 1400 bp, Aureobasidium pullulans
atgcatcttccttcgcttcttcttgccgctggttcggcaagtgttgttctttctcagcctcttactcgtctcagccaacgtgcaagcaagcttcaattcgtcggcatcaatgagtccgggcctgaatttggcgaggcaaacatccctggcacctacggaactgattacacctggcccgacctttctaccatcagcacctttgtcaacaagggtatgaacactttccgtgtcaacttcttgatggaacgactggtgcctaacaagatgatcggctcgctggatgccgcatatctcggcaacctgactgagaccgtgaatggtatcaccaaactcggtgcttatgccatcatcgtccctcacaactacggtcgctacaatggggagatcatcacgtcaaccgaggatttcgctgcgttctggaagacggtcgctgctgaatacaaggataatgacaaggtcatttttgacactaacaacgaattccatgatgagtcttctactcttgttgctcaactcaatcaagctgccatcactgccatccgctctgctggtgctacatcgcagtacatcaccgtcgagggcaatgcttacaccggtgcttggacttggaccaccactcagggcaccgatggcaagaccaatggcgaaaccatgggctctctgaccgacactgtcgaagacaagctcatctatcagatgcatcaataccttgactccgtacgtatccctctacccccaccccccatcactcgtagctgatacatcgcacaggacggctccggcacttcttcaacctgcgtttcccaaaccattggcagtgaacgccttcaagccgcaacaacctggcttcgtgacaacaagaagatcggacttgtcggtgaatttgctggtgccgtgaacactgattgcgaagctgctgtcaaggacttgcttgcttttgtagctgagaactctgatgtttggactggcgctttgtggtgggctgccggtccttggtggggtgactacatgttctccgtcgagcctaaggatggagttgcttatagcacgtatgctgatgttgtggcttcgtatgcctagatggatgtcatgtatgttcagacgacgaagcaaattctgttcggcaagagtcaatcttccattttcgcatccatcatgggctaccacttacaagcaccagctgcagaagagtaatccgtatactgagtataagactgctgcatgtttcttctcggcaccttgtgcagaatagacatttggtttctttccctgacttcccgcatgtagcttgcttgtacatcagaaggtcgaccgtcgattttggcactggtgtcgccgaggtacattcttcccactccggcgatcgtgacgacggccaaagcacaacccagaaggactag

SEQ ID NO: 1820 - DNA, 1821 bp, Aureobasidium pullulans
atgttgttctctccctggcttgatactctcacatgcctgctcgcattcggggtgtctgacatcggcgctaccgtcctgcgacaaggcttctctaatggaccccctcctgcttccgagctacatcataccggacatcatggttctaattcgacaaagctgcatggaggtattgcttccgaaagcaccatctgcagtggtatcggtcgcgacttgcttctaaaaggtgggaatgctgctgatgctatggtcggaagtgtcttctgcgttggagtcattggcatgtatcattctgggataggtggtggtggcttcatgctggtcagaggtgccgatggagagtacgagttcattgacttcagagagacggcacctgcggctgccttccaagacatgtacaagaacaacacagatgcgagtatctatggaggtctggcaaggtacgttcaaatcactctgttagtcaacatgtacggtagatgctgacgtaagagcagtggtattcctggcgaggtccgcgggctggcacacttgcaccaaaagtacggcaagctaccctggaaggaggtcatgcagggtgccatcaagactgctcgctatggtttcccagtaactgccgacttggttcgctacatggcttctgctacggcaggccagacgtccaacttcctcgttgaggacccgaattgggcgattgattttgctcccaatggaacgctgctacgtctcaatgacactatcacccgccagcggtatgcttcgaccttggagactatcgcagagcgtggccccgacgccttctacaccggtcccattgccgaagccatgatcgagacactgcaagcagcaaacggaacaatgacgatgggagacctgaagaattataccgtcgccattcgcgacccagtagagattgactacagaggatacaagctcaagagtgtgagcgcaccagcatcagggggtgttgtgttagccatcatgaagactctcgaaggctacaacaacatgggagacgaagcatacctcaacctcagcacccatcacctcgatgaagcgacccgtttcggctatggcttccgtgccgagatgggagatcctctgttcgtcaaaggcatggacgaataccaagccgaaatcctgaacgcgaccactgcagcagccattcgaggccgcatctcagacacccacacactcaacacgtcagcttacgaccctaagaacctcgagattttggatacacccggaacttcgcacgttgtgacggctgacagttcaggcatggccatctcactaaccacaactgtcaacctcctgtttggcagtcagcttattgtgccttccactggtgtcatcatgaacaacgaaatgaacgacttctctatcccaggaactaagaacgccttcggtctcgagccctcagaaagcaactttgtccgccccggaaagcgacccatgtcctcgatcgcctgcactatcgtagagaaccccgacggctcgctatactttgttacaggctctgccggtggtagtagaatcatcacagcaaccctgcagaccctttggcatgttttggaccagaacatgaccgctgccgaagcattgaaagcgcctcgtctgcatgaccagctctcgcccaactatgtgagcttcgaatacgcatacgataatgctactgtggattacatgaagagtttgggacacaacgtgacctgggtagctccaggtcagagcacagcacaatgtttgagggtactgaacaatggcaccttcgacgtcgccagtgaacctcgacaattgaactcgggagcctacgctgtgtaa

SEQ ID NO: 1821 - DNA, 1270 bp, Aureobasidium pullulans
atgtatttttcaactcttgtgctcgcctcgttggcgactatctgcctctcagctcccagtgtatctgcggatcagcaaccaattggcgcttccgagcccaacaccatcagctcatcatggaccaaagaattgatctcgctccaccgtcatctcatcaccaccgaatccatcagcggcaacgaatacgacgttggaaagtggttatccaaatatctcaaagatgacgactggaccattgagactcaaaaggtcaacaacgacagctctcgtctcaacattctggcctatcctggaaaagtccgcaatcctgatttgttgatctccagccatatcgacactgtacctcctttctacccttacaaaatatactctaatgattccgagaccatcatttctggacgtggaagtgtggatgccaaggcttctgtcgcggctcaaatcatcgctaccaagaagcttctggcagagaagaagttgaagaaggatgatgttgccttgctctacgttgttggcgaggaggttcatggcgatggtatgcgtgcagccaacgcattggaattgacacccaagaccatcatctttggtgagcccactgagggcaaacttgctacgtgagtattcgacatcataagtttcatcgacaatcaccagtgctgatatattccacagtggtcacaagggtatgctaggcttcaccatcaacgccttcggaaaggcagcacacagcggctacccctggctcggccgcagcgcaaacgaagtcctggtcaaatccctctccgccttgatgcaactcggtctcgaactccccaagagcgacaaatacggctccaccaccatcaacctcggtaaaatcgaaggcggtgtcgctgggaacgtcgtcgctcaaaacgccaccgctcaaatcgccatcagaatcgccgctggaacacctgatgacatcggcaagcgtgttgtcgaggtgatcaaggaggccactgaagagttcaaactccctggtcacgaagatgaggaaatgtttgaaattgtatttgcaggcaagggttacggtcctgtcgatatcaatcatgatgtcgagggctttggaactattaccgtcaactacggcactgacattcctaacctcgagaagctcgacggacagaagagatatctctacggtcctggatctattcttgtcgctcactctgatcacgaagccatcacactcaccgatctcaagactgcagtcaaggactatgagaagttgattctacacagctttgcataa

SEQ ID NO: 1822 - DNA, 1140 bp, Aureobasidium pullulans
atgtttgcgaagaccttcgctctctttgccttcacggctcttgctgaggcatcaggcagttgtcctgctatctggtcaaccatcgcctcagatctttcacaatcattcattggcagcaacggatgtaccgatctcgcccgaggcgccatccgattcgccttccacgattctggtatgtgtattgtatcagaggtacaggtcagcatctactaacagttcctgcagcgtcatattcttccaaaacacaatactatgcacctgctactggtggcgctgatggatcgctcctcctgagttctgtggagatcactcgagatgagaacaatggtcttcagtcatactacggtttcctccaggagaagtactccaagtacaagtctcaagtcggtgccgcagacctagtccaattcgccgccagtgtggcaattgtcagctgtcctggaggtcccaaagtcccgacggtatgggaacgaaatttctgctttacagattacagcgactgacatgtgtctaggttgttggccgcaaggatactagtactgcagcaccggataacctcctgccgaaagctttcggtgcgggcgctgcacaacaagtgctcatccagctcttcgaggacaagggtatcagtcaaccagagcttgctgctttgattggcgcacacactgcatcaaaggctgtggctcaagaggcctacggtgttccttacaatggtcagtctattgtatttggatgaaagacttcgaccgacatctaacgaatatgtacaggtcctcaagattccacacctggtcagtgggatgtgaaatactactccgacacggacaaccaccccagtggtgtctacagctttgaatcagatgtcaacctttcaaaccccaactcgactgtaggccagactttccagagcttcgtcaacagtcagagtgagtatatctgcggcttctcaatgcttatcaaaaactaacaacatgttcaggcaaatggaatgcagctttcgcacctgccatggctcatctcagtgtcctcggcatctcccaagcagaccaagcgaacttcgtcgattgtactagcgcagttccatcaggatccaatgcgagaatgattcgtgcagcacccatcaacgacagaattagatga

SEQ ID NO: 1823 - DNA, 1215 bp, Aureobasidium pullulans
atgaagatgagagcctcggagttggtgaccgtgacggcattcatgagcggcttggcggcagcgcttccatcatctccatcttcaccatcctcatacaacaacctgaactactatttccctcggcagacggcgcctcaatatccatcttcatttgatcctctgagcaacaatgtgctcgccgtctactatggcaaggcacagtacaactcgaatccgtccttgatggacctttgcaatgacagcgacattgacatgatcgtcatgggcttcatccgacaattcaatgggcccaatgttcagcccacatttgacattgccaactgcagaacaccgtccaatcctgcggccaactttacaggcatcagctgccctgctctggcagccagcatcacgcaatgccagagcgtaggcaagaaggtcatgatcagtctgggcggctccaatgccaacctggtcctgagcagcgatgccgaagcgcagcaggctgccaacatcctctggaatgtctttggtgccggcactgccacacctaacctccgaccctttggcaatgtcactctggacggcttcgactttggtaggcctctcgccctgctatcctcctgcagcttcagacacatgagctgacacaaccctagacttcgaaggtggttctgacacatcttacgttgacgtgctgtcggccaacctgcagtcactctactccactgccagtcccgcccgcttcatcagcgcctctcctctatgcgccaataataccatcatgccctacgacttctacaagtacgccaacttcatctggccgcgcttctacaatgcaaacgcgtgcaaggctggcggcaagggcttcaacaattccgtcaccacatggtccaacttcctcatcgacgtcgactccgccattggtacaaactaccctcgcttctacattggcgctctcggctttgaaaactacaacaatggtggtggcttcgtcacacccgatgtctttggcgatctcgtcgagtacaccaagaaccgcgtcggcaaagcaaccttcggaggcgtcagcatctgggaaggcaccgatgccctgcaatcaaagaccgccgatggcagccaggatatcctcaatgtcgccaaagaggcactgttggaaccattcaccagcgatgcctgtggtacgttggacactcgcgctttggtcgtaataaaattgattcgtggccagattga

SEQ ID NO: 1824 - DNA, 1125 bp, Aureobasidium pullulans
atgttcttcttatctggccttcccttcttggcttccctcacctccctcgtctctgctcagtactcaaatgctatcaatggcacagccagcaatggcactacaaccttcaacaaccctatcctcaatgaggtaggagcagacccatgggttatccgccacggtgactactactacatgacatatactaccaacaccaacatcaccatccttcgcagttctgttctgacagactgggacaatgccgacgtcaaactagcctttgaccctccaccaggcatgaactactcgactgatctctgggcacctgaattgcacctgatcgataactcctggtacatcatcatgactgccgaccctaatttcgacacgccctcgcccgagattgacatgtggtgcgacttcaactgccctgctgttcaccaccgcatgtatgttctcgaaggctcatcctcagatccttgggactcgacgtacactctcaagtctcagctcaacacgtatgatcagttcgcgatcgatggcacctacttccaacatgactctggactttaccacatctacagctgttggtaccgtcagtacgatgcatggccagccaatctctgcatcactaagatgtctgatccttggactgtcgaaagtaacttcaccgaacgccagatcatcagcactcctgacaacccttgggagaagacaccttacggtcgccccttcaaccagcgtctttcatccaacgaaggcccgcagcaactcaccaatcccaccacaggccaacagttcgtaatctacagtgcagctcgctctgacaaccgcaactactgcctcggccaactcgagctcattggtgatgacccaatgaacccatccgattggcgtaagaacaaccaagggtgtgtcttctaccaaaaccccaaggcagaggcgtatggtgttggtcatgcaagcttcaccaagagtcctgatggcaccgaagactggattgtgtatcacggcatgagggatcccgctaatggatggagtgctagaaccatcagagcacagccatttacttggaatgctgatggttcgcccaagttcccgagacctggctatgggccttatcaagtgccatctgggcaggcatga

SEQ ID NO: 1825 - DNA, 1284 bp, Aureobasidium pullulans
atgccttctattctttctatcgcttctgctgcactggtgtgcttgtcggcagcgactgcttcccctcacaagcagcctgctcaaaaccaagtcgaccctttcttctacaagggcttcgatctgtcttcgctgcatatcctggagcttggcaatgtcacctacaaagacactgctcgtcgtaatgctacaagacctgccgaggatatccttggtgatggtggcatgaacactgtaagactgaggtatggtataagtgtttccgatatggccaaaacggaggctgacattcttctctcagaatctgggtcaaccctgagcctggacaatacgatctcgcatacacattgggccaagcccagcgtttcgctaagaagggctaccgtatttaccttgatttccatttctcggacacctgggtgaatacacctgtattgctttcttgaaagattaagattgctaatcatcacaaaggccgacccaaacaagcaattcacacctgcagcttggacaaccagtagcgtttctgcactcggatcagatcttcgcgactacgtcaagtcaacccttattgccttcaagaagggcggcgttgatctctccctcgtaagcttgggtaacgagatccgccatggtatgctctggcctactggttacgtcgacgtggacaccgcaccaacctccgcccgcattgccaacttcacaaacctcgccagtctttggtcaaacgcacgcaagggtgtcgacgatgcagtcaaggctggtgtcaagaagccctccattatgatccacattgacgatggttggaacaagactctgcagctcgactggtttggcgcactgaccggcactggcaaagtcaaggccgaggattgggatgtctttggtttctcgttctatcctttctacggcaccgccgctactcttgacaacctgaaggatactctaaatgctgttgccaccaagtaccagaagcccgttcacgtcgtcgagaccgactggccagccatctgcgacggcgccaccgcacctgagctcagcgatacctccgtccctatcagccctgccggtcaaacggaatgggtgcaagatattgttagcgtagtcaagggcgtcactggtggttggggtaagggtgtcaactactgggagcctacttggttgaacaacaccggcttgggcagtgcttgccaagatgccattttgttctccgctgactggagtggctggccgaacaagatcattggatactcgagatcgagtgttaacatgttcgctggcaagtaa

SEQ ID NO: 1826 - DNA, 1245 bp, Aureobasidium pullulans
atgctacgtctatcacaactcttcagcctacaagcctctatgcgattaacagccctcgccacggtcgcgtccctcacactcacacaaaccgcttactcccaaacgacgagtagctgcaatccgacacaacaatacagctgtcctgctgatccggcactctccaagtcggtcaatgtcgattttacctctggcgaatcggatcagtttacagcgtctggcttaccgacatacgattcgaatggcgcatcattcacggttgcccagtcaggcgatgcacctatgcttacatcgaattggtacatcatgtttggaaaagtcgaggtaaagatgaaggcagctccaggccaaggcatagtcagcagctgtgttttacaatcagacgacctggacgagatcgattgggaatgggtcgggaatcagcaagaccaagtacagtcaatatacttcaggaaaggagatgcttcgacttctggccgcggcgcagccttccacatggacaatcctacagaagacttccacacctacaccatcgattggacatccacagaactggtctggcaggtggatgggaagacacaacgtgccctcaaagctaccgatgctggagatcagtaccctcaaacgcccatgctggtcaagcttggtatctggagtggtggtgactcgtcgaatgctcccggcaccattgcttgggcaggaggcaacacggattactcggcagggccgtacacgatggtggttcaatcgattgctgtcacagactattcgaccggcaagtcttactcatactcggaccagactggaagctggaccagtatcaaagcggccggagggtccatcaatggaggttcgaccaatgttgacacttcggcacctgctatcacttcggtcgtcagcggtgccgttccgtttgaaggaactcatcgaacctcgacttcggtctcgaccccaggtatcggcaactggagagccacagcatccggcatgaccagcacggtagccaccacgtaccccggattgcccagcggatggacagtaaacggttcaggcaaggtagtgcctccaagcaaagccaccacaggtgagtcactggacccagaccgcaaccccttgaactcagacactgaccagctcttcagtttcgataccccttcgtatgcttctcctcatcagctgcagtctttctttgggtttagccatgggcttcctcttgtgaagactctgcccagagaccccgcttcctga

SEQ ID NO: 1827 - DNA, 2189 bp, Aureobasidium pullulans
atgcgccgtccgctcgctgtggctttgaccacgcttctgtcttcttcagctgctgctgtgccttacgccgagtacatccttgcaccgtctcagcgagatctttctcctgtaaaagtccaccatgccaatggaacagtaatcaatgccgctggagtgacgacttccggatctggaggtgcgaccttcaatagcgtctcagccgtaacttacgactacaccaagaacattggaggtctggtgtctttcatcgtcagctctagttcagacagcgaacagtacatcggaatatcctacaccgagtcatctctatggatctccccggatggttccgatgccacgcaaaatattgccattgacgagacattgtggttcaagatcactggaccaggcaattactcggttgagcctcttcatgaccgcggtggtttcagatacctcaacgtctaccacaataccactggcaatgttaccatcagccacttacagacatactttactgccatgccacatttccctgatgacggcattggtgagtacacaggctatttccacagcaatgatgaaaaactcaaccgagtatggtatgctggtatgtatctgcacatgtccgaagctcacaaatgacatgatgctaatgatatgcaggtgcatatactgatcaactctgtaccattccttccactgcaggaaactctctggtcgacctcgacgccaccgacccgaacacaccgacagtatggtggtccaacagcactttgaccaatggaagctcagcatttaccgacggtcctaagcgtgacaagctcgtctggcctggtgatttcgccatctctgtcccgggtgtgttcctgtctacagatgatgccatcaccgtgaagctctcccttcaacaactattcgctagccaaaacgccaccaccggagcacttccttggtttgctcaacccatctacgtgttccctgagaacagctttatcaactttggaaaggtagtcttcagcttcaactaccatctcttcacactccttggattgcacaactactggatctacactggtgatgacgaatacctacaacagaactggaacagattcaagcttgctctgaactacagcttgagttttgtggatgagactggattagccaacgtcacttcaagcttcgattggttaagagaaggcatgggcggtcacaacatcgaagcaaacagtattctaaagcacaccttggacgttgccatcaccctcgcttatgctgtgaacgatacttctcacatcgcaagctggacaaattcttccgcagctatcgtcagcgctgcgaatacacttctctgggacagctctgcttcgctatacaaggataatgagaccactactctacatcctcaagatggcaacgtgtggtccatcatttctggtgttgcgtctgcgaaccagagtactgatatttcgggcgccctcgctgcacgctggggaccttatggtgcacctgctcccgaagcaggaactactgtatctccgttcatcacaggcttcgaactgcaagctcacttcctcgccggtcaacctcaacgtgctatcgagttgatgcaatttatgtgggccgacttcatgttggatgacccgcgcatgacgaatagcacatacatcgaaggctacgatacaagcggcgcattgcactatccagcttatgccgacgatgcacgcatctcacatgcccacggctggtcttccggtcctgttctggccttgtcaacttttgcagtcggtctacacgtgctgaatgcaaccaattggattgctcacccccaacctggcaacttgacgaatgtggaagctggattcaaggtcgaccatggcacttattctggcaactactctgtcactgccaacggagcgagctatgtcctctctactccgcctggtaccaaaggaagtcttgtactcgacactcccggatgcaatgctattatcaaggtcactggtgttggtagtgatgttcgtggtaagcatggcaagaagttcaattgggcgaagcaggttcacggacataaaggtgcgacatcaaacccgtggaagtgtggtgtatggggaccatcccctccttcacatcaagatggcagtgctggcacaattacgattgataatttggctggtggaaactacactgtggacatcgtatgctcttga

SEQ ID NO: 1828 - DNA, 846 bp, Aureobasidium pullulans
atgaagttcaccaccgctctcgttaccggtctgttgtcagccagcaccgtggtcgctgctcctggtactgccatgcgccgcaagcgtgctgatgctgccatcgctgcctcgcgtgccggtgttctcaaggctcctaagcctttcatcgctgccaccaacatcaccgctgccgttcacggtcccgagaacaagcacgtcagctactccaccaactgggccggtggtgtcctcgagggtactggcttcaagaccgtgaccggcactttcaccatccccaaggtcaccgttccttccggtggtagttccagaaccttgtactctgcttctgcctgggtcggtattgatggctactcgtgttcatctgccattctgcagactggtgtcgatttcagcatccagaacggcgctgtcacctacgacgcttggtatgagtggtaccccgactacgcctacgactttaccggcatcagcttctctgccggtgacagcgtcaccaccactgtgacagtttcctccaagtctggcggtgttgccaccatcaagaataacagcaagggtacctcggtcacccacaccttcactggccaaaccggcgctctctgccagactgatgccgagtggatcgtcgaggactttactcaaatctcttccagcggacaggaatcgcttgttcctcttgtcaactttgggaccgtgaccttcactggtgcttcggctaccaccagcagtggtactaagatcggccctgcttccgccgatgttattgaccttatcgctgccaatggcaagactgttcttactgatgtcaccgtcggctcttccactgtttccgtcgtctacggttaa

SEQ ID NO: 1829 - DNA, 1173 bp, Aureobasidium pullulans
atgaagttcttctcactactagctggcgccgccgcattggcaacttccgccgttgctcaatacaccaacagcacaccaactggcgacatcgaccatgtcaccatcttcacacctcccagaaactacacagttcccaggaccctctacgcacgcagtgttcttctgaaccaaaactgcgaagaggacaatgtgattctcgcaacctgggagaactacctctacaacaacaactcgaacccttacttccccatctaccagtcttacgatggcggccacacttggtcagagcgctctcgcgtctacgatcaagtcaacggatggggactgagatatcaacccttcctctacgaactgtctgaacccattggcaacttcactgccggcaccattcttcttgctggcagctccatccctgacgacctctccgagacccagctcgaactctacgccagcacggacaagggttacacctggaagttcgtctcccatgtcgctcatggtggtgaggctcttcccaacaacggactgactcccgtctgggagcctttcctcatgacctacaacaacaccctcatctactactactctgaccagcgcgaccctcgctacggtcagaagatggtccaccaagtttcgtccgatctccacacctggggccccgtcgtcgacgacatcgtctacggtacctacgactggcgtcctggtatgcccatcgtctccgagcttcccctcggtcaatacatcatgacctacgaattctacggcgccgaagaggcagatttcgccgtctactaccgcatctccaccgaccctacaaacttcaacgccagcattggtcgtcctctcatcgccacagacggcactgtcccgtacggcagcccttacaacgtctggactcccgttggaggtgacctcggcaccatcgtcgtcagctgcggtaacctgggtgaagtcttcctgaaccacaacctcggtgcccctggtgcttggaccaagatcaacactctggagccggcttcgtacactagaagtttgttggtgttgccaggacaggaggatatcttgattgttggtggtggtgtcttgggtggtgagcataatgctgtcacggcaagctctgtcaacatcaagcccaaggctcctgcttttgccaagtgcaatgctaagaaatag

SEQ ID NO: 1830 - DNA, 734 bp, Aureobasidium pullulans
atgcacttctcttccctcttcgtcgccgcttcggcctttgttactgctcttgcagcccccgctgctgagcccgttactggtaacggcatgtcctcgctggtcgagcgctccactcccgccggaactggcaccaacaacggctactactattccttctggaacgcagggggcggaagcgttacctagtgagcctttttgattctagagatgtatctaaagctcttgtactaatgttttccaatagcaacaacaagggtgctggcgaatactctgtcagctggcaaaactgcaacaacttcgttgccggcaagggatgggccaccggctctgcccgcaacatcaacttcaagggtagctactctccccagggcaactcttacctctccgtctacggatggagcaccaaccccctggttgagtactacatcctcgagtcctacggcacctacaaccccggcagtggtctcacccacatgggtaccgtcaccactgatggctctgtctacgatatctacaaaggtgtccgcactcagcagccttccatccagggtaccgccaccttcaaccagtactggtctatccgcaagaacaagcgctcctctggaactgtcactaccgccaaccacttcaacgcctgggccaagttgggcatgaagctcggccagcacaactaccagatcgtcgctaccgagggttaccagtcctccggctccgccgacatcaccgtctcctaa

SEQ ID NO: 1831 - DNA, 1759 bp, Aureobasidium pullulans
atggccatcatggagggatggaaggacaagatggcttggccacgcctgatcgtctttatggtcgtcgtatttcttcttctcacgacagtgaggtccgtcataggaaagaaggaagcttttaaccttccagcgaatggacatcctggaaacgagaagcccgaaggagataccaaagtcaacatgtggtgtccaattgccgggccgactaccatcgaggacggcttgactagctcgacagagtttgcgaagaacaaagatctattgaaacagcaagtcgagcgtcttagcgcggcagtcaatgtgccttcagtttcttacgatgacaactatgaggttgataaagacccgagatggtatgctttcgtcaccctgcatgagacgctcaagtctcactttccccgagtgtatgtcaatgccatgaacacacttcgagttgttctaacatatagcaagtcacgaaaaaatggagctcgagaaagtgcatagctatggtctgctccacacgatgccaggaagctctcaagacctcaagcccctcgttatcatggcccatttggatgtcgtgccagtcccggatccaacaagatggaagcatcctccattcgaagcatattttgatgggcagtggctctggggtagaggctctgttgactgcaagaacaacctcattggtatatacagtgccatggaacgacttctcgaacaagacttcaagagcaagcgtactataatcctgtcgttcggattcgatgaagaaactggtggcttcagaggtgccaaatatttggctgctcatctgaaagaggaatatggcgagaacagtatgggcatgattattgatgaaagcggatctggaatccgtacaattgacggtgtggcatacgcactgccggcaattgcagagaaaggattcctcgacatcgtcctgaccttgaacacaccaggcggccacagctctgcaccgcccaagaacacaaacattggcataatgtcccgcttgattacagccgtcgaggagcatccttttggtccccatatcgacgagcacaatcccttctggggctatctgaaatgcgaagtggagaattcgcccaaagcctcggagccatggctgcgcgaagccctagagaagaaggaagacttcgcagacagacttatcgattcacgtggagacaaggtccgctggtcaatccagacgtctcagtccgtggatatagtcaatggcggcatcaaagacaaccagctcccagagacgacagtcacgatcatcaactaccgcgtcttaccatcagacaaaatcgacgacgttctaaagaccgtcgccgacgtactagtaccactcgcaaacaaccatagcattgcagtccaaggatcaggttactcgcaaatcgacagaggtttcggcgtcctgaacatctcatcaagcaacatcctccaaccatctccactttcgcccacaggaccagatgtaggcgtatggaacatcttcgcaggtaccattcgacaagtattcgaaaacacaggtgaaaaactatcagcgaaaaaggtggtacctgtgggcacgatttcgacaggaaatacagacacagcgcattattggcagttgaccaagaacatctaccgattttcgccgaggtgggaaggtacgtctgagggtgtacatactgtggatgagagaattgatatgcaagctcatttgagtggactgaggttctactatgagttgattcggaatatggatagctttgtagataactag

SEQ ID NO: 1832 - DNA, 850 bp, Aureobasidium pullulans
atgaagttctccgccatctttgtcctggcttctgccaccgctgccatggccgccaactccactcccgctcttttcgctcgtcaatcgaccggtaccacctgctctaacggagagtccgtctgcggttctggatgctacgaccccactgcctacatctgctgtggtcaggccggtcaggtctgcgcttccggcaactactgcgccagcgccgaccgctgctgccccattggtgccaactgtgacggtcagggtacctccactgcttcgggtgtttctgccaccgccatccaatctggatctactatcctcggaagctgtaagtctataaattctttgaatcttttctcgtgaaaggctcgtaatgacgagccatcttgtagcagcctcatcggcagcagctgccactgcttcgcaatcttctgtttcgcagtcatctgcttctcagtcgtctgcatcgcagtcttcctctgtttcttcttcccttgcatccgctttatctgtctcatcttccgtctcgtcctctgtatcctcagcagctgcatcttctctttcatcgagtctgacatcaagcgcctcagccgcctcttctgccgcaagcagcgcctcttcgtctatgtcgagcgccgcctctagccaatcttctgttgcttcatctgcttcgtcctcggcatcctctgccgcttcatctgcatccagatctgctacatcttcggccgcatctgcttctcgctccgcttcatcggctgcctcctctgcatcctctgcagcagccacttcttccggtgctgccgttgctggaaccgctaccaacttcggtctcgctcttctcggccttgctgccctcatctaa

SEQ ID NO: 1833 - DNA, 1062 bp, Aureobasidium pullulans
atgattctcacgaaagtcttccaaactctgttggctttgactgctatcaagtctagtgttgccatgcctacaaaacgagacaccaaggttggatacctatttacatccttccccgtcgacgatgaagcaatttacatgcatctctccaacggcaacgaccctctctcataccaagctctttccctagacggcacagcggaaacacaagccattctccgcagtgacgtcggaactaagggcgtcagagattccttcatcgtgccttctcaagatggcagcaaattctggctcattgcaaccgatctccttgccaacaacttcacaaacgacttcaacgaagccaccagatttggctcacgacaacttgtgatctgggaatctgatgatttggctacatggggagaagcacgcctaacacccaatcttgtcaatgccaccgctggaaacgcatgggctcctgaagcatactgggaacccttggtcaaagcatacattgtagtcttcgcctctcgtttctggcccgaatctgacaccgaccgcagcggtccccagcctcctaacatccttatgtatgtcaccaccaccgacttcgtcactttttcggaagcaaagacctatttcaatcccggctaccctgtcatcgacgctaccttcatcgccacccccgaacaaggccccaacgtctggtaccgctgggtcaagaccgaagtcgactacacaatcttccaacagcgctcggagaacggtatcctcggcgactgggtcaacgtaggcggtgcttccgacgacgttcgcgtcacattcgccaacgagttctccaacaacgagggtcctttgatcttcagagataacttggatgcgaagaagttccatctctggattgatgagaatgatttgcagacatacattcccgccaccgcaagtacgttggatgatatgagtgcttgggtgcctgatgatagaagtggtttccctaaggatgttaagcatggaaaggtgctcgctgtagatcaacagcagtatgatgctattttggccaagtacaaggtcgttggtgcatag

SEQ ID NO: 1834 - DNA, 2884 bp, Aureobasidium pullulans
atgaagtccttcggtagtacctttgccagcgttggccttgtggtgcttccactaatcgcttcagtcatcagtgcttctaattccacgtgcccaccagcagttgattataccgcagattttgaatatgtaaaatgccgtcaagatagctactatggtcgcattctcggcagagaacgtaaagttatcttccgcgacacaaacactccacagtattgtgccgactactgcggacgatctggctacccgtgggctggtgttgaagccgggacgtacgttgaagtctatcgtcaagcaatgtccgtctgctaacgcatattccagtcaatgcttctgcggtggccaactagatggcggagcaataaccgggaatgccaactgttcgacctatacttgctccggggacaagtcacaaaagtgcggtggcgcattcttcttgcagctgtacaagataaacaatccgcttccggtcgaaaaggtcgatggtgatgtcaaacgtcagcctctctgtcacacaagcccattatgcgagcacacagtctgtgatacatcactccccatctcagagagaattgggtcgttgttgtcagagatgacacttgatgagaagatcgtcaatactgtcaatgctgctgacggagttggaagacttggtctaccaggctacgactggtggaatgaagctctccatggtctcgcacaagcccctggtgttaagttcaacagtcctaacggatcggcattcagctatgcaaccagctttcccatggctatcacgactggttcggcgtttgacgaccctcttatcggtgaaatcgcaaatgtcatcggaagagagactcgagcttttgccaacttcgagcaatgtggatatgacttttggacaccaaacataaacacattcctcgatcctcgctggggtagaggtcaagaaacgcctagtgaagattctttccatacccagcaatatgtcaaacaattggttcccggacttcaaggaggcctcgatcacccagaagagaaacagatcatcgctacatgcaagcatttcaacctgtattacgcggaaacaaaccggtaggttttgtgtgtgtatcctgagagatttcggctgaccgatcttgcaaaaagttatggtgagaactataatgcaaccgcacaagacctcgctgaatacttcaacgcaccgttcaaatcttgcgtccgcgatgttgctgtcggatctgtcatgtgttcatacgtaggtggagccctatactacttatacttagaccgaactgacctgtcccatcagaacgctgcctatggcgtccccagctgcgcaagtgagtacttcctacaggatactctacgagagaactggaatttcaacgagccctacaaatacgtagtcggtgactgcggtgctgtcgagtacattcacaccattcacaacttcaccgattcacctgctgaaggtgctgctattgccttgaacgcggggaccgacctcgactgcggccttacattcggcagctatctcaacgagtcaatcttcaacaactatactacggaggctcgcttgaaccaagctttgacccgcttgtacactgggcttcacactgtcggatattttgatggtcataatcgctatgctaatctgtcgtggagtgatgttgctactgaagacgctcaagctctcaactatcggtcagcttgggaaggcatggtccttctcaagaacgatgggctgttgcccctttcggcaagctacaaaaaggtggcactcatcggaccttatgccaatgcatcgagtcagatgcagggaatctatgctggccaagcaccatacattattactcctctacaagcagcagaagccaattgggatagtgtgcagtatgcgtttggcacaggtgtcaatggaagcaacacgacatttttctccgaggcactggaagccgcaaaatcagccgaccttatcatctatttgggtggcatagatgacactattgagcgagagacaatggaccgcaagtctctcacctggcctggaaaccagcttgatctcgtgcaacagctcagcgatcttagtaagcctcttactatcgtgcagttcggaggcggtcaaatcgacgacagcgagctacttgccaacgacaatgttaacgctctcttgtgggcaggttatcctggccaagaaggtggcaacgcagtcgttgatatcttgctcggcaaacaagcacctgctggtcgcttgaccacaactcaatatgctgccagctacgtcggtgaagtcagcattttcaacccagacttgcgcccgaacggaagctatcctggtcgcacgtacaaatggtataccggcaagcctgtccttccctttggctacggactgtcttacacgacattcgacctcgcatggtgtggcaagcctctcaaacaatcctaccgcatcagggacttgttcaacaagcgtcaacaccatggtgcaaagcgcacacctctggacactctaccttatgtcacgctctcgaccactgtctccaacacgggaaatctcacttccgacttctcggcccttctcttcctctcaacttccaacgcaggtcctgcaccctatccgaacaaatggcttgtctcttacgctcgagcacatggtatcgctcctggtaaatctgaaaccataaatctagacatttcaatcggttctctggccagagctaatgagaatggagagttgactgtttatcctggcaagtatcggttggctatcgacaacgatgagttgttgaaggcggagtttgagttggttggagagcctgtcatcgttgatcggctgactcgacagggagtttatgagtacactgttcctgtgcactacaatgctagtgctaatctggtgtga

SEQ ID NO: 1835 - DNA, 1310 bp, Aureobasidium pullulans
atgaagggcagttctctcatggcagccggtgcgctgtttggctcggcttcggctggtgtccacaagatgaagctcaagaaggttcctctgtcggagcagcttgtaagtggcgtcatatccagcgactcaaccatgcgctcgactaacagccatcacaggagggcgcaaacattggcgagcacatgcaggctctcggccagaagtacatgggtgttcgcccccagaagcacgccgacgagatgttcaaggagacctccatgcacgctgaggccggccaccccgtcgctgtcagcaacttcctgaacgctcagtgtatgtaaccccttgacctgtgccttttgatctgcttctgattcaatctagacttctctgagattgccatcggcaaccctccccaggagttcaaggtcgtcctcgacactggcagctccaacctgtggatcccctcgtctgactgtggttccatcgcttgctatctccacaacaagtacgaccacagcgactcttcgtcgtacaagaagaacggctccgactttgccatccgctacggctcgggtgctgttgagggttacatctctcaggacactgtccagattggtgacatcaagatcaagaaccagctcttcggtgaggccactcaggagcctggcttggctttcgccttcggccgcttcgacggtatcctcggtcttggatacgactccatcagtgtcaacaagatcccccctcctttctactcaatgattgaccaggacctgctcgacgagcctgtcttcgccttctacctcagcgacaccaacgacaaggaggctgagtccgaggccatcttcggtggtatcaacaaggaccactacaccggcgagctcaccaagctccctctgagacgcaaggcctactgggaggttgaccttgacgccatcaccttcggcaaggagagtgccgagttcgacaacatgggtgccatcctcgacaccggcacttcgctcattgcccttcccagcactcttgctgagctgctgaacaaggagatcggtgccaagaagggctacaatggccagtacactgtcgagtgcagcgcgcgtgactcgctccctgacctcagcttcaccctgaccggctacaacttcaccattggcccctacgactacatccttgaggtccagggttcgtgtatctcgtccttcatgggcttcgatatccccgcccctgctggtcctcttgccattctcggtgatgctttcctccgcagatactactccgtctacgacctcggcagcaacagtgtcggtctcgccaaggccaaggcttaa

SEQ ID NO: 1836 - DNA, 1478 bp, Aureobasidium pullulans
atgttttcagccaagattgctgctctggcagcccttctccctgcaacagcattcgctgctagcatagtaggcaatggctcttcagtcctgtccaacggcaaatacgagatctcatctgagggaatccgcgcccagtttatcccttatggcgcatccatcaccaacctcttcatcagagacgttcacggcattgagcgtgacatcgttcttggttgggacaatgctacctactacaccgaggacaagaagcacccccatctcgggtgagtttgctttgtgtacatctcgtccatgagctaacccgtctccagcggtgttcccggacgctacgccaaccgcatcaagaactcgacctttgagattgacggcaacgtctaccacactgatgcaaacgagaacggaggccttgacaccctgcacggtggatccaacggctggttcgtgatatcatgcgcgattttcatgcacaaacattgacatctttctagggactggcgcaactggactgtgtctgcccacaccaccgattctatcactttctccattgtcgaccccgatggcgcagaaggcttccccggcgaggttatcagctacgtgacatacacccttactccttagtatgtggatacgaactaggtccaaactctgtgctaacagattgcagtgaatggcacttcaaaatgattgcaattgcaactaccaagaagacccccattatgctgagctcccacgtatgacaatcagcctctgaggacacagaacgtttgctgacaagatttaggtctactggaacctcgacggcttccaaaatcccactgatcctactgtcaacaactacaccgttcacttgccttactctggccagcgcgtcgctgtcgatggtatcctcattcccaatggaaccatcttgcctaacgagaagggtggtgtgttcgacttctggtcatcacccaagaagcttggtgccaatctgacttcccctgatcttgttggtggctgcggtaccaactgcactggctacgacacatgctggctcgtcaacagagatcaaaacggaccctacgactggcgtgagtcgggacctgttgccactgtggctagtcctttctctggtatccaaatcgatatcttcaccgaccagcaggctttccagatctacacctgccctggacaagactgtgagttacactcgaatcttgcaaaaaagaatcttctgacgtgtccaaacagctacacaaagcatcaaagagactcagggcttcttcaaccagactagccagcctagagttgtgcagaagtatggttgcatggttatggaggtcgaggactggattgatgccatcaaccagccggaatggcaaagagagaagaaaaacatcttcggccctggagatgacccatacgttctccaggctacttacaagttctctttgaacaaagacctggccgctacttacagcaacacatcgagctactaa

SEQ ID NO: 1837 - DNA, 2544 bp, Aureobasidium pullulans
atggtccgtctctctaccaccagcctggcattagctggtctgagcattgctcaagcacaatcaaattcgtctttggtcaatgccatctacaaagatgcatctcaatctgtcgatgcaagagttgagaacctcgtatctctaatgaccttggaagagaagatggctcaattgatgcaaggtaagtcatctctcgtgcactccttcaggagcccatgactgacctcccttcacaggtgacatctccaactggctcaacacgacttccggtgaatacaaccagaccggtcttgagttcaacttcgagaaccgtggtggcatgttctatgtcggctacccaatcacctgggattggcttgcagaaggcatcaaagtcggccaggactacgccgtcaacaacactcgccttggtatcccggccattgtccagactgaaggtattcacggcttcctgatcggaaatgcgacaatcttcaactcgccgattgctcaggcttgctcgttcaaccgtgagcttcaacgtcaaatgggcgaacagattgccatcgaggctgctactctaggtgtcacccagctcttcgctcccctggctgatcttgcacgcgaactacgttatggtcgtgttgaagagacctatggtgaggatggttacttggctggcgagatggcctacaactatattgttggttgtcaaggtcaaaatgtctcggctatggtcaagcactttgctgcctactccgagccggaaggaggtctcaacactgcacctgttcatggtggtgagcgtgagctgcgtactacttggctaccccctttccacagagccatcattgatggtggtgcttattctatcatgtctgcctaccatgcttatgatggcattccggccgtggctgactactttatgctcactgagatcttgcgcaacgagtggggtgagcatgaatcttatgactcttcaaatactccttgactaacgtttgctaggctacaagtactttgtatcgagtgatgctggtgctactgaccgtttgttcaagaacttcctgacctgtggtgtcaacgacttcgaatgtgtcactgagcaatgcttgaccgcaggaaacgatgttgaggtaggtcatgattttttgttcttacggagccttgactgacgaaacacatagatgggtggtggttctttcaactttcgtagtatcccacaactccttgggaacaagacaatcgacatcagcgtcgtcgatgaggctgttgctagagttctgagagtcaagttccagatgggcctgttcgagaatcccaaccctgctgctcctaaggaccagtggaacagcctgatcaacaacgctgccgccaagaagcttgctcgcgaccttgatgcagagtcaatcgtgcttcttcagaatcctaacaagacacttccccttagtaagaccgacaagatcgctgtcattggtcccatggcctccggtttcatgaactacggcgactatgttgtctatcagtcgcaatacagaggtgtcgagtacctccaaggcatacagaatgctgtcggtccttccgccaatgctactgtttcttatgccaagggtgttgagagatggtcgaccgatgagtctggcattcctgaggctgtcgatgctgccaaaaaggctgatgtggctgtcgtcattgttggtacctggtccagagatcagcgtgagctgtggcaaggattgaacgctaccactggcgagcatattgatgagaggtaagttgtcaagacagagggatgacagaaccgtactgactccatgtagtgacctgggccttgttggcgcacagagagctcttgtcaaggctgtcattgacacaggaaagcccaccgtggtcgtcttctcttcaggcaagcctctcactgaagactggatctcaaacaccacagcgtctctcgtccaacaattctaccctggcgaggaaggaggcaacgccttggcagacatcctattcggcaaggtcaacccatccggcaaactttccgtctccttccctcacgatgtaggcactcttccagcctactatgacttcctgaacagtggtagacccacctatcctggatacgtcggcggagatggaaacctctactttggctccagctatatcttgaacactcctgtaccttggttccccttcggctatggtctctcatacacgtctttcgactacagcaatgtaacactctcctcgtcgcaagtctccgcgaccgactccatcaccgccactgttcacgtcaccaacaacggcacttacgacggagccgaggttgttcaactttacgtcaaggatctggtagccagtgttactgttcctaacatccaactcaagggtttcgagaaggtgtttatcaaggctggagagactgctgaggttgttattccgctggagatcagtgacattggtctatggaacaagagtatggattacgtggttgagcctggcaactttactgtcttcattggcagtagctctgctgatttccgtactaatgctactttgacggtggtgtag

SEQ ID NO: 1838 - DNA, 1185 bp, Aureobasidium pullulans
atgcgtgtcgccgctccttctttggctcttgcccttgcgcagacttctgtcgctgctaccgttcctcagctcgaggctcgccagtctgcctgcagtgacgttcacatcttccttgctaagggcaacaacgagccctaccccggacgtcagggcaagctcgtaaacgccatttgcgatggtcttgacaactgcgactacgaggacatccttttctacaaccccgttgaatcttctttctgtgcatccgtagaggagggtgttgccaacggcattgcccagctctccagctacaatgccagatgccccgacactaagctggtcatcagcggttactctcagggttcccagattgttagcgacattctcggcggtggttccggaactttcttccagggttgcaccactaagccctcccctaaccttgatgttaactctcaagtcggcaagaaggtcgtcgctgtcaccaccttcggtaacaccagacacactgccaaccagccctacaaccagttcagcggctcttccggaaacggtatcttccctcgccctgcctaccagttggccaacctcgcaacctggaccgccaagtaccacgactactgtgtcgctgaggaccctatctgcgcaggaggtgataacgtggaggaccacttgaactacttcgatctatacagcgaagttgccgcatcttgggtcaaggaccaggtcaaggccgccgatgtcgttgtttcaagcaccattgtctcccctagcagcaccttcacctcggtcgccactgtccctaccgacaaggccgtccccaccactttctcctacagcaacaacactgccaccgctccccaggtcaccaactctgccgctctctcctccatccagtccgaggttcttcccatccccactgccgacacaaccgtgaccgtcaccgttgactgcgcttctgtcgacacctccgccatcgcctcgtggacctctgcctacgccgcaactgccgttgtcagccagagcgtcgctgcctctgcaactggcgctgctgccaccaccggctcctctggatccaagtcttccagcgctcctaacggcacccacactcttatgccttacactggtgccgcaagctccatgtctggcgctgtcaccggctctcttgccattgtcctcttgggcgctttcgccatggttctctaa

SEQ ID NO: 1839 - DNA, 1497 bp, Aureobasidium pullulans
atgcgctcaaagtcgaacattgccattggcctcgctgccactggatctctggttgccgcagctccttgtgatctttacaaaaatggcggtacaccctgcgtagctgctcacggtactactcgcgccttgtacgatgcctacactggtcctctttaccagatcaaacgcggttctgatggaaccactgcggacatctcgcctctctctgccggaggtgtagccaacgcagccgctcaagactctttctgcaaaagcaccacctgtctcattactatcatctacgaccaatctggccgtgcaaaccacttgtaccaggctcccaagggtgctttcagcggaccggacgtcaacggcaacgacaacttggcgagtgctatcggtgctcccgtcactctgaacggcaagaaggcatacggtgttttcgtcagccccggaactggttacagaaacgacgaagtcagcggcacagctactggcgaccagcccgagggcatgtacgccgttcttgatggcactcactacaacgatgcctgctgcttcgattacggaaatgccgaggtcagcaacactgacactggcaatggtcacatggaggccatctactatggtaacaacaccatttggggaactggatctggatctggcccatggctcatggctgatcttgagaacggtctgttctctggccagagccctgcccaaaacactgccgatccctccatctacaacagatttttcaccggtatggtgaagggaaaacccaaccagtgggctctccgcggaggcaatgccgcctcaggggctttgtcgacctactacagcggcgccagacccaccgtcggtggctataacccgatgagtctcgagggtgccatcatccttggcatcggtggtgataacagcaatggcgctcagggcacattctatgagggagtcatgacttcgggctacccatccgactctgttgaggcctccgttcaggctaacatcgttgctgctaagtacgctactacctcgctcaacactgcccctcttaccgtgggcaacaaggtttccatcaaggttaccacccccggatacgacacccgctacctcgcccactccggcgccactgtcaacacccaagttgtctcctcatccagcgccaccgccttgaagcaacaatccagctggactgtccgtaccggtctcggtaacagcgactgctactcctttgaatccgtcgacacccccggaagcttcatcagacactacaacttcgtcctccagctgaacaagaacgacaacaccaaggctttcaaggaagacgccactttctgctctcagaccggtcttgccactggtaacaccatcagatcgtggagctaccctgccaagttcttccgtcactacaacaatgtcggttacattgcttccaacggtggtgtccacgactttgactctgctactggcttcaacaacgatgtcagctttgttgttggcaccagctttgcttaa

SEQ ID NO: 1840 - DNA, 2713 bp, Aureobasidium pullulans
atgaagcattccatcctgctcctcggccttagcgccagcacggcgcttgccaacatctatttcccaaaagtccaaccgacttgcaacagcgaggaccttagttttagtgggtgtttgaagggacaattctgccagcaaaacaatacgtaagtcgagtattctccaatgaaaagagttgatgttgatgaagatagatgcactgctgtcaaacacgcatggccaatgtcattccaagatcacggcaaaagaggcttgttcaaacatagagccaaggctcccaactattcacaagacggcaaatgtggcccgaataatggcaatctcttatgtgatcctaacagcacagcatacaagggaacatgttgttcatcatatggtcagtccacgatgctagcaccgactgaactcttgaattaacaaacacaggatggtgtggtgatactccagctcattgtggaagtggctgctcgtctggttgttcttccagctcagcggtcgtagcatctacaatcccgaccaccacaatcaacagggccgcaccttcagcctccggtgctgcccctcgcgatgacggcagatgtggtcctgaatttaacaacgccttgtgtgacgccaagggcgcttatggtggttgttgctcgtgagttggatcccaaccagacctttaaactcagctgataattctcgtcagctcttatggatactgtggtaacactgacggacactgcttgactgccaatggatgtctgtctggttgtaaagacgccgcaccaaccagcgctgttcctacttctgccgctgcatcgtcagtcgctccttctaacatagactccgctgctccatcaagcacaactggtgagccagtcatctctgcagcaacatcttcagctggtagtgctccaacaggcgtagttacaacggatggaacatgtggtgccacttacgaaaacaccatttgcggtgactggaagcaaggtagctgctgctcgtaagtttaccttcaagttggtctacagcgccgtacctaacactgaattttagtatgtacggatactgcggaaacagcactgctcactgtggtgatggttgtcaaagtggaccttgtctgaatggtgccgttgttgcggctcctggccctagccctgcacctgtcaatgctaacccgggacgtttcgacatcgttggcgagtctggtgttcctgccatgcatgccggtctccttcccaacggcaaagttgtctttcttgacaagatcgaaaactacacgaacatcaagctccccaatggccagtacgcttactcgaccgagtatgaccccgcaactaacaagtacaccgctttggcttacaagaccaatgccttttgtgctggtggctccttcctcgctaatggtcaattcatcgctcttggtggtaacggtcctcttgacttcattgacaccactgttggagacggctttgacggcatccgctatcttacgcgttcttcttctgacgcttctctggacggccaagactggagcgagcctggtaacaagctcaacactaagcgctggtacccttccgtccagaccctgcctgatggtaggctctttgtcgcttccgggtcgcttaatggactcgaccctactgtgccggccaacaataacccgacttacgagattttggacaagaatggaaagtcttctggtgtctctgttcctatggagattctggtcaagaatcaaccttactatatgtacccattcatgcatcagctcaaggatggctccctcttcgtttttgtttccaagtcgtctgagctctttaacgtcaacaccaacaccacagtgagaacctttgccgaccttccaggagactaccgcacctaccccaacacaggcggctcagtcctccttcccctttcatctgcaaacgactggaaccctgatatcgtgatctgcggcggtggcgcataccaagacatcacctcccctaccgatcccagctgtggccgcatgcaaccactttctacaaatgccaaatgggaaatggacagtatgcctcaaggccgtggcatggttgaaggtacacttctccccgacggtaccgtaatcttcctcaacggcggcaacgaaggcgcccaaggcttcggtcttgcccgcgaccctacattcgaagccctcatctacgacccagcaaaacccctcggtcaacgattcaccactggcgcttcttcaacaatccctcgtctctatcattctgttgctctgcttcttctagatggcacattgatgattgcaggatccaacccagtcgagcaaccagtcctgaaacccacaaccacagacccctacgtcactgaattcagagtggaaatctacacacccccatacctccaaggcgacaatgccaaaaagcgtcctacagccatcaccctctcctctaagtctttggtcgcaaactctcagactttcactgtcaagttcactgctcctactggtgctaaggctgtgaaagtggcgctctatcatggaggtttcgtcacgcattctgtgcatatgagtcatagaatggcgttcttggatactgcgggttggaaggctggagcgacggatcagcaaatcacggttaccatgcctccgagtgctaatgttgcgccgccgggtccgtatgttgtttatgttgttgttgatggtgtgcctggtgttggacaattcgtgcaggtttcatag

SEQ ID NO: 1841 - DNA, 1485 bp, Aureobasidium pullulans
atgaaaaagtctggttttgttacactctttctatccgccttgtctctacttgccgaggcaacaggcagcgaaaattatgacttccagacattatccacagccggtagagctcttgccggcaatggtactgtcgagattgacttgaatggcaaatacgtaaccgaaaatggcatggcttactttctcgacattctggttggcacccctggtcaaatgcagtcagttatgatcgatactggtagtagcgacctcatcgtcactgcatcgaacgcttctgcctgcatcactatttgggggtgcgcaggtggtacgttcgatcccgtgaagtcgtcaacatttggcaccgtcactcccgatgggttgtacaagacgtacgccgactactctcggaaagttggtgactatgtcacggatgttacccaaattggtatgtgatagctttggaaccagtagagtccgagctactcattcattatgatcaccctatgttgtcttcaattcttacgttctacaggcgatgtcccgatgactggcgctccactggggcttgcctactacaccaaagactttactggcgtcaactttggaatcatgggacttggctactccagcaatttgactggtaacgaggcagtcgaacctgacgagcaatcatacattcccacgtttgttggaacactcgttcagaagggtgttgttgcctcacgtctattcagtctctacctcaaccagctgggtgaacgtggctctatcatcttcggcggcattgacgtcgacaaattcagaggtcctttgaccactctcaattgcttggcagataacgacacggtcaaagacttttacttgaacctcgaggaagtcacggtgcaatctagcaacggaggtagccaaagtcttatgcgacctacggggcaaaagccctatcccgtcttgttagacaccggaagacttgactggagcgtaccgacggacgtctatgagaagattactgaggccgcaggggcatttgaagccaacgatacgaaaacggaacgtgaatggctcgagaagccttgcaatgatctggaccgtggcggcatcaacgcacctcacatacagctcacattttctggcaacggatccaacactgcaactcttgaccttgaaatggccgacctcttcgtcccaagactgaaccaagacgggagtgctatgaccaacgatgttggtcaagcgctctgcgagctgatagtgagagattatggatcaccaaagggtcttgaccaagagggtggtgtagccataggaaacgttgtcacaaggactggttactttgttttcgaccttgacaacggccagatctccatggcacaggccaatttcgcggcgaactcctcaaacgtaatccacgtcgaagcgggggctgacggtctgaagaaagcattcgacggcctcatagccgagactcagacaaaccatgtcgcgggacaacctggccgttggtag

SEQ ID NO: 1842 - DNA, 1079 bp, Aureobasidium pullulans
atgttccgaagctcggcgtatgttctgttattgctgtacacggtagtcagtcttgtcagatgtgatccgttcaatgatcaaatatcgctgtcgaagcgaacgacaattggtctcgctatcacggcaaactttccggatcccagcatcatcaaagtcaatggtacttggtatgcatttgctacacatacccgaggaaccgacatcaaaatccaagttgctcgatccccggacttcgagaattggtcgataatcaggaacgtcgatggttcgcagtttgatgcgcttcctgtacttcctgcatgggtgcggatggcgaactacttgacctgggctccagatgtccaacaactcgtaagtcttctgtcctagcagattgataaaggataactgacttcagtacccaggatgatgggtcgtttatcatgtactattcggccactgcagcggccagaccagacggatcaaaacactgcgttggggctgctacttcaccaacaattctcggaccgtatacggggttggcagatgcgcttttctgtccgctttccagaggaggagccattgatgcttcaggattcaaggataggaacggtaaacgatacgttcttttcaaggtcgacggcaacgctgttgggaatggcggcgcgtgtgggaatactgttctcccaatcgttggtacacctttgatgcttcaacctgtggctgcggacggtcatactttcactggcaatgctgtcgcacttctagacaataacggtcctgcggaccaaggcattttggaggctccagttttgactcgctctcgagctggtgtctactttctctttttcagcagtggttgctttgctacatcaggatacacagtgtcttatgcaactgcgagcaaccttacagggccgtacacccgtgcagatggcccgctgttcaggactggtgatggcaacggactcaaggctcctggtggcatgtcagtatggggcgataacagacacatggtgcttcatgcgaattatggaaacggtcgcgccatgtataccacgttcatagcactgaagggtacagaagtcattaccatgtga

SEQ ID NO: 1843 - DNA, 2256 bp, Aureobasidium pullulans
atgtatctcttgcatactcttcctcttcttgcttcctgggtcgcctatgctgctggttctgcggccatgaagcgtcaggcctcctcaacctcgtctgctgctggctctgccacaaccctgactccagacgatgcggacacagaatgtaccaacggcccccacagccgtgcatgttgggtatgaacattcactcagtttagagtggacaagctaacaccgtctcagggggatggtttctctatcgcgaccgacttcgaccaaaagtggcccgacaccggcaagactatgccgtacacgctagatatcacaaacactactcttaaccccgatgggacgggtgaccgcttggtcatgttgatcaacaaccaataccctggacctgttattcgggctcaatggggagattggctcgagataactgtcaacaacaagctacccaacaatggaacaggtacgatactcgcgtcattactcatgtcattgactgatcggttgccaaggtattcactggcacggtattagacaattcgagacgtgtgatcaagatggtgtccctggcataactgagtgtccgattgcacctggaacatctcgcacttatcgtttccactgcacgcaatttggtacgagctggtgtaagtaagctgaaggtacaaactcagcgggtcaattccgaagatttgaccgttctttgtgggacagcgtcctagacgtcgtctcacgaacgtccgtctcagatcgtgaactgacgcgttgaacgactaccacatcctgtttttctccagaacttcgctaactgtactttcaattcaagatcatagtcattgaagtatgtcgactaatcaactttgctgcgagatattggctaatctttattctaggtgttcaatatggtgtaggtacacttggcacgcttgtaattgatggacctgctacggacaactacgacgaagaccttggaccgttcgctctcactgactggtatgatgagactgctttcttcaacagcccgttggcccgaactgcacctccacagccttatacaggcctggtcaacggaatgaacgtcagtcctgatggaacgaagggaaagtactacaatgctacggtcaagtcagcaaagaagtatcgcctccgactcatcaacacatctgtggacagtgctttcatggtatcactcgacaaccacccattcaccgtcatcacgagcgacttcgttcctatcaaaccttacgttgcagaacgtgtgtttatcggaattggtcaaagactggacgtcatcatcgaagccaatcagacagcaagcaactactggtttagagcagatgtgccagccggtggatgcggcagcaatgcaaaccccaaaggtatcagagccatcatccactacgacaatacaaccttcggtaaccctacaagtactgcttgggacacgactggtgccaatgcagatcgatgcacagacgaatcatataattcgaacaaactggagccatattgggatagctttgttcccagcgatgccttgacagccaaccctacactgttgagtgtacaggctcaagaggcaggccttaccactgacaataaaactatcttcagatgggccatcaacaccacggcactcaatgttgactgggacagaccgatccttgaatatgtccaagaaggcaacacaagttaccctgcttatgagaacttgatcaacgtgcctgacgtagaatggacgtactgggtcttgcaggtatgtcctcagggtcttgcatcatatcaagattcgaaaaactgacttttttcgaaaacttaacaggagatcagcactcccggcggcataccattgaacattgtccatccactccacctccatggacacgacttctacgtgctaggtgctcaagggaacagtgtgtacaccaacgcgttgtcgggtcagctgaatttcgaaaatccaccccgtcgtgacaccgcgatgcttccagctggtggatggctcgtcctcgccttcgagaccaataatcctggtgcctggatcatgcatgtatgtgcctgtgtgacacctttgagttttctcgcagttctagctaactcgatgcccagtgtcatattgcctggcatgtggcagacggtctagccacgcagttcttggagacgccagaccggatcaaggtcgatcctagcttcaacgagatatgcagtgcttggagagactactaccctgagcatgctgtctaccttaaggatgactccggtgtttag

SEQ ID NO: 1844 - DNA, 1110 bp, Aureobasidium pullulans
atggttcaattctccagcctcgccgtcgccgctcttctcagcggtgccgcaattgctgctcccactatccaggagcgtggcagctgtaccttctctggctcctccgccgctgccaacgtcctcaagcagaagaagtcttgctccagcatcatcatcagcaatgctgttgtccctgccggtaccactcttgacctgactggcctgaacgccggtaccactgttactttccagggtaccactaccttcggctacaaggagtggactggtcctctcgtctccgtctccggtgacaagctcaccgtcattggtgcttccggctccgtcctcgacggtcagggtagcagatggtgggacggcaagggcaccaacggtggcaagaagaagcccaagttcttctacgctcacaagatgaccaactccaagatccagaacatcaagatcaaggattctcccgttcagatcttctccatcaacaacgccaagcagcttaccctgactggtgtcactgttgacaactctgccggtgacggtgagaacaagggccacaacaccgatgctttcgacattggctcttccagcggcatcaccatttctggtgccaacatccacaaccaggatgactgtgtcgccgtcaactctggttccgacatcactgtcaccggttctacctgcactggtggccacggtctctccattggttccgtcggtggtcgtgatgacaacaccgtctccaacgtcaagttcaccaacaacaaggtcaccaactctcagaacggtctccgtatcaagactgtctacggtgctactggcaaggtttctggcattgagtacactggcaacactctctccggcatctccaagtacggtgttgtcattgagcaggactacgagaacggttcccctaccggcaagcccaccaacggtgtcccgatcactggcctcaccatgaacaacaacaaggtcggtgttaccagctctggtaccaacacctacattctctgtgcctccggtgcttgctccaactggaagtggtctggcaacaccatctctggtggcaagaagtccagcaagtgctctggtatccccagcggctctggcgccgcctgctaa

SEQ ID NO: 1845 - DNA, 2849 bp, Aureobasidium pullulans
atgtatcgccctttgaacaccattgctgcggctctgactgcaattggtctggccggagcgcagaacagcagctggaatcatgagctttacacctctagccctccagtctatcctagccgtaagtgcatcattattctctgcggacaagtatattgacaaaatcacagcggaaacagctggcattggatgggagactgccttggctcaagcagagaccttcttggccaatctgactctggaagagaaggctggattggtcactggtacgatatatcctctgtgatagcattcaaatagctcataacacttcctctaggttctgccggtccttgtgtgggcaatatcgccccaattgagcgtctaggcttcgacggtaagactctttgggctcatttctacgattatcactcccagctgacatacgatgaggcctttgcttgcaggatggacctctcgcaatcagacaggctacctatgcttcagtcttccctgctggcttaacagctgcagcctcttgggacaagggcttgatctatacacgcggattatacatggctcaagagttcaaaggcaagggagctaatatagctctcggtcctgttgtcggaccattaggtaagtcttataagccttcattgatccgcctctagtgcgaactcggacatcacatagatcaaccaaatactgaccctgtcttcaggtcgccatggccgtggtggacgtaattgggaaggtacgtcacatttgcgatgatgactcctccaaagactgacgtgatttccaggtttctctcccgatccatatctgagtggtgttgctgtcgagcagacaatctggggcatgcagtcgaccggagtccaggcttgtgtcaagcgtacgtcgaactttggttcccggaagccacaaagctaacacatccaagactacatcggcaacgaacaagagactcagcgcaacccatccactcgcaatggaacaactatcgaagctgtttcatccaacatcgatgatcgcaccatgcacgaactatacgcctggccattcgccaatgctatccgaagcggtgtcgcatctgtaatgtgttcatacaacagagtcaacggttcgtatggctgtgctaattccaaaacattgaacggtatcctcaaagaagagttcggtttccaaggctatgtcatgagtgattggggtgtaagtttatccttacaagcactgtggaccatccactgactttcccaggctactcatagcggtgtcgcatcgataaacgccggcctcgacatggatatgccaggcactattggcttccgtgcagggggcaacagcttttttggcggtaacatcacgactgccgtcaacaatggatcactttctgaagaccgcctcgacgacatgatcaagcgtattatgacaccatacttccatctcaagcaggacaccgactttcctccgatcgatccaagcgagattcctctcaacagcttctttggtgctgccgcttccactgttgcattccctctgggctcagtcgcgaatgttgatgtccgtgagaaccatgccactctgatcagggaacttggctcagctggtactgttttgttgaagaacgtcaacggtgctttgccattgaaggctccaaagaacattgcagtattaggtaatgatgctggagacattctgaacggcgaatacttctctgccgcaccttatcagtctaatacgttcggatatggtaagttatgtctccaattcaagcaagacgatcgttaatatttatcccagagtacggcacactgcccgttggtggcggtagtggtacaggaagattatcttatcttgtcgacccactcactgctatcaaagctagagctgcccaggacggtagtctcgtacagtatatcttgaacaacactctgttgtcaacacctcgtggtcttgcgtccctccagccaacaccaccagatgtatgtctcgtcttcttgaagacctgggctgaagaaggcgaagacaggagcacgcttctggcagattggaacagcacggcagttgtcgaatcagtggctagcgtttgcaacaacaccatcgttgtaacccattcaggcggactgaacatccttccttgggcagagaaccccaacgtcactgccattctagcagcacatttacctggcaccgagacaggaaactccttggttgatatcctttacggtgatgttaacccaagcggtagattgccctacacaattgccaagacgcaagaagactatgcttttgccgacatcaccaacagcaccgctcttgttaccaccagagaccccaacgcgtggcaatctgatttcaccgaaggtctcttgattgattaccgccatttcgactactacaaccaaagcgtccagtatgaatttggcttcggtctctcgtattccacatttgacatctcatccctgagtgtcagcaaggtctatggtggctacaacatcagcagcactcctccccctgccaagatcatccctggaggtaaccctactctatgggatgtcctctaccgagcaacagtgaccgtatcaaacacaggagatgtggctggtgctacagtaccacagttgtatttgtcactccctcaggttcccggcgaagatcccacaccgctcaaggtccttcgtggcttcgagaaggtcagccttcagccagggcaaaaaacggtagtcaacttcgatctcaccagacgtgatcttagttactggagcatctatcaacaggactgggtcattgcaggaggagagatcggagtctcggttggactgagcagcagagacatcaaggcgacctcctcgatccgagtcctttga

SEQ ID NO: 1846 - DNA, 1170 bp, Aureobasidium pullulans
atgcctgtcttcaagcactttcttcttgcatctgtgaccttgtcagtgggggtgtccgcagccccaaagaagaccaagttcaactggcacgacacgaagcatgtgtaaggaaccctgaaagtgggatgacccatgatcaatactaatagctagcagaatagcatttggtgattcgtacacatatgtacaaggcacagctggccgacaaaactcgaccttcatcggcgactacttcaacttttcatttacggaagaggagttgttgcacaacaagattgttcaaaatcaggtatgtcaatctgctgttcaggcctaatgatttcgtggctgacatatccggacagactgcgacggctgagggaggtccaaattgggttgagtatctcacgggctgtgggctgaagccaggcctcacatcaccactgtcatgtaagacacaactctgggactttgcatttggtggcgccgatatctcgaccaagtagtaagtgtattgctttccttgcatactgtccaatgcttacaatcatccaaagtacacctcgtcatcacaactacacggtcatgctagaagaacaagtccagcaatttctcacctacgcccaacccacactcagcaaaatcgtcgatccctcaaaaacactagtcgctttctggattggcataaacgacatcaacgatagtgccaactacgccgtcgactttcccagtttctacgatcaactcatcagcacacttttcgcatcggtccaaagtgtgtatgatatcggataccgcaatttcctcttcatgaatctaccacccttggaccgcacaccaggaaacgtcctcaaagccaccccctcccccaacaccaccatgataaactggtgggactcgtccttgacctctcacatgcacaccttcgccgccaacaatccatccgccaatcccttcacctttgacgtcaataccttcttgaacaatgtcttggatcacccagataaatacaacatcaagaacgtcacgggatattgtgcgagttacaatcagccatatatcaaccaggcgccggagagttatggatgtttgccgttggatgagtatgcgtggttcaataatgggcatatgacttcgcatgtgcacgagattttggccaaggaggttgcgcagtttctgaagaagcagtag

SEQ ID NO: 1847 - DNA, 2220 bp, Aureobasidium pullulans
atgcatcctactttggccctcactgtggcttgcttgccagcggctctggtcgctgcatccaacatctcgtcaaacgggaccacagttcccgactttcatcttcctcctcaaaatcttaccatctacggcaacaactcgctgttcgctcaatggagaaccaaggcaagatttcgaccatcctcgaaccacatcggagatccgacggccttctggcaggatgagcaaggagtgttccatgtctctggtctatactcctacctgcgtggcccgaacatatctatcacttcttccatcggctctgccttgacatcagacttcctgagttacgtggatgctcacaactatacgaattcgtctctattcgtcaatggtgtctcaatcggtcctggaaatgagaatgaccctcttgctgtctttgacggttcggttataccaaaaggttacaaaggattgccgaccttgatctatactggtgtgcactaccttccgatctcatggagcaagccatacatcaagggcagcgaagtgcaaactctggcctactccgaagacaatggtaccacatggatcaagccagacattgaacccgttattcccggtccacctgagggtttcaacgtggccggtttccgcgacccttgggtgttccaggcacctcaatttgctaagcttctgaacgacacaccagagacttggtacctgtcagtcagtagtggcatcaggcaggttggacctcgtcttcttctttacagacagaacacctccgacttcaccagctgggagttccttggaccttctgtatctgctcctgtaaacactacctttagcgcaggcaacttttcaggcaacgatggttcgaactacgagacgtcgaacactcttttcctcgatgagaatggcgaaaatctggaagacggagtcaactttgtgacaatgggtgccgagtcgggtagagaaacacacagcttccactactctctttggaagatgggcaaattcgtacgcagctctgtcaacgagagcgtaattctcgaggaccatgcgacaggtgtcattgactggggaattggatatgcctgcacaactatgcctgactacaagaccaaccgtcgtctggcattctgctggagcaacgatgacttcaactcaaccatctccgaacaggtgggctacagaatcggctccagcggtgtctacagtatcccgcgtgaggtttactacaaggagattcccggagttgtcgctgatgatctcgctgctgagaacggctactggtctgtcgctaccgagtacctgaacactactttggcaaaggacggagtcgcattggccaaggctaacggcaacgataccgtcatactcgcaactctaggctgcaaacctgctcgtgagattcttggcttcagaaagcatgccaaccagagctggaccgagtctgactttgatgttgatgtgaagtcgatcaagtccaattgcagtggtgttgaattcaccaaggaggaaggcgtgacccgcgctttcattccattccagcagagcccccacagccgccactgggagctccaagccaccgttgatattcccgagtcttctctgcgcaacgaagagtacgaagactttgccgctggcttcaccctcttgcactccagtgcctcagcaccttcaaactactccgtcgatgatgccgcaatgctctaccgcccctccaacgagacctttatgatcactcgtgaggtagctctcggccgcgacaacgtcaacaccgatcctgaaatgggtaaactgcgcctctggaacatttcttccacaaacacagagggcaagcagagctatgctatccagtctctcaacattcgcgcctttatggatggcagtttctttgaagtctatgtcaacgacgttctcactatctctactcatctttactactggtacaaggactccactcgcatgggcttctatcttcaattccctgacaccttggcaaactcgactctggatactagtgtcaagttctccaacattagtgtttgggagggtgtgcctaacgtattccctaagcgccctactaagcctgctgagttgattgacaatggtgttggcttcgtgcagccacccaacaaccctaatgtaccgttaacttatgacggtgttggtgctccgccattgcctcctgcagagaacttgccttatggtattgatttgagcactgtggagtaa

SEQ ID NO: 1848 - DNA, 1674 bp, Aureobasidium pullulans
atgaggttcatcggctcgtctactattctccttttatatgctcatctggctacggcggacttctcttcggctgggcagcttttccaactctcgggacaagacactgtcaacaatgccaaactctcctggcaagctgttgccggcgcttcgatctatgaggtcgaacaacgcagtggcgatggcgacttctataccgtaggcaccacggccggaaacacacatgatgtatatgatctgccactcaaccaacccctggactggcgcatcaccgcaaagaacaaccaaaccaccatcgatcaatcagcccttgtttccctaacacccttctccccatcagccgactacaatatctacgacaacactataccttccgacgccctactaaaaagcgaactcgtctccaacaaaacctactacaaatacgactacgaagcctactcaaacggcagcttctcccgctttgtagaaaagacatcttcagatggatatacctacactggcaaccgcacagtgctgaccggcacaattctctgtgcctctgcaaattacagctgcaaactcgagcgccagcaatttctcaaacaccctgatggtcatttcatcatgtgggcacatttcgaacgtagtcaagattacgcattaggacaagttgcagtagctcatgcaagtcccggtggcgaattgatcttcgatggcgcgtttcaacctctaggtcacgattctagggatatgacgttctttgccgatggagaggatgcatggttgatttcctccacaaacacgaatacggatatggatatctattcgttgacgaagaattggactgctgttgatgaactgcttgtgcaagtcaacaaggcggcttatcgagaagctcctgctgtggtcaagcagaatggatggttttatctgttcacctcgagagcggccgggtggttgccatctcagccgcagtttattgctgcgaagagtatggctggaccttggggtgctgctgtggatattgggaatacggcgacgttttcttcgcagtcgggtgttgtggagagtttgcatagtgtgcaatcttttatgcttgcggataggtggtcggcgaattggcccattgctggaggtccgaacagacagttggcgcttcctatctctttctccggggctgaagggttcgccgcatatcatttctacccgacggtcaagtactctgatcaagtctctgaagcaggtcagggtattttcggtgtacaggaaggcaagatcttgtcggtaggtcgaccttcaagctcgaatgccggtaccgccaatatcaccctcgccaatgacggtacacaagacaccccgaacgccttcttcacgccctctcaagtccccttctggtaccagattgacctcggcaacgcttcaattgtgtctcgagttgaactatcgacgaacatggttcagggctcggagacatattacgacttcaatgtcactggaagtactgatggcagctcgttcagtctcattgggtctaaacatgataacgtcgatgttggattcgtgagcgtggcttcgcagtcgcaggaaaagttcagatatgtgaggctgaatgtcaattcgattgagaacgcccataatggaaacgaggcggactgggcaaggggaatatcggaagtcactgtttacggtcagtga

SEQ ID NO: 1849 - DNA, 4560 bp, Aureobasidium pullulans
atgcgtttctccaagatctccgcactgctttgtgcagtcggagtacttgctgctcccagcacacatgaagctcgcgatcttgctgtcagccctgacggcaagtgtggtggtgcttctggtcagacttgcttgaactcataccttggtgattgttgctcaaaagccggtacatgcggtgagggtgctttcttctgtggtttgggttgccagaaagagttcggcgcttgtattcctacctacaagggcaagcttgtcagccaaaacggtctatgtggtcacgatgtgacttgcaaaggctcaaagtttggtgactgttgcggttcagacaactggtggtatgtaaagcatcccgaaactcaccaagacattgttactgatgttcagcagtggaagctccagcgattcttgcggtactggctgccaggaagagaatggatcttgcggcttcacatggccttggggctccaagaaatctttggtttctagagctgatcccaaccccacctgccccaagtcaaacaacactatctacacgtcagaaactggcaaccaatacaacatcacctgcagtctagatcactctggcggcgatctgaaaatggtctgggtttcctcgaacaagattgctgactgtcttgccgagtgtgatgctactgagggctgcaaggctattgccatgtcaggtaccgcctgttacatgaagagcaagatcggcactcccgtcaagagctctaatgtcagaggtgctgtttgggtgggcaaggtcgatagctctgcttcttccagtgtctcttctaccgcatccgccacatctggaacatcttcttctgcggtcgtctcatcttccacgtccctgatcagctcttcgaccgtttcatactcgaattcatcctcgacaggttcttcatcttcggctttccctacttcgaccagccctacttgccccgccgccaacaacaccgtcttcatcgctgagagtggtgccactttcctcatcgaatgttacgtcgactactctggtggcgatctgaagtcggtcaacattggcagtaacaggatcgctgactgtgtcaacgcttgtgatgctactgacggatgtattgatatcagcatgtctggtactgcttgttatatgaagaagaaactcggtaagcctacaaccaacaagggtgttcgaggtgcacgcaagatcaaggacgcacccaccagctcgagcagcagcagtgttgccccttcgaccacatccagcagcgtcatgagcacctccagcagcttttctccatcgacttcgagcagcgcttcaagcacctcaagcgatgccgtctctacttcgtccaaggtctcttcttcagtgattttgaccactggagtatctactgccaacgccacctcttcgcacaccttgacaaacagtactgtcagtattcctgctacctccagctcttcggtcatctcctcttcggccgtcgtatccttcaacagcactagcagcaaggtttctagctcctctttctctagcagcagcatttcaagcagctctgtcgtagttggtcccactgcccccatcggcaccggagcttcaagcggtgtcccaacaagcctcaccagcggagcaccttatggaaatggcaccagcagcactgtttcagctggtcccaccgttcctatcacttccgaagactcatcgagcactgtctctagcactgtagcctctttgaacagtactagcaccgtcggctcatccacatccactatcttggtcaacaacaccagcaccgtagtatccagcaggacatcaattataggccctactatcccgattggcactggaccctcgggtggtgtctcatccagcactactagtggagcaccatatggcaatggcaccaccagcacagtctccgtcggtcccaccgtccctatcggtacagggatctcgttcagctcggccattcttgtcaacagcactagcagtactatcactgtacctattgcggtcggaccttcgagcggtatttcctcgtcaactactagcggtgctccttacagcaacggaacatccagtgttcttcctgtcggacctactggtactggagtttccagctcggtcatcaccagcaagaccgtcattgtcagccctatcggtacgggtgcttcaagcggtgtgtcttcgagcactaccagtggcgcaccttatggcaacggcactacaagcgctctgcctgtgggccctacaggtactggtgtttcatcaatcatcactagcagcagcaccagttctgcttcgaactcgtcaatctctctgactaccagctacaacctcacttcgagcattgcatcgaccgtcttgaccatgtcggccaactctactgtcagcgcacctctgacaacagctcccatcgtcactggtccttcgactgccatttcaacctcgtctggaagatataccaacacaactagctccgctctgacaacaagctctgcctcgaccacatatgatttcaacaactggggaggtatcaaatccgaccatcctgttgctacaaacacgactgcctgctccagaaagccaacctctaccgccacctgcgttcgttgcgaaggtcagcctggaaccgacaagtactgcggtcttaccatcaacgatgattcgtatgctgttgttcccaagacttgcaaccaggttgagtacagtctcgatttgactgagtgtaccgttgctcccgatggtgtcagccgtaaggctctctgtatcaacggacaattccctggtcctcttctcgaggcaagctggggtgatgaggtcatcgtccatgtcacaaactccatgactcgcaatggaacatccatccactggcacggcatcagacagaaccacacaaacgagatggatggtgtcgttggtgttactcaatgcgctttggctcccggacagacaatgacctacaagtggattgctgagagctatggattttcctggtaccacagtcacttgactctccaagcgtacgaaggtctcttcggtcccatgtacattgatggtcccaaatccgccgactttgatgtggatgctggtcacctcatcatcaacgattggtctcacatccctgtcgacgacatgtacaacgatgctcaagtcgctggtgttcgtaccatggacagcggtttgatcaacggtatgaacatcaatcctttggcaaagggtgacatcaccggcgctcgctatactgttcccactgaattcgttcctggcaagaagtatctcttccagcttctgaacagtgccatccaatctacctacaagttctacattgatggacacaaatttaccgttattgctgccgactttgttcctatcgagccttatgagaccacagtcttaaccatcaacatcggacagcgctatgagataatcgtcgaggccgatcaggaagtaggtgattacttcttgcgcttcgacaaccagaatgcttgtgcttccaccatcaactccgacgacatcagaggtatcatccactacgcaggcggccctggcggcactcccaactcgactgcctacacctaccctcgcaaggacaatggagtcggtggtatcctcggtacttgtgaagatgaaccccttgacaagcttgtacccatcgtcaagaagaccgtcagctctcctcaccaaaccgtccaacacgatgtcgctgtttcgaactcgaatgaaatcaacctttaccgctggtaccttgacggaaccacgttccaagccaactgggatgatgctactctttacaacattgttaacaatgatactatccccacctactctggcgatcttgccattgaggcctccctgggcgagtgggtatatatgatcatcgaatctcctattcctcttggtgagtacatacgctgtaccgactacatctttttatactgactggtcgcccagggcacccaattcatttgcacgggtacgtaaaccatcctttttcaacgttcatcaatagcgatcgagtttcagggaggcgtgagctgtccaagaagggtcttttccaaatttctccaatttttcttccgaagaagaattcggatctggtgcagcttgctcctcacccccagacttgttccctattaacgaaccctactctcccaaatccttttactgacagataatagtcacgacttctttgtcctcgctgctggctacggaaactacggctctggcacagccttgaatctcgacaaccctccccgccgagatgtggcctttatgcctggagatggacccaccggacaaggcggccaccttgttatcgccttctttactgataatcctggcgtatggcttgctcacgttcggctccccttacccttctgatgatcatcgctaacctttttttacagtgccacataggatggcatgtcgccatgggctttgctttacaatttatcgtaggcaaggaacagatcaaagatacggtcagcgacacctgcctgctcaacgacgtctgcacaacatggcgtccttgggctcaagagaagggtatctacgttgacgactctggtgtctga

SEQ ID NO: 1850 - DNA, 1209 bp, Aureobasidium pullulans
atgcagctcctccaaattctagcaaccgccacggcactccatagtttgtgcgaagcagtgcccctgacgactgccgacgtcaaagacaagaagaccttcacccttgaacaagttctcaacacaagctcgatcatcagaactcctgcgcaaaaactcctgcatgtgtacgccaaatacgcaaaagcaggagcatcagcaccggttgcggttcgaaaagcagcagcttcagcaacagtagcaaccgtcgccgcatctcccgaagcatacgatgtctcctatctctgtccggtcacagtgggaggcaaaaccttgaatctcaatttcgacacaggaagcgcggatctctgggtatgttcaaatctgcaaccttcatcacaacgatctgggcatgctatctacaccgtaaacaatgcaaaactcatggatggctacacatgggatatcgagtacggagatggctctggtgcaagtggcaaggtctttgctgataaggtcgtggtcggaagtgctactgctacttcacaagcagtcgaagctgcaacatcagtctctgatggcttcgtttcggacacgaacagtgacggcatcctcggtctagccttcagctccgtgaacacggtcatgccgtattcgcaaaacaacttcttcgacaccgtcaagtcccagctcgccaaagccgtctttaccgcagacttgaagaagggtgctccaggaagctacgatttcggttacatcgacactgcgaaatataccggcagtatcacatatgtcaacctcaacagcaatggtggcttttggcaattttctgctggtggatacgccgtcggcagtggagccaaggtcactaaggcctacaattgcatcgctgatacgggaacaagtctgatgcttctgcccgatttcatcgtcaacgcctactacaaatcagtcaagagcgcagtgtacagcgactatcagggcggctgggtcttcccctgcaacacgaatttgccatcatggagtgcgatcattggaggcaacaagtttactgtgcctgggtcgtatttgaactacgcaaaccttggaagtaacatgtgtttcggaggcatgcagtcgaacagcggaattggcttcagcattttgggagatgttttcctgaaaagtcagttcgtggtgttctcgcagatgactgctaaaccacaagttggatttgccgcgaaaaagctgtaa

SEQ ID NO: 1851 - DNA, 1686 bp, Aureobasidium pullulans
atgcgcgctccgtcgttgctgctcgtcgccgtctcgacgttgctggctcccactgtccttgccgtcccttcatacccgcaaccaccgccgccgcctcagcaacctttgcatcgcccagcatggcgttccgtcaccgacgctatcgttcgcaatatttggagcccgcccgttcaatcaagacctgagcctgccatcagtgctctcccacaccccaagcacagcggcgacgtggttgtacgcttcaacatcagcaattcccaagatgccacaagcctcgccgatgccgccgacactctcttcctcgacctatgggagtacacggacgactgggttgacataaggcttcagggagacttgctaccttcgctgttaggcctgcttccttcctctctacaccgtgctcacagcttgctcatggacgacttctcattacaacatgccatctcagacacatacccttcctcccgctcggctcgtctgcttcaacccaactctcctacccaccacagtgctttcggtcccaagctcggcacttcctcgtccgagaacatctttttcaacgattaccaacctctatccgtcattcaaccatggatgcgcctgatggcctctctgttcaccacccacgtccgtatcatcaacatcggtaccacgtatgagggtcgcgatatccctgctatgcgcattggcgtacacccgaccaacaacgactctcccacacgccgtaagacaattttgattaccggcggtctgcacgctagagagtggatctcaactagcaccgtcaattacattgcgtactcgctcataactggctacggaaagaaccatgttatcacgactcttctggaagaatttgactgggtctttgtgcctaccatcaaccctgacggctacgcttacacctgggagaccgatcgtttgtggcgcaagaaccgtcagcaaacttcgttgcgcttctgccgtggtcttgatctcgatcgcagcttctccttcaagtgggatggcgcgaacacgagatcaaatccctgcagtgaatctttctctggctccgctccctttgaagccgtagagtccaagcgcctggccgactgggcacgcaacgagaccgagaacaacaacgtcgactttgtgggtctgctcgacttgcactcgtactcccagcagattctgtacccctactcgtatacctgcgaccaaagccctcccaatctcgagaacctgcaagaagtcgctgccggactatcgaaggtcatgcgtctgtctggtggccgctactaccagtccgctcctgcatgcgaaggcaatgtcggcctcgtctcaaccggcgaccgtcaagtcttccctcgctttgagactggtggtggcagtttcctcgactggttctaccatgatctcaaggtcaagtatacataccaggtcaagcttcgtgatcgtggtacctatggtttcttgctacctagagatcatatcgtgcctacaggcaaggaggtcttggatgcagttatttactttggcaagctgcttagtggtcagcttgatcttactgccactgaggaagagcaggttgaactcaagcagccgctgcagcaggatgaagaaaacatgactgccatcgatgtagatggtgaggtcgaggacgacgaagatgtcatggttgagttgaggcgacgatcacggatctaa

SEQ ID NO: 1852 - DNA, 1216 bp, Aureobasidium pullulans
atgttcctcaacactcgctccctctttgtgtggtgccttgctgctttgctggaagcagaggctgcttcagtctcctccaagccaaagtcaattgtcctttcggagtcagcacccagcaatgctggcattcccttggactcgtttgtgtcatactcctttgagctttcttcttggcccgactttgctggtaagattaacctgtctatgcgaacagtgcaaaactcacactgaccattcaaggcaacctttcgtatccgaacaagttctcatacaacctcttgaacaatatcggtaatctacaaggctctttgccgattgctcgtgtaggtggcaacacacagtaagatgccattgtgactggatcgttcaaatatatgttgacgcagaacccagagatattgccatcttcgatgcatcccagaagactggtcttcttggtatagttcgtccaaatatctccagcgattatccgaccatcatcacaatcggcccttccttctttgagtcctacaagaccatgcccaaaggaacaaaatacagccatggcttcaacttgggcgcgaattcctccgccgctagaacagctactttcgcttctgccgcctatgcctgcaaagcaatcggcagtgacttggcttactgggaatacggcaacgaacctgaccttttcgtctcctccggctaccgcccgcacaactacaccgaagccgagtacgtggaagaatggctcaatggcaccacggcaatttcctccgccgtcaaagcagcatgcccttccctcgccaacacaaaattcatggcccctagtttcgcaggcgtgggtcccgcaaatgacttcttcaccttggatccggtattagcttggaagaacggattggaccaaaacgacaatatcggcttgatctcttcgcataattatatgggtgtttctaccagtccggggattactttgcaggggacgttgatgaatcataccaatgttgttgctaaagctggagaccaactcagggagtgggcggctatcaaggctctgggcaatggtttggatcctgatgtgccgtttatccttggtgaacacaattcgctggcgagacagggacgtcccggactttccaacagttttggcgctgcgttgtggggtgttgattggaatgtctatctcgcatctcagaacatcagtcgttcgcatatgcatcaaggaaccaattatcggtaa

SEQ ID NO: 1853 - DNA, 1020 bp, Aureobasidium pullulans
atgttaccgaaaacagtgctatcattcatcgtactcaccacaagtggggcggctgcctcatcagcatgcaaaggaaagcatgttcagatccagcctccggccaacgcactggtagtcgacgcttcaggtcaatcagccaacagttttaccactgtcaatgccgctgttgcagccctagccaacacgacagcagagcaatacctcttcttgatgcccggaacatactctgagcaggtgtatgttcccaagctagcagggccacttaccatacaagggtacacttgtgatagccgttcttatgccgagaaccaagcgaccatcaccggtaacctttctcgcacgacaccgggcctgaccagcaacgatcaaactgccacgcttcgtctttggacctcgaacgtcaagctgtacaatttgaatatcgccaatacgttcggtcaagcaaacaccaatggacaagcacttgctctgagtgcccaaaatacgaatcaaggattctacggctgccgcttcgaaggatatcaggataccatctatgcgaacgaaggacgacaagtttatgcagaatcattcatcaatggtgccgtcgacttcatcttcggactccgtgccagggcttggttcgagcagtgcgatattgaaacaatcggacctggattcatcacggccaatggtagagacgcggagaacaacacttcattctacgtcttcaaccaatgccacgtcaatggaaccagcggagtcgcatctaccgttctcggaagaccatggcgccaattttcccgagtcgtattccagaggtcgtacctaggagacgttgtcaagtctgtcgggtgggagcgttgggatgctgtacaaagcctggccaacctctactacggagagtacaagaacaaagggccaggagctgttggtccgagggctaatttcagcatggagctgacagcaccagtaaagcttgaaacactacttggaaagcagtacaagaaggaatggtgggtcgattctacttatctctaa

SEQ ID NO: 1854 - DNA, 1737 bp, Aureobasidium pullulans
atgcgtttctctccttctttcgctctcactgcgagcttggctgtcgctaatgctgctgccattgttccttctgagcgcagtctaggcaagctcatctctgagatcattgtgttggtcaaggaaattaccactattcccatagtgattgatcaacaaatcaacaagaacaccgtcatcagcacgaatggagtcacttgcaaagtcaccaatgcacccactcatttgcgcaccactttgtacaagactacctcagtcacgaagtcttcgactaaaacatcgacttctactgtcaagaatggcaatggacaaagcacagcaacatctgtagttacttctacttcgtccagtgttgcccctgtcactaccatctcggttgcttccacttcgtcatccgtctcgtcagcctcatctgcttcttcgcacacctcggccagcagtgtggtctctgtcaacacttcagcagctggaactggattgaacaccgacctgtacactgcaacttctacctgccctcagagcagcacaactgtcaccactgtcgtgacttctacttccaccggagcatccactaccaaggttgtctctagcactggtaccactaccgttcctgcctccaccacatcgcttgcctctggtgaatggactgactggaccatctatagcgccaatggcgtcaacttaggcaactggctcgagattgaaagatccaacaaccaatacttctgggattcctatgtcaatggttctgcagtcactgacgagtggaccttctgcaagaccctcggcaatgagtgcggttctgttcttgaagcacactacgggtctgccgtcaccaccgaaactattgataagcttgctggtgttggggtcaacttccttcgcatccccacgacgtatgctgcatggatcgatcttccgggatccgagctttaccacggaaatcaacaaacctatctcaagactatctgcgattatgccatcagcacttatggaatgagagtcgtaatcgggctgcattcgcttcctggtggtgtcaatgggcttgatattggtgaggcatcaggccatgacgcatggttctacaatgagaccaaccttgaatattcctacaaagccgtctctgctgtcctcagcttcgtcgaggcctcatcttactcttgggcatacactctgagtgtcctcaatgaggcatctgacactccttctgcatttgccactgcagataccctcaccaccaacggtacccaatggatcgtcgattataccaacggcgtttttgacttgattgccgagtctagtgttaccaagctaccggttatgctccaagactgcttcctcggtgaggaacactggtctagctacttcgcatccactgcgaacctggtcatcgacactcatatctactatttcgccgcctcgggtatctactccgagtacgtcaacagcgctgtttgtggtcaagcatccgtggctcccggtgatggcaagttccctgttttcatcggagaatggtctcttcaagtcctttacaacaacacttacgaagctcgcgagagtatctttaacacccaacgctatgcatggagccgttatgtacagggtggatcgttctggggtgcgatcttcaatggcactgactcggttgacggtgagggtactcagcgcgactactggagctacgatcgtctcattgatgctggcgttgtgaagagcccgaccaacgtgacctactgctag

SEQ ID NO: 1855 - DNA, 2442 bp, Aureobasidium pullulans
atgatccatccgatattcttgctggtgatattactgcctgccgttgcgcagtgcagcagactcgataaaagacagactccagtggaaaatgaagctctaggaacaccaaaccttgtctacaatggaagcttcaccgacggaactcccggatggaccgtcgaaccccctggattcatccgcgaaggaatgctctgtgtcgtggtacctgccggcactgctccgaaggcgagctatatcgagacgacgcagaactttacccaagtcaaaaatgatatccactacttgaactttactgcctcagcatctcatgccaccaatctatggattcagaccaatggctatgatccatctgcaggtggtgctcctgtcgatcccaatctgaacaccacacaagtgcccttgacaacatccctacaaccattctcgttccctttctcacctgctaaccaggagaacaactctacactcacattctttctcggaggaagcaacttcacaaacgagatctgtctcggcgatataagtctgcatcgcatcaaccgcctgccataccaccaagatgtaggacccgcgatcaaggtcaatcagcatggctatctgccaaacggtccgaaaattgccactgtcatgtcgcagagcaactcatctctgtcctggaatctgctgaacagccatggtattctggtcatgtccggtcagacgcatcctttcggaaacgatacagggtcgggcagaatcgtccacacaatcgactttacaaaccacatcaagcaaggctctggatatactttggaagtagctggagaagtcagctaccccttcgctataacttcgacattgtatacgtcactccgccaggactcaatggagttcttttaccagcaacgaagtggtattgcgatcgatgctgaactcgtgggataccaatatgctcgtccagctggtcatatcaatgtattcccgaaccaggtcagtattgatattcatgctctgtggaccaagctgacataatgtagggtgatgtcgtgacaccttgtcaatatgaatgggagtcaaatgtcacctacctcgagccatggacatgcaattacactttggatgtcagtcaagggtggtacgatgctggcgatcagggaaagtatgtcgtcaacggaggtatatctactgcccagatattgatggcctacgagcgatcattacacaccccgaacgactcatcaaactcacttggcgatggatctttgagaatcccagaaagatcaaatggctatcccgacttccttgatgaagcacgctgggagatagagttcatgctcaagatgcaagttccgcagaactctccaccgcagctctttaacggtacatatattggtaggtcaagtccatcgcatggatttagcaccttttgttgacaagtgaccagacatgtcaggtatggcccatcacaagatgcacgacaatcaatggacacaacttccgacacctccacatgctgattctaagcggagggagcttcaccgcccctctacagccgcaacactgaacatggtagctacagcagctatgagtgcaagactttgggccgaattcgactctgactttgctcagagatgtcttgatgccgctcgcattggttacgcagctgcaaaagccaatcctgcaatatatgccccaggtacagattgggaccttggtggcggtgcctacagcgatgacgatgtgagagacgagttctactgggcagctgcagaactgtacatcacgacttcggaggccgagttcgaaaatgatgtcacgtcgaactactatcacacggccaatgtgtcaactctgtttccccaaggtggatttggatggtcatccatgcaaacacttgcacagctagatctcgctgctgtccccaacaatgtcactggaaaggatgctattatccagtctgtaatggctggtgctgaacagtatatggcagttcaaacaacacagcctactggagtctttattacatcttacccgtggggcagcaacagcaatcaactcaattgcatccaagtagtcgcaactgcatacgacatctctcgcaacaccacctaccgcacctcagccttgttaggcatggactacatcttcggtcgcaatgctctctcgcaatcctacattcacgactacggtaccaagacttcaagcaacatgcattctcgtctcttcgccaatgagctttctcgcctgatccctcagaacccaattgtgcctccgcctcccaaaggagcaatggccggtggggcaaatgagagtccagatgatccacctgccaatgatgttttgaagaattgtgtaggacagttctgttacgtggatgatgtgaatagttatagcaccaacgaggtggctatcaactggggaagtgcgttggcttgggttgctagctgggctgctgaccagtaa

SEQ ID NO: 1856 - DNA, 1809 bp, Aureobasidium pullulans
atgagtcacctcgctcgcgcagcagttgctgccgccgccgccgtcaatgcctcatctttggccgatgtatgcactgcctcgaatatccaggctgctctacccgccaacggtacccttctcggcatcgatctgatcccctcggctgtcaccgcaagcgccgtctacaatgcatctaccagcatgggtggtatgggctctagtggtggagccacctacagctactgtaatgtcaccatcacctatacccatactggcaagaatgatgaggttgtcgtcaagtacgctttcccgcagccttctgactttaagaagcgcttctatgtcgctggtggaggtaagtttcttcgcttatgctcaaatgctcaaaaagggttggactaactatgttcaggtggcttctccctctccagcaccgcgactggaggtctcgagtatggcgccgttggtgctgctacttccgctggctacgatgccttcgactacagctacgacgaggtcgttcttgcaggcaacggatccatcaactgggatgcaacctacatgttctcttaccaggctctcggtgagatgaccaaggttggcaagtacatcaccgaaggcttctacggcatgaacaacaccaaggtctacacctactacgagggatgctctgatggtgggcgagagggtatgagccaggtccagcgctttggagacgagtacgatggagcaatcaccggcgctcccgccttccgtttcgcccagcagcaggtgcaccacgtctatcccgcaaccgtcgaacacaccatggactactatcctcctccctgtgctctggccaagatcgtcaacgctaccattgctgcatgcgatcccctcgacggcaggactgatggtgtcatttctcgtaccgatctgtgcaagctgcacttcaacttgagctccatcatcggcgaatcctactactgtgctgccgagactagctcttctctgggctttggcttcagcaaacgccaggctggtagccagacaagcactacaccagctcagaacggcaccgtcactgctcaagatgtcgccgtggcccaagctgtatacgatggtcttcacaactccaagggcgagcgtgcctacctctcttggcagattggctctgagctgtccgatgctgatccgacctacaactcgaataccagctcgtgggggcttaatatcccttctactggcggcgagtacgtgaccaagtttgtccagcttcttgatcttgacaacctctccgaccttgatggtgtcacctatgatactcttgtcgactggatgaccatcggcatggttcgctacctggacagtctgcagaccacccttcccgacctcaccaccttcagagggtctggcggcaagctcctccactaccatggtgaatcagaccccagtattcctgctgcctcttctgtccactattggcagtccgtccgctccatcatgtatggccacctctctcaggaagatgctcaaaaggagcttcaagactggtaccagttctacctcatccccggcgccgcccactgtggtaccaacagtctccaacccggcccttaccccgagaacaacatgaacattatgatcgactgggtcgagaacggtaacaagccttcgcgcttgaacgctaccgtgtcctcgggcgactacgagggcgagactcagatgctttgtcaatggcccactcgccctgtctggcacggtaacagcacttttgactgccttaacgacaaggcttctatcgacagctggacttacaccttccctgcctttaaggttcctgtttactag

SEQ ID NO: 1857 - DNA, 2784 bp, Aureobasidium pullulans
atgaagtctgctactctcattctcgctgccctcttcgctggagcacatgcggctgcaacaccgggctgtggcagtcctctttctgcacaacttacccgtggaggcgccgacaagaccaacacactgagtttcactacttctggcggagttgttcgcagctacctcctgcatatccccacatcttacgatgtcagcactccggccccaatcgcattctcctaccatggcagaaatggtaattctaaggaccaggagaccatttccgggatgtccaacgaagcattcaacccgaactatctggtcgtctatcctcaaggtctgaacgctgtatggcaaggtgatccagatgcaagtggttacgacgacgtcgaatttactcttgaacttctggccaatctcacaagcactttctgcatcgattcaaccaaaatttacgcagccggcaaatcgaacggaggaggattctctgccaacatcttagcttgtgacccccaagcttcacgcgtattcgcagcgttcgggggtattgctggcgcctactatcaaggcaacacagactacccttgtgacggcacgagggtgcctatcacctgcaatccaggtcgttaccccgtcccaattttcacgactcatggagattctgatgcgacaatcccatacactggcggaggccggcggggtcgatgcctgcctactattccgcatttcatgaccgagtggtccgttcgaaacgggctaggcagctcaaatacctcggtctcgttgtataacaacaatgtcattcgctatgattacggcaacgatagcttctcgcaactcagtactcattacctcgtgcacggtctcgatcatacttggccttccatagcagccggttcgtccttcgatgcaacacccctgctgctcgctttttggaacaaatggacattggacactataccttacaacttcgtgaacgccaccgccagcacaccgattgtatcttcgaccataagcacacgcacgtcttcgactgtcaccccaacttccagcataccatctgctagtctatgcccgtcagtgaatggtcagacagtcacagactccactggcaacatgtacaaagtcacttgctcggcagacaacagcgtcggatcctacaccaatgctcaagctgcttcgtcatacctcgattgcatgaacgcttgcgatgccgcagcttcagctggctgccaaggattcacctatgtcggcggtgccaacggtcaaaactcgggtacatgttggctaaaaaagagcatgggtacctacacaagctctggaagtaatactatctccgcagtcagggtctctggcggttcttccggtaacagtgcctctacgaccagctttactgtatcatcgactgcttcaacgagctcatcagtatcattgtctgctgctcccgtcgcttcagcactgtcttgtcctgcctcgaacaatcaagtctatacatatgcaggcaatggagcgcaatttgtgatcgagtgtgggattgatcacgcaggaggtgacatggctagcacgtctgtgaagaatcttgaaggctgtatcgcagcttgcgcaaccacagccggctgtgttgatgtgtccttgtctggatcggcttgctatctgaagaaatcccttggcgcagcagtcaacaatggcggtgttcttggtgcaagatttgttggcaccgccgcaacatcatcaacttcggtgtcgactagcaatcttgtgtcgacttcaagcagcttggcttcgagcatcagtgtggtttccagcagcagcgtcgccccaagcatcagctctacctcttctactcaaggatcaacgggaaccatagtcacttctgtctcaacttcctcaacttcctcaacaactgtatcaccctcgattggtactgatggatatacaacgaccaactatcctccttcctgcacggccatcaacaccaatatatacgctgtgacagacggcaatggaaagccttacctcttcatgtgtggtggtggatcagccggtggcacagcgtcgaccattggcaatgtcgccaactggacagcttgcttccaagcctgcgatggctattcaggctgcactggcttcacttacaaccaaggtgccgctctcggtaatggagcaggccaatgtttgatcaaaacagacagtcctcaatcttttgtctctacggcacaacttcttagcacccgaattgctggcttcatccatccgattactaccaccacgagctctagctctacgtcatcatcggcaactctgatctcgagtagcgcagtggccattacatcttcgtcagtggcattgagcagctcgagcttttcgagtctcagcacaacgccatcaatgacttccttcagcacctcgacaattccctcgagttctgctacagcgtcttcttcagatgcctcgagctctagttctccgtcgtcctcctcaagctctacttcctcgtcatctacctcgagttctacttcgtcgtcaaccgtagctgttccatcctctacacctatcatagccccatcatgtcctgcttccaacggcattacttacgctgatgctggtggtgtccagtacactattctctgcacatacgatacttcagtcaacactattagcgcttcctcaagcgtcggcagcttcggagactgtgctgtgctttgtgatacgacctcaggctgcactggtctaacctggaatggaacattttgttcgctcaagcagtcgtttggtcaatacattcttggtgctgtaaaggcgtaa

SEQ ID NO: 1858 - DNA, 1440 bp, Aureobasidium pullulans
atgcaggccatttcaattgctctcgctcttctttcgcttactggttctgctcttgccgtcccagcacctgttgaacctgtaccttcacctacagtcactgcggccccttctctcgacgaccgtgatctgatcggcgaccttacaggagctgtcaacggtgttttgggtgacgctgtaggagatatcaacagcgctctctccaaagtgggagctggccaacttgctggaaaccaagcatggagcaccatctcatccgctttggcacaagtcacagcaaccaagactcagaccaacgctgcatcggctatttctcagctctcgagcattcacgccgcaaagccttcggccaacctgttcgagtttgttgctgcaattgctgctgagggtctgactgcaaactcagtcacagatcttctgggcttcgtcgatggcttggcctctggacagaacagtatgagcaacgtcaacattcagaagcccaaggacacaatctaccctaaaaagggcaatgaccccaagtacagtgttaccgagtcttcgcttcgttctgccatctatatccctcctgccttcaagatgggagctgttcagcctgtaattctcatgcctggaacaggtgcaaccggctacttcacatatatcggcaactacatcaagctcttgactggctcaagctacgccgatcccatctggctcaacattcctggatacctcttgaacgatgcccaggtcaacgcagagtatgctgcttacgccatcaactacgttgccagcatcactggcaagcaggtgtccatcatcggctggtcccaaggcaacatcgacctccagtgggctttcaagtactttacttcgaccgtgaagaataccagaaatcacattgctatcagtcccgactatgctggcaccgtcaacgcaaacttgatctgtcccgatggtcttccctgtgacccgtccgtcctgcagcagcagtacaagggtaccagcaactttatcgacaagatgagactcaacaacggcgactctgcatacgtgcctaccacaactgtctacagtggactcttcgacgagatcgtcgagcctcaacaaggcactggtgcttcggctttcctcaatgacgcccgcaaggtgggtgtgaccaataactaccttcagggtatctgccccggtcttgctggcggttccttctacacccacgaaggtgttctttacaaccctatcgccttcggactcgtcaaggacgcccttgtcaatggcggtgccggaaagacttctcgcatcgacgtcaacaggctgtgcaaccagtaccttgccgacggtctcaacgttggcgacctactcatcaccgagaattccatcgtagtcgcggcgctagctctcgtcctttacacacccaaggtcaccgtggagccagccatcaaggcctacgccacttactaa

SEQ ID NO: 1859 - DNA, 1575 bp, Aureobasidium pullulans
atgcgtcgctttatcgctaccgtaggcgctctcttgtctgtcgctctcgcatgtaacaatgcagatacacacccttgtcctggttactaccgcgacaatttagccgaagtctcggacttctgtgccaccttcacgcaaagcaccgtcgctgcttctaccggccttccgtcatgggcgactgtctgtgacaacagtcctaagaagctgtctagtgcatgcagctgtcaggtccccgctactgctgttgctgcttctgcaccgtcctcgggtgtcgtcgcatccaccacaccttcatcctcaggctttgtcacctctgtcaagaatgtcgagagctcccctgttttcgctatcacccagacccactcctccagtgtcaccagtgctgccgcaaaggtcgccgtgagccctgaagtcgtggtcagctcttcggttgctgccactcctgctgccactcctgctgtcactagctctgcggctgctgtccctactatttctggaggtgcatctgtctcgctcgcttcgggcggtgtcacttgcactgtgaccgagtacgctggcatctcgtcagctgtggcctcgtgcaccaatatcgtcctctccaacatcaaagcccctgcctcgagcactatcgatctcacctctctgcagactggaacccatgtcatttttgctggcaagaccacttttgaggatacaaacgacaagaaattcgacccgatcgtgatcacgggaactgatatcatggtggaaggcgctgacggccacgtcatagacggaaatggacagtcttactgggacggaaagggtagcaatggaggtgatgctaagcccaaccacttcatcgtcgcaaagcatgtcaacaatggacgcttcgagaacttgaacatacagaactggcccgtccactgtttctatgtctcttactgcaacgccatcaccttctcgaatatccttctgaacaacactattggaaatgagcgcaactctaaaagtggcagtaaggcagccgcccacaactctgacggattcgacatctcttccagcgacaacatcgtcctgactgactcccatgtctacaaccaagatgactgtgttgccgttacctctggttcgaaaatcttggtagacagtatgtactgctctggtggccatggcctctcgatcggatccattggcggcaagtcaaacaacaccgtcagcgatgtcactttccagaactctgtcatcgtcgacagccaaaacggttgccgcatcaagtccaacgagggcgagactggcgaggtttccaacatccactacaagaatatcaccatggagaacattgaaaagtacggcttggtaatccagcaggactacctcaatggtggtccgaccggcgaacccagcaacggtgttactatttctggagtcactgttacagatgtcaaaggaactatgtctagcagcaagggcattgactattacgtcctttgtggtgacggctcttgcagcgacttctcgtactctggcgttgaaattactggtggcagtggtgacaagtgcaactacccttcttctggttgccctgcagtttag

SEQ ID NO: 1860 - DNA, 1092 bp, Aureobasidium pullulans
atgatccagaaccttgcttctttgctgctcgtgagcagtctcgccttggtggacgcattttcattgccagaagcagcctcctcattctcttccttgcttgcgtcctctttgaacaacgctattcccaacacgcttctcatccgtaaggacggtggctctggcggatgtccagctatctggaccagcatatcatctgatctcacctcatctttcttgggatcggatggacaatgcaccgatctcgcacgagctgctattcgattcgctttccacgatgctggtaagtagactgaccgtgtgtgacgaacctcataaactgacattttcgcaggcccatattcttcgaaaacggtgttctacgctcctgctgcaggtggtgctgatggttcacttcttctcaactcagacgagatcaacagacctgagaacggaggtctcgccgactaccgaacatggctgatgggaaagtacactcagtacaaccagaaagccaaggtcggcgcagcagacttgatccaattcgccggctctcacgccgtcatcacatgtcccggtggtcccaagatcaagacagtggttggcagaacagacacctccatcattgcacctgacggcttccttcctgctggcttcggacccaactcctctcacgatatcttgttccagctctttgccgataaaggcttcagcgctagagatcttgcagccctcatcggcgcccactccaccagcaaagccttcactcaacaagccaatggtattcccgctggcgggcaacaagactcaacccccggcaaatgggatattgactactatgctcaagtcaacagcccacctactggcacctaccgcttccaatctgacatcaacctgtcccaagcgaacaccactgttggtaaacaattccagggctttgtcggcaaccagggtaaatggaccagctcgtttgctgacgccatgttccgcttgagtgttttgggtattccgtcgtcgtcgcagagcgggtttgttgattgcacgaatgcgttgcccaggggtacctcttcgaagagagatatccgcgctgctcctatcaatgatcgcgcgcggtga

SEQ ID NO: 1861 - DNA, 1306 bp, Aureobasidium pullulans
atgcgtctctctctggtggcacctctctttgcttttgttgcgctgaatctcaatgcacatgttcaagcatggccagcaatggcgcaacaggcagccgcactgtctcgtcgcgcgcctcaagaccttattgtcgacaatgacattgtgcggataggtcttggcgatgtcaagaacggcggcaccacacccgtcggcacaagtgtctacaacatcctcatgggaacggaagctggcgattcggatgcggctggatacaagccaccaggcatagttggtaccaaggcatgtaaggctgacacatgctgcgtctggtggtggatagctcaggcgatgactgttgccttcactggacctaccggtcgatgcaatggcttcgctcgtgcagccatacgcttgggctttcacgatgcagggtcatggtcaagctctcttgccgctgctggtcaagactttggtggagctgatggaagcattgtcttatcaggcacagagatcaatagagcaggtttgtactcgccatcctatacaagctttagttacaagcactgacaagactcacagacaataacggcctgcaagccattgccaaccaagctttaatctggtctaagctgttcaatgtcggtgtagccgatatcatccagtttggagctaagcatgccgttgtcacctgtcccttaggtccacgcacccgtgtgttcgttggccgcaaggatagtaagaaggctgctcctgaaggcttgatgccctcggtctccatgagcgcagaccaaatcatcagcctcttcgaggacaagaccattcagcctcacgatcttgctgctctccttggtgcacacagtactagccagcaattcaacgtcgacaagacaaaggctggcttcggtcaagattcggtaagcactgagaattcgctttcgcatgcccagtcaagacagctgacacattcaatagacacccggtgtatgggacgtctcattctacaacgagactctgcagccaggtacaaacagcaaggtcttcaagtttcaaagcgaccttgtcacggcgaacgattcgcgagtaagcgatgaatggcatgctttcatcggagatcagagccattggaatggggtaagtcttcccgcgtcacaggccgttcttcaaatgctaacgatgttcacaggattacgcctccgcttatgtcagactgagcatgcttggagtaaacaacatcaacaatctgacggaatgtacacaagtcatgccagctgcgaagaagacgttcgctggagcatcgacaccgggtctctttggcagatcataa

SEQ ID NO: 1862 - DNA, 881 bp, Aureobasidium pullulans
atgaagtcaactacttactctctgaccgccctcgctggcttgctggccctcacgcacgccacgcctcttccggccgtcgtcgtcgccccgaccgatctcgccctcaggcaatgtggaagtcagtggtacaaccccagcagttatgcctgcagagctggagccgatagtaacgccctctgcccggtcgttaacggcgaacccatggaagagtgtgccggcgcctgctacacaccttaccgctacaagtttgtcatcattcatccatcagatccatcacataatcgctaacgaacaccagctgcaacggaacagacctctcggagaagccaagaaaggccagcggaaccttcaccctcaccgccagcaaccctgaccaggacttcagcggccagcctatccaagcctctgacaaccacttctgggtcggaggacacgctgccacctactgcccatcgaacgtcggaagcatctgctcctccttccccaatgacatgaccctcatcggcaacggatacatggtaagcaagaacgaagcccagtgatggaacaacactaaccgagcgacgcaggccaccgtggtcccgggcggacaaagcatctattggcagaaagacggcgctctggccttcacccaagcacactcgtcgtcccagtggaacctcagctactacggtggtggcatcgcttacgagggcggcggttacttcggacccaacggcgaggacctggtcacttgccctgtcattcccccaggcagcaacacgacagcctggcaactcttcgcacgtctggctggcgtcagcttctccagctcgtgtgtcggtgtgtacgctctcgtccacgaccagaacatcacagccggtgcttggcagtacacctag

SEQ ID NO: 1863 - DNA, 1468 bp, Aureobasidium pullulans
atgcatcatacattcgctcttctcctggtggctatcctggccacggttgcgctggccgcaccgactgccaaacaggccactgcacaaacactctctaagcgctccttcaccatccctcgaattcgaaagactggctatgtccgtaagccctcagaggctatgggtcgtgcctaccgcaagttcggctggtcaagaaccactcctgacggatctccttggattgccgtttccaagactcccacgaccacaagctatgacgcagatacctcctcttccgataccacttctgatgtcagcgatgaatcttacactgctcccaagactcacgcctctgctaaggtcaagactttccttgccgcaactctctcctggggtgtctcggctcctgctacgtcttccgccgctcctgctgctgaggaggaggacgacgagactggagaggttatcgctacgcctgctgacaacggcgccgagtacctttctcctgtcactgttggtggacaacagcttaacttgaactttgataccggctcctcagatctgtatgtgaagcaatcatcaaaagagaggacagcaagctaacaatttcgacagttgggtcttcagtacttcccttaccagcgctcagatcggagagcacagtgcctacaattcgtcaaaaagctcaacttaccaagaactcgatggttacaccttcagcttatcctacggtgatggcagtggtgccgcaggtatcgttggtactgatactgtcgacatcggtggtgcaactgtgactcgtcaagctattgaattggccacttcggtctccagcgctttcgtctcggacgccgactcggacggactagtcggtcttgctttctctacgctcaactcggtgtcacctagaccgcagaagacctttttcgataacatcatgtctgagttggcccaacccgtcttcacagcggctctggacctcgatggaagtggcacctacgaatttggcactatcgatgcgtccaaatttactggcaacttgatgttcactcctgtcaacgccagctctggattctggcaattcgacagcaacagctacagtgttggcggcaagacggtcacgagaagcaatgccacacctgcgattgccgacactggtaccagtcttctcttgcttgaccccgaggttgttcaggcatattatgctcaggttcccagcgctgtatacgacagcaccactggcggctatgtttatgattgttcggaggacctgcctgagtttgcagtggctgtcggagacaactacatggccaacatccctggctcaggcatcacattcgcaccagtcagctcaaagacttgcttcggtggtatccagagtaattcgggcagcgacctgcagatcttcggagatgttttgctcaagcatcactttgttgtgttccacggagagtcggagcttctgggtatggccgccaaggccgagtag

SEQ ID NO: 1864 - DNA, 3552 bp, Aureobasidium pullulans
atgcttggtaaaactctcatcaaggccgctgccctggtggcaagtctggcaatcacgtctgatgctcttgcactcaagaagcagaatctcaatgaccttatcaagccatacaagagagaactcctgcaggatctggtgacttgggatgagcactcactctttgtacgtggtgaaagaatcatgctctactcgggcgaattccatcctttcaggtacgatacaattgcccttgctaagtacaatgctggtactgacatgcctcaagattgcctgtccctagcttgtggctagatgtcttccagaagatcaaggcattgggatacaacggcgtctccttctacgttgattgggctcttgttgagggcaagcaaggtgactttagtgccgagggaatctttgcttgggagcctttcttcgaggctgctacaaaggctggcatctatctgatcgctgtaagtcaatcttgctactacttttcttttcatttgcaaaatttgtcatttcagtatcctcttgcaattacgtctggtgttctgcgtccgtctcatgcacagaatttgccaatctgcgtagtcgttcatagagagggcgtgcttggcgcgtgctccctgaattcgactcttttggcaacatattgtacactgaggcgaacattcggcatctagagaggagacatatctttgtaacattatactaattcaagcatagagacccggaccatacatcaatgctgaggtctccggtggtggcttccctggctggttggctcgcaatcctggaattcccagaactcgcgacccccgattcctcaatgcaaccgacaactactctcgccagattggcgagatcattgcaaaggcacagattactgaaggaggccccgttatcctttatcagccagagaacggtatgtatcacactgtcgggcgtcttgctcccaaatgttcaccaaacccgacctcaactccatattgcacccaatacagtgcttttcatgttgtaccaagtctacatgagggccttgctgattctctgtctcttgctagagtactcccaagctgtttcaagcgatcccgaattccctgaccaagtatacatggcggctgttgaaaaaagattccgagatgcaggcattgttgtaccttctatcctcaatgatgcctatccgcacggatattttgtgccaggtagcggagagggtgcagtggatatctatgggcatgacggataccccttgtaggtgattttgtggtttggatactttagcgaaaaagctaacttctcaggggcttcgattgtgccaacccaaccacctggcccgacaacgcattgcccacatactatggtgatctgcatgcagagcagagcccttccactccttactcaatccttgaattccagggaggttcattcgacccatggggcggcctaggatttgagcaatgtagcgaactgttgaactctgaattccagcgagtcttctacaagaacgacttttcattcggcatgaccatcttcaacatctacatgacgtatggcggaacgaactggggcaaccaaggacatccaggcggctacacatcctacgactatggagctgtcatcacagaggaacgtctggtatctcgtgagaagtacagcgaagcaaaactcgaagccaatttcttgcaagcctcgcctgcttatctgactgccattcctcagaacaacactcacgctaatggatcttactccaacaaccccgaaattgctgtcactgcattgtttggtaacagaaccaatttcttcgtcatcagacacgcagcctacaacagtcttgcctcgactgagttcaagttgacccttcccaccagccagggaaatatcaccatccctcagttgaacggatctcttgtcctgaacggacgcgactcaaagtgggcagtcactgactatgatgctgccggtaccaacttgctttactcatctgccgaaatctttacccagaaggcttatggcgataagcaagttcttgtcgtttactcaggggctaacgagaaccatgagcttgcattcacgctctcttgtagtagcgaagtcatcgaaggatctggtatcaacatcgtcaagaaaaagggcaccacaattattggcttcaagagcagctcggaacgccgaattgtcaagattggcgagctctacgtctacattctcgaccgcaacgatgcatacaactactgggtccttgatctaccttccagccccgtttctggcaactacactgatggcactatcgacacttctgctgctattgtcaaggctggttacttgcttcgcaccgtcgaggctagtggtactatcttgtctctcactggtgacctcaatgccacgactgaaattgagattatcggtggcgcacccgcaaaactcaccgagcttaaattcaacggtgagactatcaagttcgcccaggacagctgttccggcgtagtcacagcctctgctacttacagcgagccctcgttctccgttcccgacctatcgactgttgattggaaggttaccaacagtcttccagagatcgtcgcaggatatgatgacagcctttggaccaacgccgacctgacttacagcaacaacactcagcgtaatctcactacacctgtttcgctatatgcacaggattacggttacaacattggcaacctcctctaccgtggtcacttcactgctactggcggtgagaactccatctatctccagactcaaggtggctcagcatttggcatgtctgcttggttgaacggcaccttcttgggatcagctcgcggtatcgacgccgcttcaaacgccaactctacattcagcttgcccaatgtcgcttctggtagctcttacgttctgactgtcctcatcgaccacatgggtcttcaagagaacggccaaggaggttccagcgaaatgaagacccctcgtggtatcctcaactactctctcaacggccgcaacgcttccgcgatcagctggaagttgactggtaaccttggtggtgaggactaccaagaccgcactagaggacctctcaacgagggaggtctttacgctgagcgccaaggttatcatcttcctggagcaccaacctctagctggagcaacagcactcatggacctatgatcggcatcaccgcccccggtgttgctttctactccaccaccttcgaccttgatatgcctgccggctacgatatccctattgccatttccttctccaacgccacatcgagcaccaatggtgcagcctctgttgcctacagaagtcaaatttacgtcaacggttaccaatttggcaagtatgtctcgaacattggcccccaggatgtattccctgtgcctcagggcatcttcgactacaacggtcctaactacttggctgtttcgctgtgggctcttgacgagggtggtgccaagatctcaaacttgagccttgtcgctggtcctgtcatccagagtggttatggacctattgaattgagccctttgaccggttggtcgaagagagagggagcttactaa

SEQ ID NO: 1865 - DNA, 1113 bp, Aureobasidium pullulans
atgttgcgttcagtccttcttaccgcgacggcgttgctgtccagtgtgacgcatggcgcactcacctacaagggagccgatatcagctccctcatcatgttggaaaatcagggcaagaccttcaagacaaccgctggagccaccgaacctcttgagagtatgatgaccatctttcagattcaatgagcatatttctgactgtgaatatcagccattctcaagcagtctggagccaattcggtgcgtcaaagagtatgggtcaatccctccgacggcaactacaacctcgactacaacgtcaagttgtccaagcgtgtcgccaatgcaggcatgagtgtgtatttggacttccattattccgacacttgggccgatccttcgcaccagaccacacctgccgcttgggacgacagcaccatcggcaacctcaaatacacagtctacaactacactctggcagtgtgcaaccgctacgcagcagaaggcatcaatccagccatcgtgtcaattggcaacgagatcagagctggtctgctgtggcctcttggaggtaccagctcttactacaatatcgctgatctccttcactcggcctcctctgccatcaaggactccaagctctcgacgaagccgaagatcatgatccacctcgacaatggctgggactcgggtactcagctctggtggtacaaaaccatccttgggcagggacctttgaaaacaactgattttgacatgatgggtgtcagctactaccccttctacaacgaccaggccttcctgggtagtttgcaatactcgcttgagcagctcgctgcaacatacagcaaacagctcgttgttgccgagaccaactggccagccaagtgcagcaagcccgcatacaagtttccttcggatgccacctacattcccttctcggcagccggacaggaagagtggattgaagctgttggaaaaatcgttgctggtgtcaagggtggagctggtctttactactgggaacctgctttcttgggtaacggtgctcttggatcaagttgtgaggacaacttgctggttgacagcactggcaaagcgagagtcggactttctgccttcaagaacatttaa

SEQ ID NO: 1866 - DNA, 2763 bp, Aureobasidium pullulans
atgagatactcactcactactgcagctctggccttcgccatctgctctattgctgcccctgtcgcccacggcggtaacgactacggctctctgtccggtacaggagcttcaggcgttgaggtttctccctcgggctcagcaggtgttggagctgatgtcaatggctcaggcgcaggttccgcagggcttgcaggctcagcagatctgggatcatccgcctcgccaagcgtaggcgcttctgcaaacttgggcggctcgggcgttggagcgtcagcaggcttgggaggctccggcggactaggcgcacacgctggtcttggtggcaagggttccggcctcttgggaggtatggctgggttgggacttggccatgaaggtggtctgagttctggtctgtcaggaaagggtggtgcttacggaaatgcttcgccctcaattggagccaacatcggcggcagtggctcagcatcgccgtcaattggagctggtattggaggtattgcttctccttctattggcgccagtattggagccgatagctcagcctcgccttcgatcggagtcggtttgggcggatatgccgccccttcagattcagcatctttgggaggagctctaggcggtctcggatccggacaagcaggcgcaggcttgggcggagctgctggtctcctcggaggcctcggattaggtggcagcggccacggtcacggtgggattggcctaggtggtagcggaagcggaagcggtgatctcttgtcgggattgggaattggtggctctgcaggaattggcagcggcggctcagctggtgcaaatggttcgggagatgtttccggaaatgctggcggtgacacagagaccgatgcttccggaaatggttcttcggctgattctggcgcatcttcttacggcaatgacagctcttcgtctcctagcgagagctctccttctggcactgagaccgacgctgcctctgctactcctacagacgcttcatctgctccaagctacggtgatgacagctcatcccctgaggagagctccccctccggtactgagactgacgccgcttctgctacccccacagatgcttcgtctgctccttctgatgactcttcatctgccccttctgccaactcttcgtctgctcctagctacggatcggacagctcgtcctccagctacggctcggatagctcatctcctagcgagagctctccctcggagaccgagacagacgctgcttctgctacccccacagatgcttcgtctgctcctacttacggcgaggacagctccgtggaggatgcagatggctctgcagctgctcccgtgtacggctctactcccagcgaatctgctgtcgacgctgccactcctactgaggctcctaccccccctgagacctctgctcctgctcttcccctgagcactgccgcctctggaagcacttacaagtcctacatcaagaagcgtcaggatctcagttcgcttatgggtggatcttccggtggtttgagtggtctctcgggcctctcaggtggcagtggattgatgtctggaggcagtggtcttggaagcttcccaagcttgggaagtggaagttctggcttgtctggcctttctgggctctcgggcttgtccggaggtggtttgagcggacttggtagtggttcgtccggactttcaggtctcggaagtttgggaggatcaggcactggctcggcttctgccctttcgaccggcactgcttcatcttccagcggctcggggtttgatctttcaagccttggcggcggctcttcaggtttgagcggactctcatccctcggtagcggctctctcaaggagaagcgtcaatttggtggtcttggaagcttcggcggttcatcaggtttgtcgggcctcagcggactgtcagggggatcatctgggctcagcggcttgtcaggaggctcttcggcactcagtggcttgtcaggtggttcgtctggctccggtttcgacctttcatcgctaatgggcggtctaggctcaagcagcaccggcagctctgactcttccgcttcgaccggtacagctaccactgattcatcgtctggctcttctggatttggctcgctcggctcgctcggttctttcactggctctgctggcggtgctgttcctagcaacgatgttaccggcaacactggatgcaagaaggtcaccttcatcttcgctcgcgggtatgttcaaagattgctaaattcacgatttaaaacctaacattttactagtaccactgaaatgggcactctcggctccgttgttggccccggtcttgctcaggatctgatcaaggacactggctcttgctccgtgcaaggtgttgattacccagctgatgctgctggcaacgcaaacatgggcgcctccggcggtcccaagatggccgctctcgccaaccaggctcttaagcagtgccccgacaccaagatcatcctcggtggttactctcaaggcgccatggtcgtccacaacgccctcaactctgtcgacggctccaagattgccgccgtcactgctttcggtgacccgatgaacggacagaccttcaagggtgttgatgacagcaaggtcgtccgctactgcggctcttccgatttcgtgtgtgacatgtccggcaagacccaaggcaccggctctcacatctcctacggctccaacttggccgaggccgcttctcgcctggcccaaatcgttggcgtcaaggcttaa

SEQ ID NO: 1867 - DNA, 948 bp, Aureobasidium pullulans
atgaagtccttcggaatcatcgccggctctgccctcttcggagccattgccaacgccgcacctcttgccaagcgcgatgtcgtctgggtcactgagatcgcgaccgacattgtcactgttcccgtcaccatgactgtctgggctgatgctgtcgagaccactgctgtttcgaccaccactactcaacaacacggccacaagttcttccactccaaggcatccaaggcttccactacctctacttcggtttatgttgcacctaccactagcagctcctccgtttatgtagctcccaccccttcgaccacctcggtttatgtcgctcctactccttcgaccacctctgtttacgttgctcccactaccagcacctctgaggcctatgtagctcctaccactagcacttctgaggtctacgttgcccccactaccagcagcacttcaatctacgttgctcctaccacatcctctgtttacgtagcacccaccactacttcgatctacgttgctcctaccatcgagagcacttcggtctatgttgctcccaccaccagcactaccagcagcgcccctgcagccactactagctcctcatcgggatctgtttctgctggcatggccgcctccggcactgaatactctggagacatcacctggtacgatgttggtcttggtgcttgtggtgagaccagcgttgatggtgacaagattgttgccatttcccacgtcattttcgatgcctactctactggcaaccccaacaccaaccctctgtgtggcaagtacgttaccatcaacggcaaggacggctcttctcaccaggccaaggtcgtcgaccgctgcttgggatgtgttgagggcgaccttgatctttctcacgagttcttcaacagcgtcacctccaacggcgatggccgtgttcctggcatgacctggagctggaactag

SEQ ID NO: 1868 - DNA, 1336 bp, Aureobasidium pullulans
atgcgtctttccaatctgatagcgtatgcactcgcaccgcttctcgcctctgcaaccatcctgcaaaatggacaagttcgagacatagtctttcctgacacaagcattgcatctgtgaccagcaactccaactggacgtctttctctcccaacgcttcccagatctcatacaaaggtcgttgggacgagaagcatatatcttggtggtcagctcctggtctcaaattcggcttcaccggcgacaaagttgctataagctttggtcaatacacttctcaagccgtgctcattgcatacagattcgctggtcaagactggttgttcacaaacgtcactgcaaactcgacccaccagcttatcgacgcatcgactgtaggcttcaatcttacaactcaatcgcaaaagccgcagacattcgagcttcgtgtcaccaattatgcctatggtgtccagatagctggtgtccatctcagcaaaggtgcaaaactcatcaagattccgaactattccaagaaaatcgagatcatcggcgacagtctatcagcaggtcaatacggaacctatgaaggcatttcgagctacgcctggggtctagccgaaggcctcggaaatgtcgagttcgacatcaccgcatatcctggtatctgtcttgtggaccagaactgctggggaaatgctcatggtcaaacatatcaatggtacagagcttctgatacttcataccgctctgaggtaatctatggcgacaacccaccactttgggactttagacatcatcaacaatctgatattgtggtcatcaacctcggcaccaacgataacaacactcacaacaacgtcacgaacgagaagtatcttagcagctatatcgattttgtcggtcaggtgcatcagaagtacccacgagctcagatcatcctcatcgctctttggaacggatttggtcaggttggaaatacttgggagcaaggtggtgccttcatcgaggagattcaacaggtgtacgctcactaccaacacgccggtttcgtgcattacttcaacactactggtattttgcaacacaacgatattgtaagtctggcgtgggagagatggtagatgactggtactgattgaagttacagggaccacaatatcatcctacggatgttggacatatcaagttggcgagccatctgatgcaatacatcaagctgaagtttggctgggtattcggagctactgggccggaagtgcaagcagatacgctgtactggaacgatggtgtgtgctccaaagcttcctacttacaagtcaagactcgctaacgaatcggatagaaccgggctattga

SEQ ID NO: 1869 - DNA, 2366 bp, Aureobasidium pullulans
atgcagtaccctatcatcacgagtctgctggtggcacctctgctcgcacttgcccagtttcctccaccagtagagtactcgaatatcttgaagtcgccgatcaatgagaatatcactattgcctacaagactccacctgctggcacttgtaccacggcattcagcacccagaagcaattcaccggttacattggcttgccaccatttacgctgcagccgatccagcaaaactactcgatcaacaccttcttctggtttacagaggcacggcagaatccggaaacagcaccgctgaccatctggatcaatggcggccctggaagcagcagcatgatcggcatgtttgcagagaacggaccttgcgaggtcgttctaatggccgatggcacatacggcacacaggcacgcatgtggggttgggacaggagctcgaatgttctgtttatcgatcaaccagctcaggtatgtatctcatcgcgaatcttcgagtttcgagcagcgaccgcagtacgcgaatcactcaacgataggctgctttgtttcgagagtgtgttgttagcactctcgaaggagtcgcagccgattggtcttaagcctttattgcgacagcaccggaaacacacgaacaatgccttagagaaacacgctaatactgtaacaggtcggcttatcctacgacactcttaccaatgcttctcttgatcttgtgaaaggcacctatcaaccccctagcccggcaccagagggataccccccttatgcctggctgaatggaactttcagctcgaacaaccccaatttcaccagcaatacgactgacatctcggccagagctgcatggcatttcttgcagagttttctgtctgccttcccacaatacaatcctggtgctcacccaaacagcacaaacgtctcgaccactggtatcaacctctttgctgagagctatggtggcatatacggcccaacgtttgccaactacttcgaggagcaaaacagcaagcgcgagaatgggaccattcccaagaactctaccctcgagatcaagcttacctctctgggcatcgtgaatgggatgatcgatgtgctgatacaggactactactacgccaccatggcttacaacaacaccttcggcattcaggccatctcgcagacagacgagctcaacacgatcgaggcgtacaacagcaaatgtgccagcgcgattttgcaatgtcgccaagttgctggtcaaattgacccggaaggcgaaggtgatgagcaacaggccaactcggcatgtcaagcagcgacttacgcttgtaatagcttgatgatgcctttccagggaagcggtctcaatgtatacgacatccgcgtcaagaatccatcgccagacccacctcaggcttttttggaatatctgaatacagaatcggtgcagaaagccatcggtgctcgagtcaactacacctcttcgaacagagccgttcaggctgcatttatcaacacgggagactcggttcgaggcggtcaggttgaggacatcgcaaatcttcttcgggcaggcgtgcgcgtatcattgatgtatggtgatgccgattacattgtaagtggttcgaacatccgactattcgtacgactgaactgaccaccaaaagtgcaactggatgggtggcgaagctgcttctttcgcagtcgcagcagctctttcggacttcccttcgaacggattgtcctcttcatacctctctggctggaaccaggcaggatatgccgacattgtcgtcaacagcagctacgttggaggtgctgtacgacaatttggaaacttctccttcagccgcatctatgatgcaggtcatatggtaccatactaccagccggagactgctttcaccgtattcacacgaatcatcgacggcacggacctcagcacgggagaggcaatcaacctttccaacttcacatcatccggaccgatgaatgcaacgcatgtcaatgccgcaaccttcaagcaaccagcaccgacatgctggatcagggacgtagcagatacctgttcgattgaccagcttaaacacatgctgctggaggatggtatggtcgctgcaggggtttactattcaaattcgaagcaatacaatgctcccagcagtactgtgactgctggaaagcctggaacaccagtggcccgatcatccacgagcttgagttctagcggcagtgggagcagcagcagtaggtcgactgtggctctgactggagtgttcacagcgactgcgacacccagccctactcaaggagcagctactgagcgcgtgacgattgcaaagtggattcagaatctgcttgcacttgttgctgtgatggtggtcatgtga

SEQ ID NO: 1870 - DNA, 1038 bp, Aureobasidium pullulans
atgaagcttttcaccatcttgtcgggcgttgtgtcgctggccgccaccgtcctagcttattcgaaccccctttcgtgtagtggtacatgtaccaacgctcacgacccttcccttatcaagcgtacctctgatggtacttacttccgtttctctactggaggtggtattgctatccataccgcttctagcattcaaggaccttgggtctacaagggtcaagtcctccccaacggcgcaaatgtagccaactctggaaagaccgatctttgggctcctgatgtctctctggtcggcagcacctactatctctactacactgccagctcttttggcactcagaactccgtgattggtctcgccacttcttctaccatggatgtcggcagctggtccgacaagggctccagtaagtcactatacatcgatccatcgatcataccttatctcagcatctaacatgatatagccggtatctcttcggacagcagcaagtcctacaacgctatcgatgccaacctcatcaaggtcggtagccaatacctcatgaacttcggctctttctggcacgatatctaccaagtcgaaatgaagtccacccccaacaccgtctccgcctccgccggccccagctacaacaccatcttccaacccagcggcacccacgccgtcgagggcgcctacatgatcaactacaacggtggctactacatgttcttcagcgagggtatctgctgcggtctcgacaagaaccgtccagccgccggtcaagaatacaagatcaaggtctgcagatccaactctgctaccggtggtttcgtggatcagagtggaaagagctgtaccgacggtggtggtactgttgttctgccttcgcacggaaacatctatgctcctggtggtcagggtgtatacaatgatcctagcttgggttgggttctttactaccattacgttgataccactatcggttacgccgatggtcagaagcgtcttggtgtcaacaagatcaagtgggtcaatggatggcctactgtttaa

SEQ ID NO: 1871 - DNA, 1434 bp, Aureobasidium pullulans
atgaagtatcctctcatcctaacagccgctgccagcgctgtgtccgctaatggacactggcccccccaccacagtccctcttactcaaaccaatctctatcattcgacgcgaccatcaaagtcaatgccggacaacgataccaaaccatgctcggcggtggctgctccggggctttcggagccgcatgtaccacaaacaccctctcagcagccgaccaggacgccgtcgtccgcactctcttcgacgagaacattggtgccctatccatcctccgtaacttgattgggtcttccgctggcacaaccattcttcctacttgtcctgcaacccctgctggccctttcaattacactttccctactgcttccaacgatagctgtcaattgaccttggctcagaatgcgatcaaatacaatccagatctctacatctacgcagacgcctggtcagcacctggctgcttcaaaaccaccggtcgtgaagcaggaggtggtgtcatctgtggcgtgcgtggtagcaattgcacctacgactggcgtgaagcctatgcaaactatctgatcgaatacgtgcggctttatcaacaacgcggtatcaaggtgtctctgctgggtgcctacaatgagccggatttcaatccgataacgtactctgctatgctgtcggatggataccaagcttatgatttcctgagtatcttctacccgatggtcaagaaggctttccctagcttggctgtgtcctgctgtgatgcaactggtgctagacagcaaagagatctgctatacgaactcggtcgtcttggaggaaagacactgtttgatgtaaacacctaccataactaccagtctgatatcaaggagccgttcgacgacctcttggccggccagcctacactggaaactgaatggagcgacggcggcaacacctggacacgcacctgggacgccgtcggcaacaacttcgaaggtttccagtgggccaactacatgcaccatgccttcgtcaacaacgtcgccggctggagccactggtggtgcagctggacctctcccacagacgccgctctggtccaagtaaacggcacatcctaccaagtctccgcccgcctatgggcattcgcaggctacttccgcttcgcccgtcccggcgccgtgcgtctgtttgccgatagcagtgtccaagaagtccgcgtgaccgcatggcagaacaagaacggcacgatcgctattcccgtcatcaattctgcgcattatacttatacgttggatgtggagttgggggctacgaatgtgagcagggctactgcttatttgactgataacgagcataatgttaccatggctgggcagtttgcgtttgagggtggcagatttacggcgcagattgagcctaggtctatgaagacgttctttttggaggaggcggaatag

SEQ ID NO: 1872 - DNA, 742 bp, Aureobasidium pullulans
atgttctccgacatcagcctcaagggtgctctcctcagcgtcttcctcgctgcaggtgccgtcgcaagccccatcgagaagcgtgctgcctgctctcagtacaccatcatttccacccgtggtactggtgaacttcagggtccttctgctggattccgcaccatgaaccagcagactctcgcccaggtctccggcggtaccgtctacaacactgtctaccttgccgatgccagccagaactccgccctcggcactcaggacgtatgtcgctccatatcaacttccacactttgacatgcattgctaacatccatcccagattgtcaacaaggtccagtcctccctccgcaccaaccccaacatgtgcttcatcctccaaggctactcccaaggcgccgccgccaccgtcaacgccatgcccaagctcaccggcgccaacatggacgccgtcaagggagtcttcctcatcggcgacccagagcaccgttccggtctcgcctgcaatgtcgacgccaacggcggcaccaccaccaagaacgtcaatggtctctccgccgtccttggtggcatccccgctgcttgggtccccaagaccatggatgtttgcgcttacggtgatggtgtttgcgacaccactcacggtttcggaatcaatgctcagcatctctcttacccttactctagcactgttcagagcatgggtaccaagtacatggttgcccagctcaatggctccagctaa

SEQ ID NO: 1873 - DNA, 2724 bp, Aureobasidium pullulans
atgcctaccctatcttcatatatccttgcttcggcgggagcctctctggtgaatgcacagtttggcaacttcggttcgccattccccaacacaacatatcctggattcgagtctgagaacccctacactattgagggttccaagagcttccaatggagccctcccaagtaccccagtccttggggtgagggttctggtgactggaaggagtcttatgtcaaggctcgcgctcttgtctcccaattgaccctcgaagagaaggtcaacctgaccagtggtatcggaacgagtaagtaaaatcatcaatattgtcatatctcatttattctaactctcttcgaagaccagggtaactgcgtcggtcagaccggctctgttcctcgtcatggtatcaatgctctctgtctgcaggactctcccgtcggcgtccgtctcaccgatggtaactctgttttccctgccggtgttaacgtcgctgctacctgggaccgtggtcttgcctacgctcgtggacgtgccatgggccaggagcactacggcaagggcgtcgacatgcagctcggtcccgttgctggtcctctcggtagagcaccggctggcggcagaaactgggaaggcttctctcccgacccctacctcactggtcttatgttcgccgagtcgatcaagggtatccagagcgcaggagtcatgaccagcgctaagcacttcatcgcttacgagcaggagcacttccgtcaatctcaggaggccaagaactggggcttcaacgtcactgagagtgtttcggccaacttggatgatgttactctgcacgagctgtacctgtggcccttcgccgatggtatcagagctggtgctacatctatcatgtgttcttacaaccaggtcaacggatctcaggcttgccagaacagttacattcttaaccacgtcctgaagaatgagctcggattccagggcttcgtggtttcagactggtacggaactcacagcggtgtttctgctattcttgctggtctcgacatgagtatgcctggtgatcccgttcaggagttcggaaaccacggtggtgctctttttagctcgaacatgacaattgctgtcattaacggaactgttccccaatggagactggacgatgctgccgtccgtatcctggctgcctactactatgtcggccgtgacaagaacgaagttcccgtctctttcaactcttactctctcgacacctacggttactcccacaatgctgttggtcaaggttacggccttattaaccagcacgtcgatgtccgcgagaaccacagcaagctcatccgtgagattggctctgcttctaccgtcctgctcaagaatgtcaacaacgctcttcctcttactggcaaggagaagttcaccgccgtgcttggcgaggatgctttcgagaacgtcaacggacctaacggcttcactgatcgcgccggtgactctggtactcttggcatggcctggggctctggatctgccaacttcccttacctcatcactcccgatactgccatccagaacgaggttattggtaagaacggtggccagtaccagtctctcagcaacaactcgaacctcgaccaggccttctctcttgctaagcaggcagaggtcgcgataatctttaataatgctgactcgggagaaggatacctccaagttgagcacaacttcggtgaccgtaacaaccttactttctggcagggtggtgacgagcttgtcgccaacgtctcggctgcctgcaacaacaccattctggtcatccactctgttggccccgttctgcttgaggagtacgccaacaaccccaacatcaccgccatcctctgggctggtgttcctggcgagcagtctggtaactcgattgccgacattctttacggtcgtgtcaaccctggtgccaagcttcccttcaccatgggtgccaagcgttccgactacggtaccgatgttctttacactcccaacaacaagattcctcagaccgacttcaaggagggtatcttcattgactacagagccttcgacaagcaggagattgagcccgtctacgagttcggtttcggtctctcatacaccaacttcacctacagcgacatcaaggtcaacaagctgaacactagtgcctacacccccactaccggtatgactcctgctgctcagacctacggaaacatcagcatgaaccctgccgaccacctcttccccggcaacttctctcgcgttcctctctacctctacccctggttgaactcgaccaacctctcctccgctgctggtcagtctcagtacgctccctacggtgatgacagcttcgtccccgagggtgccgtcgactcttctcctcagcctcgccttcctgcttctggtccttccggtggtaaccccgctctgtgggacgttatctaccgcgtcaccacccagatcaagaacgtcggcaaggtcgctggtgttgaggtccctcaactctatgtctctcttggtggcccttacgacgctgtcaagatgctcagaggtttcgagagattgagcatccagcccaaccagaccgtcaccttctctgccgacatcatgagaagagacatcatgaactggagccccgaggctcaggattggttcgtcagcaactacaccaagactgtgtatgttggtagcagttcgagaaaccttcctctcactgctcagctcgcttaa

SEQ ID NO: 1874 - DNA, 2861 bp, Aureobasidium pullulans
atggtatcaaggtcctcgttgactgccatggctcgcccggctcccagaacggtttcgacgaactctggccgctctggcaatgtagcttggcaacaggacgacaacatggaacaaagcatcagcatcctcgagacgattgccaagaaatacggtgctcaggagtacgctgatgtcgtctttggtattcagctcgtcaacgaacccatttcgtgggaccagaacaacattgacaccaccaaggaatgggccaagaaggcctacaccgctgtcaagtctgcttcgaccaaccaagacctcgctgtcattatgcacgatggtttcatgggaccctcggactgggaagaggttggtgctgctgtcaacggtggtgcctctctttctgacgccaagttttggatcgacacccatctctaccagaaccaggttgcagatgactccaagttgacccaggacgaacatgtcgagaaggcctgcaactggtcatcaaccgagcttttgccatcatcgtctaacctaccggtcatcgtcggcgagttcagcgctgctaccaacatctgcgcgaaccctgacggatccactgttgccggcagcgtctgctggatcgacggctgccaatgctctgccaatgtcgacattgaggactggaacgagcctctgatccaagctacccgcaagttcctcgaagctgagctcgatacctttgaagcacacgctcgcggatactttatgtggaacttcaagggacctggtgcctggggctaccagaatgccatcaagtatggcttgattggagacaagatcacagacagaaagtatcctggtcaatgtagctcatgagaataacggatgaagagaagaaagatagaagaggcgctggacgccgacgaagaaggttaaaaaagtgattgcgatataccccttccatgattcaatggactagatttcgattcgattttgtagatagattcttatagtgctatgcactgaaacaaacattttctcaataccacatacgccgcaatctctttcagttgttctcaatcgatgtgtgtctcctagtgaatgctggattagacggtagatggacaaatggctggatgagtgaaagagtggaaataagtcgaaggtcttggaacaaagtccggcgcgtgctggagctcgcgcacggaccatggtctagtgtttgtgctggaagagctgcaactgttgcaccaagagagtttctgtatccacaagcacgcgacttgattctttttcccatctcaagcctggaaacacatctttccatcatacacaatgtctgccgatactatcacaacccccccacaactggagagtcaaagagcgctcgcaagaagcgcgagaaggccgaagccgccgccgctgctcaagctgccagccaaccccagcaggacagcgatggccagaagacccccgaaatcacagagaccaatggcgactcgtttgagagctctcacatgaaggaactgcagaagtttgtcggacaaatcatctattgacagatcgtctgagctgacagactctaggaacctccgcaatgtgaacaagaagctcgttagttcactcgcaccttcataactgtcgcagaggactaaccgtacacagaactccatgaccaagttggactcgatcctcgccgagaaccccgacaagtccttggacgaactcctcgcttcccgcaagatcaacgccgaccagaaggcccaggcctcgaagaagcccgctctccaagcccaggctgcccagctcgaagaacagattgcccagtacaagaaggttgatgccgactaccagtcgcgcatgtctgcccagcactcacaccttacttcgactcaccaatccgagattgagaagctgaaggcttccgtcaaggaggaacacgaggctgcgctcaaggccgtcctgcgcgagaagctcctcacattcagccagttcctcagagctgctgctgccaagcgtgtcatcgaagaagaggccgacacagacgagtctaaggcattcgaaggtgctctgttgctggtctacggaggtgacgacaaggctgttgatgctgccttgagcttgatcgagggctctgacgagcaagtcccttcggttgagggtgaactgttgcctatcaagtgtaagcaagaattgtgctctaactagtagccacgtgctgacacggtgccacagattcgcaagtcaagcaggccgctgttggctttggcgcattccccggcgaggagaccgcccaagaggaggcccctgttgagtcaacagacgctaccaacgtccagcccgaagacactatcccttcgagcgaccccaccattgcacacgctggcctcaccgagttgggcattaaccagtccgctgaggaggagaagcctatcgtaattgccgacgccgagcctcagtctatcgccgaggcctccaccggcgacgagtcggccaacaagtccgccgagacacagtgggacaacgccgctgccacagccggcgccgaccaggagctggacgactcctacgagatggtcccccgccccgccgacgagaccgaagctgtccatgaacccgcccagcctcagtcgaccagctcttgggccgatcagacatccgcaaacgccactgctactgaggccgctgccgagaacaacaacgctaccaacggactcgcatcgaccgacgctgagggctttcagtctgttgagaaacgcggaggaagaggtggccaacagggacgtggaggccgtggacgcggtcgcggtggacaaggccgtggcggtcagcaacgcggcagcttcagaggtaggggacaagctcgtggtcgtggccaagctcctcagcctcaagcatag

SEQ ID NO: 1875 - DNA, 2145 bp, Aureobasidium pullulans
atggcccctgcctcctgcgtcttctttggcctcttctgcgactcaactagcggaactactacatcggtctctaccacatcatcttcaatcatttcttccaccacttcaacaatactctcatcatcaacatcaaaggttgtggtagcctcgtccacttcttccgcagcaccagtctctactctgaagacatcaaatgctggcgtctactcaaactgctactacaacatcgatggagtaggggagttcaacacgagatgggtcgcagattggacgactggcgccacacaggatctgacaggcattgtctcttcagcttataccgtgggaactcctagcacctcatctactacaaccagcagcaagatcaagagaggtttgggcagtctcttctccttgttttccaactctctttcatttagaatcgtgccttcatcaacaaaggcagtgacttcgacagtcagcagtgctgttggatctactgttggcacagtggggtccgtcgtctctggtgtaacaactggagctacggcagcagtcgcatcggtagaggcatccttgagctcgagcacccaactctacactcaatacaacgacatcctgtatggaagtgtcagagctgttatcctgctgagtaatgccactggcttcacatcattcagaagtgataccatggagattgaccttaactggttgaattaccactctacctacgataccactgccgtctctgatgcatctacagcatggcacgagtaccgtgttgactggctacctggagctaccaactactatatcgactccaagctcatgagtagcacaaccagcgagacaagtcctggtctatggctgtggaatgcttggtctgatggcgatgacgactctgtcttccagatgcgcagtattgatgcttacttcaaccgcacatctgtcgctacagatcttgctaatggcgttgctgtctgcaaagaggtcaacattgccacggctgctgcgtcatcggtggttgatactgccaccagcctagttgggactgtcgcaggagcagcaactggggttgttggaggtgtagttggtggcctcgtaggtggttcatcctcaacctcgagttcgtcgatcacccctactcctactcctgcgcccaccactcttagcacttcgaccaaggccccttcgctctctgcacaagccaccgtctctttcacgactattagctcagcttggactggcaaaactacctcgacgacaactcaagtcaacggtctctccgccaccgtcattgtccttacacccggtgtggtagccgcaacgacctcctcttcctccacttccagctcaggcggctacgtctacatgaccactaccacagactcaggtacatttaccgcagtccaaaccaagaccttgctgcccaacattggcacaacagccaccgtccaaatcatctatcccaccccggtcaccacctgcagcaataccggtatcgcctacgccggctacacgaactctttcgcaggcggccaggcaacctacggctaccccaaattcacccccaccgtctataaatctgccaaaccatctcaaaccggcatcacaaactacattgcagaagtcaacagtggaagcacgggcgccaatgtggcatactacggccgcactaccacgacccaaaattgggtcatcgatcatgtgttttatcttttcgcaagacaggatggttattattctttcaacatcccttatacggatgatttgcagatggtgtggtatggagataaggctgttagtggatggactagggacaacgcggatattgtgcaattctggagttcgcagattgctgtgcagacgccgcagactattgctgtgtacttgactactggcagttatcttcctcgtaagtaccttccctcccatatcgctgactgaaagggatgaaagctaatatatatctgaacagtgagagttatgtttgctaatggtggtggtgctggtgaattggatttcaacatctatggaccggatggaagtactattcttgcgtcgaataggggattgggtacgggaagttcgtcgattgatatcgtgcagttcccttgcgatactacccagggcaagaagttccctgcctggggcgctgagacttga

SEQ ID NO: 1876 - DNA, 1413 bp, Aureobasidium pullulans
atgaaacatatctcgaccttggcacttgccgccagcaccatcatcggtgctgaagccatcactttgcaaaagcgttccgacagcgcatcaagagtcatcgagcacgagatccagagaaagcatgtcgccaaccccctgaagagagaccgtctacgaagacgtcagaacacgatttcgcaagagttggacaatgagcaaacactttacttcgccaatgtttcaatgggaacccccgagcagaacttcagactacacatcgacaccggatctagtgatctctgggtcaatgttgcaacctcgactcagtgtgaggacactcagcaaaacgactgctccatctccggcacatacgctcccaactcgtcctctacatatgaatacgtaaacagtcttttcaacatctcatatgttgatggctccggttcatcgggtgactacgctaccgacactttccacattggtggtgccgaccttcctgcccagcagttcggtatcggttatgtctcgagttctgaggaaggtattctcggaattggttatccctctaacgaagccatcctcacctaccagagagagtcatatgtcaacgtgcctcagcacatgatgcagtctggactcatcaacaccaacgcctacagcttgtggttgaacgaccttgacgcctccaagggatcgattctcttcggtggtgtcaacacggaaaagtacactggttctcttcagaccttgcccattctcgccgagcagggtgtttacgcagagttcatcatcgctttgactggtgttggctacaatggccaggagaactccatcgcctccaatgtcaacactgctgctctcctcgactctggctccagtttgatgtacttgcccaacgacatcactgaggagatctaccgtcttaccggtgccaagtataactccgagtacggcgctgcctttgtcgactgcaacatgcgttacaacgacaccaccattgacttcaccttctcttcgcccaccatccgtgtcagcatgtctgagcttgtccttgtcatgggttaccagggtcgcactcctctctgcatcatcggcattgcacctgctgacggcaccactcccgtcctcggtgacactttcctccgcagcgcctacgtcgtctacgacattaccaacaacgaaatctcgctcgctcagaccaacttcaacagcaccggcagcaacatcatggaaatcacaaacactagcattcccgatgccactggtgttcccgctgctgtcacctcagtcgcttcagaaactggcggtggtcgtctcggtggtttcccctctggcagcgtcaccagcagcgctctgggtgtcgccatgactcccggacctaagagtttcggtgctctcgctgcagtcggtgccgccgcgttctttgctttgtaa

SEQ ID NO: 1877 - DNA, 2778 bp, Aureobasidium pullulans
atggcgggattgcgattactcacgctgttggcgtccgtcgctcttttattgtgcttttttccttcttgttcggtgagtagcgcttcttacggcactgtgacttccgcttatgtcactttctaggttcatgctcaatcagacaccgagggtccactccacacaacaaatcatgtaaagcgttacggctcaggggctccttactggatgtcccaaattcccagacaaggcaaagtggtttacggcacaaactcttcatatcctgtatggagaaacgtcaaggactatggtgctaaaggtcagctcaaatcgatcgtatcacgactcgcggatctgatgtgacttaggtgatggcgtaaccgacgacactgatgctatcaataatgcgacatttgctgggggcagatgccaatatccttgcgagtcacagacaactgccccagctatcgtgtacttcccccccggtacatatgccatcagccgcccgctggtcatgctttactacacccaattcattggtgatgcaaacagcttgcctgtaattctaggtctacccaacttctacggcatcgcactacttgactccgacccatatctgccatatgggctcagttggtatgccaaccaggtaggttttgtcattgcgtctccaccccaatccattcactgacggagagttacagaacaacatgtggcgtcaggtccgtaatttcgtcttggacatccgacaaatccccaaaggcacggcgcactgtttgcattggcaagtggctcaggggacgtcattgcagaacattgtttttgaaatgaccgagggcggtgacaacaacaagcaaatggtcagttcgaccctactcattctgatccatgtcactgacctccggtagggtatcttcatggataacggatcggcactatacctggaagatctcatcttcaatggtggcggtgttggcttcttttccggaaatcagcaattcacttgtcgaaatctaaccttcaacaattgtcagaccgccatctaccaaaactggaactggttgttcgcctacaaagacatcgtcatcaataatgccaaaatcggtatagatatgacccaaggtggggatgtcatcactaccggctcgatcagcttgcaagacgcgaccatgaataatgtcgagattggtgttcttaccaccttctctggcaactcaacccctgcctcggctggaacgcttctcttagataacgtcaacttcgtcaatacacctgtcgctgttcagctttctcccagcaatgctacaattcttgaaggaaaccaaaagatcgcatcctgggctcagggcagagtttatactgcttacgagtcttcctacgaggagaacaacttgacctgctacgggcctgcagccaaattcgatcgagtacaacaacttgttgagccccctccgaaatcaccatctttgctgaccccagatggttcgttctacacgcgttcaagaccacagtacgaaggcgttcccgtcgaaaacttcatatccatcaaaacctatggttgtgctggcgatggtgtcaccgatgatactgcatgcgttcagagcttcttaaactcaattcgaacggaccagatcgcctatattgactacggcgcgtatgtgatcagagacactatcaactttcccattccgattaaggtccagggtgagttatggccttacttcatggtggatggcagcgcgccaaagttcagcgatcagaacaacccccaagttgcatttcgtgtgggacagcctggtcaagtcggtgacattgaacttgttgagattatgttccaaactttgggcgctgcaccaggtgcaattctgatggaatggaaccttgcgcaatcatctccaggatctgccggtaagtccttggattcgttccgctggttatgctctactgactatcgtgtgtgtagcaatgttcgatgttcactggcgtgttggtggcacaaatggcacgaaactgcaatcctacaattgtcgcaagacacccaacgtccccacctccccaaaagctgaatgttatggcgccttcctccttcttcatcttacaagatcctcgtctatgtacatggctaacaactggggctgggtcagcgatcacgaaatggatttggtaggactctggactcgagatccgataattgcacgagctgacagttgaaccaggccgatcatgaccaaatcaacctctataatggtcgtggagttttggtcgaaagccagggtcccgtgtggatgttgggcacttctttcgagcacagcatgttgtacaattaccagatcgcttcagcgaaggagatttacatcagtgccattcagtcagagactgcgtaggttcagctgtctttcagatcattgcacttgctaacaagccacaaggtacatgcaaaacaatcctaatgcgatctcgccataccctccgctgtcaaattggaacgacccaaccttctccgattgtttcactgtcaattgccctaagacctggggcctacgcatctttaatagcacatacatctttgcttacggtgctggaatgtactctttcttcaacaactacgactctggttgtttggctactacgaattgccagcagaagatggtcagcgttgaacaaagccaaggtatctacctatacgcagtcaacacggtgggctcatcgaacctggttacggtcgatcaggtagatctcgtgcctgccatttcgaatgcgaacggctttgcggacacagtggcgattttcgagtatccttga

SEQ ID NO: 1878 - DNA, 2212 bp, Aureobasidium pullulans
atgaaggtgtctgttctttcgactttactcttcgccgctggtgcgattgctggtcgcagtcctcaacatgttaacaagaagttgcctgagcgcatgcgtcgtgaacctgccggcgactttcctgctgtaggtctcgacaagagagctgcttccaagaagaagaagcacatcatcccccagaacagcaacacgacaagtacgtataaccaaacttggattcctggaagagatatggcggcacagatgttgcggcagggtcgagtctcttggagcgctgcacataggcataccgcttttggtgatcagggacatgtccaatgagagcttgtttagtgcattctctcggaggacgactctggtgatgttcaagtcgctatgcctccacgagggagatggctcgatcttgatgtgctctctgtgcacctatgcctgctacaagaagaaaaaacactaacaggccgtagagtatgctgttgatggcaccaagattcctgatgtcaatttcgatatcggtaagtcaaaccgctcgagatattacctacacactcctgatgaccttctaggcgagagctatgctggcctcatgcccatctcctcccaacagaacgctagtgagctatacttctggttctttccctcggcggacacccacgccagcgatgagattgtcatctggctcaatggtggacccggttgcagcagtcttgagggtctgctacaggagaatggcccattcctttggcagtacggaacttacgcgccggtgaaaaacaactacaactggaacaatcttacgaacgtggtatgtatgagatgttgtcagctctgatcacatactaactgtacttcttcctctaggtttgggtagaacaaccagccggcactggcttcagttcaaagggaagcacgccagccgccaccaacgaagaagaggtagcagagcaattcgctggcttctgggccaacttcatgaacacctttggtctccacaacaagaaggtctacatcactggcgaatcctacgctggcttctacgttccgtatgtcgagtccgaggcagatacatcgtggatcaccctgctgtgtcgttcgctctgttgggtgctttccataccgcattttgagccaaagctttttctgcgcggcatccgtggaaccaaacagacacacaaaggatgttcttcatgtatttgtcgactctgcttgcagaaagtcatgctaacatcaactctgctctaggtacatcgccgacaacttcatccagaagaacaactcgcgtctgtatgatgtccatggcattatgatatacgatccctcaatctcctatgatgtggttctgcaggacattccagccactccatttgttgactactggggccctctgttcaacctgaatcagactttcatggacgatatccacaaccgctccgatgcttgcggctacactgcgttcatggaggaggctcttaccttccctcccaagggtctgttgccctctcctcccaacgccgactacagtatgcctgggtgtgagctctggaacgatatctacaacgctgtcagtctcgtcaacccctgctttgatatctaccaggttgctaccacctgccctctgctctatgatgttctcggcttccccggtagtttcgactacctgcccgaaggcgtccagatttacttcaaccgtaccgatgtgcaaaaggcaatcaacgcgccaattcaagagtgggaagagtgtaccggcggaattctacgccgtgacacaagcgagtacaccagtctcagtgtcttgcccaaggtcatcgaacacaccaacaacgtcatcatcggtcagggaatgctcgactacatcatctcctacaacggaactctgatggccattaacaacatgacctggaacggtgctcaaggattcagcaagggcccttcagcctatgaggaattcttcgtcccttaccactccgagcttaacctgggagatcttgccggctcgggtgttcagggagcctggcacactgagcgtggtctgacttttgccactgtccagctttccggccacatgattcctcagtatgcgcctagcgctgcgtaccgcatggtcgagaagctgcttggaagaaccaagacccttggtgacaagagcaacttcagcactcagaagggaaactttggcaactccttcaacttcatcaccgccaatgtcaccaattag

SEQ ID NO: 1879 - DNA, 1011 bp, Aureobasidium pullulans
atgtctccccgatcagtaacactactttcagccctgttggctgcctcttcggtttcagctgctcctgctgcccttcagaagcgtgtggatatcgtgacagccgtcatagatggcaagaccgtgacttgggagaacaactggttcggtgctcctgccccaactgccgcccccaccgctatccccagttctgttgctgctgctgcttcatcatccgccgccaacaatggaggcgctgaatggataactgcaagttttaacggagccgtgttctcgtggcaggtgaatgctcccactgctgcaccagctgcatcttctgcggcacctgcacccgcacaacctacctctgccaccgctcctcagccttcccaagccggcaacaccgacccttcatgcaaggacgttcacatcttcctctccaagggctggaacgagccttaccctggccgtcagggcaagcttgctggtgccatttgctacggtctcgattcttgcgattacgaagacattctctactacaacgctgaaggcagcgactactgcactgccgtcagcgagggtgacaagaatggcattgatcagatgaccgcatacgccaacaagtgccctgcttccaagctcgtcttgactggttactctcagggtgccaacatcgctggtgatatcctcggtggtgccgatatctgcgccggccccaaccctggactcgacccctctaccagccccggtaacaagattggagctgctctcatcttcggtgacaacagacacgttgccgaccagtcttacaatgtcctcaacggctcttccgtcagctccaacgaccctcgctctcccgactctcttgcccgcatgaacaagttcgccggtgtcctgagatcctactgcgaccaggccgatcctgtctgcgcagctgcaggcccaggaccgttcactgttgacaaccacctcaactacttcgaccgctacactgacgatgccgccggttgggtcaagtatatgctcggctactaa

SEQ ID NO: 1880 - DNA, 2151 bp, Aureobasidium pullulans
atgcactcgttcacaaacatgccactcattccctttttgttcagtcttttttcgttcgtcaacttgagcatagctggctatgttctcaaggatgactacaactctgcatcatttttcaacatgtttgacttctttacagaagcagacccaacccatggtttcgtccagtatattgaccagggctcagcatggaacaccggcctcatcagcaactcgaacgggaaggtctacattggagtcgatcacaccaatgtccaacccaacggacgtcccagtatccgtttgactagcaaagcagcctacaactccggcagtcttgtcatccttgacctcgaccacatgcctggtaactcttgcggttcttggcctgcgtactggatggttggacctagctggcctaacggtggtgagatcgacatcatcgagggtgtgaacacgcaaaatcacaatgccatgacattgcacacggcagacggctgttccatctacgacaacggcaacttcactggatctctctactccgatgactgttacgtcaacgcagcggaccagaccaacaacctcggttgccaaatctccacgagtcaatacaacacctatggtgatgggttcaacaacgttggaggtggtgtatatgctatggagtggaccgacgaagcgatcagcatctggttcttccagcgtggtaccattccttccaacattcaaagtggcaacccaaccccggatgcttcttggggcagaccactctctcaattcacaggctgctgtgatatccccgaatttttctcggacaatcagattgtttttgatgtgaccttctgtggcgactgggccggcagcgtctggaacagcgactctacgtgttctgctctgagcggctcctgcactgactacgtcgccaacaaccctcaggcattctccaatgcttattggtccatcaactctctgcaagtcttcgagcagactgcaaaatcttctggaaaggttgcactgcccgcattctgtaataataataccccaacatcaactgagacgtctattagtagtgctagcacaatatcgacggagacggtgcctgctgagactacctcgaccgtgtcatctactgtaagcacgacggctacagtagagacatcgtcaacgcaaacctcttcgagcgaaaccacgtcatcgaccgccgaaccttcgtcgacttccgagagctcgtcaagtaccgaaagctcgtcgactgacaagacctcaacgaccgctgcaagctcatcaagctcatcgatggccgaatcctcgtcaaagacagagaactcttcgatgtcacagagctcatcaagtgatagtacttcgtctactgcagacacctcgttcaccgcgcagagctcatcgagcgacaagacctcgtcatccgctgctaagacgtcttcggctgcccaaacatcgtcccaagccgcatcgaccgctcaagcttcatcgacgcctcaacagtcgagtgtaaagatgtccagtgttgatacgtcccccacgcctgcatcgactgcagagacggcggccacaacaagctcgacacagtcactgcctcagatgacaaatgtagtgactacactagtattagcagtggctgctgatgcgacatcaacgcaatggactactgttgtcacgacaatccgcagagcggtgtcggtaaccatggctgcagccgattcaagtgctaccgtgcagccgacgcctgtcgagaacagccagacaacgcctgccgcaaacgttgaaacgacgcccactgcgcaaccgacggtggccgagacgactgttctcacgacctacgtgcaggctgtctctgccgacgccacaacgacgctatgggtgaccatcacgacgagccttgaacgggcaatcaccaacgcgcccgctcttgcagacacgactacgaccgaatggtcgactctcgaatacacggtcgctcctgatgtctacacgacacaatggacgaccatcacaagtaccgtcaactaccaaaaggcgagacgcaccgctctacccgaaagcttgatgctgggaggaagcgagtcggcggcgtcacaaacaacacgcatcgaagcacaacccagccctagcaggcgctggctcccaagatattggggccgagcacgcatttga

SEQ ID NO: 1881 - DNA, 854 bp, Aureobasidium pullulans
atgtactctactttggcaatcctctccggccttttgaccttcatcactttcaccaccactgtgactgcccacggcttcgttcaaggcatcgtcacaaatggaaaatggtaccctggcgctcaaccctggtggcgcgtcaaccctcagatcccccatgccaaatctgccggatggtcatctctcaaccaagatctcggcttcatctctccttctgaatacgggactgccgacattgcttgccacaagagtgctaagagcaccaacacccgtatccccgtaaaggctggcgacaaggtcaagcttctctggtccgagtggcctcaaagccacaaaggtcctgttatcagctatctggccaagtgccctggcgattgctcgattgtcaaccctaccactcttgactggttcaagattgaccaagcaggtctgatcaatggcaaccctgctcctgggtatgtttgctctcttcctattcaccattgtatctttatactaacaacaatcgtagcacatgggcctctgataccctcatcgcaaacaacaactcctggactgtcacaattccttcttccctgattgcaggctcttacgtcctccgccacgagatcattgccctacactcagccgaccaagccaacggtgctcagaactaccccaactgcatcaacttccagatcagtggaaagggcactgccaagcccgctggtgtcaaagcgaccaagttgtactcggctaccagcaagagcattgccatctccatttactggcctgtattgaagagctacaccattcctggacctgcactgtggaagggagctgtgaagcgttgggtcgagagaatcttcgaggcatag

SEQ ID NO: 1882 - DNA, 1082 bp, Aureobasidium pullulans
atggtctgggaatcaagcgtgacactcgtggcagcagcattggctctttccaatctagtgaatggcctaccgaacagtcatcccagtaaaagccactatcctggctgggcaggcattaagcatatctttgctttgtaagatcatcactgcaggcatctgatgctcgactaaccaagttcagtggtgattcctatactaccacaggcttcaacgtatctcttgcgcagccaagccctgcaaatccgttcggcaacccgacatatccgtgagcataactcgtagagaagaccttgtttatatactaatacggccacagaggatatacatcttccaacgggccaaactggattgactacttgacgacaacctacaacaagtcattcatcgagaccatcaacttggcatatggcggcgcaaccgtcgattccgccctcgtagcaccatacaaacccaccgtactatcagtcaaagagcaagtacaaaccgaatacctacccatctacgcctcgcagtcctcaatcttcccctggacatcagacgacaccctcttcacaatcttcatcggcataaacgacatcggcaacagctactcctctcaaaacgcaacactcacccctacaatcttttccgaactctccggcctggtcgaccaactctactccaccggcgcccgcaactttctcttcctaaatgtacctccagtcgaccagtctcccctcacccaagccgccggccctgcctctcaagccctcgaagcttctgcgatttccgactggaactctcgcgtcgtctctctgtctaaatccctaactcaccgtcactcggacgtcacttccttcgtcttcgacacgaacaaagtcttctcccgcgtcatcgagcacccttgcgcataccctcagacttgtgcgtatcagaacacgacccaatattgtgaagcttatcagaatggaacacccgaacctacgagtttcaacgctacgtgtggggtttcggtggacaagtatttgtggttgaatagtttgcatccgacgtttagaatgcatgaggctattgcttcgcagattgtcaagttgatcaagtag

SEQ ID NO: 1883 - DNA, 1477 bp, Aureobasidium pullulans
atgaggccccaatcagcccttctagccatcggctttgctgccatagtaagcgggcagactccaggctcagatggacagatcaccgtcgccactgcaacatgcactgctattggtacacagacatacgcagtgaccgatgcccaaggtatcctctatcggtaccaatgtggtgccggaacatttggagctcaatttagtgcggttccatcatcctccgttggtaactggactgcctgcttcgctttctgcgacaacgctcctggttgtagtgggtttacctatgtgagttcactttatctgcgtgcaaatacacaatggtgtgccgtctagcgatcatctgcatcaaaaccaaccgataggacacctgactctcttgttcggggaagttcatgctgacgtttccctccaggtcaacggagctccgaacggtaatgggcctggtggttgcaatttgaaatccggtactgctcaatcattgaacagcgatggtcttgtatcaactcgaattggtgcaatcatggcccggcatggtcctagtatgtatttaatccccggatcattctcgccatctgacttacgcctcctagagcccgcgccaaccaattcttgcccggcacaaaatctccagactgtcaccgacttcaatggtgtgaactatgtgattgcttgcgggtataatagcctattctacctagactatgctatctttctaacttcttcaatagaaacgatacgaatggagtcggagttactgcgctgcaagccaactacggcttcaacgaatgctttgacaagtgtgattcctacaccgcctctacttcgccttcagtctgcaacgcctttcagtgggttggaactggtgctaacggtgtaggaggtggtaattgctatctcaaatttgtgtcaactgcttcattcgtcacagcatacaacacgaacaacgttgggggaataagagtcgttgcggctacaccgactattgcctcttcggcctcctcatcgagttcctcttcttcaagctcggtgtcatcgtctcgatcatcttcaagcgctagctctgctgcgagctcttcgtcgtcatcggtttcatcttcttcatcatcgtcactctcttcttcatcttcgtcgagtgcatcgtctgtattggctgtgcccgcctcttctgctgccccgagtacacctacaccgacaccgacactactgggttgcccccaaggagatggttctaccttcacggattcttcaggtactcaatacctgcttcgttgtgacaaaacttttactggatataccgatcagcaatatgaagaaccggatctgtcgacttgccttacagtatgttcggcggatccccaatgtatggccgctatctacgaggacggggtgtgcaacctaaagtacgacctttcagacggccagctcatcgacagtgctggaacttctttagctcttgttgcaaaacgtccttatgcagtga

SEQ ID NO: 1884 - DNA, 705 bp, Aureobasidium pullulans
atgcttttctccatctctactttcgccgccgtctcggcctttgcatctgctgcactgggtgctgctctccccgtctcggccaaccccaacaccgtcgctaagcgtgccttgactggcgaggctactttctacggaggcaacacctctggcggacagtgctcgttcacagagtacactctgccctctggtgtctacggaactgctctctccgactctaactggagcaatgccgccaactgcggcgcctgtgtctccgtcaagggccccaatggcaagagcatcactgccatgatcaccgaccaatgcccaggttgtggcaccaaccacctcgatctttatgagaatgccttcacccagcttgctgccaagtccgctggcatcatcaatgtgtcttgggactacgtcgcttgtcccatcacctcccctctctcgatccacatgaagtccggtgtatcgcagtactggttctctgctcaagtggtcaatgccaagcgccgcaccaccaagcttgaggtcagcaccgactctggcaagacttggaaggctgctgccagaaccacctacaacttcttcgagatctcgtccggctccggtgccacctctgcctggatcagagtcaccagtgagactggctccactgttaccgtcaagaacgtctctcagactggtgatgtcagagccactgctactgccaactatgcttaa

SEQ ID NO: 1885 - DNA, 2180 bp, Aureobasidium pullulans
atggctccttcgatagcatctctttcggcaattgccctggctggacttcctcttgctttgggtcaatttgtcaaggcaccgacgaattggactcacgctactggttattcggacatccaagtccgctacaaggaggttcctactggcacttgcgagctcaacagctccgtaaagagttactcgggatatctcgatgtcgacactgacgaacattatttcttctggttcttcgaggctcgtaaccagagccccaaggacgctcctctcacagtctggatcaatggaggtccagggtcaagcagcatgattgggctgttccaagaacttggaccttgcagaattgatgaaaacggcacagtcgtcaacaacccttactcatggagtgaatcgagcaacatgatctttatcgatcagcctacacaagtagggttctcgtactccgttcccgtgcccggatacaccgacgcaaattcgggatcaattgtcactctacccaacgcaacttgtcccgagtacgcacaagggtgcggaacgtactcttatccaaatgagacattgactgccaactctactgccggcgtcgcgcctaacttctggaaggggctccagggtttcatgggtgctttcccccaatattcccgccacgaattcaattttgctacagaggtattttcagcaaacattatcatctttacaaccactgactagcatcagtcttatgggggtcattacggcccgttgatcaatcagtacatcgaaaaacaaaacgacctcatcgcgaaaaaaaagcttccgaaagctcaccacataaatctcaaaacactacttatcggcaacggctggtacgacccgctgatccagtaccaggcatactacaacttcactgtctaccctgggtacgtatactgcagttaccatgggccaacagccatcaggtggtcttcatactctagacagaagggcagaaaatgtccaccatcaaaaggcacaatgagtttcagatccgctgagttgtccactgagagcgactaacctacacgctttcactggatataactttgggtctgggaagtatcatgcctttcgatgatcatgcagccgcttctgcttggtggaaaagttctgctccaaaatgaagcatctgcggattcgcactgttgtcttgcgtggctgtgtggtggtatatcattccatcctagaaacatgctgactgtgccattcactacagaaacacatatgactacaagcccttcaacgacagcatctcggccatgatgtacaatgcgctttacggccctggtaactgtgtcgacatgaccaaggattgctacgccagcggtatcaacgaggtatgcagcttcgccgacaacttctgcgccaacaatgtcgaggaagttttggacatctacgctctacgtgacgaatacgatattcgtgaactgtcacccgacccgttcccatctactttctacgtcgactacctcaactctcctaccgttcaggaggctatcggtgcctatgtcaacttcagtgagagcaacagtgctgtctcatcggctttcggaagcactggtgacgatgaccgcgagagtggcactattgaggcactgaagtatctcgtgtctgatgatatcaccgttgtgctttacgctggtgatgccgactacaactgtaagctcagtccttcacctccttctttgcataagcataactaacgtcttctaggtaactggcttggtggagaagtcgtcgccggagaggtcaacgctcccggcttctcaagtgcaggctacacaaacgtcaccagctccgacaacatcgttcacgctcaagtcaagcagtctggcaagttctcattcgtccgcatcttcgaaagcggtcatgaagttcccttctaccagccgttgatgagtcttgagatgttcgatcgtgccatcaacggcaaggacattgccactggtagacgtactgtcaagggcggctacaagaccaccggtccggcaaagagcacctaccgcgagggcaactctactgttcagttcgaggtcgtcaacgcaactgccacatacaacacaacctcaaacgagcccgacccaatttcggccaagaagagcttcaaggctgctaacaagagacgcttgttcaagcctgccaagagaattgttgatctgacctcctaa

SEQ ID NO: 1886 - DNA, 1884 bp, Aureobasidium pullulans
atggtaaaagagtgtattcttggtcaactacttggcctggcttctgtggcagtcacccagcaagtatacctggaggccaacgggtccacacctcgaccatgcaccaagtgcattgaaggcgaaccgcagtacaccttcacaccttttcaatatagcatgacctcgacggtgcgatatgctacatctcgtccctcgccaacaactaccacaacctatgctccgccatcagagagcttgacttctctcatcggtactgtatcctataccacttggggcaaatggaatccaactgcaaacgcaactgcaacagacacggcagacccatatggaaacgccgcttggacggagttgtggagaatggccaatccgcccaacttcacccaagaagccgcaagcgctctttacagtactacagtcgagccgaccccagtgccgactgaggagctagtcctgcctccgagagactacttcggcccgaccgactgctacaactttcctcctggtttcgagtttggtgttgcaagttccgccagccaaattgaaggagctacggcggaggaaggaaaaggtccatccctaatggatatcttggtccaagatgaccgaccaaaggactatgtcaccaacgaacattactacacctacaagcaggacatcgagcgggttgctgccatgggtgtcaagtacttctctttcagcattgcctggaccaggatcttgccttttgcactgcccggcaccccggtcaaccaacaagcgattcagcactatgatgatgtgatcaactatatcatcgagaagggaatggctcccgaagtcacgcttttgcacttcgatacaccattgcagttttatggctcgattgagaacgtcactgccttactcgccgagacagaaattggttatgtcaatggtggataccagaatgagaccttcccagacgcctttgtcaactacgccaaacttgtcatgacacactacgctgatcgtgtgccggtctggtatactttcaacgagcctctgctttactctgcaaacggcaaatccatcgatcatgttatcaagtcgcacgctcgtgtttcccatttctaccaggaagagctgaagggtaccggcaagattgctcttaaattcaacaacaacttcggtgtgcctcgcgacccaaagagcgaagccgatgtatacgctgcagatcactttaactccttccagttgggaccattctgcaaccctatcttccttggacaagattaccccgaatcttacaagatgaccattaccgactacgttcctttgagtcaacaagacctcgaatacatcaacggaaccgcggacttcctgggcattgatccttacacagctacagtaattgcacctccagaaccaggttccattgatagtatcaaggcatgcgccagcaactcatcatcgggactacgaccatactgcgtcaatcagaccaccacggatatctttggctggaacatcggctatcgctcccaatcatacgtctacatcacccccacctacctgcgcctctacctgaactacctacacaacaccttccgcaccccagtcgtgctcaccgaattcggcttccccgtttttgctgaagcagataaggaaaacctctccgatcagttgttcgattctccccgcagtgtttattacttgagctttatgtctgaagtgctaaaggcgatctgggaagatggcgtgcaagtgctgggagcgttcgcttggagctttgctgacaattgggagttcggtgactacgatcagcactttggaatccagactgtcaatcgtacgacccaggagagaaactacaagaagagtttctttgatttggtggatttcatgaaggctagaggagtagagtag

SEQ ID NO: 1887 - DNA, 1928 bp, Aureobasidium pullulans
atgcgtgccgttgctgctttcgcggcatgcgttgcctttgccaatgcgcaaacatttgacatggacatgatcctggctgcagagcctgtgcctacgccctcgatccctgttgtctacattactggtgatgctccttctacaacagcatctgccacaacagtttcatacgtagagacgcaagcagctgcatctgtgtccctagaagttgctgcagctgcaagcagtactgctctcataaaacgtgccgcctctacttgtgtacctcaacccactggcatctctcacaattcgagtccggatactgcttctgccttcttggccgatgcatactactccagtgttgcctctgccgcaccgactcctgctggctatgtcaacactttcaccaacctccaggcttctaacaacgcttatgggtatgttatctgccatgctacagcataaaatctcgacctagtgctaatgagagagcagatacatgggttatcagctcctgagtacttacgacacccagctgtgttcgcagaaatgcgacaagaccaatggatgtctttccttcaacctctactttgagcgtgatccttctggtacgcatttgtctcttttcttccgtgttaggaacatgctaatgattcatagttgaccccaacgattcgagctgctccaacccagcatcagtaacccagatcaaatgcgtcatgtggggcggaccaaccctcaagtcaaatgctctcaatgccggacagtggcgcaacaagttccaggttgtgatcgctggatcaaatggctacgttaacaagacgatcgaccctgctcctggctacgaccagcctatcgatctcggagatgctactatcaatgctcctctggactgctctggccacgacactttcatgcagtccaagtttttcacctccggacctttcgatgctaacttgtgtgctgctgcttgttctgctcagaatgtctacaacctggcccaccctcctgctgagggtaagcccaagacttgccagttcttcaccacctacctcctctataaagacggtgtggctcaaggacaaacgtgttcgttgtatactatggcgtggaactcaacctataacaccaacaaaggttattactacggccaatcgcactacaccgtaggctatagtttcgctttttccaacacaactaattccggagccccctacgctgcttgtagctcttcctcgtcatccacagtcgtctccagcaccgccaaggcctcatcgaccgctgtgtctgcttcgtccactaccttgtccaccgctactgccactcccaccgctcttctccccgatacttcctgtaacaacgccggtctccagttcgcatactaccccggcctcgccagcacccagtgggatttcaactcccccaactacggtctggacgccgagaactataagaccgtaacacccaactacaccggcgtaaccaacttcatcggtggtttcgcatggaacacttaccaccaatcctcttccatctactccagcacccgccccttcgaccacgagaagatgatactcaaccaccgcggttactttttcgcccccacctccggcgactacaccttctccgtccccacttgcgatgatgccgccttcttctggctgggcgatatggcttactctggattcaacgaattcaactatctgcttttggacaaccaggccaatggaactcagagtgctactgtcacgctcacggctggaaaatactatcctatccgtttgatctatggaaatgtcggtggtggacctggaagtttgtatttccagatcacgcagggcaataaggttgctgctgattggtcttcaaccgtgagcccgtactttgtccaaaagtcttgtgatggtaccactgctcctgcttatgctgcttttggtcaggagacttaa

SEQ ID NO: 1888 - DNA, 1217 bp, Aureobasidium pullulans
atgtatgctctgatcaccaagatcggcgccctggctgtggcctctttggctacccaagcggttgccgttccttcaaacagcaagcccgatcctttctcgaatgcttcatggcctctgccccacaacatcagtggtgtttccaaccctggagccaacgaaagctatcagggatggggcggcgttcatctccatgatccatccatcgtcatgggccctgatggccacttctactcattctcaactcatggcttggtcgttattagcagggcttcccagccgaattcgctagatggctattgggagcccattggctcggtgcttgagggctctagcatcatcaacaacactggaaacactgatccatggtacagttcattaaacaattggaagtgatgtttaaaagctaatatggtcaacacagggcccctgatgtgcacaaggtcggcgatacctactactgctactacgctgtctcgcaattcggcagccagttctccagcattggccttgcgacctcaaagacactcagacctggcagctgggtcgaccacggtgccgtacttacctccaacactaccgccccctcgcctttgaacatcaccaacgccatcgatgcaaacctcttcatcgatcccaagaccaagatcccttacctcacatatggcagtttctggagtgatatttggcaattccaactggccaaggatcttctcagtgtagtgtggacccctgcaccagtgcaattgagtttggatcctgttagccctcaagcagaagagggagcgtacctgagccgtcacgacagctggtactacctctggtacagccacggttcatgctgcggctacaacgtctctgctcttcctgctcctggtcaagagtaagtttcctccccctttcgcatctctctacatcccaatttgactttatccagatattccatccgcgtcggccgctcccgctcagccaccggacccttcgtcgaccgcaacggtgttgacctcagaaacggcggcggctacatcatctacggcagccacgattacgtctacggccctggaggccaagccgtgcttacaaactaccacggtcgtgatgtgctttactaccactacgtcaacactatccagaaccctacctatgttgacgaactcaagttgctgggctggaactacatcaattacatccagggctggcctgttctgtcctacgactag

SEQ ID NO: 1889 - DNA, 2255 bp, Aureobasidium pullulans
atggctgcactctgggcattgcaggctctcctgctttcatgtctcttcctcaccaaccccgtccaggcccttctgaacgcaaccgaagatgccaaagcccttgttatcgctaacgaccgcctctatgcctccgtcaacaaatccacaggtataatggacatccttactctcgatggccaaaacctactcggcacgaaagagtataatgaagtcactcctggaggcaatgccgctggtcagaatggtattggtccttatctggattgctattgcgttcctgccggtgcgtatacgcctggcaaatatgcgacgttcaagttgtttgagggcaatgattcgactggtgtgccgtacggaggtgtggtcatgtcggaggtgtatcctttgactggacaagtattggagcagtattggtttctgagggagacggagacggggctacatacattttctcgtctggcttattataacgagacgaagccattcttgaggtatgtttgtcttttaaagatgtatgtggctgtagctgacccgtcccaaggaatctgcaggagtttagaacattgttcagacccactacgcctctgtggactcacatctctaccaatgagaagatcaatgctcctctaccctcctcggatacgttgaagaactcgaagacggtgcaagatgccacatggtacatcggcaattacaccagtgcaccgtatgtcgagcaattcgccgactacttcaccaagtacactttctcggacgaatggagagaccacaaagtccacggcatgtatggtgatggctctaagagcaaagatggctcgaccttcggcgcatggttggtgatgaacactgtcgacacctacttcggtggcccgactcactctgatctgaccgtagatggtatcgtgtacaactatatctgtaagcagaactcgatcacaacatctaattgacaaaacccaaggttgacctcttacagcatcgaaccatcacggagacaatgtccccaacattacgactggttttgatcgcaccttcggaccccaatacttccacttcaacaaaggctctaacacgaccaccttgggcgagctgcgagcagaagctgagcaatttgcttcaccaacctggaacaccgccttctacgactccattgcccatttcgtaccgaactacatcccttcgaccaagagatcaacctggaaaggtcgtatcgatctgccgaagggggctaagcgcccaattgcagtccttgctcagaatggcgtagacttccaagacaacgtcctggacaccaaagcataccagtactggggagacattgacaagaagggcaatatcgagatcccaatggtcaagcctggtacataccgcctaactatctacgcagacggtatcttcggccaatacatccaggacaatgtcgtggttgctgttggtagagtcacaacgaccaaggcgaagtggcgcgaggagtctgctggaaaagagctctggcgtatcggcactcctgaccgcagcagtggggaatatcgccatggagaccaacccgatccaagcaagcctctccatccaccagagtaccgtatttactggggcaactgggatttcccaactgactacccagagggtgtgacattcgaggttggcaagagcgacgaggcgacagacttcaattacggtatgttgagcctcccttggataaatgacctgacagctgactttgtggatagtgcattggagtgtctttggcggttatgcgaactcggtcaggccagagccatactatgagaatgtaaacaactggaccgtcttgttcgatgcgaagaagagtgagctcaaatcgaagaaagatgccactttgaccattcagctcgcaggcgcaaagacagctgccggcaacacggacaactggaatgccacgcaattgtggaacaatgttcccttgtcagtagtgatgaacggacatgaactggaaccttgggacatcccgtaagtcatcagcttgaagtatcaagctcttagagtaggcttgctgactctcgaacagatggaaccagagcagttcgtgtgccactagatctgcagttatctgctatgctctggcgcacaagtatgagttcgatgccaatctgttgaaggagggacagaacaagatgatcttgagtttgccgttcaatgcgaccgactacgagagtgcagtgctgcctagaagtacttacgtccagtatgacagcctgaggctggaggtcaagtag

SEQ ID NO: 1890 - DNA, 1282 bp, Aureobasidium pullulans
atgtctgttcgagctactagattgttcgctagtgttgtctctctgctcgctgcgtcgagtgcagcaactaacatcaccaactcttcctccccttggatcgactggcgtacgttcaaagccaacggtgtgaatcttggtggatggctggaacaagaacagtaagttgtttgaattctctttgctcttctccatcctgataacctcccagatccatggaccaagcctggtggttcaaacacagcaacgccagcgacgaatggaacttctgcaaaggcctctgtactcaatgtggtcctatcctagaagaaagatatgccactttcatcaccaaggcacatatcgacaagtttgcctctgtgggagtgaatttgctgcgtattcctaccacttatgcagcttggatcgatgtcccttggtcggagctgtattctggcaatcagcagaagtggttgagggagattgtcgagtatgctattgatgagtatggcatgcatgttattattggactgcactcactcgtatgtttacctatccgctgaccacatatctgtatgctgatatccgacagcctggcggtgtcaatgctctagatatcggcgaagctgtcggtcacgcctcttggttcaacaaccaaacaaacctcgccttatccctcgacgccgtccgcagcgtcctggacttcataatctcctcccccacgccccactccttcaccatcgcccccataaacgaagccatcgacaacccctccggcctaggtcaatccaccgccctcacgaacaatggctcggcatgggtgacccattacatccagcaagtaatccccctggtcgaatccaccaacccgcacatccccataatgctccaggacagctggaaaggcgtatccttctggtcccccttcttcccctcttccaaaaacctcgtcatcgacacccacatctactacaactggaaacaaacctacgcctccaatgtaacttctctggtctgcgcgcaagccgccaccacattcggtgatggcaagttcccggtgttcgtgggtgagtgggccatcgaatcgacatttggaaatgagttgcagaggaggaagggtatttttgaggtcatgaggtatgcgtggaggaacttcaatatttctggttcggctttttggtcgggtagatacgagggtaatgctacggtggatggagaggggttgcatagggattattggggttatgcgaggttgattgatgctggagttgtggaagaggtggacgaaagtgctgtcttttgttag

SEQ ID NO: 1891 - DNA, 1308 bp, Aureobasidium pullulans
atgtctttcaagatcgccgccgctgccgctttggctaccctcgcctccaccgtctctgctcacggtcacctccagagcattggtgcatctggcactacctatgctggattcaacaactctatcctctactcaaacaccaagcccgacctgattgcctggtccgacactgtcaaggacaatggctacgtcgctgactacaccagccctgacatgatctgccacgctggtgctggcaacgctaagctctctgcccctgtcaacggtggtgattctatctccttcaactgggacacctggcctacttctcacaagggacccgtcatcacttacctcgccaagtgcgatggtgactgcgctgacgccgacaaggcctcccttaagtggttcaagatcgatgccaccggtatcgtctctggagacagcaacactggtacttgggcctccgacaagctgatctctgacggcttcaagtgggatgttaagatccccgacaccattgcctcgggtaactacgtcgctcgtcacgagatcatcgctctccacagcgccaacaacgttggtggtgctcagaactaccctcagtgcatcaacatcgaggtcaagagctccggttctgacgagcccgagggtgttgtcggtaccgagctgtacactgcccaggacaagggtatctacgtcaacatctactaccctcccttcgagcagtacgacatgcccggccctgccctttacaccggtggttctggctctgcccccgcctcgtccgctgccgcttcatctgcccccgcctcaagcgccgccgcttcttccacctacgctgctcctgcctcgtcttctgctgaggccacttcgtacgccgcttcgtctgctgagcctactacttacgctgcttcttctgctcagcctacctcttacgctgcctcatccaccgtcgaggcttcgagctctttcaccacccaggccgccgtcgtttctagcgctgccaccggtggtgatgaggtcgttgttactgcctaccagaccgacattgtcaccgcttccactgctgtgaccgtcactgctggagcctcagccaccgctgctgtttctgacatcaagtctgctattcctgcctcgcttttgagctccactatctcggccggtatccccaccgccactgcctccagcggtgttgccaagcccaccaaggctctccccgagggcaccaccctcgaggacctcctctcttgggtcgagtacctcttcgctgagaacgcctccaagacctctagcaaggctcgccgccacgcccgcgctttccgccactag

SEQ ID NO: 1892 - DNA, 2901 bp, Aureobasidium pullulans
atgggtttgactcgattggccacattctttgcgctcgctgcagtaagcattgcagatacgtgcaaccccctgaacgcaagatgtcccccaaatgtaggtctttcgaccagtgcttatgaggtcgacttcacgaaacaatcctccataccttccgaatggaccatctccgactgggcaaccgtcaagctcggatctaaaggagccgaatttactgtgtcaatgcgtttcgagtctcctcagttatggaccaacttttacattcactatggaaaggtagaaatagttgctcaagttgctcctggcacaggcatagtttcatcagcagtcttgatgtctgatgatgccgatgagattgattgggagtggagcggcaacaacttccgcgacagtgcaggaaaggggcaaaacaactactatggaaaggtacttgagtaaatcgccgttcaagagtgtgaaaattgcatatctaaaacttgacatagggaatcgtcggcgactacgacagaggcagcttcttcagtgtcgcgtctccccagactcagttccacacatacactatcgattggacgtctacggctctgacctggtctgttgatggcacaattgtccgaaccctcctcgctgccaacactgacagtggctcccaccaatatcctcaaactcccgccaaatttcaactcggtatatgggctggaggagatccaggcaatgcatggggtaagtatcagtcatgaacaacagttttttacgatcaactaattcatttcaggaaccgtagattgggcaggtggatataccgacttcacgaaggcaccgttcacgatgtacgtcaaaagcgtcaaaatcaccaactacaatcctgcctacgcctacaactggacggatagctctggtagttcgaagagcatcaagatcgtgcagaaacctgtagtctcttcttcaagtataaccacgacgtccccaccgacttcttccagcacttcaatcgtgatttccagcactcagatcacatcgacgacttctatctctgtgccatccaaagcttccactacatgtgctggtgttcctccttccgcgcctactcagaatggtatcgtctcaggctgcacgcaatggtacactgcaaaatcaggagacacatgctccaagattgctgcgaagttcagtatccctatcgaagagtttatggactggaacccagcagttgacgctcctctatgctacaacatgtggctcaactacggatattgtgtctcgacggattgtgctcttgccaacacatcgtcaacagtggtttccaccagctcgaccagtacatccagctcaacatctgtgacaccaagcagtagttcaagctccaccattgttgtgtcatcaacaacgttgccaactactacaataagtccgacatcaaacactagcactcccaagtcgtcgagcatttctgccacttccaccactacaactccggcaagctcgcagacgacaagtggaccatcaacaacaagctcaagcactcaatcttctaccttgccatcgattcctgtggtttcactcagcgcaaccgttccttcgtcttctgccgtgccctcgtcgacaccatcgagcaccttgtgtcccgacacggatggtctaagtctcttgagccagaacaaaaatgcctacaccatcagatgctcttctgatactaacaaaggctcatacacgaacaccagagccgccgactcttacctagactgtatggatgcttgtgatgacgccgcaaattctggttgtaaagcctggacatatgttggtgggactaacggtaacgggggaggcgtgtgttggcttaaaaatacctctggcaacttcttgccagctggaaacaattacatttccggtgttttgtctacaaagggctcttccagcactagtacgactcggacggtgtcaagcacttcttcttcgagttctgcagcaccatctcaaactacatcgactagctctacaagcactacgatctctacagatctcccattagccagcccctcagctgaactttgcccagaggttagttctcagagctttgttgcgtctcaaggcggatctgtctactttatgcgttgttcgtctgatacaaacatcggatcgtactccaactcgagagcttcgacttcttacaaggattgcatggatggttgtgacaaggattcaaagtgtcaagctttcacctatgtcggaggtacgaatggtaaaggtaatggacaatgttggtacaaggacaccaaaggcagtgctgttcctgcaggagcgaactacgtggctggtttccttgccgcccgagctccctcttcaggctcatcggccagcagcatcgcaactggaaatttggcagtctcctcaaagtcaagcacaagttcttccaccacgagctctagtagctctagcacctcgaccgcttccacgtcttgggctacaaactctgcaggctccaactacactgtctaccgctcttcggacacaaactggggcgcctacaccaacgtccaagccaaagactcgttcctcgactgcacaatcgcctgcgacaacgacccgaactgcaaagcctacacctacgtgggaggcaaatccggttccagtccaggcgtctgctggctaaaaagtaaactcggagaaccagtcccagcaaacgacaacgtgatttctggctcaagagtcacgcaaagtgttaagatgcgaagggctgtgtctagttggtggaatagtgttacttcgaagcctacggcgactacgacaaaaagggttgcgactgtgaagcccaaggctccagcgaatcctccgtgggctcgttattatcctcatggtgggaggtggatgtggaatggacatggtgagtatgagtgggcttggaattaa

SEQ ID NO: 1893 - DNA, 1098 bp, Aureobasidium pullulans
atggtcaacttcctttccaccgccattcttggcgcttccctcgtcgctgccgctcctgctatgcagaagcgtggtagctgtactttcacctcctacgacgatgtcgccgatcagatcgccgactgttctactgttactctcagtgacatcactgtcccagctggtgagacgctcgacctctctgacgctgccgatggcgccactatcaccttcgccggtactaccaccttcgagtactccgaatggtccggccctctgatccgtgctggcggaaaaggtgtcaccatcacgggtgcctcaggccacaccatcgatggcaacggcgccaagtggtgggacggcgaaggaaccaacggcggcaagaccaagcccaagttcttctacgcccactctttgaccggcaactccgtcatcaagggcctgaacgtcaagaacacccccgtccaagccttctccgtccaagccaccgacctcacaatctccgacatcaccatcgacaacactgatggagatgccaccgactgcgacggcgaagcttgcggccacaacaccgacgcctttgacgtttccgaatccgaaaacgtcaccatcaagggctgcactgtcaagaaccaagacgactgcctcgccatcaactcaggcaccggcatcactttctccgacaacacatgctccggcggccacggcatttccatcggcagcgtcggcgggcgcgacgacaacgacgtcgccaatatcgtcatttccggcaacaccgtcacaaactccgcaaacggcctccgcatcaaaaccgtctacgacgccaccggttccgtcaaaaatgtcacttacaccaacaacaagatctccggcatctcggactacggcatcgttgtcgagcaggactacgagaacggatcgcccaccggcaaacccacttccggcgtcccgattaccgatatcactttcgatggcgttactggatctgtggactctgatgccgaggaggtttacatcctttgcgcttcttgcagtgattggacttggagcggtgttgacatcaccggtggtaagagcagcagtgattgtgagggtgttcctagcggtgcttcttgttaa

SEQ ID NO: 1894 - DNA, 2160 bp, Aureobasidium pullulans
atggtgtcctctctcctgcaggccatagcttttatgcttggtctgtcccaactcgcttctgctcagagctacaatgagccataccgccctcaattccacttcagtccgaagaaaggatggatgaacgatcctaatggtctgctctactacaatggagtttaccacatgtactaccagtacaaccctggcggtaacacttggggcaatatttcgtggggtcatgcgacgagccgagacctcacaaagtgggaggagcagcctgttgcacttctggccagaggttacggcaaaaatgttaccgagatgttcttctctggctcagcagtcgccgacacacagaataccagtggctttggcaagaagggtaaagtaccctttgtggccatgtacacctcagttgtaagtcgtgggcgtgtttgaagtcaggcagccaactaacactgctatctttagcatccatatgtcgagaagttacctagtggcaagaccgtaaggccaaatcagcaatcgcagtcaatcgcttacagtctggacgaaggcatgacttggacaacctatgatgccgtgaacccagtcatacttgagccacctgccgcatacgcagatcaattcattgacttccgcgacccatttgtcttctggcacgaggaaaccaagaaatgggtcgtcatactatccttggctcaattacacaaattgctaatctacacatcacctaacctgaaggactggaccttggccagcgagttcggcccagtgaacgctgcaggtggtctgtgggaatgcccaagtctcttccctcttccgctggatggcaagtcgagtaacacgaagtggattactcagattggtctcaatcctggaggtccgcctggtgtagtcggctctggaacacaatacgttgtgggcagtttcgacggcaaaacctttactgccgatgccgacagtgtatacccccctcctgcggccccgagcggtagcataatcttcgcggactttgagggtactagttttgccgacctgggctggactgctactggagatcttgttggttcgggtccgtctgctggcactgtgaatggtcagcaggacgtgactggttacgttggaagcagtcttgtcaacaccttcttgagcggcgacgccacggtcggcactctcacgtcgaagtcattcacgatttccaaacgatacatcaacttcttgattggaggtggcaacgcacttggtcaggaaggcatcaatctcgtcatcggtaacgagactgtccttcaggctactggtgccaatggtgagaagttggtctggcaaggctgggatgtcagcgcctacaaaggtcaaaatgctgtgctcgagatcgtcgacctcctgaccggtggctggggccacatcaacgtcgatcagatctcattctcagacacaattgctacaccacaaaaggccaactggatggactacggtccagacttctacgccgcagtgccatggaacggacttcctacaaacgagcgaacgaacgttggatggatgaacaactggcagtacgcccaagtcattcccacggagccatggcgtagcgccatgagtgtgccccgcggtcttgcgctccagactgtgaatggcaaagctcagatcgtgcagacagccaaagaaaaatggtccagccttgaaagtcgcggcggcagctactccaacaagtggagttcagtctccgaaggcacgcaaaagctgaagctcgacggaaagactttggacatcgtcttgactttcgatgaccgttctgcagctgctggcaaagcatctcggttcggaatcgttcttcgcgcctccaaggacttgtcgcagcagactcgcgtaggctatgactttacaatcaagcagctctttgttgaccgcacaaagtctggtaactcttctttcgacgccacatttgccagtgtatactacgctcctctgcaggctactcgtggaggcaagatcacaatgcgtatcttgctcgactggtcttcgatcgaggtcttcggtggcgtcggcgagtcaactttgacagctcagatcttcccggcggatagtggaacagatgttctgttgttttcggaggggggcaagacgaaggacgtgagtgtaacggcgaagggggtcggatctgcttggaagtaa

SEQ ID NO: 1895 - DNA, 830 bp, Aureobasidium pullulans
atgcatctaagctcgttcctcccttctttgttggctctcagtggtatggctgctgcattggctattcctgatcctttcctggagactagacaaagcagccctgccgctggtgttgtctacaccaagtgcaccaagcctggcctcttcgctcttgcctttgacgacggtccaggaccatacacccaagaactcatcaacactctcaatgcagcaggagcgaaagccaccttcttcttcactggtactttgtacggctgtatctatgacagagctgcagctgtcaaggccgcttacttgagcggacaccaagtcgcttctcacacctggactcatcctcagactctcgatagcatgagtgttgcccagctcaccactgagatgcagaagctggaaatagcactcgtcaacatcattggtgtcaagcccacctacatgcgtcccccctacctcaagactggtggcaacgttcccaccgccatgagaaaccttggctacagaatgatcaccgacagtgttgactctcaggactggaacggcctctcagtctcacagagcgagcagagattcaagagtgctggaccgaagactcctgacggctttggtcacatttcccttcttcacgagacctacgccaacactgtcagagatttggtcccaagattgatcacttgggccaagcagaacaacttgaagatggtcactgttggtaagtcatgttcggaattaacatctcaagtcaataaatactgacagcagatgcagctgagtgcctcggagatgcaaatggtgcctacgccaagggaactggtggtggtgctcagaagtgctaa

SEQ ID NO: 1896 - DNA, 1036 bp, Aureobasidium pullulans
atggctctatccaaagcatcactctttttagcatggacggctttcctaccatctttatacgcagctcctttattacaaaaacgatctgagtctggtcctcatatcacaaccgatttccctgatccgtccatcctcagagttggaagcacctggtacgcatttgctggacaatctctatacgactacaagagcacacacatccaatttgcaacctcaacagattttgagacgtggacgctacgaccggggaatgacatgttgccagatctgccaagttgggtagactcttccaagaatcatatttgggccccagacatcaatcatttggtacatacttttggccttcgtgtgttgttcatcatctaacaagaatcaggatgacggcagattcctcttgtatttcagcgcacctacgtatgacaccaatgctcctcattgtattggtcctgcattcagtgactctatcgacggcccatacacgccagataagaccagttttgcatgccctgctgatcaaggaggcgctatcgatgcatctggtttccgagatgcagatggaactcggtacgtcgtatacaagatcgatgccaactcgctcgggcacggcgggacttgcaacaacggagtcgagccgatcgtacccacacctatccttatccaacaagtcgagagcgatggagtgacaaaagttggcgacacatccgaactcatcacgaacgactcacctgaagacggaccacttgttgagggacccagtcttatccattctggcgacacatattacttgttctactcctccaactgcttcgccactacaaactacgatgtcgcgtacgccaccagctcatcgccgacctctggcttcacgaagcaaggaactctgtttgggactggctatggaggactcagaggtcccggtggagcagacgccgcgtttgacaacagccactttgcctttgccgcgcaaaagggcgatggaaggagaggcctatacacggcccaaatcgcactcagtggggacagcgtctccgcatag

SEQ ID NO: 1897 - DNA, 2397 bp, Aureobasidium pullulans
atgtggctctctggtatcgctctagcggccgttgctgcctctgccaatgctttggatcttacggtcgctgccaatggcggtaatgctacttcacccctacagtatggattgatgttcgaggtatgttgcttcgaatcaaacacctcccgagtctcaattgacctgtgaaggatattaacttctctggtgacggcggcatctatgctgagctcatccgcaacagagctttccagggaaacacagttcacccttccactctactcggttattccgctgtgggaggcacgaatctatctctcaagaatctgtctcagccactctccagtgctcttccgacctctatgaacgttgcagttgctaaggcttccagtggagacgttggattctcaaacacgtaggaccaccagagcttccatatcgtacaaggacttacatatagcagtggatactggggcattggagttgaagtccaagactacactggctctttctgggtcaaaggatcttacgatggtagcttcatagcttctctcaagtccgacatcaccaaagaaacactcgccagtgttgaagttccatccaaagcctccgccagcgagtggatccagcacaactttactcttacccctacctctgctgctcagaactccaacaactcgttcaccctcaccttcaagaagtccggtgtcactggtggttcgctggacttcaccttgatcagtcttttccctcccacctacaagaacagacccaatggtcttcgcaaagacattgcagaggcattaaaagagctcaatcctaagttccttaggttcccagggggaaatgtaagtttctgatgcgaccctccgctgatgaaaacatacactgatgtcttacagaatcttgaaggtgatgacccaccatacctctggtactggaacgagacaatcggacctcttaaggatagacctggccgacccggtacttggggctaccaaaacacagatggtttaggtcttattgaatacttgcattggtgtcaagatctggagttggagcccattcttgctgtttgggacggcttctacctgagtggacctgtgactcctcagtctgagctcggtgtctggattcagtttgctctcgatgaactcgagttcttgatgggctcgaccagtactaagtatggtgctctcagagcgtctttgggataccctgagcctttccaaattaattatgtcgaggtgaactcttctcatgctcttaaactcgaatatccccgggctaatacattggctagatcggcaacgaggacaatcttggtggcggcaatgccagttactctgcttaccgtcttcccatgttcaccgaagctatcaaggcagtctatcctgacatcaccatcatcggatcaacaccgaccgtcgaccccattcctgatcacatctctcttgactaccatgagtactcaagacctgataactttgtcagagagtttggtctcttcgatcattacaacagaagccaccccatcctgatcggtaagataagacatgagcttcgcagtgacacagctaactcagagcaggtgaatacgccgtcatcgagcctaacaacgccagcatggcttctgttgactggacatcgggcgcgaccagattggctttcccgtcctggactggcagtgttgctgaagcagtcttcctcattggtgccgaacggaactctgacttcatcatcggagcctcatacgtgagttcctgcgtggttaccagtgaaatccagaagctgacgatgtcgtaggctcctactctgcaaaatctgaacagcttccaatgggtgccagatatgatcagcttcacagcagacaccacaaaggatgtcttgtcaaccagctggcacatgctccagcttctcggcaatcacctgattacagagactctgcccaccacgggcggcaactttggacccgcttactatgttgctggttacaacaaccagactggatctcacatgctcaagacagccatttacaatgctacagcagacgtaccagtttcggtctcgttcaagggagtgtccgcaggtgccactgctacattgagtgtcctcacagcacctagcggagacagctacaacaacgttggtactcaggttgtgaagtccacaaacacgaccatcaaggcatcagctggtggtgtcttcaggttcagtctccccaaccttagtgtcagtgtactggaggttcagggcagaccaacctactgggcaggcagctggggtggacatcgtggagcctggggtcacggcgggttcggtggatggacccctagttggggcggttggggtagttggaagggcacaggtcacaacaagagagatatccccaagggttacaaggagattgtctactag

SEQ ID NO: 1898 - DNA, 1026 bp, Aureobasidium pullulans
atgatcggatctcgtatcacaccggtgctgcttagccttctaccgttcacccttgcggctcctatgcgaacaactggcaacactcatcctacacaagtcatctctgtcgactttgcggatcctgatcttttgcaagatggcaaccaatggtgggctttcgcgagcaacaatcacaagactatcgctgccgtgggtggtagtctcatcaacgttcagattgctcgctctccggactttaactcatggaccgtgaccggcagcgatgctttgccaacggtcggtgcttgggccgaccctaaggctggcaatcaaggtgcagccgtttgggcaccgagcgtcagcaagaacaagaaaggacagtatgttctaacttactccgctgctgtcaagggtagccctggcaagcactgcgtaggtgctgctgtagcttctcagcctcagggtccttacaacccacaagctgcacctcttgtatgccctctcgaccagggcggcgctattgattctggtgcattcaaggatgccgatggaacacaatacgttgtgtacaagatcgatggcaactctatgggccacggcggcgtttgcggcaacaccaatgctcccatggtcaacacgcctatcatgatccaacgtgtggcagatgatggtttcactcccgtcggcagcccagtcaagctcttggaccgcagtgaccttgacggccctctgatcgaagctccttcgcttacgcgtacctctaatggcaaatatgtgctctttttcagcagtaactgctttgcgacctccaactacgatgtcacctacgcattcgccgataacatcatgggcccgtatgtcaagcgtggccccatgatggtcactggcaccaacaacctctacgctcctggcggtcaagccgtagccgctgacggcaagcacatgatgttccatgctggcgatgttggctctgcaaacatgggctggagaggcgcatacactcaaatcatcaacattgacaccggaagtcaagttgtctcgtcgtag

SEQ ID NO: 1899 - DNA, 1854 bp, Aureobasidium pullulans
atgaagatcaccatcttctccgccggcctcattggtttggctgctgctctccctcaggcttccatccaggagtcttcgagctcggttgttcagacttctacgacttctgtcagctcgcccgaggatgtccctcatgcaaccagccttgctcaggccgccgcagtcaacgtcaccatttccgtcgaggtcccttctgagatcattgacactacttctcttgagtcgaacagtccggctcttctcaccaccaagcctgtggagagtaacgaattcctgtcccctgccgacttcctgactcaaggtttgtctttggacgacattcctgaggttcccgtcgatacctctgctctctccaagagagacttcttcggactctttggttcttccaacgccagaggtccgttcgtcaacttcctcaaggtcgctgcgcagatcttcgtcaaggttgagaagatcatcatctactggacttgccctcaatggacccgtccaactcccaacaccttccccggatggagaaactacaagtcgaacggtgttaacctcggtggctggctcgttcttgagaagaacattcagcctagcttcttcaacgacaacgcacctagcgccatcgacgaggacagcttctgtaagactttgggccaggtaaagtgcggtgctctgcttgagaaccgttacaacacctacatcaccaccaaggacatcgacaacttcgccgcctacggtgtcaacactctccgcattcccatcggttactgggcctatatgcccgccatcgcaggtgacaactactacactggtggccagaagttggccatgcaaaagattgcccagtacgccatcagcaagcacaacatgcacatcgtcgtcgacctgcacggtcttcctggcggtcagaacggtctcgacaaccagggcaagactggccagctcacttggtggaacaaccagacagccttcgatctttccatcgaaatggtccgcagagccaccgacgacatccttcgccagcccaacagcggcagttacactatctccctcatcaacgagcctctgcctgctctctactacttcggtcagacccaggacagcatcgcctacctgaacaagtactacaaggccgccctcgccgaggtccgcaagagatccaagactctgcctgttgctatctctgatggtttcattggccctcagacctgggacccttactggactaacgttgacccttacatcgttatcgacacccacatctacttcttcgtcggcggatcatactcttacgacgccgcttacggtgcctgctatctcgccaaatcctaccagaacgcttctaaccctacattcattggtgaatggtcaatccaggcgacagcaagtctcccgaggtgtataaatgatatggtatcatgctgtggttccagttggggaagcagattgccatcttggaagaacttttgaagttttcgaaattttgccggtcggtgtgagcatcccactcgccacccacaaagcactttaacgatcctccaagacggcaatctgtcctccccaacttgagccccatgactgagccatttcaggagtaccaaattcaagtttcaagaaatccgctaacttttctcccagaacttcaaccaccttggcgacaacacccgccgcgacttctaccgcagtcagcttcaggcatacacccagtacctctctggtggcatgttctggaacggcaagcacgatggtgatgccatcgtcggtgatgatggttcggcccagaagtactactggtcttgggagattctcgcctctgagggcattgtccctcgtcctggtgacaagctcgagtctctctgttag

SEQ ID NO: 1900 - DNA, 1220 bp, Aureobasidium pullulans
atgcgccaaaccatctcattactggcactctcagtggcagcttccactacagcatcagcaaaatccaccactcacaacgaaaccatttacaaatacacatacgacctcaacaccacataccaaggctggccaaacttcttctccggcttcgactttgaagatgatgcgaatccaccgggatcaggatatgctgcatatgtcaatcaaagctatgcactatcaaataacatgatcagcaatggaaccaacggagcaattcgcataggagtcgatcatacaaccatcatcagcagtaaaagcaaaagtggcagaaaagcagttagactgaatagtaaaatggtctacagctatggtttgttcatagcagatttcacacatatgcctggaggtatctgtggaacatggcctgccttgtaagtttccttctctactctcctctcaaacccaaaaacactatactgacaagcaccaaagctggatgtccggccccacttggcccataggcggcgaattagacatcctcgagggcgtcaatacaaatccacgcaacaagataaccggctacacaaatgccacaggctcctgcacaaactcccaagtcatcatctcctccaacctcacttccacagattgcacagatctagaagacactggatgtagtatgtcatcctcctctactgcctcgtatggcactggcttcaatacagactcaggcggcgtctacgctacagaatggacccagcagactggtatacgcgtctggttctttcctcgcagctccataccctctgacatcgtttccggaaagccagagcctagtacctggggtattcctgctgctgcaattccggcggaaagttgtgatatgagtacgcatttcttcaacatgcaattggtgttgaataccaacttctgcggtggttgggcgaataggacgtggaagactagtgggtgtaataggtatgcggatacttgtgaggagtttgtgaggagcaaccctgaggcttttgaggatgcttattgggaaggtatgttgtgctgtatctggaagttatggtggggatgacgatggctgactttgagttgcagtgaactatatcaagagctacactggcagaaatgttattagtgtggttgctgtcaacggtaccacttcttcggcgacgatgagtgttagacctccgatgctgttacgatggcttacaaggatgatgttgtga

SEQ ID NO: 1901 - DNA, 1248 bp, Aureobasidium pullulans
atgcacttcgccagaaactccgccctcgctgggttggttgtcatccccctggccgctgcccaaacctacaccacctgcaaccctatggagaagacttgccctaatgatgttggcctcgactcagcaagctttgcttgtgacttcaccaaaggcaagtcagctcttgccagctggagtgccgcctctggaaccaccctcacctacgatggcaccaagggtgctcaattcgtcatcaacggcaagaaccaggcacccaccatctcaagcgacttctacatcttcttcggcaaggtcgaggtcaccatgcaagcagctcctggtaccggtattgtgagcagtatggttctccaatccgaggacctggacgagattgactgggaatggctgggcggtgacactacccaggctcagaccaactacttcggaaagggcaacaccacctcgtacgatcgcggcacttaccagtctgtctcgtcaccacagactgtcatgcacacctatgcattcgactggaccaaggatcaggtgcagtggctcatcgacggtgtggttgtccgtactctcaagtacgccgatgctgttggcggcaagaacttccctcagactcccatgcgcctgaagttgggcaactggattgctggcgacccggacaccaacgccaagggcacgatcgaatgggctggtggtgagacggacttctccaaggtccccttcaccatgtacgtccagtcggtcagcgtcaccaactacaacccggccaaggagtacaactggtccgacaagaccggcagctacgagagcatcaagctgatcgatggtacctcgtctggttcttccagctcttcctcgtcgtcttcctcttcaaagtccggcagcagtggttcggcctccaagagtgctaccgccagtgtcaagtctactgccgtcatctcaaacagtgccaacaccgtcgctcctacctcgtccatcagcgttagaaaagctcaggcccagggcagcgccgctgttgtcaacagctccaactcttcatcaacctcgactgcctccactttgagctctgttatcagcagtgtcagcgctagcgccacctctgctgccgcatccaagagctcatcgcacagctcatcttcttcttcggccacttcaagccagcccgccgagcagactgccaacgcaggtgtttccaacactgttgctactggcctcgtctctatcattggagccgccatggcctacttcatcctctaa

SEQ ID NO: 1902 - DNA, 2530 bp, Aureobasidium pullulans
atggctgcattactttctctcactgcattggcgttgcttggaggcagtgcctctgcccaaactttccaaggcacagcccagggtggtttccctgactgtgtcaacggccctctatccaacaacacagtctgtgacaagtctgcaggtacggctcaattcgcgagttctctacctgaatagcatttgctaacaactcaaagaccccattgcaagagccagggctctggtctcagccttcacagtcgccgagaagctcaacctcacaggaaacaacagccctggagtacccagacttggtctgcctatctaccaatggtggaacgaggccttgcacggtgttgccgaatctcctggtgtgaccttcaacgcaactggagagttccgctatgcaacctccttccctcaacctatcaccatgggcgcggctttcgacgacgagctcatcactgctgttgctgagatcgtaagtactgaggcaagagcattcaacaaccacggtcgtgctggtctcgatttctggacgtgagtttaccactttcgatattttcactacttttctcttactaactcccttaatagtcccaacatcaacccttacagagatcctagatggggtagaggccaggagacgccgggcgaggacagtttccacttatcctcatatgttcacgccctcatcttgggtcttcaaggtggtgaggatcccgaaatcagaaaagtcaccgcgacctgcaagcatttcgctggttacgacatcgagtcatggaatggcaacctccgctaccagaacgatgttcagatcagccagcgtgatcttgtcgagtactacctgccttctttccgttcctgcgcaagagactccaatgtcggagctttcatgtgcacatacagcgctttgaacggcgttcctacctgcgccgatccttggcttttgaatgatgttcttcgcgagcactggggctggaccaacgaggagcagtgggtcaccagtgattgtgattctatccagaacatttacctgcctcacaacttcagcgacacccgccagggcgctgcagcggctgcactcaatgctggtactgaccttgactgtggtacttactaccagcatcaccttccccaggcttacagcgagggcctcatcaaccagactactgtcgatcagtccctgctccgtctgtacacttctctcgtccgcactggctactttgatggtcccgacgccatgtacagaaacctgactttctccgatgtcagcactcctcacgctcaacaagtcgctcttactgctgctgaagagggtattgttctgctcaagaatgacggtcttcttcctctcactgtcaccaacagcactaagatcgctgtcattggagactgggccaatgccactcaacaaatgatcggtaactacttcggtgttcctccttaccttcacagccccctgtacgctgctcagcagtctggtgctcaagtcttctatgctggaggacctggtggccaaggcgatcctactaccgaccactggctccccatgtggactgccgctgagaaggctgatatcatcatctacgctggcggattggatatcagtgtcgaagctgagggcatggatcgcgagaccatcaactggactggtgctcaactcgatgctatcggtgagctcgcaagctacggcaagcccaccatcgttgctcagatgggtgaccagctcgacaacactcctcttctccaaaactccaacatctctgctttgttgtggggtggttaccctggtcaagatggtggtgttgctctgttcaacattatcaccggaaagactgcacctgctggtcgtcttcccgttactcagtaccctgcccactatgttgccgacatccccatgaccgacatgactctccgtcccaacgagaccactggctctcccggcagaacctacaaatggtacaatggcactgcagtcttcgagttcggctacggcatgcactacaccaacttcaccgccgacgtcagccccatggccgcctctagctacgatatctccgctttgacctccaattgcaatgaaacttacaaggacaagtgcgctttcgaaagcgtttctgttaatgtgcacaacaccggcagtgtcagctctgattacgttaccctcggtttcctagccggccaattcggaccttcgccttatcccaagaagtcgcttgttagctaccaacgtctccactccatcgctggtggtgcttctgcaaccgccacgttgaacttgactttgggatcgcttgcccgtgtcgacgatgttggaaacactgttctttaccctggagattatgctttgatgatcgatactatgcctgagaagacgatggtcaactttactttgactggatcgcctgttactctggacttgtggcctcagcctccaagtggtggacctactattcctccttctgattacttctatggtggttatggaagtaggggcgagttccctattgccgctactactgaggttcttgagcctgaggagtag

SEQ ID NO: 1903 - DNA, 1025 bp, Aureobasidium pullulans
atgccagcactcaaaggtcaactagtcctcctagtacgctacaaacttaccttcaagcctcaacgcgcaactttctaatcatgatcatagaccggagcttccatgggcattggcgcagcgattgctcgttcactagctgcatcgggagcaaatctcgcactcttctcccgctcagaggataaattgcaagcattggctgaagagatcaagtcagctcatgaaggagtcaaggtcacttacagagcagttgatgtaggagaccatgaagctgttgataaagcagtgctttctgtggttaaagagatgggtgagattgatgtattgataaacaatgtaagttcttgcaccaccccacccatgtcaaagaacagacaagaaagatggatggatcgaaggtgctaatcaaaaaccaggccggactcgccctaggcgccccaaaagcattcccagatctcaaaatcaccgacatcatcaccatgaacaacacaaacatcaacggctacatgttcgtcacctacagcgtgctaaaccactccatgcgcaccccctcccgccacacaggcacaatcctcaacatcacttccaccaccgccctcgaagcccctccctttcccggcgaggctgtctatcatgccaacaaagcttgccaagagggcttcaccaacgccctcagaaacgagctctgtggtactgatatcagggtcttagcgctcaggcctggagtcgtggggacgcattttcatagacagagggttgggtttgatgatggtatgtatgatgattttatggatgggtataagcctttggttccggaggatgttgcggagtcggcggtttatatgctcaatgcgccgatgagtgtttcgataaaggcgctggatgttgtgccgtctggtaagttgcttgaactgctcgtagaagattagagggagaaagctaattcgtgtgtccttgcagctcaaagatctcttaccgtgtttgacagagagtggagtaagcgtaacgagaagaaggatgcaaactag

SEQ ID NO: 1904 - DNA, 1095 bp, Aureobasidium pullulans
atgaagtactctttcgtctccgctttggctcttgccgcctccgtcaacgcccactccatcatgcagcgtattatggtcgatggtgttgaccagggatccctcactggtatccgcgctcctcccaccaacaaccccgtccaggacgtcacctccaatgacctcgtctgcggtgccagcgcctctacctcctcaaaggtcatcaccatccccgctggcgcttccgtcgctggtgcatgggctcacggtctcggcggccctcagggtgctggtgactcggacaaccccatcgctgcttcccacaaaggccccacccaggtctacctcgccaaggttgacgatgccaccaccgcatccgccaccggtctcaagtggttcaagatcgccagcgacgccgtcacctccgccggcgtctggggcgtcgatgacatgattaagaacaccgactccgcaggcttcggctggcaaaaattcaccatgcccagctgtgtggctcctggacaatacctcatgcgtgtcgagcttctggctctgcactccgcttcttccgaaggtcaggcccagttctaccaatcttgcgctcagatcaaggttaccggttctggctcgtactcgcctgcttcgtccgctcagatcgctttccctggcggttactcggccactgatgctggtatccttgctaacatttatgacacttccatctacaccagctacaaggctcccggccctgctgtgatcagctgtggtgctggcagtgctcctgcttcctccgctgtcgcttcttccgtcgctgcttcttccaagcctgcttcctctgccgctcctgttgtttcatctacaaaggtcgctacttcggctgctcctgctcctactacttctgctatcaagacttctgtcgctcctgttaccactaccaaggctcccaccactttgtctaccattgtcaagactgctgagcctgttacctccgctgcttcctcctctggcagtgttgccaagtacggtcaatgtggtggtaagggcttcactggcgccactgcttgtgtttctggctccacttgcaaggttcagaatgactggtactctcagtgcatttaa

SEQ ID NO: 1905 - DNA, 884 bp, Aureobasidium pullulans
atgacaaagttattcggtctctcggtggtcttggctatttttgcggcatcttcctcggccacatctctcaatgagacggaattactggagtctcgggcagcagcgacgaagaagtcttgcatgattactctccccggagtcggcagattcaaccaatacgtcaaatacgactttgcgaagtggtcaaaatttcctttgggcttgtcaatcagcaattacggcatcacagcagaccctgaggacgaggaacatccttttgatcagttctacggacccaagaatgtcgtcctaaagagaggcaggcctttgcagttgagggtacccggaggccagactaagtcgcctatccaaggagccgagtttaccacggcttacgacgacatcctattcgcatctgtacgaacagtagcgaaagtcagcaatgtggcaggaacatgccatggtaattcatccactgcccaccaagtcttccgcaagaaactgatcacatcccaggcttcttcttctacaaatccgacacccaagaaaccgacatagaaatccgcacatccttccccaccaccatcttcctcacaaaccaaaaatcctcacccaaagccctaacctcaacctttgacaccaaatcaccccttgacatgacttccgacttccacgaatacagatttgactggttgaaaggcgtcaccaagttctatgttgatggcaaattcgtggggtcgttgaagaagaatgtgccgacgatgtctgggtcgatggtttggaataactgggcgaatggggggagttggagtggtgggccgccggagagggatagtgtgcttgagatcaggtcgattgagatgtattataataggactagtgttactggtgttaattgtaagtag

SEQ ID NO: 1906 - DNA, 1722 bp, Aureobasidium pullulans
atggtctcagcgctgctcgcttctttcttcttcggcttcaatgcctttgtcgctgcgtcatgcctcgcttcaaacacaacatacaccaaccctatactccctggcttccatcctgatccaagttgcatctttgtcaaggagtgggacaacacgttcttctgtgcttcttccagcttcgaggcctttcctggcataccaattcatgcctcgaaggacctgcagaattggaaactcatcggcaatgtcttcaacagacctgaacaattgccggatcttgccttcacgaatagatccaccagtggcatatgggcacctgcaattcgttaccacgatgatacattctggctagtgaccacgctcgtcttcgacaacaagactcaacacgattcttcaaggtgggacaatatcatcttcaagacgcaaaacccatacaaccagtcttcttggtcaattccggtacatttcccatttgagggctacgatacctctccattctgggatgatgatggcaagacatacatgactggctcacatgcctatcgtgttagcttcggcatctggcaaaagaccatcgacctcgaaacaggaaaacttggcccggaaccttggattgatctttggaatggcacaggaggtaccgcacccgagggcccacacatctacaagaaagacggatggtattatctcatgatcgccgagggaggcaccggacttacgcatgaggaaacaatggctcgttcgaggaacattaatggcccttatacgccttactcaaacaaccccgtcttgacaaatgcgaacacgactcagtacttccagacagtcggtcatgcagacttgttccaagatgcagatgaaaactggtggggagtcgctctctccactcgttcaggaccaaattacatcacctatcctatgggcagagagacagtcctcacaccagtctcatggccagaagacgactatccacacttcgaccccgttcgcggcactcaaagtggtcctttgccaccagtaaataaaaacatctctggccaaggtcaattcgtcgacgatgacgaccacatcaccttcgcaccggggacatcgcttccactccactttgttcattggcgctttcctgaaccttcagcttatgtcatttctgcgccaggtcatctcaataccctccagctttcaccctctctcctcaatctcacaggccacgatggtatctacacgagcggcgaaccgcagactctgctcgctagacgtcaaacagataccctcttcaccttttccgtagacctagagtttacgcccaccaccatgaacgaagaagcaggcgtcaccgtcttcctaactcaagaccaccacatggagctcggtcttgtttctctctccaacaacggcacatcaacaccaaccctccgtttccgcgctaagagcaatattccagtcccacaggacgttctctttccagtaccagcgaattggaccagcgatttgcacatggagatcaaagcgttcaatctgacacattatgctttttctgctggacctgctgggaagatgagtttgatgcagacgattgcctacgcgcctgctagtctggttagctatggattcaccggcacattagtaggggtatataacactttaaacggcggtgggcagggaaatggaaccaaagcttatgtcagcaattggaattaccaggggcagggtcaattcctggtttga

SEQ ID NO: 1907 - DNA, 1608 bp, Aureobasidium pullulans
atggtcaagtcatcatatgttgctctgagcgcagcgcttgctgttgctgcgattgctactgacgtctctgtccccaatcatcttcctacccgacagctcctgcaagatgcctatgcctactctctagaaccagtttggacccaggattacatttcatccaacttgacacgcaacctcatgaacgtcattgccgacatcactggaaagccaccgacattccgtgtaggaggcaacactggcgaccaaacgtactaccaccctgagctgaacgtctctgccgtggcgctgccaaacacgaccgtcacaaacacgttcaacatcagcaatgcctggtttgagcaatggggcagctacttcccgcagggaacagacttcctctacacgttgaacctcaaggacaactccagtgcttgggcgaatgctgtccaggaagctgccgccgcatacagtgtgctcggtgacaagctcaagctgtttgaactcggcaacgagattgaccacttcatcaacaagggctggcgaccttcaacctgggatgttgccatgtacattcaacagtggcgcaacatctctgatcagattgtccactcttcctggtacgaagccgcagaccaaccacccaaattccaagccgccgtcttcgccgaccctccatgggtacccgaccaacaagacgagattgacgacttcgacatcatcaacctcacgcgtgctggcttgactgagcatgacaagattggatcatatgctgtacatctataccctcagtccacctgcgacacgacacgctggtatcgcttgagtcttgatctgttgtcaaaccacagtgtcctctggcacaacgtctctcagtacgttccgcaagtcgccgcagccgacaaagcaggtattccactcgtctttggtgagaccaactcagcttcatgctctggccgcagtggcatcagcgataccttcggcgctgctctctggaatgtcgactacgtcttgctggctgccagcattggcatgcccaaggtctacttccacctcggtgccaatgccgagtactctagctttgtccctctgccctaccaacacaagaacgaaagtctctcagcaggaatcagaagtctcttttacggccactacttcacagcccacgtccttgcttccaacactcaacagcgcatcgccccgatcccttcagcgaacacctccgacttcagtgggtatgccatctactcatccggtcatcaccatcgtcacagcgagaatctcaacaaactcgtctttatcgatctacaagtctggaacggcacacagggtctttccaacccatccaccctcagcaccactgactcgaccttccattccgcgggccaacgtcccgtccgcgaagtttccatcagcacgtcctggaaacaaggcacttgtctcgccatcacacgtctgcaagctccaggcacgaatgcaaagagtgaaatcagtgtttctggtgtcagcttcgaatcacagacgggaaagcaggtcggcgagatacaaaaagagcaagttgtggtcggcaaaaatggacaagtttgctttgtaatgcaggctgctgaggctgtgttgatagaaaggaaatag

SEQ ID NO: 1908 - DNA, 1484 bp, Aureobasidium pullulans
atgctacgcaccctctgggcaagtaccttggtcactggaagtgcacttgccctcaatgatagagtaggcaaactcccggctctaggctacgataccttcaacgccttcggatgcggctacaacgcttctgacgtggccgctcaggctgagatcatgaagaagaccggcctcatcgacgctggctacaatttcatcatcttggatgattgctacgcactcaaagaaagaaacgcgactgggtacatggtggcagaccccgaaaagtttccacttggcatgccagccttctcatcgcagatgaacaaattaggcatgaagctcgctgcctacggtgacagtgggtatgaaacttgcgctgggtaccctggatcatatggtcatgagctacaagatctgcacacctggcactcttggggcatgtcgtatcttaaatacgacaattgctgtaggtcaaagcaaattgcatgagaagagtagtggtgaaaaagtgaaattgctgaatccaccaccagatatccccgccgataatgtcatccagcaaaatgtatttggcaaatacaaacgaatgtccaatgccattgccgaatttgccaaagagacacatgtgaccttccagtactcgctttgcgaatggggatgggaacaaccgtggatttggggccgccggatcgctcaatcctggcgcaacgatggcgatatcaagccctactggagttctctcgcctcgatcattaatcaagcttcctttcaatattgggccagcgacttctatggtcacaacgatatggatatcctcgaagtcggcaacaccggtcttggaacaccacccggaaacttgacttacgaagaagcaaagagccatttcacggcttgggccttgcttaaatcaccattgatcattggaactgacctcaccagagcaacaaatcagacgctcaacattctaggcaaccgcgacctgattaagatcaaccaagatcccaacgtgggtcagagtataagtccgttccgctggggcgtgaaccctgatttcgtttcaaatgccacgaatcctgccgaatactggtctggaaactccagctatggcgtcgtgttcatgatcctcaacaaccaggatactccacaagaaatgtttttcaatctgacagagagttgggtcatccgtgcaggacgacagtactctgtctatgacatgtggtcgcacaattatactggcatagctgtcaggtaagtaatgtcatctctttataagcttgaggcacgaaagctaataatgaggttcaggaacataacacttcagcttcctgcacatggtgtatcggcacttctgcttaacgatgctggtcccgaacctacgtatttgaataatacatgtgcaatgtactatcagtgctcggtaagaatcatttgttagcattaaggataaagataagaggctaaccgattctacaaagtatccaaatggtacatatatctcgaattaa

SEQ ID NO: 1909 - DNA, 1392 bp, Aureobasidium pullulans
atgttgtcctctgccagggacatgctcccctctctcgctgtctggggtctgctgttgccatccaccttggccgcaatccttccccagtatgaccccttctatactgctcctgctggctacgagagcaaggcccctggaacgattcttcgctcccgcagagtcgcgacagcatatcttggtctgatccctgatgcagtacaagcatggcagctgctgtatcgcaccacagccatcaacggtaccgcgatctcttcggcaaccaccgtcttcaagcctctgaatcccaagaccgacagctttgtcagcttccacactgcctatgacggttctgcagcaaccggtgcttgtgaccccagctacaactaccagctgtttgctccccaaattgatctcatctcctcggtggagtttttcttgcttcaggcttaccttctggaaggatacattgtgcaatctccggactacgagggtcctgatgctgcgttcggtgctggccgtctcgctggtatgggcgttcttgatagcatgcgtgctattgccaacttcaagaccactcttggcctcacaacttcgactcccaagattgtcggatatggatactctggtggtgcaattgcgactggctgggcagcttctcttctctccagctacgctcctgaactcaacgtcctaggctgggctcaaggtggcacacctgccaaccttaccggaacagctgtcttcatcgacggcactctctttgctggattcctgcctcaagctcttgtgggtcttggagcagactccgcctacggcgctcaactcgatccagtcatcaaccgcatcgccaccgccaaaggcaaaaacaccctcaaagtcgccgagcagatctgcggtgtcgagaatctcttcacctttgctttcggccagatccaaagcaccgatttccagacccttggtaacaaagtcttcttcgaaccgactatcgctagcattttggagaagactgtcatgggtgtcaaccctgatgagacgccgaaagctccggtctatctcttccacgcgaccaatgatgagatcattccttacgccaatgcttcaacattgtactcggattggtgtgctgatggcgcttccgtccacttcaccactgtagccaacggcggccacgcaacgaccgagatcatcgggttcgtcggcgcattcaatttcgtcaaggctgctttcgccggaacagtggcaaagggatgctcgactgagacgatcctggatgacagtctggatttgcttgcgttgggtgtctcgttggagccggtgcttgtgcagctgttgaatgcgcttgctgtggctggaagaaaggacatcaatatcaagaatgacattacgacgctcaatgagactgttggagcttga

SEQ ID NO: 1910 - DNA, 2233 bp, Aureobasidium pullulans
atgacatacaacaatgcccatttcctcagtctggtcgccgctacatcccttctcgccgtcaattgtcttgcgcaagctcctccgacaccgcaaggattgacctacgtcaactccaccgtctttccaggcgcatccatctctttcaaggagaccacgatatgcgagaccaacgaaggcgtgaggggatggagcggatacgtcaaccttccacctgtgccttgggaaggccagaactacgaggtacatacttggttttggttcttcgaggctcgaaatgatccggcaaatgcccctctttcactttggctccaaggcggtcctggcgcccccacttcagtctctgctgttaacgagaatggtccctgtgtgctgctgaacaactcgagagaatcggcgaacaatccttggtcttggaattacagagtcaatatgctatacatcgaccagcctgtccagactggtttttcatacgacactttgatccagggtgttgtgaatgaggtactgtctcctttcgccgtcttccctggtgcagatcaaacgacgaacgagactgcccttgctggtgtcttctcctcgcagaaccccaggttggcgccaaatagctctgacgccgtcgctccagcaatgtggagattcatgcagacctggctacaggagtaagtacattctgtctttgacatgatgatcttcactgaccaagatggcagcttccctggataccgaggcgacaaagacaagttcagcatctggggagagtcttacggaggtcactgggttcctacttttgccgattacttctactcgcagaacgcacgcatcgaagctggagaattgaacggaacttctctcgccatcgactcgattggtctgatcaatgcttgcatcgacgccgagactcagatgcccatgtatcccgtcatggctgcgaacaatacctacggtatcaagatattcaacgatacggcctatgctgcgtccatggcagctttgccacaatgtctgagctacaccaggcagtgcagagagctggctgcctcgctggattcttcaaaaagctcaggaagtgatacggaggtcaacagcgcttgtggtaaagcatacggctactgcttcaactatgtcgcgagggagactgggcttggaggtcttcaagattatgatgtaagtgtcatgaaaccttaggaggtgcaatcaggatgccttattgacacagctttgcataaccaggctttccacttcgacatcgcttcgccgctcattcattcgtttcccccacgatgggcagccggatacctcaacaacgcgactgtgcaggaagatctcggtgtgcctctcaactttactggcttctctgccaccatcgctggcgagttcgaagctgcaggcgactttttgaaaggcgacaatcttgcgattcttggacaattgctcgatcgcggtgttaaggttgctctcatgtacggcgatcgcgactaccagtgcaattgtgagtgcttcccttctgctgtcttcaaccccgccgaactgacgtgtcatgcagggttcggaggtgaagccatcagcctagccatcaactccagcacttctgccgactttgaaaaggcaggctacacgaattttgcgaccaacgcctcgtacaatggaggtctgactcgacaatacggcaacctctctttcactcgcgtcttccaagctgggcatgaaggtaggatgactctttgttctttttgcgacgctttggaattgttctgacatcgtcactacagtctcgtactatcagcccgaaacctcgtacgagatcttcaatcgcgtgatcttcgatcgcgacataccgactggccaaacgtccaccgctgcctccgactcctcgtcgccgtacgcaaccacaggcaacagctcagccctcgtctccatcggcgcacctatcaagttcgaatctgatgtcgtctcttgctatctctgggacatcatggagacctgtacactcacgcagacggcactgttcaagaatggaagtgctatcacagaggatttcgtgcttgttgggtacgagcgcgctgatggatcaagagtcttcttcaacgagagtacagttggtggcaatggtacaaacaatggaaatgggtcgtcgccggtgccgtacaggccaagcaatggtgcgtcgcatggtcctgcgagagatctgtggctggttgcactcgctgtcgctgccgtcactgcgcttctgtag

SEQ ID NO: 1911 - DNA, 1725 bp, Aureobasidium pullulans
atgattgttcttatcctctttctctttggtgcgggtctcgccaatgcacaagcgataccgaccgcaagtcaatgtccctccgcgaatgggcagaccatcaccgacagcaacggcagcacctatcgcgttacctgctccgctgacaacaacgtcggttcatatgccaacaccaaagcagcaaactcctatctcgactgcatgactgcttgcgatgcggccgcatctgcgggctgtcaaggctttacctatgttggtggtgccaatggcgtgagttcgggaacgtgttggctcaaaaagtccataggcacataccctgctgctccaagctcctacgtctcagctgtcagaattggaaatgttggcgcatcatctcaaagcagtgttgcgtctactcttgcgacagtgattacctccgcatcgtctgcatcatctgcattatctgcatcgtccactttgtctactgcggtcgccgcttccaccagcttatgtccatcttccaacttcacgtctttcgtagacactgcaaggaacaattggcagattttgtgtggttttgacacaagcccgggatcattcggctcaacatccgcaagcaccttccccgcttgtattgaagcctgcagaacaactgcgaattgtgcggctgttacatacatcgggactagttgctacttcaagaccgctttcgtcagcctaatcaccaagtcttcagcgagcagtgcattcatcatcaacctccagaactacccggtcccagtgacgggcaacagcagggcaagttcaggctgtggtgcccccctgctccctggagttcagctcggaggcacttctaccactttccagatcacctcgaagggtcaagtcaggtcgttcaatgttcacgtaccaacgtcatacaagaacaacatggctgtgcccttgatcgtcgcgtatcacggtcggtcaaacacacagctctctgtagaaagcgattcaaggttgtcgagcgaaacatggaatccattcgccatcgctgtctatcctcttggcggtgatgtgagtatcaccgagggcactgtagagatgacacactagagctgactttttgaacagcaacaatggcagggtgatccggcgactgttggtacaaacccttattacgacgatttggcgttcaccagcgacttgctcgactacatctccaactattactgtatcgacacgagtcgcatgcttgcaaccggtttttcaaacggcggagggtttgttggaactcttgcttgcgacccgacactctcccaacgtttcagcactttctcggtgaactccggcgcagagtataccaacaccaccgggagctgcaacccaacctccgttctcacgaatacgattgtccagccaatatgttcgccaggtagatcaaacctcccgatgatcgaatttcacggcgacacagacggcactattccctacccaggcggtgctcgacggggatattgtctgccaacagtaccgcattgggtcactgattgggcaataagagatggtctttcgacttccaatatcaccacatcattggcgagtggcaaggtgaccaagtacgagttcggtgcttctcaaggtgtgcagggtttggtcacccactacaaggttgctggctggggacattcttgggcaagcatcaacgctggcgctccaattgatgctacgcccctgatcatggacttcttctacagccattcgtag

SEQ ID NO: 1912 - DNA, 6091 bp, Aureobasidium pullulans
atgagcttctacttcttgctcagggtcttcgccctttgcgttcttgcacttctagtcgctgcagatagcccgaaccattcagaaatacacggccgctcgacaatcaagacagcaaacaagctctcctgtatcaaatcagacgtttcgctggtgaagaaggaagtctctcatcctcttgagttctgcaaattctatctgtcagagtacgttcagactgacggttacatatgacctactgctaactggcgccttagcaagcgaactcgctctccattacctagtctaggtgtcacagcactccaaaatgcttgcaaatgcattcaagcatcgccaccgccggagcccaccatcatccatggagcccttccttccaacaagcaatgcagccaatggaccaaattactgaatggtgaatacaagcacgttgctgagttttgcaacttctacctcggctagtgagaaacatctctatcatacatgcgagataaagctaaacatcactgctagcccgaggaagcgatcacctgtaccaggactctcagtgtctaacttacttacaggctgcaaatgcgctataggatccacaactgttgcttccgtagcaaaggctcagcagacttcaacagcaagaaccctcgcgtcgaccaaatattcgagcattgcaaagcaagccacatcaagcgcttctagccgaatcgcgaaagcgtctacaggtacagtcgcatctactccgcaagccactttgtcatccaaagctgcgacggtgctgggctttgcgtccagaatctcaccattaccttccgcaacgaagtcgtcaacttcggtggtcctttcttcgacaacctctgaaacagattcggcgacacgcggagcccccaacgtgtccgcatatatcgcaacacctgcttcttcctcgcaggtcactccattgcagacctctggcttgtctgcttccacagtattcagatcgtctgaaagcaatactccgacaacgagaaaaacttacacctcgataacggcgaccagaggcatgccaactaccagcagcgctcttagtgcaatcttaagcgcgacccaagataaaacagtgttcacagcagccgaaacgtcttttcacagcgatgttctggaggtcggcactctagcatcttcaacggactcggcctcttcgtcagttggaatgacattccaatcatccagcacagcgtacaaatccatcacggtcatcaggggtcaaccactcagcacaaagatcaaatcaactgtttcctcgacatccatcgcccctacacaaagttccatcgacacgagcagtagcagtcagactcaacagaaaacttcaatgaggtgggcttcgatgagaggcaagcttcctattactactctcacgacgcagacccgagatctggcttcaatagtggcattcatatcgtctccagatgcatctgcaagcggaggcaccgcaagcactttcgcgcccagtgattctgttggctcggtatcagtctcccgcagcatcgttcccccaactacgtctagtgctgcaacagaatcctccagagcgtcaacttggaccacgcaggtcaataacagctcggtggcttctgagaattcagcatcgattgtccaaggccgaacttcgtccgctcggaacgtgccttccaccagcacaacttcgcccgcttctggtctttcgggcagtccgtctcgaggaaccgaatcaacctctactactatgcaatacaaagaaattacatctggaaaacaaccagacacttcggctcttctagccacaatcagcaagtctgatacttcagtcttgccgacgtccaacattcttaccacggcatctcctttgacttcaaattcacgtatgcaaaaactttctgaactctcaacaacagcagctagaagtctcgagacctcatctacctatactgaattggaatacccgacatactctagtgatggcggttatccggaatggacgccgaccaaaacctccgaaactacggctgatcagcaatcatctttgactttcatgtcctctgacaaagcccctggtgtttggatcagctcagacactccttcaagcactcccgatctttcacaaacctcaaaattggcgtccatatcttacaaaaaccccatatatcatgagacatctgcgactcttgcaaccacagatctatccgagtccattgtggccctccttccgaccgataaaccttcgatttcctttgatacagtatcttctgacagtatcatgccatcgagctcaagggacccaagtaacgactatgagccctctcgaacggcagtactcagcagcgatggcgcgcaaagctccgagcaaacgatcgcaactaggatcactcctcattcaacagtggacacgatcagtggtatctcagtcactgagatcaaagctatgtcagccaattccacgcaaggagagctcgtgttgtccgcaaagaccgcaagcgcctcgactacgataaccacacagcaatcttcagcagtcactggtatcggaagcgaagcattacacagcacttcggaagaatggcgttcctcgactatctcaagcgtttctgcagcttcgatgagcagtgaaagctcggggctccttagctcagcaacatggaagctgaccacttcattcttgctgaccgcagtttcttctgagaccgcttttgagacgtcttcttcgaaatttgcaaccattgaaagctcgagcacaactgaatctctaccagatcctttaccatcttccgggataaacagtctcgaccacgattttactccaatcagtgattcgcaacatgcctccactactgagccgcccaccgaatcaactgtgaacagttctgcgactcttacaaactcggcgcaaacatcaatcgatcctgaaacaactccctttacgagtcttgcccagcacaatcatggttatctgaacgtcacatcccaaaattatgacaactcaacgcgaaattctcaaacaagctcgggtcctggtggagaagcgatcaccccatcttcatcaatgagtgaacgaattcttgacagctctttgtcttcatctgactccagcactgtcgcagaaacagtcgtctcggtccaaacaacgaatgtcgcagatgattttgtgagctccagatctcaagagttgttggtcagcatgttctccatggctagcagccacagcactagcgcgcaggttactactgctatcgactccctatggttgaatgcgaccagttcaactggctcttcctctgttgagacgaactcgttctcatcagcagtcccctcaagcatattcccggcgtctgagatggtcttttctactgagtcatcatcttccggctcaccgtcaagtacaattatcgggcagaatttcttaggcgcatcctcgggtgattcgtcgactgaaggttcaacgttgacatactacaagcctgcaagtgtgtctgcctcaccaacgattagctatgatgctattgcgctgacaacgacttcatcatctaccacatcagatgtttcagctggcacttccgttgacggcagcagttacacagacttgacaaaccctgagactccagcttcacccaatactgacatcggaccttcgcaaaccgagtcatcatccatcgcgaatgctccggatccaactatgaccggcttcgaagacaccgatgactctgtaacaccgttaccggattcatcttcagacatcagcagcatcgacgaccgccagacgcccattgctgcatcaagttcagcggaggagccatcaagttcatcagtttcgctgcctggagtcgcggagacttcatccagtgattcgagcagttccgaaacaagtcccatattcactggcactactgagccgtatccaagtgcaacctccggagctattgatattgatgagcatttcgttgatgtagttgctgaagggacaacctcatcttcatcgacagtagaaccttcaggcacgagcttgactggagagacaacaatccagaccattgcagaatctactttgcaaagtccaagctctgtctaccactctagcgaggcaaaatcaaccatcgccgaaatggacaccggctccatgccttctgcggccacttcttctgccactttcccagacgatgcaaattttacaacgccatcttcgtcggaggctcgagttgagacagcaatgattccttcttccagtacgagtccgatggacttgacttcagctcaaacattctcatcctctttaacagagaggacaagcactttccatgcccctagcaatacaacttacacctctcttgagatggacatagactcagtccccgctgcaacatcttcttctgcgacgatttctagctcgagcattcccgaaccattgctcacggcttcttctccatcaccaagcgatgatctcggctggacagaaacatcaaccactccaaatccgtactcctcggacgttgttgcacaggatctatcatcctcttcgactagcttctcggaaactctcagcgtagcctcctccagcactttgcagagcagtatctctggtccaatgaatatcgcttctgcatcagccttagagtcgagtagttctgagtatgcgcggtcgatcgcgatcacacaaaccgactctaccgattcaacgaccgaaagcaccaccatgccaatggcggagtcttctgcgtctgtgtccagctttctcatcccaagcagtagcacacagttcccgtctgccatgagttccagcgactccagtacgtcaatgtcctccttgatgatgactgagtctgccgaatctacgaccaaaagcttgactatgccagctgaggaaccatctagctctgcatctttcacctcccttggtttctgccagacaggtgctgcttcaactctcagctcatacccatcagcctcgcaattttgttcgtcattcatggcgcctccggtagttaccgcaactaccacaatctatagtacgcaaactacaggaacgacctctttcaccacaactacacagactgtgcagacagagacatcgcagagagtcgttactcaatactacagcaactccacactcaccacgaccacgtgcataccagccagcaatagcggtaacaacttcagaaaacgagatgttcctgccacactggctgcacaaaccacatacctctggaaaagagatgatgctggagatgcgggcaccgcctcagtaacatgttcggtcgcaccctctgttctaagtggatactcgtgcgacgatgtatcttctgcatgctcatgctatggaattaccacgatctcacagacgcctacgtcaacagcgactgtcactagtggcattcaacaagcaggtgccatcgtacaaacaactacggaatcaatcactgtgaccgtaatctcaagctcaacctcctacatcccacaaacaagcacagtgctctactgtccacgcccctcgtccgactgtaacaacaaaggctacttgtttgcttattacggcaacgagccctatggcaatgacgtcgcaaacatggatgccacgtacaccaagcaaatgactccaacatacaactccaccacaaaccaaggcgtaggcatatacggcagcgaatggtccagcgtttcactctacggaagctcgcagatgtattcagacaactacttctacctctcccacaaaggatatttcttcgcccaagtcactggctactacaactttaccatcaaagatgccgatgacattgcatatgtctggatgggcgatgcagcatactcgggatggacaggaggacccagtggtggcaattatgttgccaaagctagatgttgctggccgccggagaatacgaacacaacgacatattggatggaggcggaaacatatgtgccgtttcgaatcgtattgggtcagcaggatggatccacttcgcttggattgacgatcacggcgccggacggaactgtcattttgcagactggcaaagagagcgattatgtagtacagtattcttgtgatggaagtgcgccaccgtttccggattgggggtatgagacttga

SEQ ID NO: 1913 - DNA, 1788 bp, Aureobasidium pullulans
atgcctcagtcaactcttgtcatcttcagtgctcttgccggcctgtctgccgcagccagcgtccaatctcttgccgaggtttgcactgtcgagaacgttcaagcagccctgcccgcaaacaacacccttcttggaatcgaaccaattgcctcctcggtcaccgcaaacgccgtcgtcaatgctactaccagcggaagtggtatgatgagaagaagcaccagagccgggacactgacctactgcaatgtcaccgtgacttacacccataccggcaaagacgacaaggtcgtagtccaatacgccttcccacagccttccgactttcagaaacgattctacgtcgctggtggatttgcttatgagctcccgagcagcaccacaggtggtcttacgtacggcgccattggaggtatcacggatgctggttacgatgctttcaccacctcgtacgatgcggtcaacctgaagggcaatggatctatcaattgggacgccacatacatgttcgcctatcagggtatcggcgagatgacgtccttgggcaaagcaatggccaatcctttctacggaaacaacaacgataccaaagtttacacctactttgaaggctgctccgatggcggtcgtcaaggcatgagccaagtccaacgttggggagaagaatatgacggtgctgtcatcggtgcccctgccatgcgctatgctcaacaacaggtaggccatctcacgtccgtcgccgtggagcacaccatggatcactaccctcctccctgctctatggccaagattgtcaacgccaccatcgctgcctgtgatcctctggatggaagaacagacggcgtcatctcccgtaccgacctctgcaagcttcacttcgacttggacactctcgtaggcgagtcttactactgcgccgctacaaccagttcctcccttggtttcggcttcggaaagagagacgctgttgcaggtagttctactagcaccacccctgctcagaatggaactattaccgcggcagatgttgctgttgtcaagggcatctacaatggtctccacaatctcaagggcgagcgtgcttacatttcttggcagcacggttccgaggtatcaactgatgctgaccccacttggaacaacaacacttcatcctgggaacttaacatcccttccactggtggtgaatttgttacaagattcgttgaactaatcgaggaggacaacctctccactcttgatggtgttacttacgatactatcgtcgattggatgcagaccgcttttgtgcgttatatggattctctccagaccacgctgccggatcttactcctttccagaagtctggtggtaagcttctccattaccacggcgagtctgatccttccgtccctcccgcttcctctgttcactactggcaatccgtccgttcaatcatgtaccctgaatcttcctactcccacgaacaatccttgcaggctctccaagactggtaccaattctacctcgtccccggcgccgctcactgcgcctccaactctctccaacccgatggtcctttccccgaagacaacatggccaccatgatcgattgggttgagaacggaatcaagcccactggacttaatgcgaccgtatctgagggtcaatactctggcgaggttcagaagctttgccaatggcctactagacctgtctggaagaatgatgcctggaaatgtgtcaatgaccaagcttctgttgatagctggacttacactttccctgctttcaagctccctgtctactag

SEQ ID NO: 1914 - DNA, 773 bp, Aureobasidium pullulans
atggttgccggtatcaagctctggcttgcagctctcttgcctgttgctctcgcctgcaatggctacactggcggcgttcccaaggcagttggcaccaagaccaacaaagcagtcatcaccgtcaaggccggtcaaacctttgacggcaagtggaaccgctacgaccgcggcgctggcgcctgcaacggtcaaggtgaaggaggtaagctacactacacccattccctcctcctttaccgaatcctaacatctctcctccaccaccaggcaaagccgacgccgtcttcctcctcgaagccggagccacactgaagaacgtcatcatcggcaagaaccaagccgaaggcgtccactgcgacggccactgcaccctcgaatacgtctggttcgaagacgtctgcgaagacgccatcagcatcaaaaacgacaagtccggcagccaatcctggatcatcggcggaggcgcctaccacgcttccgacaaggtggtccaacacaacggctgcggcaccgtaaacatcatcaactactacgtcgaggactttggcaaactctaccgcagctgtggcaactgcaagtcgcaatgcaagcgcaatgtctacatcgagggtgtcactgctaaaaatggagatttgctggttggaattaattccaactatggagataccgctacgatcaaaaacacttgctctgatgctggaaccaagtgtcagatgttcaagggttgtgccggtggttgcgagccccccaaggccggtctctgcactggttaa

SEQ ID NO: 1915 - DNA, 2528 bp, Aureobasidium pullulans
atgcgtttcaccacagagctgctggccgttgcgctggccctcgcagatgttacctctgctcagaactcaacatataatgctactgcagctgctcaggctaaattgactgctgagttggccaaccttgagaagttctggtcatatggaagatctcctccagtgtatcccactcgtacgtttgatctagacgttcaaagagtcttcatactaaccagtcgcagctcaaggagcaggcagagatgagtgggccactgcttatgagaaagcaaagaccttggtcgcttcaatgaccgactacgagaagaacaacatcacatatggtgagtggcatgacacaagattcaatgttttccaagtgaccaacaaatataggttacacctcgaagacaaatggctgtggtggtaacagcggctctgtacccagagttggtttccctggtctctgtctcagcgatgctggaaacggtctccgtggtacagatggtgtcactggttttgcttcgggtgtacacgtcggagctacctggaaccgcaacctcgcataccagagagcccactacatgggtgcagagttcaaggctaagggtgtcaacgtcctcctcggacccgtcgttggtcctcttggtcgcgttgccgaaggtggcagaaactgggaaggtttcagcaacgacccttaccttgctggtagtctgacttttgagactgtcagaggcatgcagaataatgtggtttcatgcatcaagcatcttatcggaaacgagcaggagctcgaccgtaaccctgctggagtcaacgcctcgatgtctgccaacatcgacgacaagaccatgcacgaaatgtacatgtggcctttccaggacgctgtccacgctggagtcggatcagccatgtgctcataccagagagccaacaactcttacggatgccagaactccaaggtcatgaacggtctcttcaagggagagcttggctttgagggtttcattgtctctgattggggtgctcagcactccggtgttgccagtgctgatgctggtctcgatatggctatgcctagctcagcctactggatgaacggcaacttgagccaggccgttaccaacggatctcttgcttctaccaggctcgatgacatggccactcgtatcgtcgcttcttggtaccatcttgccgagtggcaaaaccctggccacggcatgcctgtcaacctgacccttcctcacgagtacgtcaatgctcgcgaccctgcctctaagcctagtaccttccaaaccgctgttgagggtcatgttcttgtgaagaacgtcaacaacgctcttcccttgaaggctcctggtttcatctcgcttttcggttacgatggtatcgcaccttccagctacactcccgacaactcgcccgccttcaccctgtccaacttcggattctcgcccgtcagcggtgttaacagcagtgaacttcttatgctgtttgtcaacccttcatccattccttctgagaacctgcccggtatcgccatcaacggaaccatggtcaccggcggtggctctggtgctgctcagcctgcttacatcagcgatccgttcaatgccatcaccgagcaagcaatgcaggatgacacttggctccagtgggacttccacagccagaaccctgtcgtccagagaggatctgaggcctgccttgtcttcatcaacgctttcgccactgaatcttatgatcgtccttacctggaggatgagtactcagacgacattgtcttgaatgttgctgctcagtgcaacaacactatggttattctgcacaacgctggtatccgcaccattgacgcatggtactcgaaccccaacgttactgccatcgtctacgctcacctccccggacaagattcgggcaaggctttggtcgaggtcctctacggaaagcagtcgcctagtggtcgcatgccctacactgtcgccaagaagcctgctgattacggcaacctgctgcaccacctcactcctgacaacaccagcaactactacacccaggacaacttcaccgagggtgtctacattgactacaaggctttcatcgcccagaacattactcctcgcttcgagttcggatatggtttgacttacacaaccttcaactactcgtcgctgcagagcaaggttctcagcaatgtcagcactgccgagtaccctcctagcagccccatcgctcaggggggtgttgcctccctgtgggatgtcattgctactgttgactgcaccatcaccaacactggctcagtcactgcctctgaggtcgctcagctgtacatcaacatccctggtggccctgccaaggtccttcgtggattcaacaagcaaggtgtccaacccggcaagagcgtcaacttccacttcgacctcaccagacgtgacctaagcgagtgggatgttgtcagccaacaatggcgcctgcaatctggcaactaccccatctatgtcggcaagagtgtactcgacatccagcttaccggtagcctcagcatctaa

SEQ ID NO: 1916 - DNA, 964 bp, Aureobasidium pullulans
atgtcttcattcttcgcaaaggccttgactctcggcgctctggcagcgcccatgatcgtctccgccgctccctcttccatggtcaagaagtctcagatcatcaccacttctgccaaacaagctgctgttgacctctgcggcactgctgataatctggtcctctatgataccccatggatcgtatacaacatgttctacggcgctgcttcttccgtcggcacacagtgcactcgttacgatcatgttgttaccccatccaccggtaacaaggaaattgtctggagtgctgagaccaatatccaatatgtgaaagccacgtaagttgttcgcccctctgattctacaacgtattgagggaaggggagctgatgtaagagcagcgacaacgtacccaaaggttacgccttcgtcggactgacccagaacctggaaaccaccatctccggcatctcatccattcccacaacatacacctggacccgcaccaacaccaccgcattcaaaggaaacgtatgctacgacttcatgacctccaacaccaaaggcgactccaccacctccaacgcccaggaattgatgctctggttgcaatatgaaggcggtcaattacccatcggttgggctgctggcgccaaagccactatcaacaatctcttcggcacgagctggaagttgtatgagggtaagaatgatgatactggtattactgtgcataccatgatgcccgagaagcaatttaaaggcagttttagtggtgatcttaagctttggctcgaggctcttgtgcagcatgggactttcaaggactctacctacgtcaatgttggaaatgctgggtatgtggttttcttcacgatcttgaatatttgtagggctttttactgaccagatgggcagcaccgagtacttttacggcaacagcaacttgaacgctaccctgggtctgcagatcaacctgaactaa

SEQ ID NO: 1917 - DNA, 1052 bp, Aureobasidium pullulans
atgctttcttacattctggccttgtgcctcaacctctgcctggtgctggccgccagcagaactactgctcccagtggagctcttgttgtcagcaaagcccctgccaaaggacaatactccaagatccaggatgccgtcaatgctctttccacttcttccaccactgctcagtccatcttcattgaagctggcacctacagcgaacaagtctacatcgcaccccgcaaagccgcccttaccatctacggatactctgagaacactgccgactatgctcacaatgtcgttaccattacgcaaaagctatctcagaatgaggtcgcgactaacgatctgactgcgacccttcgcgcgtggtccaccaacttcaaactctacaatgtcaatgtggtgaacagctacggatctggcaaacaagccctcgccctcaatgctgcagccgccgtaagtttcccttcctctcgcccttacctcctcacctttactaatccatccatccacagaaccaaggctactacgcctgcaagttcatcggtttccaagacacgatcctcgcccaaaccggcacccaactctacgcgaaatcctacatcgaaggcgccaccgacttcatcttcggccaacacggtctagcctggttcaccggctgcgacatccgcgtgctttccgcttccctgggctatatcaccgcatccggccgcgcgtcctcggaggcaggttactacgtcctcgaccactgctccatcgctgctaagtctggagccacggttgcaaagggcgcttattatctcggtcgcccttggggagcgtacgctagggttgctgtacagagttcgacgatcagtgaggttatcaatgctgctgggtggcatatttggaatactggggatgagaggactgatcatgttactttcggcgagatcagcaatactggcgtcggtgcttctggggcgaggaaatttgagaccaagttgagcaaggctgttgccatcgctgatgtcttgggcagtgggtatgccagtgctgcgtatgttgacaagacttatctttga

SEQ ID NO: 1918 - DNA, 1655 bp, Aureobasidium pullulans
atgagagtttctacgtatctcgctgcacttgcaacagctgcttgtgctagtgctaaagtctggggcaactctactactgctggctcagtcacttttgacaacaacagaagattgctgtttgataccgatggcaatcagatcgatgctgttggagctaagatcaatgaatttggtggcagatattatctttatggtaactctgtttctcaaaaagatgccttttacgggatcaagagctactcttctaacgacttgctgaactggttagtcagagatgcaacacagacctaatgcaaggttgactctgatacaggcaatacgagggctacctcttcgatatcgatgatggaaagaacccatgcaccggatcaggaggctgtggtcgtcctcatatcatctacaaccagaatgcctcaacttacatcctatgggcaaatgccggctctgtaggctaccaagtcgcaacttcggactcgccaaccggacctttcgtcttcgagtcgtctcctgcgatgattgaccctcaattcgatggcttgcaacctgcagatcatgccgtcgagattatcgacggaaagggctaccttgtcttctcagccctcaacttccgcgaccctagagctggcagcttgttccctcaagtctaccagactctccacatcagcgaattgacagatgatttcctcaacacgactggtgtcagttatccagtcgcttcaaatgccactgcagagctggactttgtcgaccaacaagccgaatcgcctgatatcttcaagcgtggagactacttttatattggcggtagcaacacctgcggttactgcaatggcactttggccttgctttaccgcagtgaatctatccagggaccttggactcgtcagattctggctgggtatggatgtaacagtcaattcgagggtgttactcctcttactgatcccaataccggagagaccacgtatttgtggtctggcacttctgtgtctggaggagatccgcgtgttgggttcagtggtcatatttaccagcctcttgttttcaatgctgacggtagcgtccaagatttggattgttctgttgatgctgagtttactgttgcgttcccgagggataacagtacgactgctactggcaacgcgacggaggctggtgatgcgtcgcctgctcttgctgtttacagcgctgtttgcgactctgacttcttcactctgtaccagacttggcctgcttcccaagacggcactgtcgagagtgtttcgctcaatatggctcgtggacaccaggaagctgctctttcgttgactttgttcaagttcagctctcacgaggaccttttgactcccggatacaagtggacgcagctgggcacggcatctttctttgccaaccagacaacctgggtattcgataccgttactgtgcccgtaagcaccaatggtactgtttccaagggagaattcctcggcgtctctatcgcaggcttcgatgtttcaccatggtgtcatctcgagtacgatggtgctgatgaagattacatcttgtatgcccaaggaggtggccagtactctctgcgtggcgcacaaggcaagacgtcgcctgtttaccagcgcgtcggcaagagtgtaaagttcttcgcaacttatgcgtaa

SEQ ID NO: 1919 - DNA, 1451 bp, Aureobasidium pullulans
atgagaccttcaactctccttctcgccgcttccggctctgcagtccttgctgctcctactcctagtcttctcggagacattttgagcttgaccaacaatgtcatcaccaccgtcacctcgaccatcaccaataacttggcccagcaagttgcccagctcggctgcactcttcagaccaatgccaacaagcatggtcagatcatcagctcggttgctcttaccgtccaggccatcgaggtcgccgccaagagattcactcagacttgcaactggtccaagcctggaaagtcatacatcaattggtctacctacaaggccaacggtgtcaacctcggtgcctggttggagatagaagagaattacggtaaattcaagccattcaagctcttctaatgacaagaaatcatcatactaacttcatatcagataccgaatggtgggccgccaatgttggatcattccccgatgagtggacctggtgttctaccgttggcttctccgtctgcggacccctccttgagaagcgctacgcctctttcttcaccactgccgacatcgacaagatgggtgctaagggtatcaacactctccgtatccccaccacctacgcagcctggaccaaggtccccggcagcatgctctactccggtaaccagcaagcttaccttagaaccttgaccaactacgccatcgacaagtacaacatgcacgttattgtcggtctccactccctgcccggtggtgttaacaccctttccattggtgaagccttcggacacgacgcctggttccagaacgccaccaacctcgactacagcttcaaggccattgactctatcctgaccttcatcaagacttccgatcgccagaactctttcaccatcgcccctatcaacgaggccagtgacaacttcgccgggttcgccacccctgccggtcttaccaacgacggtgttaactggatcaacacctacatcaacggtgtcttctcccgcatcgccaaggttgataagagaatccctctcatgcttcaggactccttcttcagcgagcagttctggtctcccttctacgccgctggtaccaacctcgtcatcgactctcacatctacttcttcgccgccgctggtgcctactcccagtacgtccccgctgccgtctgtggtcaggccaagtacatcggtcagggtgatggcaagttccccgtcttcattggcgagtggtccctccagactctctacaacaacaccatcgacaacagaaagactctctacgacactcaggtctacgcttaccagaagtacgcttccggtggtgctttctggaacggcaagatgttgaacaccagagacactgttgatggtgagggcaagctccaggactactggtcatgggagggtctttctgacgccggtgttgtgtctaccaccttcaaccagagctactgctag

SEQ ID NO: 1920 - DNA, 3618 bp, Aureobasidium pullulans
atgtccggtttcaagagtcttgccctgctattggcagctcagctcgccaatgctcagggtggctaccctaatcctcccgttgatggtttgcctgtaagtcacttgttctccccagaggcatacacagccccttcaagaccagaccaatacaacatcttgagccaatgtagtgtgcggccactgagagtacgacatctgcccttagaagccttgctctcatcagcatcccactgcattggcaacagttcttgcatcgcgatcgctcaccaatcccgagcctatgctttgaggaggcccagtaccaacatctcaatgtttcaacagtcaattgacaccctcacagttccctggtaccaactaccctggctccgaagtcccctacgccgtggctggtgcaaagttcaaccagacctctcccccttactacccttctccctggggaaccggtgctggagaatgggcaggtgcttatgagaaggccagagcattcgtctctcaattgactctggccgagaaggtcaacttgaccactggtacgttcattccatgactcttttgcaattggacccaactaacagttcgcaggtgtcgggttagtctatctcatcacttaaaatgctcccgagctcttgtagctaatcgctttctagttgggagtctgagctctgtgttggtaacactggttccatcccacgtctgggcttcaaggccctctgtctgcaggactccccattgggtgtcagattcggtatgtggtgagccgtccacagaagagtatcctgtgtactgacaagattcaggtgacttcgtttccgcattctccgccggcgttactgttgctgccacatgggacagaaagcttgcctacgagcgtggccatgatatgggcagcgaacaccgcgacaagggcgtcgatgtcatgcttggtcccgttgttggtcctcttggccgcagccccgaaggtggacgtaactgggaaggcttcagccctgacccagtcctttctggtgttctgaacgccgagaccgtcaagggtatccaggatgctggtgtcattgcttgcactaagcactacatcctcaacgagcaggagcacttcagacaaggaggtcccaacatctccgacgccgtctctgccaatgtcgacgacatcaccctccacgagctctacgtctggcctttcgctgatgctgttcgtgctggtaccggcagtgtcatgtgctcttataaccaggccaacaacagctacgtcgtaagtggaagaacaccacttcaacggactctactgaccaagtttagtgccaaaactctcacctcctgaacaaggtcctcaaggccgagctcggtttccaaggcttcgtcgtctctgattgggctggtcaacactccggtgtttccagtgctctcgctggtctcgatatgaccatgcccggagatgtcagcttcgacagcaagacttcgttctggggtgccaacctcaccatcgccgttttgaacggaaccgtaccccaatacagaatcgacgacatggctgttcgtatcgttgctgcctggtacctcgtcgacagagaggacactcagctcgaggatggccccaacttctcctcgtggacctcaagaaccgaaggataccgtcactacattgcccaagaaggctttgagaagatcaactctcacgtcgatgttcagggcaaccaccgcgacaacatccgcgaggtcgctgccaagggtactgtcctgctgaagaacaagggcggtctgccgctcaaaggaactgaacaactcgtcggtgttttcggcgaagatgctgccgacaaccaatacggtcccaatggctgctcagaccgtggatgtgacaacggtacccttgctatgggatggggatcaggcaagtgatactgtttggcgatcgtaacaaagagacccaatgctgactgaagttgtaggaactgccaacttcccttacctggttgcccctcacactgccatcgagaatgaagtccgctcccacggcaagtctgtcgagagcatcttggacagctacgcctacagtcagattgatgttcttgcccaacgcactgacgaagtcaatggtgcttgcattgtgtaagtttctataaatcaacaccaagtactcctaaagactaatagatggactctagctttgccaacgcagatgctggcgagggctatatcatcgtcgacggcaaccaaggagaccgcaataatcttactctctggcaaggtggtgaggctgttatcgaacacgtctcatctctctgcaagaacactatcgttgtccttcacacagtgggtcccgttctgatcaacgattggtgattacactctgttctattcagtcacaactcggcgctaacttgccttctaggtacgaacacgagaacatcactgccatcctttgggctggagttcccggacaagagtcaggcaacgccatcgtcgatgtcctctacggcaaggtcaacccctcaggcaagcttcctttcaccatgggtaagacacgcgagtcgtacggtaccgatcttctctacgagtacaacaacggtggtgctcctcctcagacccaattcgaggagggtgtcttcatcgactacagagcctttgacagaagcggtgaaacccctgtctacgaattcggttacggactttcgtacaccaacttcagctattctgacatctcggtctcggtcaacaccgctgctcccgcctacaagcctaactcaggcttcaccgatgccgcccctatctacggcactgtctcgaacaactctgccgactacgtcttccccgatgatgtcagacgcatcgagtactacatgtaagtcttgcctaaattggttggttatcaggacttcgactaatccatacagctaccccttccttaactcgaccagccttcgcgcttcctcaggcgacccctactacggcagcaactacagcttccccgccggttcgtcatccagcgcaccccagcctctccttcctgcttcaggagcatcaggcggtaaccccggtctgtacgatgtcctctacaccgtcactgccactgttaccaacactggtgccgttgagggcgaggaagtccctcagctctacatctcccttggtggtcccaacgacccggccgttgtcctccgccagttcgacaagttctcaatcgcccccggtgcctccaagaccttcactgccgagattactcgcagagacgtcagcaactggagccctgagcttgacgactggtacgtcagcgagtaccccaagaccgtttacgttggttcttccagcagaaagttgcctctcaaggctgctcttcctgctaatggtgccacttctcctggtactggtaacggtggctccggcaatggcacctacaccgttcctcccgtctcagtctctagctctgcccctggcactgccacccttccctcttcctcagcttccaagtcctcgtcgagctcgaagtcatcatcgcactctgccagccattcgacctccaagtcctcgtcccactcgtcttcgtactccactaccaagacccatggtccaacctcgtggaccacctacaccatgcccactggctaccactctacttcatag

SEQ ID NO: 1921 - DNA, 2341 bp, Aureobasidium pullulans
atgcgttattctttagccgttccggctttcgcagccttggctgctgctcttcctgctcctcaggagatcgatcttgatatggtcatcgcacagcctgacatctcctacaccaccactgcttcaagggtcacctacgacgttacctctatcgcagcccaggccacttccgacatctcttctatctctgtcgacatcagcgccatcgctactcagactcccgtcgctgtcagaagaaatgtcggaaagagagctgcttgtgctgctcagcctaccggagttacttcttacgccgtcaatacccccgatgacaccgcatctgctttctcagccaacccttcttttgctgccgctgcttccgcagcccctatcccttctggttactcgaacactttcaccaacttgaacgcctccaacaagtacgttttttgatgacaacttagatggttgaagctgaccacagcacagcgcctacggctacatgggatacaccgctctgtctagctacgacactgagaagtgtgcttccaagtgcagtacgtagaagcagaagaacagccggtgaccctactgactctctctagatgccatcaacggctgcatgtccttcaacacctactttgagagagacccttctcttgagcctggatctggatgcaccgaccctgccagtgtgacgatgataaaatgcgttttttggggtggtcctgtgtcggcgtcaaacgccaacaactacggacagtaccgcagcaagttccagtgagttttgacaaaaaaaaaaaagcctttcatgaggtgtatcactaacgatttgaagggttgttattgctggctccaacggctacatgaacaacactcttgctgtacccgaaggcttcacctctgctcagtacctcggcaacgctgccatcaacgctccccttgaccacgaaggttacgacactttcatgggtagccgcatcttcactgctggtcccttcaacgcttctctctgcgccgcccattgtcaagctcagaacgcttacaacattgcccaccctcccaacaacggctctcccgtcaagatctgcaacttcttcaacacttaccttctctatctcaacaagacctccaacagccaaggccaatactgctctctgtgagtatattgttttttctaccacgcataacctgagctgattcttgtagttacactgaagcttgggactcaagctacgctaccaacaagggccaataccgcgggaacgaccactacatgattgaatattcctactccttcaccaatgcctcaagtgccgggttcaatcctaagaagggagacaccaacggagctgtccaccaagcttctgttgacattcaatacgccactctccagcctttctgctcctccgccctaggatacagcgcactccttgcaactgttactcccacgactgttgttacccctctcgccaccagcactgttctccgcacaaccactactactgcaagcatcaacaagcgcgctctgtctacacctgctgttctgaccaagtaccctgcatctatcgtctccagcgcctgttccatgttggtcagccaagctactagcacctctacctcgactgctcctgtcaccaccatccaggctgccactcagaccactctcgagacttcggtgatcaccgtcactgcttctcctattcctagcatttgcggtaacaagggtatccaatatgcttactacggcggatctcagtacactgagggcgacaacgtcaacgctgtctaccccgagcactatgcaaaccgcaaccccacctgggccgccgatacaaccaaggttggtggtattgacattagctccagcaactctcaagccatctcgctttatggttccagcacacaagtgtcttcgcaatacttcattctgaaccaccgcggttacgtaagttcagcattaaccaatcgaacatataaaacactaacaataagccagatcttcgctcaggttcccggtacatacaccttcatcatctccaaccctgacgacatcgtcttcttgtacctcggagacaatgccgtcagcggatggaccagaggtaacgccaatgccgttgcctcttgctgcagcaactatcccactcgtgcttcgacctcgtacaccctcgaagcaggagactaccttcccttccgcatcttcttcggtcaacagggcggtcccgtcagattcgccttttccatcactgctcctgacggcactgttatccttgacaacaacacctctgagtctgactttgttgttcagtactcttgtgacggtacttccgcccctgcctttgctcctttcggacagggtcagtaa

SEQ ID NO: 1922 - DNA, 2242 bp, Aureobasidium pullulans
atgtatctctccttactaagcctgagtgtgttggtctcttatgtcctcgcctcgcctactggaaactatgttatccacgaaaagcgcgatgccactcctatgggctggagcaaagccgaccgcctcgaccgccgtgctctgattccgatgaaaatcgccttgactcaacgcaatattgaacaaggtgccgactacctgcatgaggtcagtcacccagagtctgccaagtacggtcaacactggactgctcaggaggtcgcagaccatttcgcgcccaggtaagagcccctctcctgatcacgaagtgcttaatctgtaattgtcaacgtgcatgacgctgttaagacgaggagagctacccaatgggagcagtgtttgcacgtgctctcacaggaagaagcttccatttctcaaaagtttatgcctctccatagcccggttcaccacactcaatcctcttaggatcgccgtgtgactatatgacagagaataaagctgacatttcttgctccagtgatgagaccatctcgtctgttatggactggttgattgcttctggtatctcctccgacagcgtcaagttgagcaaaggcaagaactggatcaaccttgaagcttcagtcgaccaagcagaatctctgctcaacaccaagtaccacatctacgagcacggtgctaccggtcagccccacattggctgcgacgagtacagtctccccaagcacctcaaagatcacattgactttgttactccctcgcttcacttcgacaccagagtcagagagcgttctgacaagcttgacaagcgtgaggtgacgcccgatactggcaagtcaatcggtcagccgggtagctggagcacccctcacctgggcaagtacatcaacaagtcgcaattcatcaaggaactggaacagtgtgacgaacagatcactcccaactgtctcaaggctctttacaagattcccaagagcactggtaagagtgtgaagaacagctacggtattgtcgagtacactcctcaggcctacgttccttctgatctcgatctgttcttcgccaacttctcggagaagcaagtaggggatcgtcccatcactgaccttgtagatggagctactgttcagcaaactcagatgggtttcaactacaatggcgaaagcaacctcgacctcgagtatgccatggccttgatttaccccgagaaagtgactctgtaccaagttggtgatttggtatgcttgtccattccaaactatacactgcgatgagtatgctactaacaaacccacaggtcgagggtgcatccttcaataacttccttgacgccatcgatgcttcatactgcacatacgaaggcggtgacgatccgtctcaggacggtgtcttccctgatccgtacaagggcggctacaagggcaaggaggattgcggaacattcgcacctaccaaggtcatcagcacatcctacggttacaatgaagccgatctcacacccttctatgagaagcgtcagtgtgatgagtacatgaagctcggtctcatgggtaccagcgtgttgtacagcagcggcgattacggtgttggcggcaacagcggtcagtgtatcgcagccaacggaacctacaactctggaaaggatggccgcttcaacccctctttccccgctacttgcccctatgtgactgccgttggagccactcaagtcattcctggtacgaacatcatcaccgcccttgccagtggcactcaacctgaagaggcttgtgagactgtcatctactctggtggtggcttcagcaatgtcttcgaccttcccagctaccaatcatctgctgtcaagtcttggttcaagaacttccccccaccatacggcgccgaccgtttcaacaacacacagaagactcgcggcttccctgatgtctccgccaatggagccaattacgtcgtcgctatagacggaacctttgctctcgtctacggtacttctgcttcttcgcctacattcggtgctatcctcaccatcatcaacgagagacgtctccaggctggtaagagcagtatcggtttcattaatcccaccctctacgctcatcctgaggttctgaacgatgtcactcaaggaggtaaccaaggttgtggtactcccggtttcactgccagcaagggatgggacccggtcactggcctcggtactcccgactccgtcaagatgctgaacttgttcatgagcttgccttga

SEQ ID NO: 1923 - DNA, 1257 bp, Aureobasidium pullulans
atggcgagaaaaactgcttatctcggccttctggctgcctcatcattcgctctcaccctcgcagccccagtcgaggaacgaactgtcaacgtttgtcctgctgtcgacctggttgtcgttctgctcaaggcctatccatccgcctctccgttctgctcctctttccttggaatttctacagtgactactacttcaactgtcaaggccacttcacccatcaccaccatcattcctaccacaactacaacagtctttgttgcagcaactccagttaccgagtacgatgtttcctctaccaccatcacgacttgcattccaagcgctgccaagcgagacctagccaaaagaaaggagaagaccacatcgaccacctcgtccagctcgtccaaagctacaaccacctcaatcccggcttccatcagcatacctggaacttgcaatggctgcccgggccttctcaagaacattgcctgcacagctgtttctagtgcatgcggctgtcttggcctttctaccccgacctcaactgtctatgtcagcacgacatatgttcctgtggtaacctcttattctggtgttgctgcaactcaaaccaccactggaaccacgactatcccgaccacctctacatcaacaatcctatcttgtccaactccctcgatctgtggtaaccagggtattcagtttgcttactatgccaacgagccctggggcgatcaaatctctacaatggacccgtcatactactggacaaagactcccgactacagtggcaccaccaccaaggttggcggtatcaacgagcccgccggctctgacgtcaacctgtacggcacctcgaagaatgtccccgctagctatttcgtcctcaaccatcgcggatacatcttcgctcaggtcgacggcgactacaccttcaccacctcccaagtcgacgatatcaccttcttgtaccttggagacgacgcaatcagaggctatggtctgaacaactttgacgccaaggcagtgtgctgcgatgcgcctgccaacagtgccagtgcgacttatagtctgaagactggacagtatcttccattcagacttgtgtttgggcagcaaggtggacctgttgtctttagcttttccatcaccgctcctgatggaactgtcattcttgatgccgggactcaggattcgaagttcattgttcagtattcttgcgatggtacaactgctcctgcattccctgcttggggtcaggaacaagctctttag

SEQ ID NO: 1924 - DNA, 1287 bp, Aureobasidium pullulans
atgcaccttcccagcatcactgcggctttggccctgattggtctcagcgctgctacccctactgagtaaactacttctcgcgacgggtctcatattatgcatgatgctgatatctatccaggtacagcacttcttcctcctcttccaaggatcaaggactcgctcaagcctggacctccaaaggacgccaatacatcggcacagccttgaccatccgcgacgacccgatcgaacaaggcatcatccaagcccgcaacgaatttaactccatcacccccgaaaacgccatgaaatgggagtccaccgagcccagccgcaacaactttacctttgccggagcagatgccattatcgatttcgcagacaagtacaagaaggaagtcagatgccacactctggtttggcattctcagttgcccgcctgggtcagcgaaggcaacttcgacaacaagactttgatttccatcatggagaatcatatcaagaaacttgctgggcggtacaagaacaagtgcactcattgggatgttgttaacgaaggtaagtaaacccctccctctatttgcaagagagagacaagtatcgcagtatactgacatatacgcaaattcacagcactcgaagaagacggcacctacagaaaatcagtcttctacaacaccatcggtgaagccttcatccccatcgccttccgcttggcttccaaatacgcaggctcccacacaaaactctactacaacgactacaacctcgaatacaacaacaacaaaaccctcggcgccttgcgcattctgaaactcattcagtcttatggcgtacaaatcgacggtgtgggtttgcaggcgcatttgacttctgaagctacggcgagcagtggtggtggtgttacccctgatacgaatactttgaccaaggtgttgaaggggtttacggatttgggcgtggaggtcgcgtataccgagttggatgtgaggtttaccgtccccgtgacggaagcgaaattgaaagtgcaggcggatgcttatgctagggttgtgcaatcttgcattaacatcaagaagtgtgtcggtatcaccatttgggtaagtttggaatcttgccatctccaatgctggacgagtaaaaagctgacttttttctgtgtgatagggtgtttctgacaagtattcttggatcccgggggttttcaagacggaaggtgcggcgttgctttgggatgagcagtttaacaagaagccggcttattattcagtcctcaagactatccaggcatggcgcaagacttga

SEQ ID NO: 1925 - DNA, 813 bp, Aureobasidium pullulans
atgccttcgttcaagagtgttctccttgtcactgcatacgcagtccttgctttggctgctccagccagcgaaatcgaaaagcgcagtgagaccatcactaccaaccaagttggcacatacggtggctactacttttccaactacgtcgagactggatcagactccttgactcttggaactggtacctactctctgaagtggaccagcgccaacactgatgtcgtggctggtatcggctggcaaactggtgctgctcggtgaggcagaaataacatgaacacattgacctcgactgaattgtgtccagcaccatcaagtacactggatccatcaatgctggtggtgacagtctgatcgcgctttacggatggaccaccggaccccttgtcgagtactatgtcattgagacctacggaacatacaaccccggcagtgctggaactcatctaggcactgtacgaaaacccagtccattctcatgaaccgtttcgctgattgatcaacacaggtcacttcggatggcggtgtctacgacatctacgagaccactcgtaccaatgctccttccatccaggggactgctacgttccaccagtacctctcggtccgtcagagcaagcgcaccagtggtaccatcactttccagaaccacatcaacgcttggaagtctctcggcttggtatgtcgacatcaaagtctctatacaatgttcagaagctgactcccacatagaaccttggtacctacaactaccagatcatggcaaccgagggctaccagagcagcggttcttcctcaatcaccttgcagtag

SEQ ID NO: 1926 - DNA, 2028 bp, Aureobasidium pullulans
atgcggttctttcccatcgctgccttcggcctgagtgtcggtgccagtcttgcagcatgcccgtatgccgataaagcagctgcacgccctgactgcccctatgcctccacggggaagaacaagtttgcgcaatacggaaacggaacgaatcgtacctctccttccgccgacaagaaaggcgtcttctacttcaaccgcatcgcgccttccgggtctcaattgtggatttcgaacgccgatggaagcaatgctacgaagttgatgagcaaccaaacggccccctttgattatcacgcctcatggtcttccgacggtcagagaattatcttcaccagcgaaagacgcgctgatggccagtccgacctgtacttagtcaatacggatggtacagaacttaccgaattggtctccagcgactcgttcgaagatatcggaagtctgtcgcccgacggcaacaagcttgcctatgtgtcgacagccatcaattacacgacaaacatctttgtcaaggaccttcacaccggtatctccatcaatgtcacaggcagtgacgaaagcgttggcagtttcgtgggccctcacagctttttccgcccgtcttggtctcctgacggccactggattaccttcagctctgatgcaggcacccagtggactggccacagtgatggtactggctgggagcatactcaatcactcgccgtctttgtcgttcgccccgatggtagtggttttcgcaaggtcatcggagaagagagtcgttgcctgggtacaccgagatggtcgcccgatgcatcacgaatcgtctactacaacatttcgaccgaggatacgtacggcgcgcatggcacagtggctggtcaagagttagctgtgttttctcagatctacagtgttgatgttgcgactggcagcgatgttgtccagcatactttcgacaacacattgaaggtgtctcctgcgtacttgggtaacatcagcaacattggctatctcgtcaaagctggaacggaagcgggcatccactacaccagtccagatactacacaccactatattaacagtactatgcgcaatccggcatggtccccggacggcagcaaggtcgtgtacgaagtttatgagtggggtcagcgacccgccgagaaggagctgttcagctgggatgaagagtgggactaccgattcatggacgtgttcccttcgttcaatattgagacaggacgccttgcgactaccgagaagcagctcggcaatggctcatcttcgattgttctcactggtgctgattatgccaatctcaccactgccttcgacacctgggacaccaatgcttcggaagaatatgcagagctttatgcaagcggactggcgggagcgttccaacctacctggacagcagatggttcaaagctcgccgcgggttttggagtctggttcttcgatcgcattttgtatcctggaactctttactctttcgacgccgacggcacggctacgcagaacttgactgacggcacaaacaacgcaggctttccctccttctctcctgacggcacaaagcttgtgtacagactctggaacgccacatatgggcctttgggcttgcacgtgctagacatggagaccggggacaccactcagctcactgctggctgggacaacacacccggctggtctcctgatggtgaattgatcgtcttcacacgtcaaacaaactggacttctggctcgagctggcaagaggaccgctttgatatctgcaccatccgtcctgacggcaccgacctgaagatcttgaccgagagcgaagcaaacgatgctcatgccgtttggagtttcgatggaaggatcatgtacagtacaggcatgtacggattccgggatgagagtgtgatgtacgacaacaccttccagccgtacgggcagattgttgtgatggacaaggatgggcagaacaagaagatgttgacggatagcatgtgggaggacagtatgccattgtacgtagaaaggaagttcttctag

SEQ ID NO: 1927 - DNA, 777 bp, Aureobasidium pullulans
atgcttctcaacactctccttctcaccgttgctgcctttggctcttccgcaaacgccgccgcagctgcctatgctcagtgcggaggtcaaggcttcactggcgacaagacctgtgtctctggctacacttgcgtagccaacggcgtatactacagccaatgcctgcccgcaagcaacaccgccaagcccgcatctacttcaaagacctccgcggctcctgtttcgacctcgaaggccgccagcggtggtggtagcagtggcacaacctacaaggcctccttcactcaatacggcagcggtgatactttcggaagtggcaactgcaacaccaagaccaccgcttgtggtttctacacttctgtaagcacccaaatccttgacatgatgtcttacccagcatactgacttctgcagcccggttattcagctgcactctcccaaaacgcctttggcgtaggccctggcgccggcgcaggcccagcttgcggaacctgctggaaattgaccgcccaaaccgacagttccggccacgccctttccaacgctggaaacaccatcgtcgttcaaatcaccaacctctgccctgcagatggaaaccctctgtgctcgcagaatggcttgacaggaacaaaccaatacggcgccaacttgaactttgatctgtgcttgaacagtggtgccaatactgctttgtttggaaactctggtgttgggttggctgtgggaactgctgtgcaggtctcttgctcgcaatggtctggtactgttgttcactaa

SEQ ID NO: 1928 - DNA, 1653 bp, Aureobasidium pullulans
atgaggatctcatccgccatctctgccttgaccgcattggtctcggttaccagtgctgctgcaaccacaaaggctgtttcagcctcggtcacctttgacaataacagaagattcttgttcgacaccgatggcagacagattgatgcctatggttcaaaggtcaacaacttcaacggcaaatactacctctacggcaattcgttctcggagactggcgtcgcttatggcataaagtcgtactcttcaagcgatcttcaatcatggtatgcatcgaagattcgtgcaaaagaggactgaatgctgacattcctccttttcaggcaatatgaaggactcctcttcgatcctgccaacaagaacaacccctgcgctgggtctggcggttgtggacgccctcacatcgtgtataacccaaacaagaagtcatatgttctctgggccaatgctggagaagtcggctacgtggttgcaacatcaacatcgcctactggtccatttgtcttctccgccgcgagagctctcatcgaccctgcctttgacggtctgcagccagccgacttcaccgtcgaagtcatcaacggtactggttacattgtcttctcggctttgaacttcagaagccccaatgctggcaatgtctggcctccaatcttccagaacctacatgtcagcaagttgacagacgacttcatgaacacaaccagagtcagctacccggtcagctcggctgccggagatctgattgacaatgaagccgagtcgcctgatattttcaaggtcggaaacaccttctatgttgctgcttcaaatacctgcggttactgcaatggctcaatcgcgctgctgtatcgctcaaactctatccaaggtccatggactcgccaaatcctcgaaggatactcttgcaatggtcaagtcgaaggcgttctccctctgacaaatcctgcaaacggtgctgtaaccaatgtctggcactcaacttctgttcctggaggtcctcgtactggattcggcggccacatcttccaacccctgactttcaacgccgacggcagcgcaaagaacctcgactgctcgaccactgcatccttccccgtcaccttcaccaagggcaacggcacagcaccagcaggaaatgcgacaaaggccgttgataccacaccagcccttgctgtatacaaccccgtctgcgattccgactctttcatcttgtaccaaacctggacagcatcgaaagccggaaccatcaagagcgtctccctgaacgtcgctcgtggctcgcagaccgtacctctcacccttaccgtctttaagcttaactccttgaacgatctcttcacacctggtttcaagtggaccgctctcggcaccgctgccttcaacgcaaaccagacaacctacactttcgacaccgtaaccgtacccgttactaccaattccacagtgaccaagggtgaattgttgggtttgtcgatctcgggtgctgattattcgccttggtgtcatttggagtattcgactactcaagattgtggattcaagttgtaccagcagggcaacgggcagtactcttggagaggactgcagggaaagaacccgccagtttatgagaggcagggcaagagtgtcaagtttttcgcgacgtacgcttga

SEQ ID NO: 1929 - DNA, 1263 bp, Aureobasidium pullulans
atgaagtatactactactgctctcgccgttgccggtatggccgccactgttcgtggtcacggtttcctcagctctcctaaggcccgtatgcctggtaccgctttccaggctgcttgcggccagcaggtttactacaaccaggctggtgataactatggtaacgtccagggcgaactccaggttgccaagacccagaccgactacaaggccgctgagtgtgacatctggctttgcaaaggcttcaagtacgaggacaacaaggacctcgtccagacatacaccgccggccagaaggttcccatcaagttcgaggtccgcgctcctcacaccggtatcgccaacgtctcgatcgtcgacactgctaccaacaccatcatcggcactcctctgatctcctgggacgtctacgcatccactgcttcgggcgttcctgctgaccagacctctttcgacattaccatccccgaggaccttggtagcaagtgctccactgctggtgcttgtgttattcagcactggtgggactctagagaggttgatcagacttacgagtcttgcatcgatttcactgtcagcggatctggctctggtgctgcacctgccagctccaaggccgcttcatctaagcctgcctccagcgccgttgcctcctcgagcgctgcccccgtcgtctcctccagcgctgctcccgtcaccaccaacgtcgctaaggtcacctcttcttcgagcgttgttgctaaggcccctgtgacctccactaaggctgctgcttcctctgtcaagcctaccaccatgaccaccgtcgtcaagtctagcagcgctgctcctgcatcttccggatctgctagcggcaccgtcgctgcctatggacagtgtggtggtaagagctacaccggtgccacccagtgtgcttcgggatacacttgcaaggttcagaacgactactactcccagtgcatcgctggttccgccaaggtaattgatgcctcctctgctgcttccagtacctcctgcactagcaccatcaccatcaccaagagctcttccgccgctacaagcacaggcgctgacagtgcttctacaggtgtaaacctgagcgacgccgttaaggctatcagcaccggcgtcccttcagcagctctcactgccaccgcaactggagctgcacccaccggtactgccaagcctatccctgagggcttcactctcaaggactgcctcgactggatcaactacattgttagcaacgctggccagcaataa

SEQ ID NO: 1930 - DNA, 1971 bp, Aureobasidium pullulans
atgagaagcggtctcgacttcctagtccacctactcgccttatctccgctcgccgctgagcccgccactgccgctcgtcgcgatcgtcctcaagaggccctattacctcccatcccaatcgactacactcctctgccgagtcagcaacatgaatttactttgaggcatatataccacaagggctcacaccagtaccctgacctcctccgcaaggtcgacatcaagcctggcgttactctcgaacacatccaaggccataacgacgatagcgaatatggcgccacagtcttggccaccgactcctaccgcatcaactcaggtcccatgacaatacaacgcctagccgaccgcagacgcaagaccatcgaccgtctcctggaagctgggaggatgtggggagaagccgtttccttgcctccttctgcttggactatggatgaaatagacggtcccaacatcaccgacaaggagacagtactcggctttgctcgcatggctgccaatgcctatgtcatcaagccacacactggtgactggattgatgtaggaggaggcttcaactatactgaagactttggctgggagagcgacggccttcgcggccacatctttgccgacaccaagaacaggactgtcgttattggcctcaagggaacttcacctgctgtctttgacggtgccgatactactggcaacgacaagctgaacgacaatctcttcggaagctgttgctgcggtcaaggcggccagtctttgtggaagcaagtctgcgactgtcagacgtccgcctatacttgcaactcgacgtgtttggtcaagaatctgcgaaacaaggctcactactatcaggctgctcaagagctataccacaatgttacagagatctatcccaatgccgacatctggttgactggccactcacttggtggtgttgttacttcgcttcttggccttacattcggtctacccactgtaacttttgagacattcccagaagctcttgctgctagtcgtcttggtcttcctactcctccaggctatcacattggcgatcacaaaaaccgtcctcatactggtgcttatcattttggtcatactgcagatcctatctacatgggaacttgcaatagtgccttttctggatgcaccattggtggctatgctttccaaggtaaatgccacactggcagtagatgtttctatgacacaatggaagactttggctggagatcaggtattggcactcacaagatcagcaacgtcattcacgatgtgattgagaagtacaagactgtgccgaaatgcgaacaagatctcgactgcatagattgctacgagtggaagttcttcgagagtaatggcaccgagaccacgaccagctcttcgtcaaccgcgacatcgactacacgaacgaggaccgagacatgcaaaacacctggatggtggggttgcttggacgagtctactacagttcctgcgaccacgacagagaccatcaccacaacgacttgcttgtctcccggctggttcggctgcaaggatgagataaccacaactgagacgacaacgatcaccagcggcatcgcaactccggccccagcaccaagcgtcacgacaacatcggctgctgcttcttcatcagcaatgacttcctcagctccgactgcgactgccacctccacttccacctgcaaatcaccaggctggttcggctgccacgactccactacctcgaccaagcactctgcaacaagtacatcaatctcaagcacatcacccgcaagtacatccacagcttcccacacctgcacgtcaaaggagtttttcggtctcatctgtgtcgacccttcagccacacagaacaagcccgaacccacttcttcgcacaagaaatgtgtaaagaggaattatgtgggcaagtgcaaggagtggagttatggcgagggaagagatgtcaagactgacttatga

SEQ ID NO: 1931 - DNA, 2187 bp, Aureobasidium pullulans
atgcatacatctaccgcgctagtaccactgctggcacaagcagcttttggtgccgcaactcgatttgtcccaagagcatacaatgtatcattcacaccggaccagactcgatggcctagtggtctgcaccttgctgtcgactactatccctcacaatggccagagtacatgtgggagtcagatgtcgctgccatgagggatgccaacatcagctatgttcgtgtcagcgaatttgattgggaagtcttggagccatctgagggtgtctacaactttaccctccttgacaccacactcgagttgtttggcaaatatggtctcaaggcgattgttggaacgcccacagcggcacctcccaattggctcacggagaaatacgacgtcaactttgtggatcgcacgaaccagactctcatcttcggatctcgcagacattacagcttttcgtctttcgactacaggaagttgagccaaggaatcacacaaaagctggctcagagatatggcaacaactcaaatatcgtggcctggcaattggacaacgagtttggatgccacgacacagtacgctcctacgatcacaacgccatcaccagattcagaacttggttgaaggagaagtatggaactatcgagaatatgaatgaagctcaaggtcgtgtcttctggagttcgcaatacgtcagcttcgacactgttcaacctcccttcttgaacgtctacatgccgaatcaagctcaattgctggactggtataccttcagctctgaaatggtcattgaatttgccaaagagcaaactgccatcatcagacaacatgccccctctcacgccgtcacaacaaatttcatggtcagctacacggactttgaccatttcaaattcaatcgtgaggtcggtcttgacttggcaactttcgacaactaccctctcgccggtgtttctgaaggcgctgagtaccttcgtactggtcttcctgatcttcaagctctgcaacatgcactttaccgcggtatcgctggctctgcatatggcgagaacaacggccccttcggtgtcatggagatgcaacctggagtgttgaactggaacacttaccgtgtgtctcctttggaaggcatggttcgtctttggactttggaaacatttgcctcaaagggtgacttggtcaattacttccgctggaggcaagtaccctatgcccaagagcaaactctttccggccttttcgtctccgacaacactccagacgaaggctttggagaaactcagactgtggcaggagaagatctgcccgcccttagacaagcgcttgagtcagaagagacaacagcagatgtggcactcatcttcgactacacatccgtctgggtctggagtatcgaaccctactcaggctcctactcacccctagacgttggattcgagaacgccggtctagcatatcttgatctggtctcgacattctacacctctctccgtcgtcttggactcaatgtcgacgtcgtttctcccgaccaagccatcagcggttacaaaatggtcgtcgtccctagtcttcccatcatccctgaagccttcaacacggcattgtcttcctacaatggcactgtagtccttggtcctcacaccggctcgcgcactcctgaattcgcttacccgccaggattgaacccctctgcaggcaccatccgcgataaattgcccatgaaagtcaccagagtggaaacacctcctacatacgcaaacagtggtgtttcttacgcaggcacgacctacaatatctcgctctgggaggaaaacatcatttgcactcgcgacaatgctaccagcaccgcatccatctcgtcaacctctgcacacagaaaaaacaaacctgccgcttgctcggcaaacaacttccactatttagctttcaacccaccagcagatctcttggtcagctatattggtgacgcggcggccaaggctggagtcaaggatgtatttggaagaagtgctagtaaggcgaatgatctgggggagaatttgagagtgcttgagagaggtggattggtgtgggcgtttaattatggtgctgagacgatcgagacgccgaaggtgaatgggagtgttgtgttgggaggaagcggtagtggtaatgggactgagattgagggggctggtgtcagagtgtggaagctgtaa

SEQ ID NO: 1932 - DNA, 1865 bp, Aureobasidium pullulans
atgtggtcaagatcatcaaaaagtcttctcgcgttgtccatcgccggcccagcgctgagcacacctattctgcctaggtacactaactcgaccagttctggcgttgtatgcaatggcactttctcccgcatatcagctcagacttgggtggacggcatgaatccaggatggaacttgggcaacactctggatggcatacctgacgaaggagattggggtaatccgcccgtggtaccctcgactttcgacgatgtgaagcaagctggcttcaagggcattcgacttccaggtaagacatccttagaaatgccctgatcaactctcagctcaccataatatcatcgaagtaacttgggcataccattttaccactgaagctcctgattatgatgtcgacccagcctggctccaacgagtatctgacgtcgtcgacatggttactgagcgtgacatgtatgtgcttgtcaacgttcatcacgactcatgggtatgggccgatgtcaccaaggctggggccaactatactcaaatagaggaaaaattctatcgcctttggtatcaaattggtactaagctggcatgcaagtcgagcttattggcttacgagcccatcaacgaaccacctggcacgacagctgcacatgctgccgagctcaaaaagcttgaagacttgttcttgaaggctatcaccgatgccggtggtttcaacccggaccgtgtggtaactctcaatggtctccaggaaaacagtgatctgacttctcaatatttcgttcgtccaaccaacatcaccaatccttgggctattcagtatcactactattcgccataccctttcatcttctctgcttggggtagcactatctggggttctgaggccgacaaagctgctctcgaagcagacatcgccaacattcgtaacaacttcaccgacgtgccgttgataattggtgaatgggctgcgtctccagtcgctaccgaaactgccgctcgctggagatactttgacttctttgtccgcacagctgccaagtataataccacgactgtactttgggacaatggcgcagacttcttggaccgcgcaaatcatgtctggcgtgatcagactgcaatcgacatttatatgtctgctgtcgcgggtgaagccaatgcacttcccgacagtaccactgatccgagcgctgccacccagttcaccagtgccgatctcttcgttcgtgtcggtcagaacgtgtcctcgcagacactaccttacatcttgccttccaatatctcgctgatttccatctcgggagccgatggcacagcactgactaaaggtagcgactactctgtttctggcgacgacatcacgttctcggcttctttcctgcgcacatactttacttcagcctccagtcctggctctgtcgccaatttgaccctcgacttttccagcggtgctgacttgaccttgaaccttgtcctctgggatacccccgtgttgagcagtacttcaagctcagtcgcagcagccaatggttccagcatttccataccaatccaatggaagggcatcaacaagcccgccactgtcaaagccgtgactgccaatggtacatacttggtcgacgacttcacctcctactacgggcctctacagaatgctagaacagtaagttaagaaggacagctgtggaaagaacagtcactgacaggggttacagacctacaactcgcagtggaactgggatactgacaatgtgatcattacggctgctgctgttagtgctgtacaagctttgggtcaagatgtcatcttcacgttcgagttttatcccagggtgcctggtaatgctgtcaactacacattgactgtctga

SEQ ID NO: 1933 - DNA, 1239 bp, Aureobasidium pullulans
atggtgaccatcaagtctctcatctcagtcttctccctcggtctgctgggcaccgctcaagcctacagtcgaggcgagtgccaataccctacgcaaaatcctcttcaaggttgtcctcaaggaactcttctggtcggtgcaggacagaaattcacttccatccaatccgctgtcctcagcattcccaacaacacggtaccctactatatcctcattcttcctggaaactacaccgaacaagtcaacgtcacacgccctggccctcttaccctgctggcccagaccaggtatcccaacgacaataccaggaactcagtcaacgtgatctggcacaatgctaccggaacagcaagcactggaagctacgacaacgcctacacttccaccctcaccatcgctccgactttcaacagtagttcgaccggcagtggaccaactggcaatcaagtgcccgcaggaacacccttcggcaacactgatttccgcgcttacaacttgaacttcatcaacgactatctaccctactccgccggcccttccctagctctaagcgtcagctacgcaaacgccggattctactactgtggattctacagctaccaagataccgtaagccttccccctgctcttcacccattccccctccaaacgaccctgtactgacaatcctcaaaggtatatatcggcaagttgggaaatgcatacatgtacaactccaccgtcgcgggccaaacggacttcctctatggcttcggcaccctatggattcaatcttcgcttctgtctctccgttcctgcggcggtggcataacggcttggaaaggcacgaatacaaccttcgtgaaccactatggcgtctatatccacgactccttcgtccgcgccgcaaactcctctctgaacattgtgggcaagtgcgcgctaggcagaccatggaatgcactgcacaggagtatattcgcaaatacctacctcgacgactcgattgaacctagtggatacatcaaatggagtgccactgatccaagagtcaatggcaacactacaatggcggagtacaaggattatggacccggatggaatgcaacaggcagagcggcaggaaatgttaccattgtcatgacggatgcggagtatgctccttacagcactttggaaaaagtgttccaggagccttttacgggcaaatttgggaatacgaaatggattgataggaagcctgttgtgcatgggaattga

SEQ ID NO: 1934 - DNA, 1435 bp, Aureobasidium pullulans
atgaggcttttttcttgccttcttgccgccgccacggccatcacctctgctgtcgcctacgacattcctgacggtgcatctatctctgtcccatggaggcatacaggacgtcctggattcggctggggcaaccaaaaagacaaatggggtaacaagatcgaggacgaccgccgtaagatcactattcgtgcgtctgaagacgacaccgacgacatctcagcagatttcgtttgggctctggaacaagcacagaacggaggattggtacatctcgaggaaggtaagacctacatcattggcaagaagatcgatcttcctgtgctcaatgatgtatatgtcaagcttgatggtaccctgaaggtgagttattcgcactattcatcgagagcgatctgacacatgcagttcaccgatgacgttgcgtattggcaaagcaactacttctactacccttttcaaaagagtatcactttcatggtctggagtggcaaagacatccgcatctacggcaagggaacgatggacggcaatggtcaagcatggtacaatggctttgctggtcgcgagatcttggtgatcatctactgcgtgtttctccccaatgatccaagctaatagtgataaggactccaccaacacatactaccgtcccattctcttcttgaccgacaatgccaccaatgttgacgttgagggtatcaccttcttgaacagtccctgctggaccactttccttgttcgcaccaaggacgtctcttttgacaatgtatacattgaggctttcagcaacaacgcctccgcgctccctaagaacactgatggcttcgactcgctcaacgttgatggtctgactgtcacaaatacacgtgtcaatgtcggcgatgactgcttctcgcctaaacccaacaccaccaacatatacgttgagaatctttggtgcaacggaacacatggtgtctccatgggctcgattggccaatatcctggcgtcaaggactacatctcaaacgcctaccttaagaacatcaccctcctgaacggccaaaacggcgccagactgaaggcctgggcaggtccaacagcaggttacggctacatcgacaacatcacttacgaaaacgtgcacattgagaacaccgacgcacctatcgtcctcgatcagtgttacttcaacatcaacgagaccacctgtgctgcctacccttccaacgtcaatatcaccaacatcaaattcatcaactttactggttcatcatcgggcaaggatggtcgtgttgtcgcggacttgacttgttcgcccggtgctacttgcagtgagatccttctcgaggatatcaacctgactagtcctaatggtacggcggagattgtgtgtaacaatatccagggagatattggagttgattgtatctcggctgcggacgccgatgattga

SEQ ID NO: 1935 - DNA, 1089 bp, Aureobasidium pullulans
atgccatcaaacactctaagactactttgtgctttggcgcttacttcttgggcatctgctagccctgcagcgcttcctcgccaactgacctatcgcgactctgtaaactaccaattcaacccaacttctcgtaaccttgcagtctactatggcaaggcgcaaaacactgacagcccttccttgtacgatttgtgtaccaacagtaatgttgacatgatcgtcatgggattcgtacgccagctcaatggacctactgcccttccatcattcggatttaccagatattgcaagactccagccacagtcacggacaagactagagtttcttgtccggatatggcggccaacatcacgttctgtcagagtatgggcaagaaagtgctcatcagtctgggtggatcggtcagcaacttgactcttgacagtgtcagtgacgctcatgaagccgcgagcattctttggaacgtgtttggcgctggagccaactcaacagcgctgagaccatttggaaatgtagccatcgatggctttgatttcggtaagattggaaggctcgtttggagcggaaagcagcacgactaaccttccacagacttcgagtctggggctgacacaacttacatggataccctggcatcttccctacagtcttacttcagatcgtcatcgccagaacgctatatcagtgcagctccattgtgcgccaacaacacagtcctgccctacggtctctacgccaacgccaacttcgtctggcctcgcttctacaacgcaaaagcatgctgctttggtagcaaaggtttcaacaagtccgtcagcacctggtacaactacctgaactcgatcaacagcgacttgggcccaacctacccacgagtctatcttggtggactgagcttcaataacagtaactctgggtttatggagccggacgcttttgtcaatgctactttcactgggaggaggctcgttcagagcaatttcggtggtgtcagtttatgggaaggtacggatgggttggtcaccaagaacgctcaaggcagagacttcttgaacgtcactaaggctggtcttcttagagatatttga

SEQ ID NO: 1936 - DNA, 2669 bp, Aureobasidium pullulans
atgtacaacctgaagtctagcgtcgcggctcttgtcgtccttggacagggcattgctgctcaaaactcgtcttgggaccattctctttacactagcagtccaggtgtattccctagccgtatgtcaatatgaatacgatcccactcgcggtactgacaaacatagcaaacacaactggtatcggctgggaagatgctcttcagaaagcaaagtcatgggtcgcaaacttgaccttggaagagaaggtcggactcttgactggtgaacctaagggaccttgcattggtaagtttagccatagtatgatctttcattgtacttacatgaagcaggtaacattgcacctattccgcgtgtaggattccctggtctctgcttgcaggatggacccttgtcgattagacaggccacttttgcttcggtcttcccatcaggcctcactgcagcttcgtcctgggaccgtgacttaatccgtcaaagaggcgagtatcttggagccgagttcagagacaagggagcccatgtagctctcgcaccagtggtaaggaatcctcaagactaaccggttcgatacctgcaacactcatactgatgatacttttcactataggctggacctcttggtagatcggctgatgctggtcgcggatgggaaggattctctccggacccatatcttaccggtgtggcaatggaggagaccattgaagccttgcaggaggctggtgttcaggcttgcgcaaagcactggattggtaacgagcaggagactcagagaaaccccactctctcgcccacgaacaagacgatcgaggccgtctctgcaaacatcgatgataggactatgcacgagctctacatgtggcccttcgccaacgctgtcaaggctggtgtttcttcaatgatggtgagtcaaggcacacagtggcacctataagaagtactaacatatgtgcagtgttcttacaatcgtctcaactcttcatatgcctgtcaaaacagcaaagctctcaacggtcttctgaaggaagagcttggcttccaaggctatgtcatgtctgactgtaaggatcgttttgagctcgtttgtaggatgtgagctgaccagcaacacagggggtgctacccatgcaggtgtcgccaacatcgaagccggtatggatatggacatgcctggaacaattgctttcttccaagccggaacttcttactacggacaaaacctcaccaacgccgttaacaatggaactgtgcctgaatcaagaattgacgatgcagctcacagaatcatgactccctacttctttttgggtcaagatcaagacttccctctcattgatccttcctccggtcccatcaacattctcggtgttcagccttacctcgactctttccagtatggagaagcaaatgttgatgttcgtgccaaccacgcagatcttattagaaagcttggatcggcaggtaccatcctcttgaagaacaccaacaacgtcttgccactcaacaagccaaagaacattgcggtctttggcaatgacgctggtgacccggagaacggtctgtactctctttctttgactggaaatggcgattatgagtacggtcatcttgccgttggtggcggctcaggtactggtcgtcttacatatctgtcgactcctctggacgctctcaaggtccgtgccaagcaggatggtaccaacttgcagtggatcctcaacaacactcttctcgcaaacgccaacaccgctgccggatttggtgcaatttaccctcagcccgacacctgcatcgtcacgatcaagacctgggctgctgaaggcaacgacaaggctaacttgcttcctgactacaacggtactcaagttgttgaaaatgtcgccgcttggtgcaacaacaccatcgttgtgactcacacttccggacccattgtcatgccttgggctgatcaccctaacgtcactgccatcctcgccgcccatttcgctggccaggagagtggtaacagtttggtagatgtcttgtacggcgagtacaaccccagtggaaagcttccgtacaccatcgcctacaacgagtcggactatgctttcgctcgcatcaccaactccaccgagctgagactgaccgaggaccccaacgcatggcaggctgacttcaccgagggtctcctgatcgactaccgccactacgattactacaatctttccgtacagtacgagttcggatacggtctttcgtacaccaacttcagcatgtccgacgtcaaggttcaacgtcttgctccccagaacttgactgctcgtcccaccaatgctggcaccatgcccggtggcaaccccactctctatgataccctctacgagatcaccgtcaaggtcaagaacactggatccattgctggagacgcagttcctcagctctacctctctcaacctgtcaacccctctttcggtctcactcccgtccaagtccttagaggcttcgagaaggttgcactcggagccgggcagagcagaacagtgactttccctctccagcgccgtgatctcagtttctgggatgctgttcagcagcagtggatcattccttccggtaactttggtgtcagagctggattcagcagcagagatattcaggctacttctggcttcagtgctctgtaa

SEQ ID NO: 1937 - DNA, 1961 bp, Aureobasidium pullulans
atgcgtttttccctgcttcagattggtgccgcacttggcctggctgccagtgttggtgcttcttcatcgcccggccgcaatgtctttgaacgcgccgagaagttgacggcaaagtcacctattattgagaagagagagattggcaagcccttcgagcaccctagacttcagaagagagcttcgccctacctgaacaatgccactgagagtatgacactctcctccaggagaatttgtaggacacacactgaccacagtcacagagttctgggtcaacggatcagctattcccgatgtcaagttcgatgtaggcgagtcctacgctggtctcctgcccatcagtggtgctgccaatgagactcgcgagctttttttctggttcttcccctcgacaaaccccaacgccaccgaagaaatcgccatctggttcaacggtggtccaggttgcagttccctcagtggtctgttgacggagaacggccccttcacttgggaggctggtgagtaaaaaagaaggaggagagaatcgaagcaaaatgtgagctaacgattggacaggaactctggagcccgtacagaacccctacacctgggtgaacttgaccaacatgctttgggtacgtatcaagccatgacttccctgatcaagcacattctgactggttgtcccacaggtcgagcaacccgtcggtgttggcttctctcagggtgtacccaacatcaccaatgagatcgagctcggtcttgaattcgccggcttctacaagcagttcgttgacgcctttggtctccacaactggaaggtctacttgactggcgaatcttacgctggtttctacgtgtatgcctatcctccatgcctctgtccacttttatcgccttactgacttcactgccacagtccctacatcgccgacgctttcatctccctcgcagacactgtctactacaaccttcagggtatcgccatcaacgaccccatcatcggagacgagacggcccagcagcaggctgtcattgttccttacgtcgactactgggagaatgtcatctacctcaacgagactttcttgaagcagattcacgatcgcgccgaccagtgcaactacacgtcatacttggagaagtacctcactttccctcctcctcaggagcctttccctctcctccccgatccctatgagtccgacacctacgcatgcgacatgttcgacacggtgtatgaggccattctcctggtcaacccctgcttcaacatctaccacatcactgagtaagtcactttctaccaagtggatgcgacgatgctaactatttcactcaggacctgccctcacccatggtcagtccttggtggtgtcaacaccggcgactacattccctctggagaagtcgtctacttcaaccgtaccgatgttcagaaggccatcaacgcgcctgttggtaccaactggcaacagtgcaccaacgtcaacgtcttcggtggagccaccaacaaccgctcgctcagcgacaccagcaagggccccgctctcgatggcactctccagcgcgttattgagtacaccaacaacaccatcatcggttctggtaacctcgacatgctcctctccaccaacggtacccttgttgccattcaaggtgttgagtggaacggaaagagaggtcttcaggaataccccggcaaagaattcatcgttccttaccaccccgagtacaacggcggtgccctctccggagccggcaaggtcggatactacggaagcgaaagaggtcttaccttctacaccgctcaactcgccggtcacgaacttcctggctacgctcctggtgctgcttaccgctctattgagctcctccttggacgtattgactctctcgcctatgacggtgacttcaccactcaaactggcaacttcactggcaatggtacaatctatgcccagcagcagttgttttag

SEQ ID NO: 1938 - DNA, 1064 bp, Aureobasidium pullulans
atgaaggtccttctcacaggtggctctggctttgtcgcccaacattgtctcagattgctcttgaagcatgggtaagcacttccgatcacaaatacacacgtacatgtgctgaaaaggtactcctctactacagccacgacgtcgtcactacagtcagatcagcggagaaaggacaacaactactttctgcgaacccaggactgccgactacgaaactatcgtatgtcatcgtcaaagatatcgccgaacccaatgcattcgacaaagcaatcatttcctctcctcccttcgcagccgtccttcatacagcaagtcctttccactatgcagccacagacttcgagaatgatatgcttaagcctgctgtcaacggcactttgaacatcctcaatgccatcaaagcacacgctcctgaaatcaagaaagtggttgttacgagctccttcgctgctattatcaacatgcaatctccgccagaggtgtatgatgagagcatgtggaaccccatctcctgggagcaagcgcagaccaatggtgccacggcctatgtaggcagcaagaagttcgccgaaaaggcagcttgggatttcatggctgttgagaaaccagggtttgcgttggctactgttaacccagtattggtgtttggacctattatggagggcagtttgacctcgcttaatgcggtgaatacgtccaatgttgttttcagagatatgatacagggaaggatgaaagatggcattaccaacgggtcattctcatgggtggatgtccgggatgtggctgctatgcatgttgctgcacttgagaagtcggaagccgatggacagcgcttcatcgctgccgccggaagatattcaaacagcgagattgcttcaatcatcaagaagcatttcccaagtctgcaggataagcttccggagcacatcgaacttgagtcgagcaaggctgggtatggaatcgacaattccagtgcagagaaaattttgggggtcaaattcagagatttggcgcacgctgtggttgatactgtagactcgcttctcaaggtggaagcttag

SEQ ID NO: 1939 - DNA, 1042 bp, Aureobasidium pullulans
atgatcatcaaacctctcttgtcactggtcggcctcaccgcaccctccaagaacatatgggcgaacacaacgaatgtgtaagcaaactctacaggatcgggtcatgtagagcagggctaacattgcctttagcattgcattcggagactcttactcgtatgttctgggcacatcaggacgtcagaactacagtttcattggagattaccaaaatctcggattttcaagccaaacacttttgaacaacaagattgtccaaagtcaaaccagcacagcggaaggtggtccgaactggcttgagcacctcacaggctgtggagtcaatgctggcaccacctcacccttggactgcaacattcagctttgggacttcgcattcgctggggcggatattggaacacagtacactcctcgacacaagtacttcacagttccgcttgtgaaccaaactcaacagttccttacatacgcccaaccagctcttgccaacatcactactcctgaatctaccttggcttctttctggatcggcacaaacgacatcttcgacactgccacctccaccgtccctttcaagaccgtctacgcgaacatgatcgctactctcttcgcctcgatgcaaaccatccatgacgctggctaccgcaacttcctcgtcatgaacctagctcctctcgacaagactcccaagaacgtcctcaagcgccgcccactaccaaacaccaacatggttaaccaattcaactccatcctcgccaaccaggccgccgcattccagaagaagaacgcagactccaatgttgcccttttcgacaccaacaccttcctcaacggtgtcctgaagaaccccggacagtatggtatcaagaacactaccggattttgcgcagcttggaaccagcctaatgttgtcgccaacgctggacaatatggttgtcagcccatggatgagtacttctggttcaacactgcgcatttgaccacgcatgttcacgagatcttggcaacagaggtgcagaagttcttgagtggaagctcatga

SEQ ID NO: 1940 - DNA, 1433 bp, Aureobasidium pullulans
atgttgttccaacctctcattgctgcgactcttttgagcgccattacagccgttgcttcaccgacatggtctgcacaacaagagtataccaagtctttaccaaagagtgtctccaagcatcaaggaactcgacccaagaccgacatttctcccaagaagcctttcaagccattcccctcttctccttcccggaacaaggtctgctatgttagctcccacaacgacggcgtaaccgacgactcggagtacatcctttctgccatcaacaagtgcaacaatggtggccacgtcatcttttctcaaggccagaaatacgtgattggcacagcgttgaacctgacaaacctcaaccacatcgaccttgatatccaaggttatgttcaattcaccaacgacaccgattattggcaagcgaatgcgttcaagcaggtcttccaaaacgccacgaccttcttccagcttggcggcaacgacgtcaacgtttacggcggcggcttcctcgacggcaacggccaagtttggtatgatctgtatgcccagaacatctacgttctgagacctattctcttcggtgctgttggtctgcacaactcaaccatccagaacttgaacttccgctacagccctcagtactacaattgggttgccaacagcaccaacgtcctgttctcgaacatctccatctctggatcgagtcagagcaagaacccggctaagaatactgtgagtctcgcatgtcctgaaaggtctgccttctcttactgacgtcattataggatggatgggacacttaccgtagcgacaacatcgttatccagaactcggtcatcaacaatggcgacgattgtgtctctttcaagcctaacagcaccaacatcctggttcaaggcttacaatgcaacggcagccacggcatcagtgttggctctttgggacaataccctaccgagaccgacatcgtcgagaacgtcctcgtctacaacatctccatgtccaacgcaagcgatggtgctcgcatcaaggtctggcctggctcacccgccgctctttccggcgacctccaaggcggtggcggcaagggccgtgtcaacaacataacttacgacaccatgtccatcaacaacgtcgactatgctattgaggtcacccagtgctacggccagaagaacctcaccgcttgcaacgagttcccttccaagttgaccatctccaacatcgtcatgaagaatattcatggcaccaccagctccaagtacaatcccatctctggatatgttgtctgcagtagcccaagcgtttgcaccaacatcaagctgtcagacatcaacgtcagcagcccgaacggcacggtgaacgagttttcttgcggcgacgtggatgagagtcttctgcagggcattcagtgcactaccatcaacaagggttacaactag

SEQ ID NO: 1941 - DNA, 3123 bp, Aureobasidium pullulans
atgattcccctacgaccgctattatcgttactgtccgttgccagcacgacactggcaattggtcagaatgccactgttgctttcaatgcctcagctggatctctcagcctggcttctggaggctcttccgtccaaatcatggcagactccaacgactggcctgctgcgctgaaagccgctcatgacttgtctcaggactttggccgagtcaccggcacgaacggatctatgattttatcaaacacctccgatacctctggcgtaccggcctataacgctggctcgtacttcagcggcaacccgaacaatgcctcgatgatcttcaacatcactggcttgaccacgttcgcaaccactgcccctggagcaaaaggaggtgtcatcatcgcaggcacgattggaaactcttcactcatcgacaccttgattcaaagcggcaagattgatgtgtccgccatcaatggcacatgggaggccttcacctccaccgtggtgtcgaacccgatggaaggcgtagatgtcgctttagtcattgctggcagcgacagaagaggaactgtctatggactttacgatgtttctgagcaaattggtgtttcgccatggtacttctgggccgattcgcctccccacaagcatgattcgatctatgccatgaatattaccaaaattcagccttctccgtctgtcaagtatagaggtttcttcatcaacgacgaagcaccagcccttactggatacgtcaacgagaagttcggcttcaatgagtacggctcgaactacggtgcagacttctaccacaccatgttcgaattgcttcttcgcctcagagccaactacctgtggccagctcagtggaactctatgttcaatgttgacgacccacgaagccagaacatggctgacgcatacggtattgtcatgggtacctctcacactgagcctatgatgcgctcgaccaaggaatggagcgagtttggtaacggaacttggtcctgggcaaccaacaacgcctccatctacccattctttgtcgagggtgctgagagacttcgtccttacgagggtgtcatcaccatgggcatgcgcggctcgggcgataccgcactgtcggctggtatcgagactcaactcctcgaaaatgtggtttctgcccaaaatgatattctcgcacaagtctttggcaacgccagtgcctcagacccaaacagtatcggaaagctatggtgtttatataaagaggttcaaggctactacgaagccggcatgactgtacctgaggacataactctactctggacagacgataattggggcaacattcgaagactgccagtagggaacgagacatccagaattggaggcgctggagtctactaccacttcgactacgtcggtgacccaagagattacaaatggatcaacactgtcctcaatcagaagacatgggagcagatgcacctcgcttatgagagagaggccagaaacatttgggttgtcaacgtgggagacctcaagcctcttgaactacctatctcacacttcttcgatcttgcatacgatatcaatcgttgggacaaagacagcacttccgagtggctcgaactttgggcagcccgtgagtttggccctgaagtagcagcacagaccggagctctcatgaacacatactccctgcttgctggacgcagaaagttcgaggaggtcgatccaaacactttcagctggatcaactacaacgaggccaacaatgttctggccgagtggactgctatccaaaagactgcccaaagcattctcgacaaacttccagcagccacacagcccgctttcttcgagatggtttaccatcctgttacagctgctcgcacgtactacgacatcatgatctcggccgccaaaaacaacgtctacgcccaacaaggacgtactagcaccaatgccatcgctcaacacgtgcagaaccagttcacttacgatcaccagctctcgaagtcctacaaccaattgctaggcggaaagtggaatcacatgatggaccagacacacatcggctaccagtactggcaacaacccatgagacaagctctgcctcctctgcagtacgtgcagatggccgagcgtgcattgactggtgatttgggcatcgccgttgagggttccaatgcaacagttccaggtgatgacagattccactctctgtcgtccatgactctgtatcttctaactcttgacccttacggacctgcccgatggatcgatgtgttccacagcggcactcagaaagtcacctggaacgtgcaatctagcgtcccatacctaaacttcactcaaaagaccggcacattgtctcccaacggcactactgatactcgcatctgggtctctgttgactggtcgaaggtcaagcctggtgctatcaactcgaccaccatcaacatcacctcgagcactgactacggtactcaatacagtgtgcccaaggttgtaatttcgtacaacaacaccgctgctccttcgaacttcaccggcttcgtggagtctgaccgtaccgtttcgatcgaagcagagcactattcatccatctccaacggtggaaactcttcagtctcgtacgaggtcattcctggtctttcgcgtaccctttctggtgttactctattccctgttactgcagactcgctcaccccagccaccgctcctgctcttgagtatgacttctacactttctcgaacttgagctccggagtcctcatggaccagaacatgggcaccagctcaaagtatacaccaaacactgtcaatgttacactgttcctcggcacttctctcaacacaataccagaccgccctctccgctatgccgttcaagtcgacgaccaacagccccaggcacgtcaatacatcttcgaccaacctcaaggtgccaaccccactggttggttgaccgctgtcgcagatgtgatttggtacaacacgaccacttggaactactcgggccctggcgcgcataagctgaagatctgggagcttgagcctggtgttgtgctgcaaaaggtagttgtcgatctcggtggtgtgaggaagagttacttgggtcctcctgagagccacagagtttaa

SEQ ID NO: 1942 - DNA, 1650 bp, Aureobasidium pullulans
atgcgtgtttccactgtggcatccgctgccctgatcgcaggttcgactcaggtgcaagctgctcccactttcggcttggtcttcggtcttctcaagggcatcactactgccgtccacaccgatatcaaccttcttcttggctctctcggcctcggcttccagacaaatgccaacatccacggccaggctctcggctatggtggtattggatgccccttctcctacaacaaccaggctggcgtctctgtgagtgccggtctgcacggtggtctctctcacaacatcggttggtctgccggtattgagggccgtaacttcatcaactggaaaaacttcaagggcaatggtgtcaccctcagcggatggctcgttcaggacaagactctcgacattgactggtggaacaagtacggttccgactgcgatgatgagtggtctctgactgccaagctcggcggtcaagccggtgccgtgctcgaggctcgctatgcctcatacatcactaccagctacatcgactcgctcgccgctgctggtatcaaccttctcagaatccctacccactactctgcttggatctccgttcccggctcgggtctttaccacggtaaccagcaagcttacctcaagactatctgcgactatgccatccagcgccacggtatgcacatcgtcatcggtcttgactccctccctggtggtgtcaacggccttgccactggtgagcgcatcggtgccacggcttggttcaactctgccgagaacctttcctactccttcaaggccatcgatgccatcctcggcttcatttccgccaccggtcacgtcaacgccttcactgtctctcccattaacgagccctgtgatgtcactgccaacttcgccactactggtggtctttcccttcaggctacaaacttcatcaacacctacgttcagggtgtcttgaagaagatcgctaagctcgatgctcgtattccttgcatgctccaggacggtttcctcggccacgactactgggctcctttcttctctgctaacgccaaccttgtcatcgacagccacgtctctttcgctggtgccgtcggcgccggaatctctgctggagtttccgcaggtgccaacgtaggtgcaggtgtgaatgcaggcgtcaacgcaggtgtaaatgcaggagtttcggcaggagccggcttgggcgcaggaatctcaggtggtgttcacggaggtctcggtcttggtctcggatctagcatccacagcggactcggagctggtattcacggtggtattggtgccggagccgctgtttccgtcaagggcagccttcccaagctttccgcccacctgatcgcccccagcgtctgcaagcaggcctctctcctcaagggtaccggcaagttccccgtcttcgttggcagctacggtatccaggcccaggacggcaacaccctctctggccgcaagaccgtctacaacactcagaagtacgcctacgcccaacagctttccggtggttctttctgccacgccaaggcatactccaacagcgtctccgtctctggtgagggctgtgcttccgactacaactccttccagggcttgatgtctgccggtgtcgccaccaaaaataccgagtcttgctactgctag

SEQ ID NO: 1943 - DNA, 1236 bp, Aureobasidium pullulans
atgcacattccactgcttctcctacccgtcttgggtgctctcacccaagccagcccaatcatctcacgagcatcgtcatggccaaacgcacccttcaccacctcaggccgtgacatcaagaacaatctcaacgagacagtcacctatgccggagtcaactggcccggtgcagcagacaccatgatccccgaaggcctccaataccaatccgtcagcacaatcatgacgaagatcaaagacctcggcatgaatgtgatccgcctaacctacgccatcgaaatgatcgacgacatctatgaaaacgcagacacaagtctcaaaaccgccttcatccaagcactaggcgaaacaaatggcacaaaggttttgaaccaagtgctgatcagcaacccttcattcaccgaaaacaccactcgcttggaggtgtttgacgccatcgccgcagaagcacatgcccaacaaatctacgtgcatctcgacaaccacgtgtccaagggaatatggtgctgcggccacgatgacggaaacgcctggttcggggatacctacttcaacgttacctcctggaagcgcggtctagctttcatggcctcccacgcctcttcctggccagcattcacttcaatctccctgcgcaatgaactacgcaccaccacaaacggcacaggcgacaattgggtgtcttggtacgaaaacatgatcccagccgccgatggaatatacgccgccaacgaccaaccattaatcttcttctccggtttgaattacgacacacagttgggcacgatagtgaatggcaatgacatcggcaacggtaccgaattctcgatacacgatcacgcctacgcggacaaaataatctgggaactgcacaactatgcaaacagcgccaccagttgcggaagcatcagaagcagtttgagaaatcaaggatacaacgccatggaagggggaaatgtgacaaacaaggcgccagtgctgttgacggaattcgggtttgatcagaatactgcaagtcagagtgtttatgcgcagtgtatcaaggagtacttgacgggattgcctggaggtcctggtggttggatgcaatgggttatttcgggtagttattatattcgtcagggtgagcaggataaagatgagacttggggattgttgaatcatgattggtctgagtggcgcaaccagacggcagctgactacacaaagagctttgtagatgctactcttgtatag

SEQ ID NO: 1944 - DNA, 1829 bp, Aureobasidium pullulans
atgggataccgttcgtgagtgcgaggtccgtgaaagaactttaggctaaacgaagtcctctcttacgtgcattttcttgctcgcagcatgcacctacaggtatgagatcaatagagaagatgcatactgtgccgtggggccgtgaatgatcagtaagtacagacacggttgcggggtgagcaagcggggagtcctgtatactcatccgtactggtccgcaaatgctttctttgtataccgagtctctatacccggtgtgtgttaactactagcatacaggcaaattatagtgtagtactccgggtcgatgagaacatgcagtccatcacgaggctggtcaacagagagatgaggggtcaccaacatatttttgaatgactgaggatataagaaatggccttgaccactgaccgagacttaccatccaaggctcccggcatctccagagcaaacactcgatatgttctcctctctgttatccgtcgtcacctcagcattgctggccaccactgctgtggcatggcccaacgtaccctcagctccattcgtccaaaacgtgaccgtcttctctcccccagccaactggccaaataaaggtggcagctatgcccgctccgtcctcctcaaccagaactgcgaaaagggaaatcctaccatcctcgccaccgccgcctatcaaccaccagacggtcagtatctcatcatccacaagagcacagactttggtgccacttggtcggagctctccaaggcatacttcaatggcaatgctagtttgtctggcggtatcattcttcagcctttcttgtatgagcttgctcagccgtttggcaagtatcagcctggtacgatcttgttgtctgcaaattatatcccgggagacttttctagtaccaatattcagttgtatgctagtacggacaaggggtgagtatttcatgagtcacaagagtttccggtctgacatttgtgtagtgcttcttgggagtatgtctccaccgtagcggccggtggtccgccaaacacagataacggtgcgccgtgtgtatgggagccctttcttctggcctacagcaaccaactcaacgtatactactccgatcagcgcgatcccgcatacggtcagaagctcgctcatcaatccagtggtgacctcgtctcctggggcgatgtcatcaacgatgttgcctatgcaaactacacacaaagacccggaatgattaccgtagcacaaatcggcaatggaaagtggatgtgctcttacgaagtcgggctctggacagatcccgttactggcagcaacgacagtgcaccctatgctacccactacaagattgcagactcgcctctcgattttggcccagtcggcgacagcatcttgaagactcctgagggcatctccagtgcaggtccgtataccgtttggactccagctggtggcccttctggcacaatcgttgtgagcgattcgtcttacgatcagttcttcctcaacacacagaacggcgctcctggtgcgtggaagaatgtcagcagccaaggtcatggtgttggctataccagatccctgtcggtgttgtcagggaatggtggaaagactgttcaggtcctcaatggtggcatgtatggatcgaacatgacgctgtttagtgccggcgacttcatcgttcctggaccggccggtcatggtcctggtgcttctggcttcccagcctgcaatcataacagcggcggatacggtgtgtattgtgtatcgttctctgtacaagaaacatgctaatgctttctccacaggtcacggttggggatggggaagcccttggtggtaa

SEQ ID NO: 1945 - DNA, 1052 bp, Aureobasidium pullulans
atgttcttctcaaagctgggacttttggtcctcagtggtgcatctgctgttctcggtgcttcctactccaaccctctggagcccaaggatggcggtgatccttccatcgtctggtacgatggctactggtactttactgcaaccaactaccgcgacatcagcgtcagacgcgcaacaacgctcgatggactcaagactgctctgccaaagacagtatgggcacctagtgcagaattccctactcgccaatgcaacatctgggcaccagagctgcacatcgtagacggacagtaagctatacaccagactcagaaacgacatgtcaaaccttccgctaacacaacaccagatggcacatctacttctctgccggtggctgcggcgatggctcgatccaacaatcccaagtccttcgcggtggcgagtctccctgggacaatttcgactttcacggcactgtcaacgcacccgcctggtcaatcgacggcacacccctaaccataaacggtcaaaactacttcgtctactcctgcttccgctccgacactggcgaaaacctacaatccctctgcatcggcaaaaacagcgatattctcaccatcggcgaagaacacctcctcgcctccccaaccgaagcctgggaacgcaatggccaaatgcccgttaacgaaggtccattcgccctttacacgaagaaccgcacattcctctcctactctggctctttctgctgggatccttcgtattcgctcggtttactcgaatatgtaggcggtgatccattggagcaaagtagttgggtaaaaactggtccgcatttcagccaggcgaatggcatgtatagtactggacataacagtttcttcgccagtcctgatggtacggagacatggatggcgtatcattcttctcctaaccctgctgggagttgtggggataggtattcgaatgcgaagaagattgatttcgaggctgatggatttccgatccttggcgctcctgttgctgaaggggaggttttggctggtcctgctggtgagccggctgcttag

SEQ ID NO: 1946 - DNA, 1572 bp, Aureobasidium pullulans
atgaagtctgtcgtcggccacgcgttagcttggctacaagcgcctttggccccatctagtcttgagaatgctccaacccgatgctcagcagacgtcctggcgaagccggatctctttggtgctgagataatcaacatctctgctcacgaggtcatcggacactcgaccattcggacgtccgcactggaggctacagccagcaatggttctagcttggacttctgcaatgtcactgtcacctacactcatccagggcaacacgataccatccaagtgaccgtctggctcccacttgagaactggaatggcagatacctagccgtcggcggtggaggctggatcaccggtctaccctacctgagcccagctcttgaattgggctatgccgcagccagcaccaacggtggacatggtatcgagcgatccgcagcatcctgggctctgaccagtcccggaaacgtgaattggaacctactacaggattttgcatatagagctctcgacgacttggctgttgtcggtaaagccatcacaacattgttctatggaactgcccctaagtactcttattggaatggatgctcgactggtggtagacagggtcttatgcttgctcaacgctctcctaagcgatttgacggtattgttgctgcggcacctgcgattgactggcctacttttgtgatttcggctttctgggcccagcagaggatgaatagacttaacgcttacccgtctacgtgtgagctcaatggctttagagctgctgccgtcgaggcatgtgatgagctggatggacttcaagatggtatcatcggggcacccggcctctgtgacttcgatccccatactgccgtgggcagaacaatcgagtgtgatggtgtcaagcagatactcacatctgaaggtgccgccatcgcccaagcagcttggacaggacctatcaatgctgatggcaaagcttcctggtttggcgtcaactacgatgcaattctcagatcagcagccgatgccatcgtcacgcgaagcgacagcatgcaaggcagaaacccgaccattccagaagaatggatcagtctctttgtcaagaaagacccatcctacgatccagcaaacatgacagacgcagaattcttttctgtactcaaggcctctcagcgcgagtatgattcgatcatcggtaccaattggcctgatctctcccaatttcgcgatgcgggtggaaagatgatcagttggcatggccttgctgatgatcgtataccgcctaatggcacttctcactactatgacagagtcctggcggaaacttcgaatgtctcggacttctataggtactttgaagcccctggtgttggacactgtgctgaaggtgctggagcggtgcctaatgctcttgcggatctagtgaaatgggtcgaggagggtattgtacccgacacccttaaagccacaggtcaaaatggagatagcactgtcagagagctgtgtcagtatcctctggtgcagcgctatcttggaggtgatcccaaggttgcatcttcatttaagtgtgcggctagctttgcttga

SEQ ID NO: 1947 - DNA, 1131 bp, Aureobasidium pullulans
atgtcttcctgcagggccctccgtattctggggcagagtttatctttgctcgctattctatctcctctgtcagtcgccgccgcgtccaaggatgagttcaagacgatgtgtgccgcctttggcgactcgtctgcagcccagttcgctggcgcaagttccgacactggcaaatacctgtatggctcgaaccagtggggttgggacgacagcggtgctcagtgcatgactgtgagtattcgccatggtatgatcgtgtgacacgcaactgaccgagattgtgtgacaggtcggactggacgactctgacgatgctgcttcgttcaatgtaacatggtcgtggacggaacgcgacgtctgggtacgaagaaactcccagctcttgattgtttacaccagcttactgactcataacaacaggtccactcgtaccccaatgtcggtcttgagtctgtacagctgcccagcagactggacaacgtcaagtccttcaacgtcagcgccgcctgggacatgtacccttcagcccaacccgatgccgtcaacaagaccgaagctctcatggccatcggcaccaaggccgatattgcgctcgacatgttcatcgacagcaacaacgtcactgccatgaacgcttccgccgccgctttcgaagtcatggtctggtcggctgtctggggtggtgtcgcccccatcggataccagaccttcaaccgcgccgacgctcccaagtacactcttgctggaatcgaatacgctctttactctggcttcaaccagcagggccagaagcaggctgtcttctcttgggtccctgctgagaaccagaacggcatcgatgccaacctctgggagcttgtcacctaccttgtcaacgccggtaaccttaccgccgacatgtacctcggtctgatccagttcggcactgagactgtccacgccactcagaatgtcactttcgagatgcaaaaggctcagatggacctcgcggttgtcagtcaaaagcccaccaccaccaagggatctcctcccgccaccgctggcgcatccaagggtgctgcattccacgtcgcaccgactggattcgccctccccgcagctgccatgggcattgctgctgccgtccttctctaa

SEQ ID NO: 1948 - DNA, 1856 bp, Aureobasidium pullulans
atgaagggtatcgcaggcctcacactcctgccgctgctggcagctgcaaagcctgtcttcaaggcagacaccttgagccaccagagcatcgacaacgatgccgctcctctcatctcatctgtcgatgctgagaccatccccgactcatacttgattgctttcaaggaccacgtcgaccaccgtgacgccgccgctcaccacaactgggtgcaggacatccacgagtcgacccttaacaccaagctcgagctccgcaagagatcgcaggctccctttgtcgacactgtctttgacggtctcaagcacacatacaacatggccggcctcaagggctactcaggtcactttgacgaggatgtcattgacaagatccgcaagcaccccgatgtaagtactgcacacgatctcttcattctaccctcaaaatctctacgatcttggttggagacaccttggaaacagtgtttccagtcgtttgcctcaatcctgtggcgacttctaagctgctgcctgaataccctcgagtcctccgaccccagagagcttcgctgacacattcgcctccaggttgcctttgtcgagaaggaccaaattatgcacactcttgccaagtccgaggaccccgccgtcgagaagggcgctccctggggtcttgctcgtatctcgcaccgcgacagcttgacctttggcacattcaacaagtacctctactcatctgacggtggtgagggcgttgatgtctacgttattgacaccggcaccaatgttgaccacgtcgacttcgagggccgtgccaagtggggcaagaccatcccccagggtgacgaagacaaggacggcaacggccacggcactcactgctctggtaccgtcgctggcaagaagtacggtgttgccaagaaggcccacgtcaaggccgtcaaggtcctccgctccaacggctctggctccatgtccgacgttgtcaagggtgtcgagtatgctgctgagtcccacattgaggaggtcgagaaggccaagaagggcaagagaaagggcttcaagggcagcactgccaacatgagtctgggtggtggcaagtctgctctcctcgaccaggctgttaacgctgctgtcgatgccggtattcactttgctgttgctgccggtaacgacaacgccgactcttgcagatactctcccgccgccgccgagaaggccgtcaccgtcggtgcctccactcttgctgacgagcgtgcttacttctccaacttcggcaagtgcaacgacatcttcgcccctggcctcaacatcctttcgacctggatcggcagtgagactgctaccaacgtcatctccggtacctcgatggcctctccccacatcgctggccttctcgcctaccttctctccctccagccctccaagaactctgcctacgctgtcgctgagatcacccccaagaagctgaaggccgaccttctgtccatcgccactgtcggtgctcttgaggatgttccctcagacactgccaacgtaagtcacatgtctaatttctaattcctgtacactatactaacttgaatcagatcctcgcctggaacggtggtggttccgccaactacaccgaggtcatctccgctggtggctacaaggtcaagaactctcagcgcgagtacggtcttgaggagctcaaggctgtcaccaagaccgacttcgcccacgatgcctacaagaaggttcaggagatggacgcttcgaccatccgtgaagacatgagagagtcgtttgaggccgctcgcaaggagattggcagactcactgccaagctcgagtctgagattgatgagttcctcgtcaactccaagatggagtaa

SEQ ID NO: 1949 - DNA, 1152 bp, Aureobasidium pullulans
atgaagtttgcctcagctgttcttttggccctcagtgctgtttctactgcactcgcggcttcattcaccaaccctttgagagccaaagatggatccgaccctttcatcgtgtactctggcgacggatactactacctcttgacgactgaatggaccaacattcaagtcacaagatccaagactcttggtggtctcaagactggcgagacgaaggttgtctggcaagacagcactgcctctcgttgttgcaacggtacgtgagccaagggcactaccacggtgcaggcagccacttttaaaacatactgactgatgcgtctgcagtctgggcacccgaggtacactggattaacaacgcgtggtacatatactacagcgcttcgaacaaggatgatcttggtacccagcgcatccatgtgcttaagggtgagaaactctctattacagatacgacagcaaaagactaaccaggcgctcaggcggatctgccatctttgatacatacacttacgctggccaactcttcaacgaatggagcatcgatggtaccgtccttcgcttctctgataagaactactttgtctactcctgccagcgcaccaacctccaatcactctgcattgctccaatgaactcaccaacctccgtcggaaccccaaagaccttgtcacaacccactcttgcatgggagaagattggcgagttccctgtcaacgaagggcctgctgcgctctatcatgggggaaagacgttcttgacatattcggcaagttactgctggactagctcttaccagctcggtcttttgacctacaagggtagtggagaccccactttgtcagcaagctggaccaaaagtggtcctgttttcagctctgccaacggaaactatggtaccggacacaacgggtgagtttacgagagagaatctagctttggttctaacaaaactgactggctttcagattcttcaacagccccgatggaaaagaggtgtggaacgtttaccacgctactgccaactctgctggtgcatgtgatggaaacagatatactgaggctcaaagggtcgactggaactctgatggaagccccaacttcggcaaggctgtcaagctcggcaccactctcaatggcccctctggcgagtag

SEQ ID NO: 1950 - DNA, 786 bp, Aureobasidium pullulans
atgaagtccttcttcattgcctgcctcgctgctaccagcactcttgctgccccccttgctgttcctcagtttggtggtttccctagctttggtggtggcttcggcggcggctttggcggcagcaccaagaacgatgtcaccagcggtgtttgcaagcccgtgacctacatctttgcccgtggaaccacagagctcggtaatatgggctctactgttggtcctgccctcgagaaggccctcgagtcggcctttggtgccaacaatgttgctactcaagggtaagtttgaacttccaaaataatccgagtcacgcctaacaattaaaacagagtaacttacccggctgatgtcgctggtgccatcagtggtgctctcaaccctggctctgctcagggcgctcgtactatggctagcttgacccagcaagccctgtctaagtgccccgacaccaaggtcatcctcgccggatactctcaaggtgccgaacaggttcacggcgctctccagaaccttcagaacggacaagttgctgtgagtctcatatcgaaactcctttcgtgtttggatagttgctgatgatcaccacaggtcgctcttaccttcggtgacccgctccagagaatgcctttcagaaacatcgactctggccgcaccaagatctactgcaacctcggcgacggtgtttgcgctggtgccttcatcatctctgctgctcacttgtcttacgccactcaggatgccactcctgccgctcagttcgccaagggtgtcattggcaacatctaa

SEQ ID NO: 1951 - DNA, 1189 bp, Aureobasidium pullulans
atgaagttggctacttctctgatcggagctttcgttgcacttgctcaagttgtcacctctgaagctgtggtgggcaaggccgacggttttgcatacggcgtcatcggcggtgcacatgcttcgcctgattaccctgccgacattgaagagctcaagtctatgcttaccgacgccacccctcgtgtgattgttctcaagaagacttacgactttactcaatccgagggcaccatcgtcggcaatgtttgcttgtcgtggggagatggccactcttgccagcagatcatccaagacgattgtggcgataccccgtcgatgactgcgaagtggtggaaggctcctactcaacctattgacgttgcctcccataagaccattctcggcgttggcaacaagggtgtcatcagaggcaagggcttgagattccgcggtggcgctagcaacatcatcgtgcagaacattcaagtgtctgatctcaacaacaagtatgtttggggaggcgatgccattggctttgatggagccgatttgatttgggttgaccatgttactgtaagtcaatgactcttttccttttcgaatcaaaactgattttgtttagacacacaaccctggccgccaacactacgtcttcggcttcaatcccagtactcgtgtcactctttcaaacaactacatcaacggcaactcaacatactctaccagctgcgacaactaccactactggaacttcgagatggttggcaccgacgaccagatcaccatgaagaacaactacatgtaccgcacggctggccgcgcacctgctctcagcggtggtactctccttcacgccgtcaacaacgtctggtccgacaacggtggccacttgcttgaaggtggtgactctaaagctcgtggtatcttcgaaggcaatgtgttcaccgacatcaattcgatggtcgcagactacgcaggtagattgttcggaactcctgctggaagtgagagcaagtgcaagtccgctctcggtcgctcttgccagaccaactcttacaagcagtcttcaggaagcttggactcttacaccgatacttccttctttggcgacttctctggtcttcacatcgctagtgctggctctgcggctcaagccgcttccagtgtacctcagaatgctggagctggtatcatcaatgtcggagcttag

SEQ ID NO: 1952 - DNA, 1275 bp, Aureobasidium pullulans
atgcacttctcttctctcgtcgcagccgccgccattggtggtgctgccatcgtttctgctgctcccgcagcctcgcccatcgacaagcgcgccactacctgcaccttctcaggctccagcggtgctgcctctgccacaaagtccaaggctgcttgcgccaccatcgttctcaacaacgttgctgttcctgccggcactaccctcgacctcactggattgaccactggcacccacgtcatcttcgagggtaccaccacctttggctacaaggagtgggaaggccccctcgtcagcgtctccggtacttcgatcaccgttactggtgcttccggcagtgtcctcgacggtgatggtgctcgctggtgggacggcaagggcagcaacggcggcaagaccaagcccaagttcttctacgcccacagcttgaccacttcttccatgtaagcacactttgctgcaaactccaatcatgcccaatgctaatcaatgtaatagcaatggtcttacgatcaagaactcgcctgtccagaccttctccatcaacggagccaagaccttgaccatggacaagatcaccatcgatggctcagccggtgacagcctcggtcacaacaccgatgccttcgatatcggttcatcgaccggcgttactatcacgaatgctgttgttcacaaccaagatgactgtgttgctatcaactctggaacaagcatcaccttctccggtggttcctgcactggtggtcacggtctctccgtcggttctgtcggcggccgctctgacaacactgtcagcgacgtccacttcaccaacaacaaggtcatcaacagcgataatggactccgcatcaagactgtctccggtgcaaccggcaaggtggtaagtacaaaattcgcaatcgtgcactcaagaacgtgagactaacatcatactcagtcaaacgtcaactactcgggtaacaccctctccggcatcaggaaatagtaagatcgctactggccatgtcgtctgctcgtcactaactctttcctagcggtattgtcattgagcaggactacgagaacggctcccctaccggcaagcctaccaacggcgtcccaatcaccggcttgaccatgagcaagaacaccggtaccgtcaccagctccgccaccgatatctacatcctctgtgcctccggtgcctgctccggctggacctggtccggcaactccatcaccggtggcaagaagtccaccagctgctccaacgtccccagccctgcttcttgctag

SEQ ID NO: 1953 - DNA, 873 bp, Aureobasidium pullulans
atgaaattctctaccacctttgtcacctgcctggcgttggccagtggtgtgaaacccgctcctgttgctactcaacgcaatggctcccacggtgcacgcatgtctgctcttgctatgagcgaaaaaggtgatgctgttaatgatagaccgagttggagatcttcaaactggtctggcggtgttctccagggttccgacttcaggacagtcaccggaactttcacaattccgaatataaccatgttgtatcctggagagcccacaaacagaacacattcggtcgccgtttgggtgggcatagatggcatacatgactgcgatactctcttacaaaccggtgtggatcttaccatggagaaaggtattcctaagttcaaggcttggttcgaatggatccccggaccatcaaccgatttcgaccatgagctagagttctctgttggtgacagcgtgaacatgaccgttactgccacgtccaaaaccggcggaatagccatggtcgaaaacaacagcaagggtacgccagtcaaccatacatttgccaatgagactgcagagctctgcctggccaacgcagattggatcgtcgaaagatggaccctgacttccacacaccaagacgactcgggccagtcataccgtcactcaacccaggtgtcgccagtcgatttcgatacattgacgttcacgaatgcttcggccaccactgctaacggaagttctcttgatgcttgcaatgctagaacagaggctgttgatctttacgagaatgtcgtcaaggacaatcgatcatcctaccgcttacagatggctactacctttgatgattcctccatcaccgtctcgtacgtgagaggagatcatgtcaaatga

SEQ ID NO: 1954 - DNA, 843 bp, Aureobasidium pullulans
atgaagtatcttgctgctgttctcggatgcgctactttggctgctgctcatggatatatcgacaatgctaccatcggaggcgatgaacatcagttctatcagccttacctcgacccttatatgaaccctgcggtatgtgtttggtctgacctcttcgcatcaccgatactgatatcctcgcaggagaagcgtgtttcccgtcccgtccaaggcaacggtcctgtcacggacgttgatctgttagacatccagtgcggtggctactctgagggaggcattgtcggctcttctcccgctcctctcgaagctgcagcagaggctggctctaacgtcaccctccactggactctttggcccgacagccacttcggtcctaccattacttacatggccgcttgtcccgatgaaggtaagatataattccacccccagcaatctgaaccactctgacatatatcaggttgcgaaaacttcatgcccaacaaaacagccgtctggttcaagatcgccgaacaaggccgcagtgcagacaagaagacctggggtaccgatcctctgaccaaacctggcaatgcaggatacacttacactatccctgagtgtatcaaagctggccactaccttgttcgccatgagctggtcgctttgcatgatgctgctcaatatcccggtcctcagttctatcctggttgtcatcagatcaaggttagtggtgagggaactactgtgcctaagagccttgttgcgttccctggtgcgtataaggggcaggatgtcatttatgatgccagcaaggcggagtacactgttcctggacctgcggttttccagtgtgctgcttag

SEQ ID NO: 1955 - DNA, 2072 bp, Aureobasidium pullulans
atgcatttccagaagctcagtgggctctgcctcttggcattcgcctcagtctcatgggccgatgccgtacctgagggtcgctacctatggggagctgaccgtatgggcaagatggtccgtcgagcaaccacaaaaacttcaaccacatcgaccaaagcgtctacctcttcagtcaaggcttcatctacctcttctgtcaaggcttcttcaacatcatcagcatcatcaaaaacctcttctgccactgtgatctctgtctcaagcagtacccctgcttcctcagtcagcagtgcatcgtcgtcaacttcgttggtggctgatgctgcgtgcaccaatggaccaaactctcgtcaatgctggagtggcggatacagcatcaagacagactttgatctgaagcatcctactacaggaaacactgttacctacaaccttgagatcactaacacaacatgcaacttcgatggcaatggcgacatgcagtgttacctcatcaacaatcagttccctggtcccaccattaccgctaactggggtgaccaaatcgtcgtcaatgtcaagaactctcttcagaacaacggcactggtattcattggcacggtatcagacagctcaacagcatgggatctgatggcgtcggcggtcttactgaatgccctattcctccaggcgccagcagaacatactcgttccaggcaactcagttcggtacttcctggtaccacagtcatcactcgtcgcagtatggtatgggaatcactggtcagatcgtgatcaacggtcctgcaagttccaactacgacattgaccttggccctctcccaatcaacgatctctactatggccttgcaaacaacgtgaacgaggttacactgcacaaccttcaacagaacctgcctcccccagatggttccaacattcttgtcaatggcaagggtaagagcgccaacggtggctcttactcacagatgaccctgaccccgggaaagagacaccgattgcgattgattaacacttctgttgataacgctatccgtgttaagcttgatggccataacttcactgtcatgtccgctgatttcatccccatcaagcctatcaccggtcagaactggcttctactcgctgtcggccagcgatacgatgtcgtcttcacagccagccagggttccggaaactacttcttccgcgccgaagtcgccactgactgcttcagtggaaacaccggaaagggacgtgccctcttcacctactcaggaacgaccgccgccgagcccaccgacagcaacgaggctgcccccaccaatggctgcactgagctcaacactgttccttactggactcaagctgttgaccagagccaatatgcctctcaagttcagaccctcaacactggtgttgcacccggtctcactaccaacgggcagaactttgcgctctggaacctggacacccgcgccatgatggtcaactgggacaaacctaccgctgaatatgtattcgagggtaacaccagctatcccgatccctacgccgtcctcgagatccccacagagggtacatggacctactggctgatccaaatgggccagcaaaacccacctcttcctcgtacgttccacaatttacccggacaaatcgtctttgtactaatcgagctttgcttagatcccatccatcttcacggtcacgacttcttcgtccttggctccggcgctggcgtattcgatgcctcaaccgctgtcctaaacttcgccaacccaccccgccgtgacacctccatccttcccggtcttggttggctcctaatctccttccctgccaataatcccggtatttggctcatgcatgtacgtgcctcctatacacctcctaaacatcctgaggtcatagctaacttgatgtttagtgccacattgcatggcatatctctgagggtcttggtgttcaattcattgaagccaaaaactctattgtcatgcccgacaagaccgccttcaactcacagtgtgatgcgtggaggtcttactccaagaacatgctttatcctcagatcgacagtggtctctag

SEQ ID NO: 1956 - DNA, 895 bp, Aureobasidium pullulans
atgtcttcaattctcgcttggacaaaggctgcttgccttcttcttcttgcatctgaagcttttgctagcccaattgagcttgagaagagagcggtatgcacagcttacagtatgtcttgcatttgagcatgtcggcgaccagagagaaatctgatatgaatacagctttgattgagacccgtggtactggcgaacctcagggaccatcgaacagcttcaagacgatggatgcagcaatcattgcccaactcgctggcggtaccgaggtttgtgctctctaacgcctgcgaaatacacgaaactgatttgatctcagtacaacactgtttaccctgcaagcattgaccaaaactcggccaagggtactgctgatgtgagtcaaacagcaaccacttcacaccgttcgtcactgacatttacagatcatcaaccaaatcaccactggtttgaagtccaaccccaacagatgcttcatcctcgaaggatactctcaaggcgctgctgcaactgtcgatgccatgtcaaagatcaccggcgccaattttgatgcagtcaagggtgtcttcctcatcggcaaccctcatcacaagtcaggccttgcatgcaatgtcgactccaacggcggcacgactactaagaatgtcaatggacttaccgttcttgttggcagtatccctgcaaactgggttagcaagactttggacgtctgcgcatatgtgagtgttgatcactgtctgaagaaggaacgtgatgtactgacttgacacagggtgatggcgtttgtgacactgctcatggctttggaattactgctcaacatttgtcttacaagtctgatgccaacgttcagaaccagggcatcaagtttgttcttggaaagcttcgcggtacttag

SEQ ID NO: 1957 - DNA, 2647 bp, Aureobasidium pullulans
atgaagcaagcagccaccaatcttttggctcttgcctctacagcttacgctgctgccagctcccctgctggcaccaagagtggttgctactggaacactgatgctggacaattcaacactcgttttggccacgacttcagtattgatctgtatggtactgtggagaacttgattcccagcacctacactgtcaaccagggtgtcaaccctcttgctcgtcgtttcgacattgccaacattggttttgacggtgttgagaaagccctcacacttactgttcctggtggccagtcaaatggtatgtcaacaacatcgttcatgctgatgcctttctaacactttatgcaggcccaatctctgttgctcaactcgcaaccagctacagcgatattctttacggctctgttcgcaccgtagctaagatctccaacgttcccggcaccacccacggcttcatcttctacgccaacgacacccaagaagtcgattttgcgttcttgacttctgacacctccaaggcttggctcaccaatgagcaagttacttacacctctccttattccacttacagcgttgctgctcccggagatgctagctctgcttaccacgagtacagacttgattggctccctggagtcagcaagttctatattgatggtgttttggtgcagacaattaccgataacgcaccgagtactcctggaagctgggtaagtgactcctgttctcattgcacagaatttgttcgctgaccaggaaaagatttggaacaactggtcgaacggaaatgcttgggctcaaggaccgcctctttccgacagtgtgctgaagatccgcagtatcgacggctacttcaaccgcactactgttgcagacaacatcaacctcaaccccagtagttgccctgctgtcagctcatcatcttcgagcgtcgctccctcttccaccgtcgtctcgtcgagctcctccagcgtagtttcgtcatcttcctcgagcgtcaaagcctcgtcatccagcgtggtttcttcatcctctagcgttgctccctcttcgtccagcattgtctcttcgtcgagcactgtctcctcgtccagtgttgccaccacttcctcggctaccttgagctcatcgtcctcatcatcatcttctgttgctcccgccacctcctcttcggccgctgctgtcaccaacttctacatcaaggacgccaacaacaaacttgtcaacgttccttctggacaagacggtgtagccaactacgttaccagccagaactctgctacctcgttctacatcgatagcaagactggctacctctacgagaccggtgctccctacgccgccaaccgcggtaccagcgctaagcctgagatcacctacttcagcaccattggcttgggctacagctacatcacatgctctcagaacactgctcagacctggttggagtgcaaggccaacggagtggctcagcaagccatgacttgcggcaacgatggcctgctgtacttcgctcctaccattccctccacctgcgcatgggtacctctctactacgtctcgtccacctcggcttcagtctcggcatcttcggttgcatcgaccacatcctcgtcatcttcctcatcctcttcttcggtagcacccaccacttcctcgacatcatcttctgtcgcacctactacttcatcggtcgctgctcaagccaccgtttcgttcactaccgtcactaccgcttggaccggtacatttacaacaactactactgcagtttctggcctggctgccaccgtctacgtgcaaactcctgctaagaagggtgatgtcattagcacttcttccactgcaaaggcttcatacactacagtaaccactcactctggtaccgctggatccgtcggctacatcaccgcaacacctaaggtcgctggtgcaacaactactgtcacggtcgtgtaccccacccctgttactacttgcggcaaccaaggtatcaactttgctgcttacacaaacaagtactctggtggtcaagcaacctatggttacccctcattcagccccgagacttacaagaaggtttccccttggttttccgacgacaccacctacattgccgagtccaacgatggttctggcaccaagatcaacgtttatggttacggccctcttgacgctagcactcttgtccttgatcacactttctaccttttcgcctcccaaaccggttactacagtctcaacgtcccgtacaccgacgacatccagttcgtctgggttggcagcaaggcagtcactggctggacccgtgccaatgctgatatcactcagttctggagctctcagatcgccacccagactccccaaactttggcctactacctcaccgtcggcacatatcttcccagtaagttacccctaaatcaatgacctctgtatcacagctaacaagcgcaaagtcagaaccctcttcgcaaacggaggtggccaaggtgatctcagattcaatatctatgctcctgatggtacatcggtgctctcgagtaatgctggacagaactcgggagtctcgagcgtggatatcgttgagttcccttgtaactctgctcttggagctcagttccctgcttggggcaaggagacttag

SEQ ID NO: 1958 - DNA, 1541 bp, Aureobasidium pullulans
atgattacatcgacttggacttctgctctagtagcagcagctttcgtaccatctattgtttctgcagttcctcatggtggacactctcctggaaagggccatggcatcgccgccgatgacttcgtttccgttgacggcttcaagctcaaggatcgccagggcaccgtctatctcactggactcaactactggtcctgtatgaacctagccgccgatgaccatgttggaggcaactactcgcgcttcatcactgaactagaccagatgaaagctcatggggtcaaccatctccgcatcatggctgcttcggaaggcgcacccacccatcaacctttcagaatgtatcctgctttgatggagagccctggaaactacaacgaagcaatctttgtcggcctggaccgctgtctgaacgagatgagcaagcgaggcatgcgagccaccatgactctggctaatgaatggcaatggagcggtggctttggtcaatacgtctcttgggctacaaacaacagtcagattccctacccgtcatcttggaatttaacagcgaatcctcagcgctctgagccaggcactggttggggcaattacacagtcgaaggcgtagatgccgaatcttatggcaacttcaccgcttacgcaaaccgcttttacaccatcccaaagtgtcaggaatggtaccatgcccatatctccaagattctcaatcgcgtgaacacagtcaacggccgcaagtacaaggaggacgctactgttatgacatggcagcttgccaatgaacctcaacccgctgttgtccctaccgaataccttggtccttactccctcgaactgccagcagcgcccgaagacgtcatcatcccctgggtcaagaacagcagcgcctacatcaaatcacttgcacccaagcaattggtcaatgtcggcttcgaaggcaagcaaggaaaatggtacttccaagccgtgcacaacttcagcactgttgactacggcaccactcattgttgggtccaaaactggggtgtctacgatatgctcaactcttctgctgcaaacttggaagctgcaaagagctttgctacagcgttcgttgccaactctagtgaatggagtagagagattggaaagcctgtctttcttgaggagtttggtatggcaagaaataactgggaaaatattggcaaggaatatccttacctcagttcggcgggcactggcaataaggatgagtacttcactgtaagtctatcactcagttccctgtgtaatcatcactaatgctcaaacaggccatcatcggcgccgccatgaatgatttcaagtccgaaaacggaacatatgtcggaagctgtccttgggcatatggcggattatatcgtccggagacacaacatgccaatgcctttggcgaggtctgggctggtgacccgccgcatgaggcacccggttggtacgatctgtacgacaccgatgaagctatgaacattgtgcatcgtcagcagcaagatattgctcagtatttgagcaagggacattga

SEQ ID NO: 1959 - DNA, 1636 bp, Aureobasidium pullulans
atgctgtctcaaactctcgggctcgctgtcctcgtcctgcctctactcgccgaagcgaaagactgctctcaagcagccttccaaaagatcattccttccaattccactttcaactatgttacaaaagtggcagcgggcggaacattcacagatgcgtacgccaatgccaatgctacaggtctgcctgaaggatgcgctgtgagcgttcgcgtacccacgcctggcaactcgtcctacaacatggcgatatacttgcccaacaagtggaactcacgcatcatgacgaccggaaatggtggttatgctggctttaccaattggcaggatcttggaatctactctcagtatggcttcgcagctttgactaccgtaagcaaatgcaaagtctccaatttgtggtacatcattgacgatgaaacaggacaccggtcacgacaatgcgaacccgctggactcgacctttgctctcaacaaaggatcactcgaaaattggggatggcgagccatgcacggttcggtcctcgtcggcaaagcgctgtctgccgcatactacggagagaaccacaagtactcttactactcgggatgctcaactggaggccgacagggattgaaagagatgcaggtatctcctgaagcattcgacggcctcttcgttggtgctccagcatggtggattcctcacttgggcatctacaccagtcaggcaactcttggcaacctgcctcagaactcctctcaccacatctcggctgctttggctactgtgatcaacgacgagattcttaagcagtgtgatcctcaagatggtgtgacagacaaggttatcatgaaccctgagggatgtgtgttcaacccattgactttgctctgtgagaattcttcgaacacttctgcctgcatcacgcgccctcagctagacactctttacaaggcgctgcacgactggacctactttgacggcacattgatcttccctgcaccttcacttggtacgcccctgaccgcatacattggtgacagtcctctaccgaatcccatgggaactggcatgatccagcatcttttactgaacacaactgagccttacgactggagtaccttcaacgagagtgtggttcgtctctccgaagctattgatcccggaaacgcatctccagatgactatgacttgtcgacattccagaaaagaggcggcaaagttatccactggcatggcacttccgaccctatcattccgtacagatctagcacctacttctacagccaggtagcctcgtcggtcgctcctcacggtattgagatggacgacttctaccgattcttccctattgccggtatgagccattgctccggaagtcaatactctccctggtatatcggaggtgccagtcagcctttgaccaatgtcagccatggtgttccgggcttcgatgactcgcagcataacggtctccttgcattgatgcgctgggtcgaaaatggcacagctcccgagaggttaattgctactaagtacaacgaagacaacccagcgaagggagtgtaccgtcaaagacctctctgccctttccctaaacagcctgtttacacccatggaaagattgactccgcaagtagctggaagtgtgtatag

SEQ ID NO: 1960 - DNA, 1203 bp, Aureobasidium pullulans
atgtcttccatcaagtctctcgccctcttggccctggccaccggtttcgcaagcgtcgccagcgcagctgagactggcaagaccacccgctactgggactgctgcaagggttcctgctcgtggcctggtaaggccgatgtcagcgcccctgtcaccacctgcgacaagaacgacagccccttgaccgacgccaacaccgcttctgcctgtgatggtggttctgcatacatgtgctctgaccagtctccctgggctgtctctgacgacctcgcctacggtttcgctgccgtcaacattgctggtggttccgaggacagctggtgctgctcttgctacaagtgagtctctcctacatgtagtagcgagaagactgttatactaacctggatgtccaggcttaccttcaccaccacctccatcgccggcaagtccatgatcgtccaagccaccaacaccggtggtgatctcggtagcaaccagttcgatctcgccattcccggtggcggtgttggtatcttcaacgcttgcaccgacgagtacaacgctccctcttccggctggggcgcccagtacggtggtatcagcagcaacacctgcagcaccttccccaaggctctgcagtctggctgcaacttccgcttcggcgactggttcgagggtgctgataaccctgaggtcgagtttgagcgtgttgcttgccctgctgccatcaccgccaagtctggctgcaagagaaccgatgatggagctcagagcgccgttgctgctcccgcctcgtctgctgtcgcttcatcttctgttgctcaggctaaggttgccgttgcttcctcttcggctgtcgcctcttcatcttctgagactgctccctcagcctactctacctccgaggccgcccctgttgcttcatccagctctgaggccgctcccgtcgcttcctccacctcttctgaagaggctgttgctgctgagacctcatctgtcgctgctgtctcgtccgtctacactgctcctgctgtcgagttatctgctgctgcttcatctgcttacagtgcccctgccgcttactcatctgccgcatcttccgcttatgtcgcatcatccagctctgttgctgctgcttcatcggtcgctgctccttcatctaccgctcccagcgatcatgccaactgcaacgtccagtacgtttacgagtacgatctttaa

SEQ ID NO: 1961 - DNA, 2251 bp, Aureobasidium pullulans
atgcgttcattcttttctactatcaccctgttgggcttcctcccagggctcctggcacttcctactaaggcagatgtacaagttcagcccctcgagaagcgtggtactcgcactaccgctccaaaaggatgtctttctgtcggctctggagccacttacaccactatcgcctctgccatcaaggctctaggcggttccaaaaacgacgcatgtctctacatcaagagtggaacctacaaggaacagttgaccatcgactacgccggtgctctaaccttctacggagagactgccgatacatcgagctacaagtccaacaaagtcttgatcagccatggcatcagctctccagctgcaggcagcctggatgcaagctccaccatgaacattagagcagcgaacttcaagatgtacaacatcaatgttgagaacagtttcggaaagggtgcacaagctgttgcagtcactgcaaatgccaacaagcttagcttctacggttgctctttcctcggttaccaagacacactctatgtcaagaccggcactcagtactactcaaactgcttgatgaagggtgccgttgactacatctttggagacgcttcagcctggttcgattcatgcacaattatgagtaacggtcctggtgctatcaccgcttcgtctcgcaccaccagcgatgacactgcgtggtatgtcttcaacaacgtcaatgtcatctctgatggcacagatcttgtcggcaaagtcttccttggtcgtccttggagagtcaacgcaagagtcatgttccagaagtctcaactctcgaacgttgtcaatgccgctggttggactgagatggccgatggtgccactcccaggtactacgagtacaagaactctggtgttggttccaacacctccaagcgcaagtggacaataaatgcttctgccgctattagcatcaacaccgtgcttggagacagctacagttcttgggttgatcaatctggtaccggctctagctcttcttccacttcaacaaccgtctcaaagaccgccgctgcaaagcaagtcacccctgctaaatctgcagtcgccaaaggtcctgtttgcactcctactgccggaggtgctgctaccaaggatgatacccctgccatctatgctgccatccagaagtgcggaaatggcggaaccatcgtgatccctgctggcaagacttactaccttaacactgtcctcgagtttgacgggtgcaagtcatgcgccttccagcttgacggtacactaaaggcctctgatgatctaacctattgggaaggcaagactgctatcctccacctgaagagtgttcctggtctcaccttcactggagctggagtcatcgatggaaacggtcaaaaggcttgggaccacttcgctaccgatagctcctacaagcgtcccactctcttttacatcgatggtggcgacaacatcaagatggatggttggaccatgatcaaccctcccaacgtcttccactctgtcaagggcaatgctctcaatatcgcttactccaatctcaacatgtctgccgtctcgacttcgaagaatcttccaaagaataccgatggtaagtaaacacatttgacgaccatcttgagcctcaactgaccatcattcaggattcgacattggtgcctcaacatatgtcactctgaccgacatcaccgtattgaacgatgatgactgtgttgccttcaagcccggctctaacttcaccactgtcatcggtatcacctgcacaggctctcacggtctgtccgtcggctctctcggaaagtccaacgccgactccgtctccaacatctacgtgtcagatgccaccatgatctcttcctcaaaggccgtcggcatcaagacctaccccatgggcaacggtcacggcatctccacagtcaccaatgttacctacaccaacatcaaagtccaaaattccgactatgccattcaaattcagagctgttatggtgaagatggcacttactgcgagaccaatgccaacaatgctgtcttgaagggaattgtattcgagaacttctccggcactactagcaagaagtattcgcctactactgctaatctgaactgtggagctaagggaacttgtgatgtcaaggtcaagaattatgctgttaaggctggttcggggactggacaggtgctttgcaacaacacgcctggaagcatgggcgttgcttgtacaaagggtgcttcggggtga

SEQ ID NO: 1962 - DNA, 1672 bp, Aureobasidium pullulans
atgtttggaaagaagtcactttcttacctgctgcttgctgctgcggctcaagcaaagtatatcgtccctggaggcagatggaccgatacagatggcaatctcgtcaacgcacatgctggtggtgtgaccgttggtaaagatggcaagttctatcttttcggcgagtacaagactcaaggacagactgaaggtggaggtatttctgtctacagtagtgatgatcttgctacttggaaatctcatggtttggctcttggtaagcgttcaaacagagtgtggataagagaacgatagatgctgacgaagagtagagcctattgaaggacatccttacattgcacctgacaagatcattcagagaccgaaagtgttgtacaatgctgtcgatgaccaataccatgtcagtcttgtgttacattgcttctccacactgcacccctaactaacgttaacagatgcactggcacgcagacaatagcacttacggctggctccttcaaggcctagcaatctcccccaacatcacaggtccttatactttcctcaatgccaccgcccccttcggaaactggtcgcaagacttcggcaccttcaccgactacaagactcaaaagtcctacgctttgtattcaaacggcgaccgcaaagaagccagagatgtctaccttgccgcctacgatgactctaacaccgagttggcggagatcgtccatcgctttgacaagtatgatttggaagctcctacgattatccagacagacagttcctactatgctttgatgagccacaagactggatatagacctaacaatgttgtcgccttcagagcaaacagtcttgccggtccttggagtcaacctttctttgtcgctccattggggactagaacgtataattcccagtctggcttttcgctcaagatcaacggcaccaaaaagactacttggttgtatatgggtgatcagtgggactcgaactccctttgggaaagcagatatatctggttgcctgttgacattgatgacaacaagcaaactctcaagttggagtggtatgatatctacgacttggatgtgtaagttggccacaagaaacgatacaaggcagaatactgacgaaagatgcagcaaaactggtcagtacaaagaagtcaagggcaagacctactacgccaaagacgccgtcacagcaggcgatgctttcaaacaggaagccgtaagcatctctctgtttcctcaccttcttccatccaagctgacacatcccttcacagaattttgcctcttccaacacaatagtcacaggcatctccggcaacgcgtccacactcaccttctccaacatccaaggctccggctctccccaatggatctccttctactatcaaaacactgatgacatgggtttcggcgaccaacccggcggctccccggatcgcatcaagacgccttgggcactgcgccgtatcgcttctgttgtggtcaatggcaacagcagtgatattcagacgctctaccaaagagacacacacaagggaatcatcctgagcaccccactaaaagtgaatttgaaaaagggcagcaataccattacgatcggtggattggataacggtattgatgtcaaaggagcggatattgataggattgtggtgtatcctgctgagaagtga

SEQ ID NO: 1963 - DNA, 880 bp, Aureobasidium pullulans
atgcatctttcaaaatccgctctatcatgggtgactggtattaccagcctcattgccaccagcgatgccacgcctcttgagaagcgtgtcactacatcgcccgccgcaccattcgacggatgtctctatcaggtgtctaaagttggtgccttcaattcccgcatcgctgtcacgaactggaacaagttccccttcaccctcaaagccaccgatcgcactggtggcccggctcgtgtgcgatggaaccctgccaacgtcggtgtagacgccaatgacggcagtctcaccttgactgttcccggaggccaagcaacatgctccgacgacagcccttgtggaagtgcccaaatcaccaccgcatacgacgatatcatgtacggaagcatgcgtactgtcgcaaagacacccaatgtctggggcaccgtcagtgctatgttcttctacagcgatgacaacaatgaggcggacattgagattcaaaccggaaacactacatacgcacactttaccaaccaggactggtacggagacaacgctctgtcgaacagcagcgttgtcgcagacacttcggctgcttaccacgaataccgtatcgactgggtgcctggaagaactgattactacgtggatggcaaacttctgcagacctacaccaaattcgtgcctaggacgagcggatattggatgtggaactcttggacgtaagtgatcgtgaatgcagtgtcatgatgtagtgtcggagattatagctgactctggatgtagaaatgccggttactggacctacggccctccagccaaggatgccgtccttcacatcaagtctatcgatgtatacttcaatcgtacgagtatcactacctgtggtagcgcttcttga

SEQ ID NO: 1964 - DNA, 1517 bp, Aureobasidium pullulans
atgagctatacacttcatctccaaatcctcatctccgctctatgtctactcttctgcaagccctcgtgcgccacccctaacaacggtagactcgacctgcaacttcctttcgtgcccgtgaaaacccctcctttgtcgaaagagcataattttgtactgtgactacttctcaaagtctggaagtctgaggtgactaataatactttgaatagaccttgagacacatttaccacaaaggatctcaccgatacccacgacttttccgcaaaatcgatattcatcacgattcacttgttcaagatggcacaaaagagagctgctgcgatggcgaggcgacttcaacagcgtttactgtcaaatcgaatgcacttgagatacagcgactatccgaccgcagtcgccacagcatcgatagtttattggaagctggagaattcttgggagaacctgtttcgctcacctctgatgcttggacaatagatcggatctccgggcctgacgtcagtgataagagtacggtgttgagtctcgcacacattgctgcaaatgcatacgtcgatccgccacatggaggagaatggaccgatattggtggaggtttcaactacactgaggatttcgggtgggagcgcgatggactacgcggtcatgtgtttgccgacacggaaaacaaaaccgtgattattggactcaaaggaacctctttaccttatttcgacgacggcgagactttcaataacgatatcctaaacgataatttattcgggagttgctgctgtggtcaaggtggccaatacgcgtggaagaaggtttgcgactgccagacttcaacaaatacctgcaactcaagctgtctgatgacaagtctgcggaagaaaagcaactattaccatgccgctcgacatctataccataacatcactgcaatctatccagatgccgatgtctggctgaccggacattcgctaggtggcgtggtatcctcgcttctgggactcacctacggactccccactatcactttcgaagcctttcccgatgccctcgccgctcgacgattgagtttacccacacctcctggctaccgcgttggtgacgttgaaaaacactacactggtatctatcatttcggtcatacagccgacccggtatacatgggacactgcaattccttcaactcaccctgcacgattgcagggtatgcgtttcagagcaaatgccacactggacacaattgtacgtacgatacagtcggcgatctaggttggagagagtctatcggtacgcacaggataagcagtgtgatcaaggatgtgattgagaactacaacgccactccgaggtgtgagcaagatgtcgattgcgctgattgctctgagtggaagttttttgatgaggaaaagactaccactacttcaaggatagaaagctcaacatcccagaccacgactaccatttgccagaccccaggttggtggggctgtcgagatggtaccacaagcacaactactttctga

SEQ ID NO: 1965 - DNA, 1986 bp, Aureobasidium pullulans
atgagtgctgcgaaactcttcttggtcgccggtctgcttgcgagcggtgcctacgcttcacccatccaggcaagaactccttatgccgtcaaggactcccactttgttccttccaagtggagacaggttgctgctgctccctcgactcacaacattgatctccgtattgctgtcaagcagaaccaattcactgatttggagaagcacttgtacgagggtaagtaacaccaacatattctacagcaaccaatcgagcaccaattgcgtcgagccttcctttccgatcagctggatttgtttcacaaacaatcaccccgcttagactcttgatgttgtgtctgaccaaaactcgtagtttctgaccccgaccactctcgctacggccagcacttgagcgagctcgatgtcaagaagctcgttcagccttccgacgactcactggctctggtccacgagtggctcgccgacaacggcattgaagccggtgatctctcctacagttcttccaaggattggatcaaggtctccctccccgttcaccgcatcgagagcctcctcgataccaagtacaacgtctaccgtcacgaggatggttccgagaccgttcgcgcacccgagtggtctctgcctctgcacttgcacgagcacatcgacaccatccaacccacaaactctttcttccgcagcagccccaaggccgtttctctggaagttaacaagtttggtggctcatactcccaggatgtcacttaccaccaggaccctaacgttactgctatctgcactcctcgtggcgtcacccctctgtgcatgagaactctttacgagaccattgactacattcctcaagtttctggcaagaacaagatgtctcttgtcaactaccttggcgagaccaacaaccgctcagacacatacctcttcctcgagaagttccgccccgaagccaaggaaactgcatacgaattccagttcgatgtcatcaacaacggcagcacatctcaagcaaaggtcactagcagaatcgacatcgaaggcaacctcgacgtgcagacaatgcttggcttctcatatccagtgccgctcacagcctacactgtcggcggatcacccgatttcatcccctcgaacggcacaaccaccaacaccaacgagccctacctcgactggctgcaacacatccttgcccagtcagacgacacaatcccccaagtcgtctctacctcctacgacgatgaagagcaaaccgtccccgccagctacgccaagcgtgtctgtgaagacctcgctcaactcggcgcccgtggtgtctctgtcttctactcctcgggtgacagtggtgtcggcggctccggcagctgtgtcaccaacaacggcagtaatgccaaacgcttcattcccgaattcccctcgacctgcccttacatcacttccgttggcgcaactatggacttcaagcctgaagttgtggcttatcatgcctctggctacgcttctggaggtggtttctccgatcttttccccagacctgcctaccaagacaaggctgtcaaggcttatctgaagggcctcggagatagagatgctgcatacttcaatgctagcggaagagcctaccctgatattgctggccagggaagttacttctcgaccgtctggaacggcactgatactctcgtctctggtacctccgcctctacacccctcatcgccgcgcttgttgctctcgtcaacgatgccctgctcgctggtggcaagcccactcttggtttcctcaacccctggttgtacaagaagggttaccgcgccttcaccgacatcaccagcggttctgctgttggatgctctgagattggcgatggtaagggcttccctgctgtcgagggatgggatcctgttactggtttcggtactcccaagttcagagacatcattcatctccttggcgtacacggatactggaaccacaccggtggctggagttag

SEQ ID NO: 1966 - DNA, 2258 bp, Aureobasidium pullulans
atgggcaagcgtatactcacatcatgcttggggctgctagtgctcggacgatgtgtatttgcaactccaagtacaactcagctcggtagtgtgactattctggccgctgatgatttgatcagtacgtagccgactcgcagccattgcacacctttttcttggacacatcactgacgtatttatgaagctaccaacaataacaagacgagtgccgctcttctcctgggcacaccattgactctagcatctgcactcactgcatgcgagtcactacacgagaatctatggtcaccttcgttgcatccttttactgctggtctgaacaattcattggcatacgaggtcttcagtggacgtgttgcaagcagtcagctcttctggactggccagtctcagtctcaaccgtcatcttcaaaatacgccggctctccttcacattcaagacctcctcaccagcctccacaatgtcaggccattgatgtcaacggagatacgcatcatgtgagctgcaaagagaggctacctgtcttatgttcccagaccgcttccgcgtccaacataacatacgcagataattctccgccgtatcagatctctcaagccgttggctttcaaacacttgttgggtatagagacttcctgacatttcgatttatgggagttcgcttcgcagccgagcccgagagattcacacactcttctatctacgaggggacggggactaatgatgctcttgagcctgcgccggagtgtctaaccttgcccaacaatggctcgacagactgtctgtttctcaacatttggaccaccagtctgcctagaccgggtgcaaaacagaatctcaaacctgtgatggtctacatctatggaggtaattgttcctcctgccattcattgagatgatggctgattagtccaaaggcggcttcactaccggatctgcaagtaatccaacaaatgacggaggcaaccttgctgctcgaggagatgtcgtggtcgttgacattgcttatcgtctatccaccctcggcttccttgcgttagacgatggcgttcacaaaggcaattacttcctctccgaccagatcgctgccttggagtgggtacagaagcacattgagagttttggcggagacccatctcgtgtcaccatattcggcgaatcggctggtgctgagtctgtgaatgcgctcatggcttcgccaaaaggcaaaggcttgtttcatggagctatactgcagtcgaactactaccaaccttacgtccccttggtcactgcagtcaatcagagcacaactccgatactcaatctcacaggttgccgcgatgccgccgatcagttggcatgcctccaagcatacaatgctactgagttgcttggtctcaaaactgtcttcaagtaagctttcacgctctctgtggattcttagtgcttactcatgagcagctaccctgttgttgatggcacatatctcgtgtccgagttcattgatcttaacagtacgacagacgtcacaaatcgcgtgccagtcatcatgggcgtgaatcgagacgaagaaggagtccttggcacagtatacccaaccaccaacctcactaccggcattgatgacatagctgctgcaaatcatctcaacgccagtgacatcctcgcctcagatctcttccctcttggtgccagcgacaacaaaaatgccactctgaatgtcttcaatacaaccactcgcatctccacagatgtctctttccgctgttccaaccaattcgaagcctacgccggcgtcaaagacggtgtcctccccaacatatggttctacgagttcaatcgcacataccaagatccagcatacaaccccaatctcgtctgcgcagctccagtcacaccttcctatccttatggcgacccttctcaggaatacttcaaatgccacgccggagatctggcaaacacctttggcaatgtagctcgtgcaggtttcccagatcgagatggcttggatgcgaagtttgggcagttgattaccgattattggactagctttgcgagaaatcatgatcccaatcctgatatggcatatctcaaggtcagagggtactggaatactatcgcgcagattgagaagtcgggtgcttgggagaaggttgatgtggagcagccgatgatgatggagctgcagtggaactcgatcatgatgcctttcagagatgtcgagcagtgtgctgtgttgggttacccgctggacttccttactaggtga

SEQ ID NO: 1967 - DNA, 3649 bp, Aureobasidium pullulans
atgaggatctctttacgtctcctcgtatacactctcttcctttgtgctctggtcctggctacggacaatggcttgactacccaagtcacctgggacccttatagtctcatggtgaatggagagcgactgttcgtcttctcgggagagttcgcctatgaacgtgtgcctgtaccagagatgtggtcagacatcttccagaagttcaaggccaatggtttcaatgctgtcagcatgtatttcttttggtcttatcactctgcttctcgcgatgtctttgatctcgagacctcgggaaaaaatgttcaagctgttcttgatgctgctgctgaagcgggtctatagtacgtataacgaacagaagtgatgaacagtatagctaagggggttccctgcagcgtgatagcaagaaacggaccgtatagcaacgcggagaccaacgctggtggacttgcgctttggacttcagatggctcaggtggtgagtacagtagtcaaaccatcccaacgaatctgtgaattgagcagcctcaggcaactatcgaacatccgatcaggtctatcaggacgcttgggctccctggatcaaggcactaaacaagattctggtgaggaaccaaattacggaaggtgagcaaagctctttcttcagcaaacacttggcataaattgtcgttctcatctgcgagaagatatgacaaattctgtctgatattgtcttcgttcttgctgacactgcaacaggtggacctatcatactttatcaagtggagaacgagctgcaggagactgtccacaaggctgataatacacttgtactctacatggagcaactcgagaaagttgccgtcggctctggaattgtcgttcctctgactcacaatgagaaaggccagagaggtcaaagttggtcaaccgactatcaagacgtgggaggtacgtatcttgaaccacactgacttgatcaaatctaaccatagaaaaggctcggtcaacatctatggtttggacagctatccaggtggtctatcatgcacgaacatcaactcgggattcaacctagtccgcaattactaccaatggttccaaaattattcccacacccaacccgagtactggcccgagtttgagtccggattttaccaaccctggggaggcttttggtacgatgagtgccttgcaggtaagtactttttgacgcgaatgagataatctggacggtgttttgtcttagcacacgctctatgatttagttgttatgttaacttattcttgctccagaacacgaccctgcattcgctgatgtttattacaagaacaacattgcccaaaggggcacgcttttaagcctctacatgtacacatagtctgatacattcttgcatacgatatgctaacagatgtttagggccatgggagccacaaattggggcaatctggcggcacccgtggtctatacgtcttacgattattcagcacctctacgagagacacgcgaaattcagctcaagttttctcaaacgtaagttgatccacacgattagcaccactcgaaagcgcgagtaccaccaaatgctgtttcaatgcacgaagtgtcagctaccgtctgtgtcctccagtgagagccgcgtttttcacaagcttccacaggacattccttcgattggtgaaaacactgtacattgcattaggaacatgctacgacacagccagcgcagaggatcgagcgctttaatcacttcacacttgcgctatctaggaacatggctgatctgctcacagaaaacttattgcgctcttcacaagagtgtcgcaggacctactctacaccgagatggaaagcaatggtactgggaatgctgtttcgactcaggatatctggacatgggtcctaagaaatccaaacactactacagggttttatacgacacaacacgcaaagtcaagctctagagctgtgacagacttctctattaaccttcagacatcactgggtcctatcactgtaccagatgtccagttgaacggccgtcagagcaagattgctgtcacggattaccactttggcaagaacaccttactctattcgtccgttgatatcctcacctacggactgtttggctcgaaagccgttctcgtcttgtatcttgagcaagatcaagttggcgaattcgccttctctggcaatgtttcgatcaagtcttatggtaacacgaacgttacgacatctcgcgttaagagcaacggaactgcgtcctataccaagctggtctacaagcaaacagcaggcaagactgccttacaactatccaacggtgtcttgatgtatcttctcgaggtcactacagcctggaaattctgggctcctccaaccacgtccgaccccaacgttgctccggacgagcaaatattcgccatcggaccctatctcgttcgcaatgccagcgtcagtagcaacgttgtttccatatctggtgacaacaccaactccaccactcttgaagtctatgttggtgatgcgagcgtgaatacaatcgtatggaatggcgaaaagcttcccaccaagcaaacagcatatggtgctctcacagctgaccttgcttcgattgtggaccgcaaaatcactataccaacactctctggatggaaagtagctgattcactaccagaagccgccagagattacgatgattctgcttggaccgtatgcaataagaccactacccgtgctccggtcaagccactgtcacttcctgtcctatacagctccgattacggttactactccggtaacaaggtataccgtggttactttgacgggaagaatgcagtatcggccaatgtgactgcccaaggtggctcagcagcaggttggagcgcttggctcaacggcaaactcgttggcggtgctcctggaaatgcttcattactttcgacaactgctgtgcttgatttttcgaaagcgacactctacgacaaggacaatgtactcactgtcgtgacagattacactggccatgaccagacgtctactggtaaaggtgctgcgaatcctcgtggtctcttgggcgtaaccctcaaaggctctagcaacggtactgctacattcaagcagtggaagattcagggtaacgctggtggctcggcaaacatcgatcccgtcagaggtcccctcaacgaaggcggactgtacggtgaacgtcttggatggcatctccctggtttctctccctcgggcactgaatggtccactggctctcctgctcaagggctcaactcgagcggcatcaattggtacgtgacaacattcgacctcgatatcgattcagacctcgacgttcccatcggccttgaactatcggcccccgcgggtactgttgccagcatccaaatctatttaaatgggtaccaatacggaaagttcataccacacatcggaccccagacgcgcttcccgttcccacccggagtcatcaacaaccaaggaaagaacactcttgctcttagtgtctgggcagagacggacgcaggtgccaaactggacactgtttcgttgttcgcatataatgtctaccagacatcctttaactttgcacaggatttcagctatctgcagccggagtggacgagcgagagattgcaatatgcatga

SEQ ID NO: 1968 - DNA, 1058 bp, Aureobasidium pullulans
atgcgctcatcactctctttgagcctttcgcttctcgtcggcctggtgtcggctgccaactacaagctcgtcaaggacttctcgggcaacaacttctacaaccagttcgacttcttcaccggccccgatcctactcagggctttaccaactacgtctctcacgaccatgctgttgaatacggtctgatctggaacaagagcgttcccacctggggcgtcgactcctacactcacctcaatgccaatggtgccaatggcggtcgtacttctgtgcgcatgaccagcaaggacaccttcacccatggcctcttcatcgccgacattgcccacatgcctcagagctcgtgcggcgtctggcctgctttctggacctttggtcagactggcaactggcctcagtccggcgagatcgacattatcgagttcgccaaccttgccagccagaacaaggtgtccggtcacaccatgcctggctgctccatctctggcacctctcagagcggtagaatccaaggcagcgattgctcggttcgttgttctgtaacctctaatctgaatgataagctaacacgcaacagtctgcaggtgatggcgccggttgcgctttcctgtccccttccagctcgagtgcaggtaccggctttaacgccattggtggtggtgtctacgccatggagtggacctctcagcacatcaacgtctggttcttccctcgcaacaacattccttcatccatcaagaacggcaagcccgatgtcagcaagttcggccaacccatggccaacttccgcggctgcgacctcgacagctacttctacaaccacgccatcgtcttcgacaccactttctgtggcacctgggctggcgagaccttcttcaacgacggctgctctgcctcctcgtgcgttgacttcgtcgccaataacccttccgcattcaaggatgccttttgggctgtcaactacctcaaggtctaccagcaaggcggtgcctccaaggccaagcgcgacttgatccgtcgccacgcaaagcagacccacggtcacggtctcatctaa

SEQ ID NO: 1969 - DNA, 2152 bp, Aureobasidium pullulans
atgtcttttctcctccgccccgtactcttcctcttatccctcctccccatcctcgcatcagcatcaccacgccacttctccaccctcaaacccgcctacttcctcctcgccggcgacagcacgaccgcgacccaaagcgccaacggcggcggctggggcgacggcttcctaaaccacactctccggcaaggctcctcgggccacaactacggacacaacggcgccacgacaaaatctttccgtgaaggaggtgactgggcgaaagttatcgaagaagtcaaaacaaagattggaaactacaccgtttatgttactattcagtttggacataatgatcagaaggttaccagtggggttaatgtgacggaatatggaagtaatctcgagaggtttgggagggaggttcaagaggttggagggattgctgtaagtgtgctgtgcttgctttcctttgtcttcttccatcctttttgagattttgctggtttttttttacgcatgcttatttgaaatgtatgattagatttttgtaactcccttgactcgtcgtaattacgctgccacttctcctcctactattaaacaagatctggctattcagcgtaatatcacgatacaggcggcccacaccacccgctcccgtcatatcgatctcaatatcgcgagcacaaactattgcaacgagatcgggccggatgcggcgtgggaatataatttgaacccggaggatcatacgcatttgaatgtacatggcagtgtggtgtttgggaggatggttagtgatttgatggtgaaacagtttggggatatcagggctgtgactgaaaagaactcgacgttgagtagggagatttgggggggtgttgctgcgtaggaggggagaaggggtggaagtggaggtggaggtggagggggatgtgaagggacatgagaatgatattggtaccaacttgggcgtgtgctccttgatcattttcctaagttactgagttcgagacatactttcaggcagagcttgaatcagtaaacaccgttcacttgcttcaactgtgtgtgagatcacctcaaatgtttgggactatgccttcactcaaagtttttgtatagtggtttcgtgaaagacatgtgagcgtcctttgtccgaacaacactgtctcaaaaacgctcacttggcttgtcggcaaatcaacatcgacgcgttattcttgaccttcttgtttgcgtcttccgtaacgcatcatcaccattatcactttcttcttgtccaatcccttcatcgatgtctgaaagcaattctcccaagctcgaggacgactcttctatgcctgaggacaagtcaaagtctggagatgacaacaactctcctgaagccgacgacaataactccgagtctggagacgacaacaagtcagagtctggagacgacaacaagtccgatgctagagacggcaagtctgagcatgaaaacgatgattcttttgagccagaagacgtccccgagaagatatgcgctctcttcagacagcttaatcccgagcacatcatcaacagcatcaaggaagtcgttcttggtgacatcgagcatctcgtcaacatggcagatggccgcgaactcgacgccagcaccatcatcatgctgttcgatgaagccatgaagactcgcaccggcaaagccaccatcatcgcactcaacgctgctgctcttgtcgtttgtatcgtcatgattgtattccccttgcctactgctgccccagttctcggcgctctaggtttcactgaggctggacctgctgctggtgagtgaatacttcaatacttatctcatgtttcttgctcgctgatatcttggaaggatcgatcgctgctgcttgtcagtccaccttcggaaccaatgctatgttcagtaccctgcagagtgctgccatggctgactatggtgcccccgtcgtcgctggcgtcgtccagggtgctgctgctgctggagccactgtcgctagcttcagtttgttcgaagccttcgatggtttttgatggttcgaacaactaagtgtctcttcaccgtctgcttctcttctgattcacagagccctttgtatgccgatggatcgcaaaagatggtgtattgcaaaactttgcaaaggaacgatcgtag

SEQ ID NO: 1970 - DNA, 1875 bp, Aureobasidium pullulans
atggctatcaattcgctactactatcggcctcgtgctttgctatcgcacatgccgccatctccctaacaccggccgccaacgcgcctgcagcctctggcatttcacaagttctcagtccttcctatgctggcctcggtatcgagccttccaacttgttttcattcactggcaaagacactcctaatcaactttccatcaatctcctccaacatctcacaaactattccggcgcacctccgcatctcagacttggcggcaacactggcgaccacatggtatgggacgcgtcctacgatgcattcaaccttggcaagaaccccaatcaagaagagactgggcccactcctgcagacggttcggttttcggacctggctacctcgaggctctcgagcgtttccccaagggcatgcccatcacttttcagctgaacatggcctacgatgaaggcgattacctcgaccgcattgacgaagcagctgctgccgttgtcgacggtctcaacaacacttcgctctactcgttcgagattggcaacgagcccgatttgtatttgcaaggctggcaattgcagagaaacggcacttggaacggtcaaatctacacgcagcagtggttggcaagagctgagtcggtatgcaacaacgttctgaagccgcgaggaatggactgcaacttcttcgaggctgcccagacggcctcgaccatctcgaccactttcaccctgaaggacatggccgacgccggtatctccgaagaccacaacggcactacctatctctcttcatggaaccagcacgattacttctactttgtcggagtctcgacttacgacatcactctcaacatcatgatggactttgacagaaccgaaagtcagttccagtactggactacagagatcgaatacgctcactcgaccggcattccttacaacctccgtgagatggccaacgtcggtcccattggactgaaggatgtcagcaacactttcggagctgctctgtggttcctcaacttctactgctacggtgcaactctcaacatctcgtccgttgagatgcacatgaccgacaactcgtactcctcgccttggcagcccatcttcattaatggagaggccgccaatgtccgtcccagctactatgccatggcagccatggctcagctcattggttcgggcaacggtactaccagacttgctcccctggccaccgagaattcctatgtccgtgcctacgctggatatgccaatgacgatttatcctcattggtcatcatcaacgctcagcaggtcaacacctctgctaccgacaagggcagcatcgacttccagatctcgctccccgactacagcggccagaccctattcctctcatacctcagtgctggaggtgctgatgctgtcagcaacgtgacctggaacggtctcagcttcgaaggtgacagcattggctctgtcagcaccgcccaggaccaaagcggtcagactgtcgccctcgataacaatggtgctgcaacaatcaccgttcgcgactctgaggcagtcatcgcacacctcggtgctcgtctgggctctcttcccgtcactgtctcgaactctacatcttccggttctggcagctccggctccggttcaggctcgagcaaaacatccagcgccagcactagcggcgcagcatccacagtgagtacatccgccaccgcatcctccaccactggaggcgttcaagctgccgcagcatcgggcagcagcagcgtcgctagtgccagtgccagcgcaagtgggaccgcgcaatcgtcgagccaaatgctgaccaccgacaagaccctcctggctctccttgtggcccttgtgtgtatcttcacatcctag

SEQ ID NO: 1971 - DNA, 2640 bp, Aureobasidium pullulans
atggctcgtttcgcagctcttcttcctcttgcatatgcactgggcgcctttgctcagagcgtggcatacaatgacccaaacactggcattgacttcatgagttatcaagattcgaaatcgggagcaagattctcggttgccactccggagactcttggtagtgacttcattggtcagattgttgctcccactactgagggatgggctggtctcgacatgtcggcccagatggcgagtcacatcctcgtagtggcttggcccaatggcgacaaagttatgtcgtcccttcgtgaggccactggctacactacccctcctgtctacactggtaatgctactaccacacccatcgccaacggtactttcgtcaacagcacccactttgcttataccttcgtctgcattgggtgtatcactggcgaggacgacagcttccccaacactgtcagcggcaacgctttcggatgggctttctctactgatgctcctgctgcgccttcttccgaggagacagctctgaacatgcacactggttttggtgcatttgctgtcatctttgccaactcttcatctgcttcctacgacacttgggcttcatgggcagaacctgttcccgcagtgaccacccctgttgctggcaacggtacttctagctccaactccactgttggagtagacactggcaagaatattacctctaccgcccccattgccaccaccttgaacaccacttatgactacatcattgctggtgctggtcctgctggtatcatcgtcgccgagagactcgctgagtctggcgccgaggtcctcctggtcgaacgtggtgatgcatctacctacgccagcggtggtcgtgctgttgagtcttggaacgagactgtcacccagtatgatgttcctgctatggcatactacctttccaccgcaggtgtcaccaacgaatactgcactgacactgccgacatggcaggctgtctcctcggtggcagcagcatgatcaacgccctcatgttcgtccgtccccaagagcgcgatttcgatgacaagtggcccactggttggaagtggtcggatgtttcttcctcagccgagagcttctatgagagaaaccctggtaccatctctccttccaaggatggccagagatacgatcaaggcgcttatgacgttttgtcttccttcttcacctccaatggctggtcatccgtcaacgcacttgaggagccaaacaagaagaccgatgtgttctctcatccaccttggaacattcaagacggccttcgcgctggtcctgtcttgacatatctccctcttgccaaggcaaagaagaacttccacatccaactcaacagcactgtcatccgcgccgttcgcgaatcctctttcgtctctggtgttgaagtcgaacttgttgatggtagcagacagatcatcaatgtcaagactggtggtaaagttgtccttgctggtggcgctctcagcactcctcgcatcctcatcaactctggcatcggtcctgccgaccaaatcaagactgtccaaagtggaagtgtagctgttactcttcccgaccaagctgagtggattgatcttcctgttggtaagggcctcaaggatcaccccatcattactctcaagttcaataccaagacttcgttgtcttccctcgacaccacagccttcaccgaccccactcaggtcaacgccgatcttttcgcccatggcagtggccttctcgtccaaggcggtcaacgcctaaacttctggtcctctgtcaacggcaccgatggcatcgaacgcttcgtccagggcacttgcaactctccctccaacgacaccatcaagatgaagatctaccttacccatggcttgacctccacaggcgagatcggcgtcacaagctcaggagccacggaatatatcactcaaccatggctcaacacccccgaggacaaagacgcccttgcctctttcgtagaccgcttgatctcgtttaccaaaactgcaaactcgactttgactcttgacgccgggctcaccgcttcctccaacgtcactggcgctgatttgatcaagacttttgtcacgggcagtcatttcgtgggtacggctaagatgggcacagatgatggaagaaagggcggtgatgctgtcgtcgatttggataccaaggtctatggcactgataatctgtttgttgttgatgcgtccttccaccctgatttgcctacgggaaacacacaggcgattgttatggttgctgctgaggctgctgctaagaaggtgcttgctgtgcaggtcagtggtggttcaaacggtagtgtccctgcttcttccgctacctctgttgtcgcttcaagcaccgtcgccgctacaacttcctctggctctgctacctctgctgcttctgcagtaacctcagcaccagcaatcacttcagcccctgcatcttccgccacagtcccaaccacctatacgacaaacaccgccacaacttccgtcgccgtccccagccctgcttacacacaagttcccaaatacggtaaatgtggtggaaatggatatgagggacctaccaaatgtgctgagggtagcagttgtaaatatcagaatgattggtattggcaatgtgtttag

SEQ ID NO: 1972 - DNA, 2039 bp, Aureobasidium pullulans
atgtttatcaataccctttttcttcatgtctttgtgctgtccgcactcggttcggccaaacatgttccacctggccctctatctccttactgtggactcaatgtgacatacaaacaggtgatttatagaagcgtctcagtttgcgaactcttgctaatagcatcagaactccatttgcgaaactactcctggagtcaattctttctccggttatgtgcatcttccatcctctctcctggcggattcgcaaaatgcgtctgatccgtacgatatttcgaccttcttttggtactttgaggtcagtaaatatggttattttcagacgaagctaaaactcacatatcaatgcacagtcaaggaacaagccaaggcatgctccgctgactatctggttcgccggaggacctggcgcagcttcctctttcagcgccatgaccgaaaatggcccatgctacgtcaacgaatatgccaacgacacagttctcaacccgtactctctcaacgagaactccaatgtcttgtacattgatcaacctgttcaagctgggttttcgtactcctctttccagaacagcacttacaactttcttgcccttgatacatcagtttctcctgttacgccgatggatgcatacgatggcgatgtcccgcctgagaattcgactttcaagtatggcgtttgggcggatcaaagtcggaggcatacggctagtacgacgatggatgctgcacgaccggtctggcatttcctgcagagttggttcgagaagtgagttaaccgtttgctggttgatatgattcgcactgacaatatgtctagctttccagagtatcgtacgagtgaccgtcgtgtcaatctttggggcaactctgtaagtggagttccttctagtcttgagtattatctttgctgatggctctctcttcagtatggtggtttctgggtcaccggattcacttctcacgttcttgctcagaacgcacttgtcaagaatggaacacttggtggtcgagtgatccctatcaacaccattggtattacgaatggatgtgtagatgcattcacaaccgtacaatcctacggcgacatcgcatacaataacacatacaatacctccttcatcacctccgaagtctacgccgacatccaaaacaacatcaccaagtccggagggtgctacgaccaaatccaccaatgccgagctgcagtcgctctctccgatcccacaggcactggaaacaacgataccgtcaatgccatctgtgccggagccaccgtctactgtcttgcttacgcaggcaatggagcttacttagctgcttccggccgcagtgctttcgacatggcagaaaatgccagtgccccatatccaccattttccgccacgacctatctcaatcgtcctgaagtccgtgaccaactcggtgttcctgtactgttcaaaccaggctccatgaccataaacaacaagttcatctacggcaccggcgatctcgcccgtgtggatggtatccatgcactcaacgccatcttagcttcaaatgtcaatcttgcactggtctttggagacagggatacaagatgcaactggctcagtggcgaaaccgtcgcgaatacaatcgattggaagggcaaatccgcctatgcagccgctggataccaagaaactcaaacaaattcgacatacatcggcggtctgaccaaacaattccaatccctaagtttcaccagagtattccaagccggtcatgcagtaggcttcttccaacctcaaaccgtcttcgagattttcgagagaagcagtgtgtggagtaccgatgttgcgactgggaaacagaagataagtagcaatgggacgtatgggactaaagggcagagcagtgcgtggagtcatttcgaggtattgccggaggtgccggagccagtttgcgatatttgggatgtggggacgtcgtgctcggaggggcagattgaggcgttggtggaggggatagcggtgattgtggatgatgttgtggttagtccggcttatcagtga

SEQ ID NO: 1973 - DNA, 3036 bp, Aureobasidium pullulans
atgcgtttcatcgacaccgccatcccgctctttgtgggcttgtctgctcttgccgaagcgcaggatgttgacttcggcaaagtctactcggttaagccgcaactaaagtcggccagtaacaccggatcatcgacatcgtcagtgaacacagcctcgactgcctcctccatcgtctcggtcttaagttctcgccatgctgcaactatggtgccttcggggtcgtcttcttcttcttctcagaagtcgtcaagctctgccaaggctagtagcagctccaagtcatcgagctctgccaagtcaagcagcgcatccaaatcatcggctgcctcttccaggcagtcatcgagtagtgcacagagcagctccagcaagttatcgagcaagtcatcttcttcggtaaaagcacccacgaccttgagcacacagaaggccaccagctcgacgaaacagtcatcatcctccaccagcagtaagacttcttcatcttccgctgctgcgaccaacctttgtcctgctgtcaacaacaaggatatcaccgactccaaaggcaaggtgtacaccatcaagtgttcctcggataccaatgtcggctcattcaccagcaagtcggccactaactcctacactgattgtatgactatttgcgataccacctctggatgtgttgctttctcgtatgtcggtggtgataacggaagcggctcaggcacgtgttggatgaagaattcagctggcagcgccatcgctgctggcaagaactatgttgcaggcttcttgaagtcagccactgttaacaagggcaaagcatctgtttccagcagcaaaaagtcatcttcctcatccaagatggctacttcatcaaagaaggcttcctcgtcttcggccaaggtcagcacttcggtcaagaaggtcacttcaacttccagcaagcgatctacgtcaacctctaccaagtcaagctcaaccaaagtcaagcgtgcaacagccactacttgctccaacccaaattcaatcctctacaactacgcccctaaccccaacacacccactcaattcttggtcgactcaaccctggctgccttgtctgctgcacaatggtatcctcccgccggttacagcactagcttcactggacagttcggtggtcttttcgcaccgaactatctcggctaccaacagctctcttcctataacactagcgcatgtgctgcctactgcaatgcccgctctgactgcaatgctttcaacatttacttcgagcgcacgcctgtcttcattcccgatgactcttgcccgagtcccaacgctgctgcgaccatcacttgcgcactctacggcagctctgtcgatgcttcgactgccaccaacatcggccagtaccgtaaggacttcatggttgtcattcaaggatctaatggctacaacctcaaccctgctcccgcttccgtttcgtcgttccaaggtcccaatgctcttgatgcggttgcttacagcagcggtatctacttggctcagcagtacttttcgacatacgatgttacacagtgcagcgctgcttgtaccgcctatacagcaaagtcgaagtcgactgctcagagcaacaaggcttcgacctactcaccttgcaactacttcaacgtcttcaacttgacgttgaatggacagtcgcagatgatgggatgttatttgttcagcacttcggatgcccaaaactacgacacttacagaaccgcaaagggcagcgatggtaccgtctacaatctgaccaactcgtacggatatgctctctatccccaagataagggtctgaccagtgtcacttggtctgccgcacccaccggcaccggcgcttcttgtgcatctcttggcaaggccggcgatgctctgattgattacaacactgttaactacactcttggttgcggttacgatgttcaatactctaacgatatcggtaaccagaccactcctgacttctactcctgcttcgctatctgcgacagcggtgcctaccccgggtgctctggtttcgcttatttcggcaacacttgctacttcaagaacctgactggttcgtctcgcacacctcagctggacaactacaatgtcgacatggcttggcttcctgcctcatatgctggttttggtgcctctactgtcgcagcgactgtcaccttcacaactaccactattgcatggactggtgcctcgactacaactgtcacatcgatcaacggtcttcaaggaaccattatcgtcgagactcccggaaaggtcacagctgcaactaccaccacctacgtcactaccgccattgaatcgggtactgcgtctactatcgcaacccagaccatcgctcctaccggtactggcaagaccggtactgtccaagtcatctaccccacacctgccactacctgcggaaacaagggcgctttggcaggattgtactccaacacattctccaacctgcaaggcactaccagctaccctgccttcaagcccgagtctttcaagaccaagaccccttacgccatccagactgcttcgtacatgggcgagtacaactatctcaaggatacacctactgtctatggcaaagccctcacatacgcccaggccagcgtcctgactctcaatcacgtcttctatctctttgcaggccacggtactggttactatagcatcaacttacctcaagctgatgacatcacgctcgtctggattggtgcaaatgccttgtctggctacacacgtgcaaatgcaaacatgttgcagacctatgtccaaggcacccccacccctgtcacccttgccttcttcctctctgcaaacacatacacgccaatcagagtcatctttggtaacggagcagaggtcggtaacttccaaatgaatatgtatgccccagatggcacccagattcttggaagcaatgctggtaccaataccggtatgatgaacccggatatcgtccagttcccttgcgacaccactctgggcggcaagttcgctgcttttggcaaggagacttga

SEQ ID NO: 1974 - DNA, 960 bp, Aureobasidium pullulans
atggtatccctgcgcaccctcctcacaggcagtattcttgccataggcgcactgtcgtcccatgtccataaaagagatgtcaaccctggcccagtcaagggagataccttcatccacgaccccacggtagtcaagaaacccgatggcacatatcttgctgcctttacagccaacggcgttggcttgaagacatctatcgatcgcacaacctggaaggatgtgggcgctgcgttccccaacggcgcttcttggacgactacctacactaagggcgacaaaaatctgtgggcccctgatttgtcctaccacaacggtcaatactacatgtattactctgcttctagctttggaacgtcccgatccggtatcttcctcgcagtgagcaagactggtgcctccggctcgtggaccaactacggcctcgtcgttgagtcgttcgacaacagcaactacaatgccatcgatcccaacctctacgtggcctccgacggcaaatggtggctctccttcggctctttctggggtggtctgaagctgatcgagctgagcccttcaaccggcaaacccatcaaccagaaaagcatcgcctcgatcgccgctcgtcccaacaatggaggggccatcgaagcgcccttcatcaccaagcacggcaactacttctacctctgggccgccttcgacagctgctgcaagggcactgcaagcacttaccgcactatggtcggccgctcttccaagatcaccggtccttacgtggacaagtcgggcaagtctatgatggaaggcggcggtacccagattctcgctagccacggcaacatccatggccctggacaccctgcagtcttcactgataatgacgccgacgtgcttgtctatcactattacaacgctgctggtaccgcccaacttggcatcaaccttattcgttacgacaatggctggcctactgcttactag

SEQ ID NO: 1975 - DNA, 3302 bp, Aureobasidium pullulans
atgaggttctccaacgctgctgtagtctcaaccatcctattcctctcggtatgtgcagccgagctcgagtgcgctagtcgtactcctacagcctcacaagcgacacttccgttacatcttggccccacctatccgacaagttcctctcttgctacctccgccgaacctcataccgtacacactcaatgcgaggtggtgcctcttggatggggtcgcgacgatgcaccacagatcctaaaggctgtcgagctttgtggcaacggaggcacgatcaccttgcctgcgccttacacgtacacaatctcaagtcgtctctacatgcgacttactcgtgcaacattgaacgtccatggtcttctctcattcacgcccgatcttggttactggatcgaaaactcccaccgcgtcgagttccagaacatgagcacagcttggatcatcgaaggtaatgactttattgttgatggtggaggctggcaacaaggtggcatcaatggaaatggacaggcttggtatggtcgagccgcaggtcaaagtaaccagtatggacgtccgatcagtctttcaatctacaacagtgcgaacgtcagcatcaacaactttgccttctatcaaccacagttctggtctgtctgggctcaagactcgcgaaatattaccatgaccaacatctacatcaatggaatcaacaccgatcctgctggcaacagttcaaattatgccatcaacgtcgatggtatcgatactatgcgcgtcgatcagatgagacttgagaactggacattccacggaggagacgactgctttgctccgaaaggaaattcgacaaacatggttctacgcaacttcacctgcataggaggtggtatcgctttcgggagtgttggccagtatcccggtcaccctgattttatcatcaacgttagcgtgagcgacattcgtgtcagtcaaaaaatcgatgcaaagtatggtggcgcggctgtcgctgcaggggcttacttcaagtcatgggtcggagtggagatgggaaacccacctcaaggaggaggcgggggtaccggccgagtgtcgaatgtgactttccacaacctcattgtcgaaaataccacacaggctgtctacatcaacaagtgctacttcaaagtgcctgctcaaggtgcatactgcaacacctcaacattcgagttccaagacttcgacttcaacaacgtcagcggcacagttcgcacaccaattggtgtcaacctcaactgctcacaagcagcaccttgccgtgaactgaagttcagcgagctcaacttgcggcaatccaaaaccaacaaaactgccattgctgtttttgagaatgctcaaaacgtctttggattgagcgagggtacccgaatgttttcacattgatggaagcaaagcttactgaaatattgaatcttccatagatgtaaggaaccataatagtagataactacctacgctatatttacgcctcagaccacgtattgacacttgcattcgttactgtgtacgcgatcgtgaatcttagcttcttggtggatgaagacatctttgcaagattcgctgtgttgggtctaaggttttcgtattagatcaacgtcagactctgatgtatggggacgcaatgtatcgaattttagccctctggttctggagatagacttgtgagaactaagaccttgatgtacacatggctacacggtattaccaagagttcaaccgaaattggcctcttggggcgtggatcggtagagtttgctgtgcttcaggtgccttcaatggtgaaagcatgatctccaaacgtgtctcgtatatcagaaataccctcgtaatgattctcatgggttgagacatcggtataccaagcgttatacatgcgaccgcggtacatggaaggtacatcacgttgtatcctgactggacaggaacgatcatccactgcgcatatcagcctggtatacgaggtttgtcttgcttcaaaaacccacaacacgagatttatcagtgttcatcgaaagatgcttgtggtcagatttagcgacagtcgtggtcaaggcatatataagtcctcgcatctttgctctatccacctcaccatctccttcaacgatctcacaagaacgccatactttctacaaacaatgcattgctccccgctcgccaccctcctcactttggtcatactcgttgagccactgtttgcgtaccagaccatcgcccatcgcggtctttttcacgatgtcaacgaccacaacgccttggctgagaacagcgttaatgcaatgtatcgcgctgaagctttgggtctacctggtgtcgaattcgatctccggttgagctctgacaatcaagtccttgtcttccacgatatgatatccaaccgtgccacttccaacgacaactatggtggccgtcttgatgctgttgacgtgtccctgaatcttcagccgctagtggctcccatcctggtcaaatctagaccagcgaactcctggattggcaccggattgaaggctttcggtcgcaatggacagatcgttcctgccgatggcgcacagaagctggaaacactggactcgatgctctcccacttcaagaacctcaacaatcctaacttctggttgattctcgacatccaagacccggtcatcttcagcagagcggcagccgcggtgaacgcccatggtttgagtaggactgtattcctcaaattcttcgcaacgaaagccatcaactccaagggtatcaaatacaatggagccaacacttgctatcagtatgcgcgtaagaatcatctcagcgatctacaaatcattccccagatcaacgatggagagctccatttcgaaggagaaactgcgtacctcaacgtcttcaacacaaagttatcagttagagaatatctccagtgttgggcagacgctcagaaagctcattctggaaacggagcagctcttatgcccatcgtgagtgcgagtgttccagccaataacgaagtcgcattcaataccgctcgagatacgttggcctgggccaagagcgcaggcagaaagaccatgtccattttgcccaatccagatgctggtcgtattatcaacacgcagtgcactttgtggacctatcaatccggcagtgtcaaggcagcaagatttgacgaatctgcacgcaagacgaaacttgcctttgtggaaatcgcgaagcctgattatgttgttcttgacttgatgggtgatttgggcaatcgaagatggattggcgacttctctagctatatcatctatctttgctga

SEQ ID NO: 1976 - DNA, 1129 bp, Aureobasidium pullulans
atgcattttctcacttccatcgctaggctaagtgccattgccgccatcactgtttctggtgtaactgccgctcctgcatctacttcgcttcaacctagagcagacgattatgtcggataccttgtttccaccttctcggatgtaacacctgctgtccaattccacctttccaagggcaatgatgctggcagttatacttttttgaacaagggtcagccggttttgaagtcgactgtggggacgaagggtgtgagagatgtgtttttggctcatgatagtgcgaggacgaattactacatgatcgctactggtgagttcgaaaagagttcctgaatgattaatgtatattgacagagaacagatctcgatatcaatgctgcaggattcagctgggatgccgcaacaagaacaggaagtcgtggtatcgtggtttggagttccaaagacctgatcaactggtctgcatcttctctccgcacgtaagatctcccgtccatccatacacttgctgcaactactaacaaaaggcagtgtcgagagcgcaaacgcaggcatgacctgggcaccctcggcagtctgggacgacgcaacatcccaattctacgtcttctggtcttcccgcctctatgccgattccgaccctaaacacactggcgttgcctctctcgaccgcatccgttacaccacgaccaaagatttcgtcacctttgcacccgcaaaggattatcttgctcttgccaacacacctctcatcgaccaagaattccaatatctaggcaagacaggctccttcgcacgtttcttgaagaacgagacggtgaatcaggtctatgtcgagacgacgactggtggtttgtttggcaagtggacgcgtacgcctggctatgtgagaccagagagtccgagagaaggtcctgcttcgtttgttgacaacgttactcctggactctatcatctgctgttggacgattacactcagtatgtgccttaccagtctaccgatccggcaaagagtggtgcttggactgcttcgaactaccccaacttccctaagggtctgaagcatggatcagtgactccgttgacacaaaaggagtacaatgctgttgccgcaaagtatcccgcttaa

SEQ ID NO: 1977 - DNA, 2346 bp, Aureobasidium pullulans
atgcgcgtcactcaggttatcgctactcttgcgccgatcggtcttgttgccgccggccctctgcataatcatcatcgccatactcaccttcatcatctgcaccatcgttccgtcaatggcacttcttccaactacaccacaagcgataccgcaaactctacaatctttgctgatcacatcacatacgagacttctacagtcaacgttgctgctaattttgctgatggtactgatgcaagttcggccagctcggaggcagcttccagcaccatctcagaatcaagcagcatcctctccactactgcgcagtcagaaactgcttcctcaacattgtcactctcttccggtgcttcgtatgtgagcgggtctccatcgaacgcatcatcggccttgatcatttcctcctctattccttcggaagcatctgtctccatcgttcttgctgtcgcagcaaccacacccactgctgtcggcgcactctctcagactgttgataccaccaccagcatatctgtcgacaccatctataacaccatcactgtcaatggagctgtcactaccgcatctgcaagcgagaagactgtcaccgtcactgacgttgtgaccaactttgtcactgcgaccttctcggcattggcacccttcaaggctcctgctatcaaggttgccgcaatttcttccggatcttcttgtgcagccatcaagactagcatcgtctaccttcccgccagtgtctcacccactcttgttgctggaggtgctgcatccagcaaggtttcatcgattgcttccaaggctaccagccaaagctcaatcaggtatgtgtctcagtccgcttcgaagtcaagttcttcctccatcaaaaagtcgagtacatcttccaaaaagacgagcacctctgccattcttcccacatctgttgcgaagcccatctctaccaagaaaacaagcacttccatcaaagcaagcacttccatcaaagcaagcacttctaccaaaacaagcacttctaccaaaaagtcaagcacatcaactaagaaaacaagcgcatcttcattgaagattagcaccgccacctcggtcaagaaggtcaccagcagcacttcatctgtcaagaaggtcacttcctctaccaagcctgctaccttgattactctatcctctctggttcaaaagggtgccactactaagactatcatcagcacttccagcattgcagcctatgttcccagctccagcgctaaggtgtcgagtaagagtgctgtcagctctgctgccagctctgcgaaggctagtgcatcttcttgcgctgctgttgccgctcctgcttctactcagactggtatcgtctctggctgtaccaagtggtacacggccaagtctggcgattactgctatgcaattgcttcggccaatggcatctctacggacactttcatgtcctggaaccctgctgtcaatgcaccctcttgcgacagcatctggtaagatcgacccttttcacctttttgaaaacctcaatactaaccatccttcagggtcggatacgcctactgtgtcgccgcaggctgcagctccagctccagcaacacaccttcctcggctgccaaatcctcagcccaagcaagcaccgcaaagacctccaccgtcgccaccgccgcagcaccatcgaccaagacatccacctccgcagcgacttccaccgtcgtcgcatcttcctcgtacaaaatgtacagcggcaacggcaccgtcgccgccggctggcccgcccaaaaccaatggatcgacttcgacaccatgttcaccgccaacatccccatcatgaagcagtcctgcggcaacaacggctggggcgccaacgactcggacgacgaaatcgccgccataaaagccgcgatcaaaaaggtttcggcatcctcaggcgtagatgcacgtttcatcctcgccatcgtcatgcaagaatccaacggttgcgtacgcgttgttactacctcttggtcagtccagaacccgggattgatgcaagatcacgcaggcaccggcacctgcaattccggcggcgtgatccaggatccttgccccagcagtgagattgagcaaatgattgtggacggcactaccggcaccacttctggcgatggacttgtgcaatgtttgagccaagccgccgcgtcagatgtatcgcaatattaccgcgccgcacgcatttacaacggtggatactctgggttcagggctgatgatttgggtactggatgttgcacgctttgttatgcatctgatgtcgccaacagactcaccggatggagttctggtgtcagtggatgccatttgggcactgcatag

SEQ ID NO: 1978 - DNA, 1291 bp, Aureobasidium pullulans
atgagatctctcggtttgttcaaaccaacatgacttcctctacttccagctgacctctgaaagcattccagtcattgtccctttccggactggcagcagtagctgccgctgccccagcttcgaacatcgccagagccgctgatgcttgtcatgtcacatcgtactccggtgtcgctgctgctgtctcttcttgtaccaacatcactctggatggtatcgctgtgcccggaaacaccactcttgatctcaccaagctcaaggcaggcacgacggtgacgttcgctggcaagacaacttttgcctacgccgatgccaactacgatatgatcaagttcgctggtaccaacgtcgtgctcacagcccagaagggcgcgatcattgacggaaacggtcaagcatggtgggacggtctgggttcgaacggaggagtcgctaaacccaaccacttcattaccgtcaaggccatcggcaattccgtcatcaaggaccttgtgatccaaaattatcctgtccactgcttcagtatctctggcagtaacggccttgttgtgaagaatattttattggacaactcagctggcgacgcacccaacaacagatccaatggacttgccgctagtcacaattccgatggattcgatatttcaagcactgatggcatggtcctgaaggattctcgggtggtgaaccaagatgactgtgttgctattaccagtggcaacaatatcactgtttcgaacatgtactgcgatggcggtcacggtctgtcgatcggtagtgttggaggcaaggtgagcatacatttgctccctccatcgttcgaccatcttatctgacttttacagagcaacaacaacgtcaccaacattcttttcgagaacagcaaggtcttgaacagtcagaatggcgcaagaatcaagtcaaattctggcacgaccggctatattgccaagtaagcattacattctcttcgtcctaatcaagcaagcctaacattctctccagcatcgagtaccgtaacatccaggtctcgaacatcgacatctacggtatcgatatccagcaagactacctcaacggaggcccgactggcagcccaaccaacggagtcgttatcaagaatatcactatgtcgaacatctctggtactgcacaggccaaggccagagactactacattctctgtggcgatggcagctgctcagacttcaagttcaacaacattcacatcactggtggaaccaacaattcctgcaatatcaagcctacaggaaatttccagtgtatttag

SEQ ID NO: 1979 - DNA, 1941 bp, Aureobasidium pullulans
atgaagtcattcactcttttcacttctgctctggcagcattcgcaagcactgtcagtgccgctggtgtcaccggtgccgctgagggtttcgcaaagggcgttactggaggtggctctgctgcccctgtctacccttccaccaccgccgagctggtctcgtacttgggtgacagctcgcccagagtcatcattctcaccaaaactttcgatttccgcaacaccgaaggcactacttctgccaagggttgctccccctgggtatgtgatactgataagacatcaccacaagctatccagatatctgttcaacctttgcgaactcatataagggatgtttgtggtggtggctatcgatcctgccagaataatgatactaattttcaataaagggcaccggcagtctctgccaacaggctatcgacaaggacaactggtgcgagaactacgaatcctcgtcgccgaaggtatgtactgtagctccccgggatgttctttgtggctccaggatgttttttgtggctccaggaattttttttggtggctccagaattttttttggtggctccaggatgttttcttgttgctccaggatgttctttgcagctccaggatgttctttgcagctctaggatgttctttgtggctcacagctgatgtaatcaggtttcttccctcacatacgacaaagccggtatgattggcatcactgtcaactccaacaagtccctggtcggtcagggctccaagggtatcattaaggggaagggtctacgaatggcaaacggcgtaaaggtatttcttagggtactcctggttgcacagagcgatgctaactgtgtttccagaacatcattatccaggtttgtggccaattcgattcttgggcgattttcggtctctaacagcggaacaagaaccttgctatcactgacatcaaccctcactatgtctggggcggtgacgccatcaccttggctggtactgtgagttttgaggtcctcaaggcgttgttgtgagctgtatactaacatatcacaaggacatgatctggtaaaaggaatatttcaacacccatgtttgaccttacattctgactcgttataggattgaccatgtcaccacacaaagaatcgcacgccagcacatcgttctcggagagtctgcctccggtagagtcaccatctccaactgtgatatcgacggtgcctcatcttggtcggccacctgtgacggtaagcctcccccagatggaacagtaaataggaagaaagaaaggcgaggagaaggagatgagaaacagaaagaagggaagaggaagaggaagaatatcagaaaagacgaaaaagaaaaaaggagaaaaaagccaaaaatctcccagaacctcccctaaactccccaatacagtccaggactaacagcatcaccctaggacgccattactgggccctttattttactgggtcctcggatttaatcacgctaaagggaaactacatccaccacacttccggtcgttctcccaaggtccagggcaacactctcctccacgccgtcaacaactactggtacgacatcgactccaagggtcacgctttcgagcttggtcagggcggctacgttctcgctgaggggtaagtcatcatacttctgacttgtggtacgtgaattggcatactgacactgtaaaatagcaacaagttccaaaatgtcaacaccatcattgaagctggtgctactggcaagtacttcaccgtgccctccagcggctctgcttgcagctctgtcctcggccgcagctgtgtcaacaacgccttcggtagctctggtctcttctcttccgccgacaccagcttcctcagcaacttcaagggcaagaacattgcttctgctgctgctgccagcaccgtctccactgccaacgtcggttacggtaagatctaa

SEQ ID NO: 1980 - DNA, 3232 bp, Aureobasidium pullulans
atgttggttcgtagaatagctgccattgcagcaacgctcctcccgaaagtctttgcccagaatatcatcagccttagtggccacgactggatcttgtcaaactcggacttgaacatttcctgccctgcctcattgccatctcaagctcatcttgaccttcacgcctgccaggtcatagggtcgccatactatggcctcaatgatttcaaccttcggtttgtagcctgggccaattggacatataccagtgctcccatttccaacctccaagccaattcatcttcaacatggctagtgttcaatggactggacaccttcacaagcatatcattctgcggagagcacgttgccgcaacaaacaaccagttccgtcagtactatttcgatgtctcggccatccttgacgactgccaggacgaaccagttcttagtgtcaatttcggaagtgctccaaaaataacacaggaaatcgcagacgaacctggtcaagagacatggccatacgggatcgagatcatgtatgagtttccgaacaggcaatttatgaggaaagaacagaacgattttggatgggattggggtccagcctttgctcctgcaggtccatggtatgtgttgtggaatcgcggtcagatatgagaaacgtgcttattgtttgattctaccaggcaaccagcatggatagtgcaattgaacaacccagaggtctacatcaggaactctcttgtcgatatctatcgccaaggacagctaaacaacctacctccagatcagagccagccatgggttgtgaatgctagtctggactacttcggagcgattccgaatggtgcatctctacgctataccatctctactcctgacaatactactgtttcgagcgggtcgttatcaaacatcaacataacccagtctacagtgacaggatcgacagtggtcgactcttctcttttcgagctatggtggccgagtggcttgggaccacaaacactgtacaacatgaccataactctcgaggacagccggaacaacacactagcaagtgtcaacaaaaggaccggtttccgcaccattgtcctgaacgagaacccgatcagccaagcacaacttgatcaagggattgcaccaggcaacaactggcacttcgagatcaacggacatgagttctatgctaaaggctcgaacttcatcccacctgatcctttctggcctactgtcaccgaggacagaatgcgaacgcttttcgaggccgtagttgagggaaatcaaaacatgcttcgcatttggtctagtggagcctaccttcccagtttcatctatgatcttggagatgagtatggtatcctcctttggagcgagtttgagttcggagatgctctgtatcctgtggatgaacttttcctcgataacgtgagggaagaggcagaatacaatgtgcgacgagtcaaccaccatccctcgctggctgcttggatgggagggtacgtatctcgatagcgtgactcgcggcaatcgctgacgatattctagcaacgaactggaaaacttggagttggcgaacgttaacaacacagctccagaagagtatgatcgctacgtgtctgagtatgagaagctgttcctcgacactcttcttccagtagtattcggcaactctcgaagtatcagctacgcaccctctagcacaagcaatgggtggctggagctcaatttctccaacccgatccccatcgttgagcgatacaacaacctgaccgaagggtcagtatacggcgagacaggttggtgaatcaattcctgcctttccgtgtgctaaaccttgtcacgcgtacaactatgaaacagcacaatttcagcattgttagggatagcctccactgagagcgtggtaattagcgtctctctacggacgacttaccgatctgaaaaacattgtgcatttttacaggccagacgactccaggcgtggccgcaggagatggctggaagtgacaggttttagcatacggggaggtggaacgactctatgctgacacacgaatacagatcattacaattatgatccgaccgtcgctttcaacctctcctcataccctatcggtcgtttctcaaacgaattcgggtaccactccatgccctccctccagagctggcaacaagtgatcccagaatcccagctctacttcaactcttcctacgtccagctacgcaatcgccactacccacctggcggtctaaacaccacaaactactataacagcagtcttggaatgggcgagatgacaagagctgctattgagtggtatcctgtgccaaacaagattgatagtgtggccaatttctctgcttggtgtcatactacgcaaatcttccaggcagatttctatcgctcgcagattgagttttatcgcagaggtagtggacttcctgagcgtcagttgggatctttgtattggcaacttgaggaccagtggacggtatgtatcttgacagctggcagaaaagacatgtggactgacctgatcaatgacaggcacccacctgggcaggcatcgaatatgaccgtgagcttggagctggccgctggaaagtgttgcactacattgcaaaggacgcataccaaccagtcatcatcgcaccatactataatgtcacgacaggtgatttggaggtatacgtaacctctgatctctggcaagccgtgtcaggaacagctagcttcagctggtacgactggtcaggtaatcgcctaaacatctcagcagcacccagcgcacaagtcaacgtgggcgccatcaactccacacgcgtgctttcgaccaacactttcgacatcttgaacagcactggcttcaactactcggatgtgttgctgcacatggaaacgacagtccaaggtatgatgcccaacagcaatcagagcaagacattcacacatgaaaactggttccacgcgtctccattgtcgacagcagcgatggtagatcctgggcttgagttgtcgtatttgaacagcaccaagaacttcagtataactgcgacttctggtgtggctgcttgggtgtggatagactatccagcaggcgctgtggttacttttgatagcaatggattctggttgctgccaaaccagacacgtgaagttgggtacaaagtcaaggccgactctactgagggtggatggattcaaggagtctcggtggagagtctgtacaataacacgattgcgtga

SEQ ID NO: 1981 - DNA, 2108 bp, Aureobasidium pullulans
atgtttggaggaaagatcatgctaagcagcgctgctgccttgctctcggctacaggagtgtccgcacttgtcccagttcttgacaagaggcagtacttccctgccaatgccaccggcctcaagaccatcactgtaagtacacgacaaagcgacaggctagactgacgacagctgaccctaggcatagactcccggatcaaatgtcaccatccgttacaaggagccaggcaaggagggtgtttgcgagaccacacccggtgttaactcgtactctggatacatcgaccttgctcctgacatgcacactttcttctggttcttcgagtctaggcgtgaccctgccaacgatccgattacactctggctcaacggaggcccgggaagtgactcgttgatcggactgttccaaggtaattaagccccaattatcttgcagacatgcattgtgatctctctagaggccccagtctttaggaaaaagatcgcgcattgatgcagtacttttgcaaatgtcggggcctgacgggatctcaactgtgcatcgaagcgtcaactttcacgaatctccgctgacctgattgacctcagaacttggtccttgcaatgttacagccaacctcacaacccaggtcaacccatacagttggagcgaagtctcgaatatgctgttcctttcccagcctttcggtgttggcttcagttactctgaggaagagcaaggctcgttcaaccctgtcactggctccttccagaacgcgaccgaggccaatgcaactggtacttaccccgctatcaatgccaccgagatcgacaccaccgatcttgccgccattgctgcctggcacgttctgcaaggattccttggtgctttgcctcaactcgacgctgagattggaagcaacaaggagttcaacctctggactgaatcttatggagggtatgtataccataggcgtaaactccgcgagcctatcatggcctcgtcgaatggaagccgtatcccgatttatcgtgtagctttgctgaccatgtcttataaaggcactacggaccttctttcttcaactacttcaacgaccagaacaagctcatctccaacggaaccattcctggtgtcaagcttgacttcaacactctgggtattggaaacggtatcatcgacgagtacattcaggcacctcactaccccgagtttgctgtcaacaactcttacggcatcaagtccgtcaacgatactgtctacaactacatgaagtttgccttgaacatgcccggtggctgtctcgatctggttgacagttgtcgccagtccagagagaccggccaagaaaatctggccacgcagaccatctgttctgaagcacaggatatgtgcagagataacgttgagggaccttactactccttcagtggtaggggcacatacgatatcagacaccctcgcaacgaccccactccccctgagtactttgccgattacttgaacattgctgaggtccagaacgctctcggtgttagcgtcaactacactgagtcgaataacgacatctactatgccttccaggccactggtgatttcgtctataacaacttcttgacagatcttgaggagctgctcgctcagggccttcgcatcagcttgttctacgggttagtaacccctctagtctcatctctcgacttttgctaacatgattgacagtgacgccgactacatctgcaattggttcggtggagaagccatctcgctcgccatgaactacacccacagcaaggagttcgccgcagccggttacgaacccttcactgtggacggaaccgagtacggtgaagttcgccagtacggcaacttcagtttcctccgcatctacgacgctggtcatgaagttccgtactaccagccccaagctgcgctcgccctcttcaaccgcactcttaaccactggaacattgccgacggtactgagatggtcactgccaaccttaccagttacggctcgcccaacgctactcacactcagtcttttgtacctctgcctcctacttcgactgccagtgcttctgccactgatggtgctgatattgtacctatcggatggagatcttag

SEQ ID NO: 1982 - DNA, 2136 bp, Aureobasidium pullulans
atgtctcgcttactttctctttcattcttcgtgctgggtgcattggcacaaggcacttctccgtcatacgactacatcattgctggagctggtcctgctggtatcattgtcgctgagaggcttgctgaggctggagtcagtgtgctcctgctcgaacgtggcaatgcatcaacatacgcatctggaggacgttcccttgtaccatggaacaacactctcactcaatacgatgtccctggtgttcgacactacatcaagaacagctttgccgacaagagcgaatactgcacagacactcctggcaatgcaggatgtatcctaggtggcgggactatggtcaaccagctcgcatatatcccacctcaaaatgtcgacttcgacgacaagtggcctgttggctggaagtggaccgatgtcgccagcgctgcagaaagagtccattctctcaaccctggtagcacaaacccctcggcggatggcgttcactatgaccagacatcatacaacgcgtttgccaacttcttcagtgctcaaggctacacttctgttgatgccatttctgaacccaacagcaagcacgatgtttacagtcatgctccctacaacgtcaagaatggtctggttgctggtcctgttatgacttatctcccgatggcgcaagcaatgtccaacttcaagcttcaactccataccaaggtcatccgcgctgtcagaaacggttccactgtgactggtgtcgaggtggaagttgatggtcagcgtcagattatcagcctcaacaatggtggaagagtcattctcgcgtctggtgtattctcaactcctcgcatcttgttcaacagcggaatcggacctaacgagcaactacaaattgtcgctggtagcaaggcgactactaatgttactcttcccgcaagctccgattggatcaacctcccggtcggtcaaggtatcaaagatcacatcattgtgacactgaacttcaacaccactgagtctgtggatttccttgacacctcatacttcatcaagccctcatcgaacatcaccgacccgtacagtcatggtaatggtatcctcacccaaggatatcagcgattcaccttctggacttcaaacacaacatccgacggcagcgttcgatacttccaaggcacttgctacgcaagcggtcaaaactatgtgtccatgaagctttacctcacgcatggcctcacctcaagtggtgctcttggtatcactgcatctggaaacactgtctatactgttgatccttacctcaacaccgccgaggacaagtacgccattgcttctttcattgacaacctgctcgttcagacacgcaaagcagactcgaccttgatctactctggtccctcaactgacactggtgcttcgctgtccaaggtctacacaggtggcagccattgggttgcgactgccaagatgggtactgatgatggtcgtgtcaacaatggtacatcggtcgtcgatctcaacctcaaggtgtacggtacggataatctgttcgtcgtcgacgcttctatgcatcccgatctccccactggaaacttgcaagctacagttcaggtagccgctgaagcagccgctgtcaagattcttgctttgccaaagcaacagtcactgtcaagctcgtcttcttcgagcagcagcgcaacttcctcgatcagcacttcctctagttcgactagtcagctttcctcagtcagcaccacctctagcacgtccacccagctatcatcatctgctagctccacgctcgttacactgaccacttccgcatctacctcgtctacttcctcatcaacgtcctccacttcatccaccaacactgctcagcccacaaaccctacctgtccaaagtcagatggtacaaccttcacagccaagagtggcgcagtcttccttgtcgagtgctacgtggaccgcgtcggtcatgatattgcatatgtcgatgtccctaccaaccgcattgcagactgtgtgaacaagtgtgatgctctgcctggatgtgttgacatttccatgtctggtactgcttgctacatgaaaggtgcggtcggagagaagattgtcaacagcaagtacatcagaggcgcacgcaggatctcatag

SEQ ID NO: 1983 - DNA, 1397 bp, Aureobasidium pullulans
atgatcagatcactgaccaccttcgccctggccacagcagcctctgctttgtcactctcatcaaatggtgtacagaatggttgcatgttcagtgtccctgatgttggagacttcaatactcagattctccacgattggtcctcttcgtcaactagtgatgatgtattcaaggatcttcaggcctctacttacaccgtcgatgctggtactgctccatttgcccgtcgtttcgatatcgtcaacatcggacaagacaccaaggatccgtccatcaccttgacagtccctggtggtcagcaacatggcccagtcagttcagcacagataaccacaggtgtaagtgtactctttacgtgagcaggccgatctaaagctgaccgaactcaaagtttgcggacatcctttatggatccgtacgtaccgtggccaaggtcagcaatgttcctggtaccactcatggcttctcgttctatgccaacgacacgcaagaagttgatctcgccttcttgacctccgatatctcggtcattcacttgaccaatgagcaactcactcctgatagtgaactatcatcctatcaagtcgatgcaccttctgatgctgcaactgcatggcacgagtaccgtgttgactggcttcctggcgtcaccaatttctacatcgacagcgagctggttcactcgatcgacaagaacgttcctaccaccccctcgttcttcctttggaacagttggtcaaacggcaactcctgggctgccggcccacccgcgtccaatagcgtgctgaaaatccagagcgtgaccgcctacttcaatcgtacctcagtcgcctcctctatcgccgcaaaccccggcgcttgtgtctcgaaccccttctccatcctcagcgcctactacgcagacaagaacgtgaccacttctgcccaatccgctttcatcaacggctccaacctctacatcgacacatcaagccttgacactcagcttggaggtaacccctggtctggcactgcaaagactttgaccttcctctacacctacggcaccgaaacccgtgtctttgtcgctgctcagaactcaggcacttatctcatcacacccggaggcatcgatacggcaccaggtagcgtactcgtaccttccatcaccgcacccgccaaagccaccatcgatatcatctcagtggtctggggcaaatcgcagatctctactgccagtgtatggaatgctctatacaacgactcgatcaagaaatactcattccagctacttgacgagttcttcggcatcgatacttggtggggaactcagaagactgcggtgatctggtatactgctgcggacggatcgttcaaggctgtagttggaagggaaaatgcttgggtcaagtttacttag

SEQ ID NO: 1984 - DNA, 2549 bp, Aureobasidium pullulans
atgctcagatcaagcgctttccaccctcgtataaagccccgtgcggcatggtaagctcgagacgcacctttacatccctttccatttatactaaggtgctattcagtcgcaggctgcttcatcaagcctcgccaacctttaaagacacacgcaaaggcacggctggagtcgccgccgctgtattagttgttacaggcgcatacactctgggatgtcctcgtcaagtcctctatgcggatagtcctgaaggccctgactcgcaagggtggttctcatggccagtggttgtcaaggcagtaaccccggacccgaaggagcttcccacagtgtccaaggccgaaggttatgataatgccaatcaatctcgacccggacagcaggcacctccttctcaaaccaagggtcacaagaactctgacatcagtgaggctttaaacgattccgatgtatcagcatggcacggtatgatcgagagtttcgaaacggccaaagacagcatcgtcaattttgaaatatccaagattggcgaaaaaattgctggaaccatcgtaccacgttgggtcaaagtcatgcctggttacatctctaaattgcaaaatgaactttccatggctcctgggtctttggcagaagagatctggcatgaggcaaatgatcctgagatcaatccagagatcatttgggatgcaagagtccgggtctcggacgacatctgcaaagaggagcgtgattttctgcgcaagaggaaaatccacacgactgctgctttggccaaataccttgatgtaccagagacagagattcatccggccgacgtaccaaccatcgcaatgtgcggatctggtggtggacttcgtgctctagtagccggcacgtcttcatatctctctgcacaggaagcgggattgtttgactgtgtgacttacacagcaggtgtaagtggctcctgttggcttcagactctgttctactcgtctgttggccagcagagtcacggtcgcatgatcaatcacctcaagagtcgcttgaatgttcatatcgcctatccaccagctgcactttcactgttgagtagtgcgcctacgagcaaatatctgctcagtggcgtagtagagaagatgaaaggagtacctgacgctgactttggccttgtcgatgtatacggattgctccttggcactcgtctactggttcctaagggcgaactcggtatctcggacaacgacttcaagatttccaaccagcgacaacacaccgactcgggcgcttacccgcttcccatctacactgcagtcagacatgagatccctaacgttgctcaaacacaagatcgtgctatgaatctgcaggacgaaacatccaaggccattgcaagagccgaagcatggttccagtggttcgaatggacgccttatgaattcttctgcgaggagctcggagccggaattccgacatgggctatcggtcgcaagttcgatggaggctacagcgtttacagagataatggtcttgctctgcctgaacttcgagtgcctttgctaatgggcatttggggaagcgcgttctgtgcaacgctctcccattactacaaggaagttcgcccaatcatccgcagtctcgctggcttcagcggcattgatcagctcatcgccgagaaagatgaagatctcaccaaggttcatcctttcgagcctgcatccattcctaacttcgccgcaaacatgaagagtctgctacctcaatcatgtcctgaaagtgtgcataatgtttcgactttacaactcatggacgctggtatgagcaacaacctccctatatacccactgctacgaccaggaagagacatagacgtcttgatcgccttcgacgcttccgcggatgtcagacaagacaactggatcaaggtgacagatggctatgtaaagcaacgcgggatcaagggatggccaatgggtgctggttggcctaccgaagagcttaacgaagagcaaacattgaaggagctcgagcaggctcaggctactaccgaggaggaggccaccaagagagttgaagaagcacaaaacgcagagaagtccaagcctgtcgtggaaggcggaaaggtcccagcgaagccaagtgatctcggctactgcaccgtttgggttggtacaactgaggagcgcgagaatgacaccgaaccgcccttgtcaaaacaagtcgaagaagattgggagctcatgagaccagatgccggtattgccgtcatctacttcccattcctcaagaacaaaaaggtcccaggggtagacccacagacatccgacttcatgagcacctggaactttgtttacaccgacgaggagattgacaaggttgtgtcattggctcgggcgaattttgaagagggcagagaacagacaaaacgtacaatccgagcagtttgggagagaaagaggaagcatcgtcttgatcgcgaggcagaggcaaaggagattcgacgacagacgagaatgaggaaggtgaacagatacaagcagtatggtgatcacggtgaccagttcagctga

SEQ ID NO: 1985 - DNA, 2464 bp, Aureobasidium pullulans
atgatgatatctacatgtatagcgtgtaccatactgtctgggctatgccttttaccggcagtttatgccaaagccctttgggcaactgagccagcgaacaatttcacagacatcatcaggaccgcctatccggtcggcaatggacaactagccggtagagtttgcatttacagtgactcattcaggcttctaatctgattgcagcactaccttttggtaatcctggacatgagaaactcagcttgaacgttgattcgctgtggagtggaggaccattcgagaattcgagctacaacggaggaaaccctcgatcttcggttgcatctgcacttccaggtatacgtgactggatcttcaagaatggcactggtaatgtaaccgctctgatgggcgatgacaacaactatgggagctatgctgttctcggaaatctgaccatctcaattgacaagatctcaaactttactgcatacaacaggtctctcgatctgaccactggtgtgtacactacgaacttcgaggccgacggcagcaagtatacgaggtaagtgatactcttctgactccaacgtgccaggcactgacatgattcagcaaaatctattgttcgtatcccgacagtgtttgcgtatacgaagtttcttcgactggcactctgccgatcatccatatatcgtttgaaaatcagcagtctaatgcctccttggtcaactcaatatgctcgacatcatccaggaccgcatcatttgttggcatcacccaagccgagattggtatgctataccgtgctgaagccagagtcgtgggaaaatcagcttcactctcctgttcctcagggatcctaaccatcaaacccagctcgcaacaacactctctagcgttggtcgtcgctgcaggcaccaactatgcagagactaagggaacagcagctgccaactactctttcaagggctcagacccaggagattacattgccactattgcagctctggcggcagccaaaggagctagagcattgctgcagactcatgttgcagactactccgctctgtcttcacgcttcacactcagcctaccagacaccgccggatctgcaggaaagcctacagcagaactgattgcctcttaccaaggcaccgagaacataacaagcgatccatattatgaatcacttcagttcgactatggtcgtcatctgttcatctcttcgtcacgccagaattcactacccccaaatctgcaaggcaaatgggcctacggtcttcaaaatgcttggggtgccgactaccacgccaacatcaatctacaaatgaatcattggggtgtagatcaaaccggtcttggagacttgcaagaatctctgtggcgatacatggttcagacatggataccacgaggcaccgagactgcaaaactactgtacgatgcaccaggctgggttacgcatgacgagatgaatatattcggtcacaccggtatgaagacgggtgacgaatactgggcaaactatccagcttcagcagcatggatgatgctccacgtatccgatcacttcgactattctcaagacctgaaatggctgcgagaaaccggatacccacttctcgaaggtgtatctgcgttttggctcagtcagttgcaagaagatgtctctttcaaggatggcagtctggtagtgaacccctgttcatcgccagaacacgggcctacaacattcggctgtacacactatcaacaactcctccactccctcttcacaaacaccatctctgccgcaaaagcccttcacatctcttcccctctcctccccgatctcacgcatgccttgcatcatctagacaccggtctccatataaatccctccctacaaaccctgcaagaatggaaactcacagacctcgacaacacctacaacacaaactccacccaccgccatctctcccacctaatcggctggttccctggctcctcaatctccggcctcctctccggctacaccaacaccacaatctccaccttcgtccgcaacaccctcattcaacgcggcccaggcatcaccgactcaaacgccggctgggaaaaagtatggcgatcggcctgttgggcacgcttgaacgattcttcctccgcctacgacgagttgaaacttaccatttcccaaaatatcgcttctaatggtttgtccatgtattcgggcaaaaacgagccttttcaaatcgatgcgaattttgggttcgtgggggcggtgttggggatgttggtcgtggatattcagggtttggaggaggtggtgttggggcctgctgtgcctagggagtgggctggaggtagtgtaagggggctgaggattagagggggtggaagttgtgattttggatgggatgagaggggcgtggtacagggagcgaaatgcaaaggtgttaggaggagagttgtcaatgttgagggcaaggtgctttgttag

SEQ ID NO: 1986 - DNA, 1020 bp, Aureobasidium pullulans
atgaagaacatcaacatcgtagcgcttggagccgcactcctcagcgctgtcatggggtcaactgcctgcggcaatgcaggaactaccactctgagacagactgctgctcagaaggacatcctcatcggttctggagccatcaatcccacctatctcgacgatgctcggttcgccactattcttagccaacagttcaaaagtctctcccctgagaacgagttgaagtggaactttttccatcccaatcaacattattacaactggactgcgcttgactgccttgttggttttgccgaagccaatgacatggttgtcaagggtcacggtctaatctccaactgctgtaatccagactatctgctcaacatcaccgaacccgccagattccgtgcggccatggtcgatcatttcaatgccgtcatgcaccgatataaggggaagatggatcgctgggacgttgtcacggaagccgttcagacaatgggtggcggtttgagcaacaacactttcctcagagtgcttggccctggctacatcgccgacgccttccgcattgcaagagcagccgacgctgacgccaaattgttcatcaatgagggtttagtcgaatcgctacccggcaagcgtcaggaactttatactctggtcgctggacttgttggcgccaaggtgcctatagatggtgttgccttgcagatgcacattaccgacgtagcgcctacccctggtgtcatcacaaacatcacaaactcctacacagcacttgggctggaagtgacgatcgcggaaatggacgtgcacactctcaacaagactctagagaccgagatctacgaagctgttatcagagaggctcttgatgccgggatcacggacatcagtttctggggatttactgacaagcatgcttacacctggctacctggagcaaagccattgatgttcaacgaggagtatagcgctaagggtgcttactatgctactcatgctgctctgaccgactttgtcatgaacaactag

SEQ ID NO: 1987 - DNA, 2697 bp, Aureobasidium pullulans
atgtttttcttcaccatctgtgggcttctgctccctgcttttatctaccaggtcaatgcatctcctcacaacgctcagcccaaacatcgactcggtcgtgagcggatcaatctcaattctgactggaaatttcgtcgatgggaagagaatccggatggcttaatctacgattaccgacaagatttggagaatttgacagacgtttccattttgaaaccttggattctgccatccggaaatgattttatcaaagatagctcaaaacattatcaaagacctgaaggcaaccctggcagcaacgtctcattcgtacagaacgacttcgatgaccagtgctggacctctgtcaccctgcctcacgactgggcgatagcagggcctttctatacggagcccgatggagaagcgatcgtaggaggtggcatgggacgtctcccagtctttggtgtaggctggtatcgacgtaagctgcacatctcgaatgacgacaagaacaaacaaattcagctcgagctcggcggtgctatgtcgtatgcgatggtctggctaaatggtaaactgattggaggctggccttatccctacaattctttccaactcgacctcactcctcatctccagtttggtcaagacaatcaaattgctattcgattagacaatccagtcgattctgctcgttggtatcctggcggtggactttaccgcgatgtttggctcaccaagacggaacacactcatgtcaaccaatggggtacgcggttcaccacaagagacgtttcgaatgattctgctgtcatcgatcttcagctctcgctagggaacactgcgaactacacatcaaaggttagcgttgtcaccgagatatatcgatcaaataccgtcactggccagcaaggacgcatggccgcagcttttccagccacaacggtggaaatcgaagcaggcgacaaaataagcataaatcaaaccctgctattgagctcaccacagctttggggtcccccaccaacgcaaaccccgaacacatacatcggtgtgaccagactactcaacgaggctggcagtcaggtcgacgcatatgagacacgctttggaattaggaagttcgaatacaccggcgatgacggtctgcgagtcaatggcgagcgagttcgagtacaaggcgtgaacgagcatcacgatcttggggcgttgggtgcagcattcaacgtcagagctgcggagaggaaactcgagatccttcgtgaattgggtgtgaacgccattcgtatggcacataacccaccagctagcgagctgcttgacctgacggacaaaatgggctttctggtctttgatgaagtgttcgactcctgggagcgcaacaagactgccaacgattttcatctcatcttctctgactggcacgagcaggaccttcgtgccatgatccgtcgtgacgccaatcatccttccatcatggtatggagtattggcaacgaggtcggcgagcagaattacacacaggaacttacagaaattgccaccaccctttacgccattgctcatgacgaagatccaacaaggcctgtaaccgcttccatgaatttcgctcagcctggaaataacggcgctcctttcccagatattctggatgtgctgagcatcaactatcaaggggaaggaatacgagatactccgaattatgcagttacaaagggcatcaccactaagcctgcttaccccttgttccatggagaccaacccgacaagctcatttggaccagcgagtcggcatcaacagtcagcacacgaggaacatatttcttcccagtaactgacgacggaggcgctcccgtaaacgatagttctgggggtaatacaactcttgcacaggtcagtgcgtacgagttgtattcggccaacttcggatcttctcccgacaaggtttttgcaacacaagatcaaaatccttatgtcggtggagagttcgtttggacaggatttgattatattggagagccgactccatattacacttccagaagctcttattctggtatcattgatctcgctggcttcaagaaggaccgcttctacctgtaccaggcaagatggcgtccagatcttcccatggtccatatactacctcactggaattgggctggccgagaagggcaagtaacaccagtccatgtcttcaccagtggtgatgaggccgagttgtttctgaacaacgtatcaatgggaagacaacacttggatcaatacgagtatcgtctgaggtgggacaaaattacctacgaacccagtgaactccatgtggtatcgtacaaggctgggaaattctgggcagaagccaccgttcgtacgactgggcctgccgtgtctttgaggctgactgcagaccgtcaatcaatttctgctgacggtgttgatctttcatacatcactgcggatgtgctcgactcacaggggtcagtggtgcccacggcgaatcctgagatcgagttttctgtttctggcagtggtgagattattgcaacagacaatggtgatccagcagacctcgtcgcattccccagtacgaacaggaaggcatttagtgggaaggctttggcaattgtaaaggctttgaagaggaacgagaccatctcggtcgtcgcaaagagcgagggtctcaccgcaggcgaaatcacactgagtttgttgacctag

SEQ ID NO: 1988 - DNA, 1560 bp, Aureobasidium pullulans
atgaagaccagtgtcatgaccgccactcttggtgccgttcatgccaccaatgctctactcacaatcaggaacaatgattgtgcatccttcacacacaatctcactcttgcggagaacaccaaaattttgaacactacctatcacgcacctcacaccgtcaacattactagcggtcagcagaacatctacaacagccatggtttttgcgaagtcgatgcaacagtctcatacggcagaaattcaaccttacacttttcagtctacttgccagatgcattaccctacaatggccgcctcatggccgtcggtaatggtggaatggccggagtcttggataagacagccttgatgcagcagctgaactctgggtttgcgtctgccgctggagatgctggacatctggctagtttgaacaacgatggctcgggagcccctgatacgtatataccttacctacacaatcccgaggaagtccaagcttggattcacgatgccatcgctctctttgtaccatcttccaaggatttgatcgaagcttattacaacaaacctgcagcctacagctactacagcggctgctctacaggaggagctcaaggttttgctttggcacaatatcacccagaactttttgacggaattatcgctggctgtcctggcaactggtactctcatctggctctttcctttctctggaacgcgcaacacgccgtagaaaacacatcggcgtaccttccacaaactgcactaaatttcaccggtcaagcggtgttggaagcttgtgatgcccaagatggcgtcaaagatggtgttattgagaacccacttgagtgcaacttttcgatcgattccctggcttgcaacgctacccaaatctcacgcaacaacaacactattacttgcctcactcccgatcagatcgccgtggcgaaagccatttacgatggaccaaggaatcccgagacaggggagcggatctatcctggatttgcacacggctcagagattcaatggatcttacaggagggctcactctcccatgatttctcagttccgatcctccagaatttggtctacggtaacctcagttataacgcctcaaccttcgattggacaagcgatgtatcagatgtggatacaaatgctggagcttttatcgatgctgtcagtacgaatctcactgctttccgcgatcgaggcgggaaattgctcgtttatcaaggctgggccgaccccttcaatgcccagacatggccgattcaacactatgaggatgttcaatcttttttcgaagacgacatctcggacttctacaacgtttttatgatacctggcggtggacactgtggtgctgcatcgttctatcctcaagtgcccgcgacatatcacacagtacctgcgttgatggactgggttgagagaggagagaagcctgaggaagtgttgactacaaaccccacaaacggagagacaagaagcagaaaactttgcgcttggccaaaggctgcgatttatgtgcaaggaaataccgacgattggaaatcatacgtttgcgagtag

SEQ ID NO: 1989 - DNA, 684 bp, Aureobasidium pullulans
atgcacttcaccaacagcatcctcgccggagcatccatccttggattggccgccgccagccccatcgagcttgacactcgtcagtcaggttgctccagctacaccatcatcaacaccagaggtaccggtgaagcccaaggtccctccgcaggtttcagaaccatgaacagcaacattctctcctcaaagtcaggtggcaaggtctacaacaccgtctacgccgccgactacagccagaactccgcagccggtaccgccgacattgtcaacaagatcaccaccaccctccgcacaagccccaacgagtgcttcatcctcgagggatactctcagggtgctgccgccaccgtcaacgctctccccaagctgaccggtaccgccaacactgctgtcaagggtgtctggctcatcggtgacccgctccacaaggccggtctgacttgcaacatcgacagcactggtggcactaccactctgaatgtcaacggtatctcgcaataccctggctcgaacagtatcccctctggttggatctccagaacccaggatgtctgcaagtacggcgatggtgtttgcgacactacccacggacagggtattaacgctcaacatctctcttaccccaacgatgctaccgtccagagcatgggtgctaagtttgttctcggcaagctcaacgcttaa

SEQ ID NO: 1990 - DNA, 1329 bp, Aureobasidium pullulans
atgactcctgccaagctattgtcactgtttgctacaattgctgctatagcgcagacattgcaatgcccgcaaaacgtccatggacaagcatctcaaatgatggcaagcaatatcgcaagaagtcaaggagcggccgcaagctcttccgggacggggttaattgaactcggcatcttctatcaagcattacgagagagcatcgccgcgacaaacaacacggcggacaagcaagcatggacggcatacctacacaacagtactgcaacggctattcccctcttcacgaacgctacttctgccatcggattacctcttgatcgcttctcaattggcaccgagatgatgcgtcaatcgcacgaaacacagagcgcgtctctcttgtctgccatctctacgttgcaagactcgctcgcacatcagcctcgaaacacgaacggtggcctctggtactacgacaaccagaacaacttgactgcctaccgcaacttgtcatacaccgacggcatgtattcgtatccgactttcgcaattctgagtgcagggaatggcactcggcagtctgacgctgttggacctgcggcggtgctgaagcaactcgagatactggccgccatctgcgatgatggtacaggtctgctcgtgcacggatatgacgctttgaaggcacatgattgggctgaccccgagactggcgcaagtccttctgtgtggggcagatcacaagcatggtatacccttggtgttctcgaagctcttgaagccctacaatccgcgacttctcctgccatgactctggaagtcaagattgcgtacagcaacatgaagcttctgctcaacagtctgatcaaagcccagatcgttgctctcgagcgtgctttgcagatcaacggaaagtactgtgtctggcaagtcgtggatctcccgggtgcctctatcaatggatctcagaacttcatcgagacaagcgcgagcttgatgacagcatattcccttctcaagtctgtccgcctcaacatcctggaagacacaaagcttcggaccaaagccatcgaggcaggagtcggtctatgggagaacatttttgagacacacattacccgcaatgcgaacggcaccctggacctgagcggaacaagctctatcgccagtttgagtccgcagattgtcaatgcaaaggcgagatacgaactgaactttccaattctgccaataggaaatgttgactcattttcgcagtactactttgacaggccgacggccaacaacagtctgatcggtaccagcgcctttattcttgcgagcctggagctcgagaaattgtgcggatga

SEQ ID NO: 1991 - DNA, 1543 bp, Aureobasidium pullulans
atgcgatctcttgccatccttgctcctctttgtggcctcggccttgctgctccagctgccgagatcactcccactccggtgcctaccaatgtcaacaatggccttctaggaggtgtggtctcggacctcagcaatgtcctcgccggtgtaggcaatggtgacattgctggccaggatgcctggtcttcaatctcatatgccgtacaatcagtcaccgcgaccactacaccagtagctgcagcttcagcgatcgagtctctagcatcaatctattcggctcgtccatctgcgaacgcatttgaatatgcagcaagcttggttgccgaaggtctgacctcctctgacatgtcgagtgttttgggatcgattgacggcaacggtaccgctgacgtgtaagtcaagaaagtttatgtttgaaagcatatatctgacccaaaacagcaacaagcgtagtctccttgacttggacctgaccgccaacagcatgaacaataagtgagttggactcgttcgtgtgtaactttctatagcttatcatattcgcagaaaccctaaaaatcccagtcgctctgtctatccccagaaagcatgcggagatgcaccttacaccgttgacgaagcaactctcagagcagctattcacattccctcaggctttacatacggtgctaaacctcccgtcatccttatgcccggtactggaaacactggcttcgagactttccaagggaacttcatccccgctctcaaaggtcaatcgtacgcagatgccgtttggctcaatgtccctggatctcttcttgatgattcgcagaccaactctgaatatattgcctatgctatcaactacattagcggcattgcctctcgtaatgtctcagtgatcgcttggtctcaaggtaacatcaacactcaatgggctttcaaatactggccatccgctcgtcaagtcactacaactcacattgctatctcacccgactatgctggtactactatggtcccccttatctgccccgaggggctgccttgccctctcagtgtccttcagcagcggtaccttggggcctcggatttcatcacaaccttaagatctaacgacggcgactcggcttatgttcctaccacgactctctatagctccaactttgacttgattgtccagccccagcaaggtactggtgcgtctgcatatattcttgatgctcgcaatgtgggagtcaccaacaatgaggttcagacagtctgtgccggaactgtagctggcggcttctggactcacgagagtatgcttatcaactcgctcacatttgctttggccaaggatgctcttatcaacggaggccccggaagagtttctcgcattgatctcgagactgtctgcaaccaacctttgacacctggtctcggtcttgcagagctacttctcaccgaaaattccctcctcattggtcttgccaaaattatcacgacacctttgaaggccactacagaaccagctaccagagcctacgttaatgtgatgcctgcttgcgatgcttaa

SEQ ID NO: 1992 - DNA, 987 bp, Aureobasidium pullulans
atgaagttctccattgctcaggccggcctggtgtcggccaccatgcttctcggctctgtttctgctcaaacttgcgaccttcccgctaagccccagtggtcttccaccactgctcttgctcagcccaagagcggatgggtcgccatcaaggatttcaccaccaccttcttcaacggcaagcaccttgtctacgcctcttaccatgacaacagcaactacggtgccatgaacttcggtctcttcagcgactggtcccagatggcctctgctcctcagaacgccatgtcctcgtccgctgttgcccctactctcttccacttcgctcccaagaatgtctggatccttgctcaccagtggggacctaccaccttctcgtaccgcacttctcaggaccccagcaatgctaacggctggtctgctcctcagcctttgttctctggcaagatcaccggatcttccaccggagccattgaccagaccgttatcggtgatagcaagaacatgtacttgttcttcgccggtgacaacggtaagatctaccgcagtcagatggccattggctctttccccggcaacttcggaactgcttccaccgttgtcatgagcgacaccaccaacaacctgttcgaggccgtccaggtctacaccctcaagggtcagaacaagtacctcatgattgttgaggcccaaggttccggcggtcgctacttccgctccttcacctctaccaaccttggcggtagctggactcctcacgctacttccgagagcgctcctttcgccggcaaggccaacagtggtgccacctggaccaacgacatctcccacggtgatctcgtccgcaccaacgctgatcagactttcaccatcgacccttgcaacctccagttcctttaccagggtcgtgatgccaagtctactgccacctacgacaagctcccttaccgccctggtcttcttaccctcaagaaccccgtcaagaagtaa

SEQ ID NO: 1993 - DNA, 1746 bp, Aureobasidium pullulans
atgtggcttgcaagtatcatcacccttgtcttgagtacaggtctgggcgtaaaaacccatgccgtagctaacacaaaaaacgccacttataccaatcccattctccctggattcttccctgatccgagttgtatattcgtaccagagttgaacaacacatttatctgcgcctcgtcaagcttcctcgcctttcctggcattccgctacacgccagtaaagacctcattcactggaaactggtcagccatgttttcaatcgccgcgaacagtatccaagctttgggaatatctcgaacaaccaatttggagtttatgctccaactatccggttccacgaaaacctgttctacgtctccgtgacaatgtttggaagctctgaatacccttaccttacgaacctggtcttcaatgcaagtgatcccttcgatgatcacagttggggcataccgatcagtactcaaggtcaagcttacgatacctctttattctgggcggacgatgggacaatttacgatcaaggtgctgctggtctgggcattgtccaatggaaggtcgaccttcaatctggaaacatcaccgatcaacgatatatctggaatggaactggtggtgtggcacctgaaggaccgcatgtttataagaaagacggctattactatctcataatagcggaaggtggatctggtgatgctgagggtactgctgcgaccaagcatcatgagtcgattgctagatcgaggaatgtcattggcccctatgagtctaacccagcgaatcctatcctgtcgaatgtgaacaccacacaatacttcactggtaccggtcatgttgatctcttcaaggatgctcgaggtaattggtggggtgtcgctcttgctacacgaggtggtcccaaatcagctgcttatcccatgggacgtgagactgtcttatttccagtatcatgggagactggagagtggcctgtcttcgaccaagtaaggggtatcatgtcaggccctcttcctcctaccgatcttgatattcatgcccacggccgattcataggaggcccggacatcgtcgagtttagtccgggatttgacatcccaatacacttcacctactggcggttcccgatctctggcgcttacacagtctcgccagccaagcatccgtacacactgcgcctcgtaccttcggaattgaacctgacaggaagtcccaatcatgcactgtcagatggccaaactttcatctctcggagacagactgatactctgttcatctattctgtcgatataagcttcctcgccgcttccgagaacgaagaagtcggcgtctctgttttcctgacgcaagatcaacacctcgatctcggcctgacgaaactcaacaacgtaacatacctacgcttcagaggtcgtagcagcaaagaaatcccaccagcagaaatattacaccgagtagactccacctggctatcagaaaaagtgcgcttccagattgatgctttcaatgctacacactatcgtttcctcgcaggcaaggtggaggaagatgttgatagagttccgctgagagagatagctgtcgcacctgcctcgctggtcagtggagggtatactggtacattggtgggagtttatgctactactaatggtgggaatggtagtactcctgcttatgtcagtcgttggagatatcttcctcgaggacaggctgtcgattatgatacatgggtatatgcagacgagcattgttga

SEQ ID NO: 1994 - DNA, 1059 bp, Aureobasidium pullulans
atgcgcactcaattccttttcggtgcagctcttgctgtcactgctgctgcttcacctgtcatcaagaacagagaagtcaccactgtgaccgtctccggtagcacggcaacctcatatcctcagcccgtctctgagatccaaggcttccctatccaccaatcttgcaatggtaccgagagaagacaacttgaaaaggcactcggtgataccatcaagattgcccaacaagccactcagcacatccatgctcacggcaatgactctgccctctacaccaagtactttggccaagcacctactgctgaagtaatcggctggtatgagaaactcatccacggtgaccacgaaggtgttctcttccgctgcgacgacattgacggaaactgccaccaagaaggtatgtcccacctccccctcttccttccttccaatactctgaacaatcactcacaaatcaaacaggctggggcggccactggcgcggcgaaaacgcaaccgacgagacagtaatctgccccctcagctactccacccgccaacccctcgaaaccctctgctcaggcggctacaccgtagcttccggaaaactaaaccactatttcgccgccgacttgatgcacagactcttccacaccacaaagattggcgaaggtgctgcagagcattatgctgattcatacaccgagtgtctggagttggctgaagagaaccctgctgaagctgtgagaaatacgcatacgttgcagtattttgcgctggatgtttatgctatggatgttgctctgcctggggagggatgtactggtacagttggggaagaggaggttggttcacatgctgctgcgactgcttcttcggctgcctcttctgccgtgtcttctgcttctgctagcactaccgccgctgccaccagtacttcggctcaagctgcttcccagaccgcctcgaagacgtcgagcgctgctgttgtaagtactttttcctagagaccgcgattcctcgctgacaaagttacaggaatgccacacccacgctgacggtgtcgtgcactgcgtctaa

SEQ ID NO: 1995 - DNA, 1161 bp, Aureobasidium pullulans
atgcctaccttctcgctaccagcattgctagccttgtcctcggtggcatcagcatggccacactttggtcctcctaatcctcctcttcacccgctacctaagtcatcagcttggaacttgaagaaattcactagcttggtcgctttcggagacagctacactgacgattctcgtcttggatactttggctctcataacggcagcgcacctccagtcggatggatcagcccagcaaactaccactctgcagacggtggtcgtccttggcctcaatacgtggctcaatactccggtgctaacatctacaattacgctgtatcgggagcagtctgcagcaacaatatcactcctcgcacattctccagcatcaatgccctattccctgacattgacggctacgaacttcctgcctaccttgctgacagcaaatacgtctatcctaatggcacaaaagcattgaacgtgcctgtggactcgactgtctactccatctttattggcaccaacgaccttggcaactacgccttcatcgacgacagtcaagtcgccaacaagaccatccccgactacatcgactgcgtttacactcaattctcccgcctctacgcctccggcgccagatatttcgtccttcagaatgtttctccgctgcaattgagtcctcagtatggtttgccatctaagggtggcctgaacgctactcaatactggcctgagaagcccgcgaacacgacagaagtttctggcagaatgttggagactgtcacgacggtcaacgatgtgttcaagtatcgcacgccattcgagatcttggtgaacaagaagttccccggtgctcactttgctctgatggatatgtacggtttggtaagtttccctctggcccctccttcaagggataaattgctgacatgaagattgtagattaccgatatgtacaataacccctctcagtatctcaacagcacaaaccccactgtcactggctatgtcaaccactgcaccacagctggcacaaactgcgttgctgcttccaaccctgattcgtacctctggtatgaccctttgcaccccagcgagcaggccgaccgtggctttgctaaagctttcatcgatgtggtcaatggaaacagcaaatgggccacttactactctggatag

SEQ ID NO: 1996 - DNA, 800 bp, Aureobasidium pullulans
atgtcgacacaagcgcccgcgccaacggccccgcagcagccactctcggacccgaacacaattcagatcccagagtgggactcaaacgcagtgcacacctcgaaagatggagttgcgacaacatcacaacctggagctcatcatggagggaacgcagtactacaggagaagttcaacgcagtcctcccaagatcgcgatcatattttggtctcaaaagacgcaccttcctgatcgtcgtcgcctgcgcatttcttgcattgctcgctctcattattggtctcgctgttggtttgaccaagcattcaaaagggtgggttagattcaatgttagcaaagtggctttgactgacgttcttctagtggacagaatctgccactcccgacaaacagcgagcagcatgaaggagatcttacctactacggtactggtctaggctcttgtggccttacatccactgacagcgacatgatcgttgctgtctctcactacgtctttgacgctgcatcaagaagttcggatccgaatcagaacccattgtgtggtctgaagctcagagcctcgagatatgatgaacaagtcggagagaggagaagcgttgatcttaaggttgttgatcgctgtaagtcctacctctgcgtaattagatatttaggttgagactgacataatcctgtaggtgtgggatgtgccgctacggacattgatgtgtctccggctgccttcgacaagcttgcagctagagccagcggcagagtcgacgtgacttgggcatggctttctccacaggccactgcttga

SEQ ID NO: 1997 - DNA, 1437 bp, Aureobasidium pullulans
atgatgtctatccgttcgctgctcagctttggcttgttggctgcacctctggtgtctgccctgcctgctgctgattacaagtcaacttcttgcagcaccagcacttcccacagtacttcgcactcgacttctcactctacctctcattcttcaactcacacttctactcacacttccacttccacccatacttctgcccacagctcttctgcaacttctgcagttgtcaccacgaccaccagctctgcttccaacactgtgcagactacaactcttgtagctacagctactggaaagaagggtctggatacttatgccaaaaaggctggcaagctctactttggcacagcagcagatgtccctggaaccaatgagaccaccgacaagtactaccgtgccgagctcgccaacaacgcagattggggatcagtcactcccgccaatgccatgaagtaagagaaaacgtcaagatatctacttatttggaatcggatgattaaccttctcccaggtgggtctttaccgagcctgaacaaggcgtcttcaactacaccgaagcagaactcttcctcgccgccgcaaaccccaacggcaagagaaaagtccgctgccacaacctgaactggtacaaccaactccccaactgggtcacttcaggcacctggacaaacgagactttgaccgctgtgctgatcaaccacgtgacccacctcgtcgagtacttcggcgaccgctgctacgcctgggatgtcgtaaacgaagccctcagcgacagcggcacgggcaacctcgccgacaacagcacctggagatcggatatctggtacaacaccatcggccccaactacgtcgccgtcgccttcaaagccgccgaagccgccgtcaaagccaacaaactgaaggtcaagctttactacaatgattacaacatcgaaagcgctggcaacaaggccactgccgctcaagctctggtcaaaagcctcaaggatgctggaatccaaatcgatggcgctggtctgcaatcccacttcatcgtcggaagcacaccttctagagctgctcaaactgcaaacatgaatgcattcgctgctctgggtgtcgatgtcgccatcactgaattagatatccgcactaccgtccctgcaaccgctgccgctcaacaacaacaagttgtcgactacgccagctctgtaggcgcttgcgcagacgttgatgcttgtgtaggcgtcacagcctgggactttgacgatgcttacagttggatcccatcaactttccctggccaaggctatggagatcttttcttccagcctggtggttatggtactcctctggtccgcaaggctgcctatgatggatgtatccaggtaagtcgtttatgttttcgattgtcgagatgcaacgctgacatgggcataatagggtctcaccagctag

SEQ ID NO: 1998 - DNA, 1443 bp, Aureobasidium pullulans
atgcgttcgttttctactcttttggctttcgctgtcgctctacctgcgctggtcgcaggtgagctttccggcaaagtcggtcccaccacttcccacgccaccaaggctgcaaagaagacttgcgatatcaccaagtatggtgctgttgctgacggcaagactgatatcagtactgctctgaacagcgctttcactgcttgcaaggctggtggtgtagttgttatcccctctggcaactttgccatgagcaagtgggtcaagcttgctaacggcaataactgggctctgcaacttgatggtatcatcactcgcactggcactgatgccggtaacatgattatgattgagcatagtgataagtaagataccctagatgtctgcttgacaggcgtttactgactaggtgcagcttcgagatgttctcgtctactggaaagggtgccattcaaggtaatggctaccagatccacaagaccggcagtacatctggtccccgcctgctgcgtgtttgggacattaccaactggtctgttcacgacattaccctggtcgactctccttccttccacttctccatcgacacctgcacgaacggtgaagtttacaacatggctattcgtggtggtaacgagggcggtctcgacggcatcgacgtctggagcaacaacatctggattcacgatgtcatggtcaccaacaaaggtaggagtgatccttgtgccaagacaaacaatcatgctaaccaaaatctcagatgagtgtgtcaccgtcaaatcaccctccaagaacattcttgtcgagaacgtctactgcaactggtcaggcggttgtggcatgggttctttcggcactgatactgctgtctctgacatcacatacaagaatatctacacctggtccagcaaccaaatgttcatgctcaaatccaacggcggttcgggcacagtatccaacgtcgtcctcgagaacttcattgggcatggcaatgcgtacagcttaacgttagacgaggcatggagttcaatgaagacaattgccggcaatggtgtccaactttccaatttcaaaatttcaaactggaccggcaccgaactcaaaggcaccgcccgcggtcccatcaaagtcgcctgcgcagccaacgctccctgccacgacatttccatcactgacttcgccatgtggaccgagcaaggcagctctcaattctactcttgcgaaaacgcatatggaagtggattctgcttgaagtctggaaccagctacaagtcttatgctgctactacccagtgggtcagcagtgctcctactggatatgctgcacctactatggctgcggatttgaagacggcctttggtactacgcagagtatcccgattcctactatgcctgccagctttttccctggtgtgcagccttatactaagttggctggtagcaagtaa

SEQ ID NO: 1999 - DNA, 938 bp, Aureobasidium pullulans
atgttgaagacctttgcttcagcggctgccttgtgcactgtagcaacagcatactcgccgttccttgtcaactctctgtccactcatcaaccaatcggcaacaatgaaggtcaaacaaactactatcgtatcgcgtttgatgtttcgtcatccaacggtggagccaactcgtcggcaacctgccagacattctggggagacaattcttggacagaaccagaagcgtattcggttgcagtgccaacagggaaatggattgattgcgactcaagcgacttccggttcaagctgttcccttatttcagcattggcaacttcagtctagccatccagcagaattttaccgacatagcgtaagtccgggattcttaagcgagacatgaacatggtcgttctgactattaggcaggatcaaggaagaaatcattgccaatggaacgacgcacatcagcaactcgacgtcttggttcaattgcaagatcaacccgattgaagtaatgtatctccagcatgcccagggcgactgcaacatggctagcaacgctagtgcctactcgatcccagtggagtctgcagaagcgtgtacctcaggcaaagccacgaccatcttcgaggtcagcggatcgtttgagaatgcgggcgagagtattctcttgattggcagtatcccagaacttggtggttgggatacgtccaaagcaattgccctctcgaatcttgatgccgagagtgccggggcaccttcgtttggaggacgcttcgatattgctgagggcacgactttcgagtacaagtatattatgcaagaagcagatggtagcagaagttgggagtgctgcgagaacagagagtttacggttccggccgactctgcatgcagcgagcagagcgtagacgttgggtggttcaggggtggggggacggctgtctacaagtag

SEQ ID NO: 2000 - DNA, 1989 bp, Aureobasidium pullulans
atgaaaagtatcagcagcaagaggtcactcttcgcagcattggcctgtgtgccatctgtggtggctgctcaatatggcaatgctaccgcatccgccaacgcttctaccatcagcttccatgatcctactggtgtttcgacaacctttgcaaccaagtcattcaattactccctggcaagcacgtactcggtccagaccgatttctcgaacgaacgactggctgctctctggcaacaagtcggcccaattgcggctgggcctgtgactacgaccgtctcgcctacccctgagtcatcacccttggcaaggccaggtgttatgcatccttacataccaagctacgaagcaaatttgagcaatgcgaaactgcctgaaaactttatttggggtgttgcttcgtctgcatatcagatcgaggtatgccagtcagtatcgctaaatgacacctacttatgtaacatagggtgcagcgaatgccgagggaaaaggcccatcgatctgggacttactggctcatagggtacctaatcaagtcgccgacaataccacaggtgatgtcgtagccgagcactactatctatataagcaggattttgctcgtctgaaaacactgggcgttcccgtcttcagtccttccatttcctggcctcgaatcttcccgttcggaaagggaccgatcaacgaggaaggagttcaccactacgacgacgtggttgccgagctagtcaagaacggtataaagccagccatcacacttttccattgggacacaccattggcgttgttcaacgagtacggtgcttggaccgacccacaaattgttgacgacttctttaacttcgcaacgttcatcatacaaagatacgaccagtacgtggaaacgtggttcaccatcaacgaaccgcagtattgtaactggcagtatgcttcatacccggctggaaaatactatcctgcttacaacaatgtcactggaggcctggaagcaaggttcctttgtgggcactacaccctgcttgctcatgctcgcgtagccaaatggtaagaaggtccccatcattgaaacaggttttaattcattttacctacaggtatcacgaggacttcaaaggccgaggtcgaatcacattcaagaattcggccaactacttcgagccaaacacaacctcgtcagctgatgcggtggctgtgcagagaaactacgactttgttcttggttggttcaatgacccagtctggaaagatggcgactacccagaaagtcttcgccagaccttaggtgacactcttcccacattcacagacgaagaaaaggcactggtgaagggttcatgtgacttcttcgccttggacggatatacgtctttctacgcctctggcatcgatgatctcgaggcttgcactagcaacagctcgtatcccggataccctgagtgtgctggctcgcagtccacagccccagatggtttccctattgggccctctgcagatgggggtgccaattggttgtacagtgctcctgttggtctccgtcgcttcctgaagaagatcacgactgagttgtttccgagtgtgcctgatattatggttaccgagtttggttttgctgaaccaggggaagcagcgctatcgtcactcaacacaattttgtgggacctaagacgcgcagactattaccaggtaagtctgttcaccacataacacacgttcggtactgattgcctatagtcatacctcgacaacatccttgcgtccattcattacgatggtgttaatgtgacaggagcatttggctgggccatctttgacaactttgagtggggatctggtctcaacacacgatttggactccaggtgagacatccgttctatcatcgagggaaggcaaatttactaacatatttacagtatgttaactacacgagtctcgagagaactccaaaggcaagtatgttcaccttcctgaactggttcagccagcacatttga

SEQ ID NO: 2001 - DNA, 1038 bp, Aureobasidium pullulans
atgcgctctttcgccactatcatggctgccgccgccctggcccagaccgcaatggcccactaccgcttcaacaagctcattgttggtgacgaggttaccaaggagtacgagtacgttcgccagaacagcaacatgaactctcccgtcaccgatgtcacctccaaggaccttgtttgcaacgttggtggtcttgacactggtgctcagacctccacttacaaggtcgctcctggtgacactgtcggtttcgctgtcgacactcctatccagcaccctggccctctcaacgtctacatgtccaaggccactggtgatgcttccgagtacgacggttccggtgactggttcaagatctacgagatgggtgccaacaaggccggcgacaacggtcttaccttcaaggctgacaagcttgacaaggtcaccttcaccctccctgacgagacccccgctggccagtaccttctccgtgtcgagcacatcggtcttcacagcgcttcttctttcggtggtgcccagttctacatttcttgcgctcagatcgaagtctctggcagctctaccgctaagcctgaccccactgtcaagatccctggtgtctacactggccacgaggatagcattgagctgagcatctactaccccatccctgttaactaccaaccccctggccctgccgtttggggcaacggcgccgccgccgatggcaacgctaccgactctgcttccactgtggctgcatcgtctgccaccgctattgccacatctgctgtttccgcaaccacctcgatctcgacccagcaggctgttgcaacttccgccccttaccctaccgagaacgcaacttcggtcgccgcaggacccactggcttctctaccgttgtcgtctcttccactgctcccatgggcactggtaccgtcggcggtgctgtcaagaagtacatgcagtgcggtggcaaggccttctccggctccaccgagtgcgagtccggcaccacctgcaagtcctggaacgagtactactcccaatgcgtctaa

SEQ ID NO: 2002 - DNA, 985 bp, Aureobasidium pullulans
atggttgctctcaagaacaccgctctcaacatgatggccatcggtgccatggctgctgtcgccaatgccgatcagtcgcttgagaagcgctacacttcatcctcttctggatctctcgtcaagggcggctgctactacagcgtccccaatgttggtcttttcaccactagaatgacctactcttgggacaacgccttcactctggctgccaccggtgtcggtgtggtccaggaccttgtttcctccctctacactgtcggtgccggcaactctccccttccccgccgcttcgacctggtcaacattggtgtctcgctccttgacccctccatcactctgaccgttcccggtggtcagaccaagggtcctatctcttctgctcagattaccactgcttacgatgacatcctttacggttccgtccgtaccgtcgccaagatctccagcgttcctggtactacccacggtttctctttctacgccaacgacactcaggagattgatttcgccttcttgaccaccagttctggtgttgcccacttgaccaacgagcaggtctctgccgatagccctgccacatcctaccaagtctcggctcctagcgatgccacttcagcctaccacgagtaccgtgttgactggcttcctggaaaggccatgttctacatcgactctaagctggtgcaaactatcactggcaacgtggtaagtacattctacatcatgtcatcaagggtttgaagctaatactaaaaattcagcccacaagccctggcttctggttgtggtaagtacctggctgttctttcagtgctcttcaatcactaacaatcgtttcaggaacaactggtccaacggcaacgcctgggctcaaggtcctcccgccaaggataatgtcctcaagatccgcagcatcgacggctacttcaaccgcaccagcgtcctccagacctacgccgccactcccttcggctgcaacatctaa

SEQ ID NO: 2003 - DNA, 1692 bp, Aureobasidium pullulans
atgttaaagtcattctttttggcggccgcctcttctggccttgccgctgcaatcacttgcgatgacctcgcttcttctctcaccttcaaggatgtcgatgtaatctcggcgtccagctcttactacaccaaaggctcaacgatcaacattgagggcgagcagtcaaatgcctgtttcaagcagacctacccggagatcgatatgtgcagagtcgtcttgactgtggccaccagtcctacttcacacaattacatggaggtgtggcttcccagcggcagcacaccctggaacggccgactcttgggtactcgcaacggcggtctggccggctgcatcgaatatgaggatatggcatactactctagcttaaacttcgctacagtaggagataatggcggtcacaatagctccacttctgatggttcgaagttgctgaacaacaatgaggccgtaatcgatctttcctaccgttccaggcatatttcggtcgttgccgcaaaacaagtcatcaagcagtattacagccagcctgcaagctactcttactatgttggttgcagtactggtggtcgtcaaggtctcaagtctgctcaagagttccctgacgattttgacggaattttggccggatcttctgcctctgacttcaatcacctttcggactggacttctagattcctgttgatcactgggttcggcagtgatgctagagctctatctaaagatcagtgggtctatgttcacgaagaagtccttgctcaatgcgacgagcccctggatggcgttgcagacggcattctcgaggatcccacaatctgcgagttcaacgctgctgctcttcaatgtggcaccagctccgactctcgctgtctcacccagactcaggtccagactgtcaacgacgtctactctgaactctacgaccagaacggaaacttgctctacccttctctgtctctcggagccgaattggttgcttcccagcagggtctcttcaccggctcagtcatcggcaatgccgcaaacttcatctccaacgccgtatacaatgacagcaactgggacccccgcagcctgagtcaagagacctttactagagcagatgagaccgatgtcttgcacggaaacatttcgagttggaacggcgatctcagtgccttccgcagagctggcggcaagttgatgatgtagtaagtaaatacgagtgatatctttttcaagcatcatgctaacttatacatcagtcacggtatggcagaccctaacatcgctggcgagaactctcaacgctactaccttcacgtcgccaaaaccatgggtgccagcgacgaacaattggacgaattcttccgtttttaccgtatctctggtaacggacactgctcttcgggtggcgagggcgcttgggaatttggacagatagcagctgcacgaaacggaaaattcagtgccgtccagcagctggtggattggaccgaaaagggtatcgcccctgacaccatcaccggaaccaaattccacaacgacgaccccaaccagggtgtcgctttcgagcgcagccactgcagattcccttaccgcactacgtacaagggcaacggcctcgatcccaacgtcaccaccagctggacatgcgagaagatcaacaactggcaggagtgcggccctggtgcacttcccagactctgttaa

SEQ ID NO: 2004 - DNA, 2555 bp, Aureobasidium pullulans
atgaaaaccagtttagccgttctaggcgctgcaaccctttgtgcagcctctgtctccaacactaccaaagacggccttatcaccaatggactcgtctctcttggagattggcagagtgccttcgacaaagctcaaaactttgtctcacagcttactaccgaagagaaaatcaccatcatcggagctggatctctgaccaacacctctgcaaattggacagctctcgggatttcggatggtccacaaggagcgcagaacttctactacgaaagcgccttctcgatgacatgtgccttggctatgacttgggacaaagacgctatctacaaacaaggcaaagctgtcgctaccgagttttaccagaagggcttgcaaatgttggctgggcctgtatcaaaccccatgggcagatcagcttggggtggccgtaatggtgaatcgtttggaccagacgcctattttaacggtattctcggtggcatcagtgcaaaagcctaccaggcaggtggtgtcatcgcaggtggaaaagtgagtatatcttgttctgactccgtccaagtcactaaccgcttgtcagcatttcatcctgtacgagcaagagactaatcgtacttcttccatgagcggtggtggtggtatgggaggcggcatgggcggtggccccaccggttcaggcaacagcactatgggcgcttcaacatctggctctgccccgtcaggctctgctccgtcaggaatgactctcaaagcaagagcagacaattcatccactacccaatcttcgaccgagagtgccccttactcgtccaacatagacgacaagacgtttagagagacatacctctggccttggtacgacatcatcaagggtatgtgatcgtcaagcacaaggaaaacttcttactgacgtatatacagctggaactggtgcagtcatgtgcgcaatgaccgaagtcaacaacactgcagcttgtgaagatagctcactccttatgggcatgctcaaaactgatcttggcttccctggaatggtttggccggaccagaacggtcaaaaaacggctcttgggtcagccacaggaggccttgactacggttcaagcagtacctggtctacatcaactatcgaagcattcttgagcaacggctctctttcagaagcccgtctgaatgatatggttatccgcaatgttattggctactacagagccaatctggacaacggagaacagccttccaaggcagactacgatgactacgtcgataccatgtccgaccacgccaacatcattcgtgagaacggagcgaagtcaattgttcttcttaagaacgatggcgctcttcctctgaacaagcctagaagaatgacactcttcggtgccaacgccggacctgtcatgggagggcccaacctgcaattcactgttcagggctctgggccaacataccaaggccatcttgctagtgattctggctccgctcaatcttcgctaccctatctcatcactcctgaagcagctctgacgctcagagcatcgaaggaacataccaatgtcaagtggatcttaaacgacacatacagtacgagcagctcgggcaacactctggttactctatcttcctcagagactgctgtcgatgcttcttatgcgggatatgcggccgccagtgacgtatgcctcgtcttcattaatgctctatcaggcgaaggtgccgatcgaactgagttgtacaacaaggatcaggacaccatggttaacaccgtggctgccaactgcaataacaccatcgtcttcattacttccactggtatccgccttgttgaccaatggattgagaacgaaaacgttactgctgtgctatactctggtcctcttggtcaagaaagtggcaactcaatcaccgacgttctctacggcgatgttaatccctcaggtagacttatccacactatcgcaaagaacgagtcggactacaatgtagagatttgctacacctacaactgcaactacaccgagggcaactacatcgactacaagtactttgaacacagcaacaccaccgctcgttatgctttcggtcacggcttgtcgtacacttccttcggctacagtgacatcaagacgaccaagctcatgtccaacctgtcataccacgccaagggacgtcttgaagttggcggccgtgcagacttgtacgacgtcgttgcagaggtaagtcttactaatacaagcccttgaaaagtatactgacaagcataggtcgatgtcaatgtgcagaacaccggttcgcgtgacggagccgaagtcccacagctctacattggctacccagagggctctggggctgatcaacctctcaaggctctccgcggcttcgagcgtgtagagatcaagaaagacgaacacagccaggtcaagttccagctcagacgcagagatctctcgttctgggacgtcactgcccaggagtgggctttgccgactggtgatttcaagatttatgtcggcgcttcttccacagacattcgacagacgggtacgctggctatgtag

SEQ ID NO: 2005 - DNA, 2639 bp, Aureobasidium pullulans
atgcttctcgtggtgaatctccaggcgctgtttcttctgtgggcttgcagcgtaatcaccgtcgatgcacaatctgggactgtcaccgagagtatcaaccctgcagcgactaatgtcaccttagctcaaagctctgctcctgcagtcgccagcactctggcaggtacagtaggtaacggagctgtatcgcaacctagtctgcttgatcagatagatcaagcaatcgtccaggctgtagcagataccaaaaacgccctcaagaagattctggcaccggagttgtattactcctatggcagatcaccgcctgtttacccatctcgtaagtcttttgttgtatctgcctcgtcgttctcccagctaacatttctctagcaaatggtgttggattgggtggctggaccacggcatatgctcaggcaaaggctctcgtatctcgaatgaccaacactgagaaagccatcgtcacccttggttcttctcagaattacggttgttcaggcttcgttggacccgtgtctcgtctcggtttctctggagtttgtttgaacgacgccgagagcggagttcgcggcggcaatctggtcaacggctacccatctcagctgagcgttggtgcatcttggaacagaactctggctcacgccagagggcaagcaatcggtcgcgagttcaaggcaaaaggaatcaatgctgccctgggaccggtcgtaggtcccttgggccgcatcgctaagggcggccgcaactgggaagggtttacaaacgatccctatcttgctggtggtctggttggccccaccatcaaatcgatgcaagagtctgtcattgcggttgtcaagcactttgtcgcaaatgaacaggaaacgaaccgcaacccgttcttactcggacttattccacagctcggcaagcaagctgtgtcctcaaatctggacgaccgcaccatgcacgaactctatatgtggccattctatgacgctatcagagcagaacctggttcggtcatgtgcgcatacaatcgcatcaacggcagccacgcctgtcaaaactccaagctgatgaacggcctgctcaagacagaacttggctttcaagggttcgtagtcagtgactggggggctaaccatgcaggtatcgccagtaacaacgctggcctagacatggtcatgccacagtcatcccagttgacaccttcatcactttcctttgccgtcctcaatggatcaatcaaatcatcacgccttgacgatcaagctacgcgcatcatcgcctcgtggtatagatacgctcagattccaaacatcggcgtcgacagtaataagaacattgatgcccgtgatcctgcagcgtcgaatgttctgcttcaatcagcagtggagggtcacgtcctggtcaagaacatcaacaacgctctgcctctgagggccccttctaccttgaacctgtttggatatgatgccgttggtggtctcaatggaacttccggcttaggatctggcggtcttgccaacactcaaacttttactgatggtcggccgttcacatcattggagtacatatctttcgtcactgcgtttgcgccagactcattcaatgcacccaccgtggcactgaatggcactctcctgagtggtggtggcagtggcagtatcacccccagttcgtccacctctcctttcgatgctttcaggcgtcaagctgctatggacaacacaactcttcattacgactttgtctcctcaagcccacttgtccaagaaccaaacaaaccatgcattgtgttcatcaacgcacaatcggtcgaaggctcggaccgaagcgctctgagtgacgactactccgacaacctcgtgcgttcggttgcctctcaatgctccaatactattgtcaatattcacaacgccggtatccgcatcgttgatagctggattgatcatcccaatgtcacggccgttatcttcgcccacacacccggccaagaaagcggaaatgcattggtcgagatcatgtacggcaaacaatcgccttctggacgtcttccttacaccgtagcaaaccaggagtcagactatggatcgcttcttggcccgagctatgcagatgccaacaacccgttataccctcagtccgatttctccgaaggtctcaacattgactacaagcacttcatcaatcagggcattacacctcgctttgcctttggttacggcttgacatattcgaccttcaactattcgtccttgcaagtcacgaagcaagccggtgctatcacatcagccatgccacctgacgcagccagcagaaaccccgtacctcaaggaggtctaaactcactgtatgacattattgctaccgtcaccatccaagtggccaacacaggcaaagtcgctgctgcagaggtgggacagctctacgttggtatccctggaagcggacagccaaaagtgcttcgtgggtttgagaagcaactcattcagccaggcagctcggccacatactcgttccctctgcgtcgcagggacttgagtgtatgggatactggttctcagcagtggaggttgccctcgggcacatttgccttgaacgtcggcaagagtgttttggatattcagctccagggaacattgcagctgtag

SEQ ID NO: 2006 - DNA, 1711 bp, Aureobasidium pullulans
atgtatgtcaagacaacatccctcgcaacactcggcgtccttgccacaaaggctgcagctctagacaatggctttggccgaactccgccgatgggtttcaacacatacaaccctgcagcatgcacaatcaatcagaccttcgttcgagactccataaatgcctttgcagacaaaggatttggtgcagctggctacaatatctttggtctggactgtggatggcagggcactcagcgccagtccaacggatctatcacctatgatgctggcgctttccctgatggcattttgcctctcagcaaattggcgaacagcaaaggctttgtgagttgtcgcttccatcgaagatcttgattgtgctaatctctatgatcagaaatggggcatgtacaccgaccaaggtgtgaacgcttgcgacacaggagttgaccgacctggatccttgaatcatgagaagcaggacgctgcccaactggcaggatggaatgtcgcatatatgaaggtcgacaactgctacatcaccgctggtgacaacgcccccaaagatcccagaacagacttcccttctcgttacggagctttctctaacgccatccaacaagtcggcatcaagggcatgcttgtttgccaatggggaacgccttactcaagccccggcggtctgcaaggtcctgctgagtggacccctccgctctcgacatcttttcgtgtcagcgacgatatcactcagggttgggcgagtgtctctcgcatctacaacgaggcgattaatgtcaatttgagaggactgaacggacccggccacttctccgatatggatctactggaggtcggcgaacctggcatgacgactgatgagcaagcatctcatttcgccatctgggccatgtttaagagccctctcatggtctccacaaggatctcgaccatgtcaagctcaacccaagcgattttgcaaaacaaaggtctgattgcaatcaatcaagattctcttggccagcctgttgtcctaactcagcgcttcactggggacaacgatcaattcgccggacctctcgccaatggtgatgtcgcagtgcttctcgtcgatcttagcaacaccaagcgtactctgggcatcaacttttctgccctgaacatttcttccgccaccgtcactgacctctggactggcaaagtagtttcgaacgcaaacaactacttcaccaccgtcaacggccacggttcagttgctttacgtttgagcaatgtcaagaagtctactcccgcagctcccaagctgacctactacgaggccgaggctggccaattcgccggcagcgcaggtgtcgcatcttgctctggatgctccggcggcaagaaggtcggcaacgtcggcaatggtaacggaaacacactcaccttcagtggtattcgcacgagccaggcgactcaagatgttcgtttcgactacatcgattgtgagattggctatgcttttagtggaggatatggtaacgtcagaggtgcgagcatcagtgtcaacggtggtgctgcacaatccgtcagcttccctttgaccggctacaactgggacaaggatatcacgaagggattcttggtcagactttcgggcttcaagacttcaggtgacaacacgatcaccatctcggggttgtcgagtgtgtcgccgtatgctcccgactttgatagaattggtgtggtggcttag

SEQ ID NO: 2007 - DNA, 2923 bp, Aureobasidium pullulans
atgcgtctgactacgttcacactggctgctgttattggctggacgctagcacaatccagtgacaatgcaattccggtaactactcacttgttggaaattctcgacatcgtttgacatggctcagtttcccaatgtcacttatcccgacgccatctctccgaatccaaatgtggttttgggagctcgaaccaaccagacttccccaccaagatatcccagtccttggggcacgggggctggcgaatgggcaactgcctacgagaaggccatcgcaattgtcgagcagttgactcttgaagaaaaggtgaatttgacgactggtaagttttcgttatcttctcagtgatattcgtgagcgtggctgacagcatgattgagggtccggctggcagcaagaacaatgtgttggccagaccggaggtgttcctcgtctcggtatccgtggacagtgtcttcaagattcgcctgttggcgtgagatacaccgagtgagttcgcggttcatgactgctccaccgaaactgcttctgatgcacgaatagtttcgtcagtctgttccctgctggcatcaatgttggcgccacatgagacaggcgtcttgcgtatgaacgaggcaaggcaatgggtcttgaaagtcgcgacaaaggggtcactgtccagcttggacctgatgctggcgcattggggagggtgagttcttctgcttatcacaggagcttgacgctgacgaatcaccacccagtctcccacagcaggtcgtaactgggaaggattcagtcctgatccttatcttactggcaagctattcgctgactcaatccgcggcatacaaagcacaggagtacaagcaagtgccaaacattacgtcggaaacgaacaagagcatttccggcaaactcccgagtctcgagactatggtttcaacatcactcagcctggatcttctaatatcgatgatcaaacacttcatgaactctatgtctggccttttgcagatgctgtcaaggctggggttgcttctgtcatgtgcagctacaatttggtcaacaattctcaagcttgccagaacagctatctgctcaaccacgtactaaagtctgagctcggcttccagggatacgtcatgagtgactggcaggccactgcgagcggtgtgcctgccattcttgccgggctagacatgaccatggctggcgacatccgttttggcgatggcctgagctacttcggccccaatatcaccattgcagttctgaatggcacagttcctcagtggcgcctggacgacatggtcgtccgtatcctggctagctggtacttggttggcggagacaccgaagtacctactcccaactttcagtcatggacgcccgatacctttggcgcggtgcacgcacatgtcggctcgacttggggtactggattggtcaaccaacatgtggatgtgcgacgtgagcatggaagattgattcgtgagatcgggggagcctcgaccgtgctcctcaaaaacacgcatggcacactgcctctgaacaacatggcaaaattgactgcggtgttcggagaagacgccggctcaaaccctctcggtccaaacggctgtcgcaatcatgcttgcgatgttggtactcttgcagttggttggggtagtggtcaagcgagctgctcctatttgatcagcccagatgcagctattcagcatgaagttgtctctcgttacggatcgtacgagtcaatcaccaacaactcagcattcactcagatcaatgctctcgctcgtcgcgtcagggatgtcgctggagtgtgcatcgtcctaacgaatgccgggtctggggaaggatttgctaacgtcgacggcaactatggtgatcgtaagaacttgaccctttggcaaggtgctgacgccgtgattgcgaatgtgtctgccacttgcaacaacactgtgctggtcattcactcggttggcgccgtcgagattgatcagtacaaggacaatccgaacatcactgcgattctctgggctggactgccaggtaagcctcgtcaatcttactgcacttcgattactgaccaagggaaaaggtgaacaatcaggatatgcggttgcagatgtcttgttcggccgggtcaaccccggagcaaaattgccgttcaccatgggtcgcaacagatctgattatggcactgacgttctctacacaccaaaccaagaagtgcctcagtacaatttccaagaaggtgtctttattgactaccgtgggttcgatcaccgaaatgtcacgccagtatacgagttcggctttggattgagctataccaccttcgagtactcgggactggtcattgagaagttgaacgttgccaagtaccagccaactactggtttctctgggcctgcacccacctacggcaccatcgacaacgatacctcagctcataccttccctgggaatgttacgcgaattcctctctacgtctacccctggctcaacagcacgatcctgaacgaatcatatggtgcgacaggctttggtgatgactcttccatacctgagaacgctctgaatggcacaagtttcgagcattctccctcctctggtccgaacggcggcaatttgtacctttgggatatcttatatcatgtccgagtcaacgtgactaacaccggcaaggtggttggtgacgaagtggctcagttatatgtttctcttggtgggccttttgacccaaagatcattctccgtggcttcgagcgcgtgactattgatcctggtcagactgtgcaggtcacttttcctctggctcgcagagatttgtcgaattgggataccgtcaagcaggactgggtcattactgaacatatcaagattgtatacgctggctcatcttcaagaaatttgccgttgaatgcagtactcaagtag

SEQ ID NO: 2008 - DNA, 1783 bp, Aureobasidium pullulans
atgaaagctctttctttcttcgtcgctgccagtctgactagacttggcagcgcacaacctgcaaagcaacagaactcgaccatctacaaccccatccttcccggcttcaaccctgatccaagttgtgtatttgtcaaagaatgggacaacaccttcttctgtgcaacttcgacattcctcgccttccccggtattccaatccacgctagcaaggatctccaaaatttcagactcattggccatgctttcagcagacctgagcaacttcccgctttcggcaatatcactggtcagcagcaaggatggtacgcgccgacattgagataccacaacaagagattctggatcatcaattcttgtgttggagcggccacgggatattggagcacttccgacccatacaacaacgatgcttggacgaatgttaccccaaccgagatccctggctacgatcctgatctcttctgggatacggacggcactgtctattcggcctttgccaaaactgttcagaatgatcctttcacgactgagatccaccaggtcaacatcagcatgccctccggaaacacaactacagatcgcttcttgtggaatggaactgctgttcaacctccggaagggccgcacatgatgctcaaagatggttatcactatcttctcctcgcagaaggtggcacggcacaagctcatcaagtcaccattggtagaggcaggtctgctcaaggacctttcgaagccaacccggccaatcccatcctcactgcatacaataccagccagtacttccagacggtcggtcatgccgatctcttccaagatgctgcaggcaactggtggggtgttgcattggctactcgctccggtcctgagtacgaaacttggccgatgggcagggagaccgttctgtatcctgctaagtgggagaaaggtcaatggccagtacttggagggcctgtcaaaggcaaaatgtcaggtccgttgccaccagcaaacaggaacattcgcggcactggtgctttcatcaaggaccctgattactacaagttctcccctggctcttccattccttcgcacttcagttactggcgctttccgaagaccgagaactatgccatctcacccaaaggccacccgaacatgctgcgactcctcccttctcgctcaaatttgaccggtgatgccactgccctcccgaccgatggtatcactttcatcggccgcagacaaactgatactctttttacctacagcgtcgatgttgacttctcgccctcttctgtcggtgatgaatcaggagtcacactcttcctcacgcaggactaccacgctgatctaggtatcgtgcgtctcaacaagactggaacatacctccgctttcacgccgaaggtccaggtgccccaacagatactgttctcccaattccgcagaagtggaacaagcaagttttgacattgcagattcaagcttacaacacaacacacttctccttctctgctggaccaaaagccggtagaatgcaacagattgctactgttcctgctaccctggtatccaatgggtttactggtgagtctttcaagccctcgagaattgaaagtcgtataccatgcttacattcggataggttctttcgtcggcgtttatgctaccaacaatggtaacacaaagagcaacactccttcgtatatcagcaactgggtctatcaagggcagggacagtacattgggaatggagagttctatcctagcaacggaaagaagggtggagctggtttctag

SEQ ID NO: 2009 - DNA, 2511 bp, Aureobasidium pullulans
atgcgcattcttccatatcttgcattgattggcttggcctttgcagaagacggcctcagcggatggctacgatatgctcctttgccttcctcggtgtcatggccgtatattccacacaacatcgtcgttttgaacaccacaaagactagtccagtctacacagcaggtcaggagttacaacggggtatccagagtatcctcggtcaagactgtcatgtatcatctgacagcacgcacgagtccatcattgttggcactctcgatgcatacgttaatgcttatggcaacctttctcagactgttgatctcaaggaagacggcttctggcttagcacggaaggcaacactgtccagatcctgggtcagaacgagagaggtgcattgtacggagctttcgaatatctatcaatgctggcacaaggaaacttttcatcagtcgcatatgcatccaaccccgacgctccgattcgctgggtcaaccagtgggataatctggatggcagcatcgaacgcggatttggtggtgcttctatcttcttcgctaatggatctatcgttgacggcttgactcgcgtcgcagaatatgctcgtctattggcttctgtaggcatcaacgccatcgttgttaataatgtgaacgcaaattcaacaattttgactcccgacaatatcaacggccttggtcgtatcgccgacacaatgcgaccttatggtgtacagattggtctatctctgtactttgcatctccaacacaaggcatcaagggccaagcgaacctcacaaccttcgaccctgtcgatccagaagttgtcgcctggtggaccaacgtaacttcccagatctacgacgtgattccagacatggctggttatctggtcaaagcgaattcagaaggccaaccgggaccaatcacctacaatcgcaccctcgcagaaggagcgaacctcttcgcaaaagctgtgcagccgtatggtggtattgtaatgttccgcgcttttgtgtataatcaactcaacgagagtgactggaaggctgatcgtgcgaacgccgccgttgatttcttcaaacctctggatggagagtttgatgataatgttgttttgcagatcaagtatggacctattgatttccaagtcagagagcctgcgagcccgttgtttgcgaatttgaggaagactagtatggcggtcgagttgcaagtctcgcaggagtacctaggtcaacagactcatctggtctacctgccgccgctttgggagactgtgctgggtttcgatatgagggttgacaatgagacctcactggtcagagatatccttgcaggcaggactttcgagcggtcgcttggtggttatgccgctgttgtcaatgtcggaaccaaccagacgtggctgggaagtcatttgtccatggctaacttttatgcgtatggtaagcttgcttgggatcctactcaggacaccacgatgattcacgaggactggacaagacttacttttggcttggatcaagatgtcatcgacaccatcacccagatggctgtcgaatcttggccggcatatgagaactacagcggcaacctcggcattcagacattgaccgatatcctctacactcacttcggacccaacccgcaatcccaagataacaacggctggggacaatggacacgcacagatcacgatactattggaatggaccgcactgtctccaatggcacaggtttctcaggcacctacccaccccaaaccgccgccatgtacgaaaacatctcaaccacacctgacgacttactcctctggttccaccacgtcccctacacgcagcacctcaaatcagggaaaacagtaatccagcatttctacgatgcccactacgccggtgcagaaactgctcagacatttgctccacgctggcaatctctgcaaggcaaaatcgacgaccagagattcaacgagcaactataccgcttgcaataccaagccggtcattccatcgtctggcgcgacgccattgtagatttctaccacaacatttccggaatcgctgatgaccacaatcgcgtcggcaatcacccatggcgcatagaggcggaaaacatggacctgaatggctacaaaatctacaccgtcaatccattcgaaacggcatccaaccatcacgctgtaataacctcttcaaactctactgttggctctatatccaccaccttatcttttccttccggaaaatacaacattggtgttaatttctacgatttatacggtggaaagtcgaggtttgagattcgtgttggtaatgtgacggtcgggatgtggaaaggggatagtgaggattatcttggtcatacgccttctatttatttggacgggcattcggcgaggagaatcacgtttggagatgttgatgttagggagggggatttgttggagattgtgggtatgccggatgggattgaacctgcgccggtggattatgtggtttttttgccggagggggtgcttgattga

SEQ ID NO: 2010 - DNA, 1508 bp, Aureobasidium pullulans
atgaagatctcttcaattgctcctgtgctcgccttgatggctgcgcagagcgtcaacgcacacactctctttgccgaactctatgtcgatggccaggctcaagtaagtagatgtttgatcgtccagccgcgcgatgttcgaggctaatctatctctcacagggcgatggcacttgcatccgcatgccctgggatcccaacactgccaccaatcccatccccagcctggacagcagcgacatggcttgcggtgttgatggcaccaagggtgtcgctcgtgtttgttcggtcgacagcggctccaccctcagcttcgagtaccgtgactggcctgacaacccatcggtcggcagcatcgacatctcccacaagggaccttgcgccgtctacctcaagaaggtctcatctgccatcgacgacgagggtaccggtgatggctggttcaagatctgggatgaaggctatgacgagtccgccggcaagtggtgcaccgaaaagctcatcgacaacaacggccacctcagcgtcaaggttcccgaaggcctccaaggtggttactaccttattcgtcccgagctgcttgccctccacaatgccgacaagggtgatcctcagttctacgctggctgcgcccaagtctggttgaactctgatggcacccagcttcctcagtcaactgtgtccatccccggctacgtcgactacaaccagcccgccaccagcttcaacatctggaatgagaagatggccctaccctatcccatgcccggtccttccgtctacactccttcatcttccgccaaggtcggcaaccagaagctgagagtctcccagcagaagcagaccgaaggtcttgctcccagcaacagcatcatcaccaacggcaactggaacggtatcgagctcgccaaatacaacgatcaggaaggctgctggaacgccagtaccgcatgctgggctcagtccaaggaatgctacgacactgctcctcctaccggtcactctggctgcaagatctgggaaggcaagtgccaagacatcaacgatcaatgcagtgccagcaactacaacggccctcccaactacatgaagaacctcaaccccgtcgtcaagcaagtcaagcttcccgccgcagaggctgctcagactggtgacggttcttattctcctgcctcttccgccgtcgccagcaagcctgccaccacgttcaagacttcggctcttgtcgccaaggccactgctgttgctcctccgtccaactccaactcgctcaccgtctctactgaaggcaactgcggcaatggcgtgacctgtaagggctcaagcttcggcgactgctgttctagccacggttattgcggctccagtgaccagtattgcagtgctggatgcaatagcgctttcggcacctgtggtggtcagtataagagagacgaacacaaccacatgcacgtccacaagcacaagcgcgctgttcgtgtcggtggcgacgccagaatgatgccatga

SEQ ID NO: 2011 - DNA, 2596 bp, Aureobasidium pullulans
atgttgtcggcttctcttctttccattgcggctctgaccgtgcccagtgctctggcagcatctcttcgtgaccagcttccgggtgtaccagcaggatggtccgtctctggtacccccgatgcttcccagtctatcactttgaagcttgcagtcaagcaacagaacatcgaccagctcgagggtctcttgaagtcggtttctgacccatcaagccctacctacggcaaatactacaccgccgaccaggtcaacgctctcttcgcaccatcaagtggctccgttgatgctgtcacatcttgggcaaagactgcaagccttgacaacagccttgaccgtggcctgcacgtcaccatcaagaccaccatcggtaacgccaacgaggtcttcggagccaacttcacaaccttcaaggacgaatctactggtgttgagaagctgagaacgctgcagtactccgttcctgacgagatctctagccacgttcacttcgtttcacctactaccttctttggacgtacgaatgcggagagtgctctcagactccccgagaatgtcggcgtcgagagacgtgagccagtttcggagccaaaatcaggcttgaccaagcgtgcccttgcttgcgtctcttactctgctcgcggaactgcctacctcggtcccgattgctggaagcaggtttacaacgttacgtatgttccagatgcctcctctggcagtcgcatcggtttcggcagtttcctgaacgaatctgccatcgaagccgacctgttcctctacgagcaaaagtatggaattcccaagcaatcattcaacgtaactctcatcaacggcggtgtcaaccaccaggagcctgagtacaccacaatcggcgaggctaacttggacgcccaaaacatcttcggcttggctcaccctctgcctgttactgagttcattactggaggctcgccacctttcctcacgaacttggaccttcccaccgaggctgacaactccaacgagccctacctcgactactacgcatacctcctgtctcaatctaacgaggctctcccccaggttatttccaactcttacggagatgacgagcagaccgtgcctatcgattatgccagatacgtctgcaaccaaattggtatgatgggtcttcgtggtatcaccattctcgagtcctctggtgacactggtgttggtgctccttgccaatccaacgatggcaagaagactccccaatttactcctgccttccctggtacttgcccttacattactgcagttggtggtactcaaggattcaatgaggaggcatgggatggcagtactggtggatttagtaactacttccctcgtgcatggtaccaggagtctgccgttgagacctaccttggttcttacatcagcaaaagtgttcaggactactacacaccattcaccaacttcagcgcccgtggtttccctgatatttcagctcacagttccaacccttactggcctgtctacgctaacggtgttcttgctctctactctggtacctctgctgctggtaagttttttgactcagattttttcttcattttttcttttttattcacccaagtctcttgatggtataccaatcccctttagctcaaagaccaagctaactcaccgaaagcaccggcatgggcagcattcgccgccatgctgaacgatgcacgcttcaaggctggtcagcccgctcttggtttcgtcaaccccctcttctactccctcaagtctggtttcacggatgtcactcaaggcgctgctaccggctgtaacggtgtgaatgctcagactggtgctaagatccctggtgcatcaatcattccctgggctacttggaacgcaacgtaagtcatggtttcctattcgtctacagtctagaactgtactaatgttcaacagagtcggttgggatcccgttactggtctcggtattcccaactttggcgtccttcttgacactctgggtctcagtgcttacaacaagactgccacgccatcgtgccccagctggaacactttggagtacataccttcgaccggcagcacctacaagatcgagtgtggtactgaccacgccggtggtgttttctcccaaatctacgtcaacggtaccgacagacttaacaactgcatcatggcctgcgagggtaccaacggctgcattgacgtccaactttccggcactacctgctacctcaagggtgctgtcggcgctgccgtctccaagcctggtgccgtcggcgcacgtctgatctcccaacccatcggcaagcacgcccagcttaccgacaagccttcttgcccaagctggaacaacaccatcctgaacgtcggcacttccaagtacttcgtcgagtgtggtgttgaccaccagggcggtgatctcaagctggcctatgtcaatagcaccatccaaggctgtgttgccgcttgcgatcagactcccggctgcatcgattcctccctatctggatcagcctgctacctcaagagcaaggttggtaaggctgttcccaactcgaatgtcttcggtacccttttgatctccaagggtaactcgaccgcttaa

SEQ ID NO: 2012 - DNA, 3218 bp, Aureobasidium pullulans
atgaaaggactcttcaagagcttgacgctctcgttaccattgagtcttgccgctctctccagcgcacaggaagctcaatggccgcttcgaagcaacggcctcactgacttggtcgagtgggaccactacagcttcaaagtcaatggggaacgtctattcatctggtcaggagaggtatctacaaattgccaatcaaatgttcatacaatttactaagcgatttcaatagatgcactactggagaatcccagttcccgaactctgggtggatgtcttgcacaaggtcaaggctgctgggtgagtcgagtcttgaagacttgaaatgtttcgactgacatatttagtttcaatgcagtctcgttctactctcattggtaagcagaacactaagaaagacttctcttgaatcgaaaactcattgattgcaggggataccacgctcctcgtgacggtattgtagactttgaatctggagcccacaacatcagcagcttgttcgagacatgcaaatccctgggtctatacatattctaccgccctggaccctacattaacgcagaaagtactggcggtggtttcccaggctgggtcacaactggtgcctacggatctcttcgcaacaacgacacgagatatactgaagcctggaagccctacattgagaccgtcaacggtatcattgctgagcactctattgtcaatggcggcaatgtgattttctaccaggttgagaatgagtatggttaccaatggaccaacaccgctcagagaacccccaacgagactgccattcactacatggagcttctcgagactgttgcaaacgacactggtatcaacatgcctaccgtacataataaccccaaccttagaagcaagtcttggagcatggactacgatatcaacgacgttggtggtgacacctggctttatgcagtggataactacccttcttgctggagttgcaaccttcaagagtgtagttctaccaactctcctgcccctgacttcacagtcctcgactactacactcacttccaggagactgctcctggagatccttctttcttcgctgagttccaaggtggaagctacaacccgtgggatggccccgcgggtggatgcaggaacaacactgggcctgactgggtgaacgtgttctacagaaacaacattgctcaaaaggtcactgctcataatatgtacatgctgtacggggggtgagtttccatgatctatctactttttgtcgtcagtactgacaccctcgttgcaccaattttggtcaattagccttccctttggttggaactagttacgactattctgctcctattcaagaggaccgcctgattggcgacaagtactccgagacaaaactgcttggatacttcattcgctctgctaaggaccttcctctgatcgagagaggtatcaacggcacaaacctcactacgagctccaacgtgttcacccaggtcctgtacaacgtcgagaacaatgctcagttctacgttgtcagacacgccaatactagtttgcagacttctctctccttcaagcagaacatgaccacctctcttggaaacttccaggtgcctcagcatgccgctgatatccgtatcaacggaagagagtccaagatcctcgtttccgactacaacgctggagatcagaagatcatctactctactgctgaagttctggctgtctcaatccaaaatggcaagcccatcatcgtcttctgggttcctactggcgagagcggtgaattctacctgaagggcgcgcaaaacggtaacgtcaagcaatgcaatggctgctccagtgttggcttctaccaaaccaaagatggcgtcattaccagcttcgctcagggttctggtatgagcgtcttccagtatggtaacggtgtcactgctgtcattgtggacagatcctatgcttacaagctgtggcaccctaccttgactaacgaccctcatgttcctcttgacaagactgcattggtcactggcccataccttgtccgtacagcagctgtaaagggagacactctcgcccttgtcggtgattacaacggaactactcctcttgaagtctttgctgcaggtgtcaagaaggtcactttcaacggccagagcgtctctgtcaaggcctcggcctacggcagtctgaagggagagctttctcacgacaaagttactgttcagtcgctgaatgccgcactccctaagttgtcgcaatggaaggttgctgatggtcttcctgagcgtgaggccagttacgacgactcaaagtgggtcaatgccaaccacactaccacacctcactggaataagcctgccaccgaccacattctttatgccgacgagtacggtttccatggcggtaacctcctctggcgtggacgcttcaatggcacaagtagtggtgctttcatcaatgtcattggtggtactggtagtggttggtctgcttggctgaacggcaagtttgtcggatcaacattcggtgacatcaagctctcccagaccaatcagactctcaagtttggtgatgcagtcaaagctggagagaatgttcttctcgtcatccaagaccacatgggcaaggaccagactactggtgccatcaatcctcgaggtatcctcaacgccactttgaccgacggtgcgaagttctcttcgtggaaggtcgctggtaaggccggtggtggtgccaacatcgaccccgttcgtggtccttacaacgaaggtggtcttcacgctgagcgtctcggctggcatttgcccggcttcgacgacagcaagtgggcttctggctctccttctactggcctcagcactgcaggtgccaacttctaccgcaccacacttcctcttgatctgcccgagggacatgatgtctcattggctttcaaccttcacgcgaccaagagtaagaagctcagagctcaactctatgtcaacggttaccaatttggcaagtttgttccatacattggtaaccaggttgagttccctgtcttccctggtatcttgaactatcatggcaacaacactattggtctgtcgatttggtctcaggacaatgttgaggcaagcgtttccgttgatgtcagtgttcttggtgtgcactcttcaggcttcgatgtcgggtttgattcaacctaccttagacctggatggacgaacgagagactgcaatactattag

SEQ ID NO: 2013 - DNA, 1599 bp, Aureobasidium pullulans
atgaagtactcatctgtcctcgcggctttgtccgctgttggtagtgctctcgcacaacagacatataccaaccctgttctttggtatgatcttgcagacattgatgtcttccgcaagggaaaccaatactactattcggcttcaaccatgtcgttctcacctggagctcccattctcagatctggtgaccttgtcaactgggagtttatcggacactctgtcccgagacttgacttcaaggacactgcctatgatttggccgatggcaagcaagcctacgtccgcggtatttgggcttcctccatgcagtaccgtgagtatgataacactttctactggattggctgtgtcgacttcaagactacctatatctacaaggccagtgatcctgctggtacttggagcaaggttggcgagatcggtacttgctactatgactgcggcatgctgtttgacggtcagaacatctacgttgctgtatgttgagcgttactctatcctctaaatagtcaaagactgactttgctcctacagtacggcaacaccaagatcagtgtagctcaactgaacaacgactttacccaaaagtccaccacccaagtctactcttccagcatcacgatcgaaggctcccacatgaagaaaatcaacaaccgctactacatcttcgtcacccaacccgcctccaacgaatacgtcctaaaatctaactctggccccctcggcccttacgaattcaagatcttcacaaaggctccagccagtggaattcaaggctctggaagcccgcatcaaggctccgtcgtcgatacacctaatggagattggtactatttgtcattcatcgatgcgtatccgggaggccgcagccctgcccttgcgcctttcgtcttcgactctcaaggctggccatctctggaagcaacaaatggtttcgcaatagaaaacccctaccccgtaacccccgtaccagtaaaatccaccaccggcaccgatactttttcctctggcaaactaggcccgcaatgggaatggaaccacaacccggatacgtcaaaattctccttcgccgctggaggtggattggtgttgaaaacagcttccgtgaccaaagatctctaccatgccaaaaacaccttgacgcatcgtatcttgggcccagacagtacagcgaccatccaactagatatcttacaaatgacatccaccgaccaagcaggcctatccctcttccgcgacaattccgcctacatcggcatacgcaatggcgttgtaatcctccaacgcgacatcaccatgggagcagcatggaacaccctctccaccggccgcctcgaaacctccgcctccctacccgcgaaaacgacaaatgtgtggttacgtctacacgctgatatcaaacccgctggaacccatcagggtgttttcagctacagcactgatgggaagagttttaagcagttgggtacgccgtatacgatgaatacgacttattacttttttatcgggtataggtttggtattttcaatttcgctgagcaagggttgggtgggagtgtggtggttaagtcttttgatttggctttgggtgcgaagtga

SEQ ID NO: 2014 - DNA, 880 bp, Aureobasidium pullulans
atgctcagcacaatcattcccctggctcttgccctcgtgggtcaagttgctggccagaccgtatacttgaccggagactcgaccacagctcctggaggtggtggtaaaggcacagaaggtaagaagatctttctagctctcatgatataagcatcagactgacatatacttttcacaggctggggccaatacttgcactactcgatgaagatcccggtcgtcaacaaggcctttgctggacgttctgctcgcagctttactcgtgaaggtcgtttcgacgaggttggcaagctcatcacaaagggagactttgtggtcatcgagttcggtcacaatgatggagccagctcacctgataatggccgttccgattgccccggcagtggcaccgagacttgccaatacacctacaagtaaggcaacctttccaatcttcatgatgcttaaaaacagtctctgattcgaattctccagcggcgtcaccgagaccgtccacaccttcccctactacctcgagcaagcagcaaaatcctacgtagcaaagggcgcccacgtaataatctcctcccaaacccccaacaaccccgacgaatccggcgtcttcgtctccacccctccccgcttcgtcgccctagcaaagaccgccgccacaaatgcaaaggtggattatgttgatcacaacgcttattctttcgcggcgtacaagcctttgcccgtgtcgactgtcaacagctatttccccaatgatcatacgcacacggcgcccaagggtgcggatttggttgctcaggcttttgttaggggactggtttgtggtggatcgttgttgagcaattatgtcaagaatgctactgcttcgattgagggatcttgcctgtga

SEQ ID NO: 2015 - DNA, 813 bp, Aureobasidium pullulans
atgcgtttcagcacttccgccattattgccgcctccctctctctggctgctgccgagagaatgggtccccttcgcactcgtgcctctggcagcttccccatccctgccagtcagggttccgtcacctacgatgacgccaagaccatctccggatccttcgatggtggttataagacctacggccgtggtgttgagtgcggtggtcaggctgagggccagaacggtgatgccgtcttcgtcctcgaggacggtgctaccctcaagaacgccatcattggcaaggaccagaacgagggtgtccactgtctcggtgcctgcaccattgagaacgtctggtgggacgctgtctgtgaggacgctcttaccttcaagggtaacggtgacggcaaggtcatcggtggtggtgctcgcaacgccgaggacaaggttatccagcacaacggtgttggttccatctccatcgacggcttcactgtccaggacttcggcaagctctaccgctcttgcggtaactgcaagcagaatggcgtaagtcttcattaccccctttgacttcgcggcatgtgttaacgtcttcaggatgccagaaaggtgaccatcaccaacgtcaaggccaccaacggcaagtaccttgttggtattaactcgaactacggagattctgccactatcacaaagacctgtgcttcttctgtcaagcacatctgccaagaatacaagggtactagcaacaatgacgaggagccttctactctttctgagggtccctccgatgcctgcatctaccaggagtctgacgtcgaggcttgctaa

SEQ ID NO: 2016 - DNA, 1365 bp, Aureobasidium pullulans
atgaggtactctcttactcttgcggctctggcagctgctactggagtctcatttgctcaatcagccgttccagcatatggacagtgtggtggtcaggattatactggatctactgtctgtgtttctggttaccactgcagtaagaacaacgactactattctcagtgtgttgctggtgcaggatcgagtggcgttgcaaccaccatcaagacttcggtcgttccatcctcttcaagcactgttgtgactaagccacctgtcaccacttccaaggtcgtctctacatctaaggttgcaaccaccactgctgcagccgcaggctccatcgccacgacctcgggaacaaagttcgtcattgatggcaaagctggatactatgcaggcacaaactcttactggatcggtttcctcaccaacaacaacgacattgatcttgttatgcagcatcttgccagctcaggcctgaagattcttcgtgtctggggtttcaacgatgtgactaccactcctactgacggcactgtctactatcaatcctttgccaatggagaagccaccatcaacaccggtgctaatggattgcaacgccttgattacgtcgtcaaaagtgccgaagctcatggcatcaagctgatcatcaacttcgtcaacaactggaccgactatggcggcatggcagcctacttctcctacgccggcatcacctcaaacgcgcaatggtacaacagcaccaaagcccaggcccaataccagaagtacatcaaagcagtcgtatcacgctacagcagcagcaccgcaatcttcgcatgggaactcgccaacgagccccgctgtaccggttgcgacttgtccactctcaagacctgggtcgtcaacacatccaagtacatcaagagtcttgactccaaacacatggttacaaccggtgaagaaggcttcggacccatccccggcgacgacggaagctacccctaccaactctccgccggcggaagcaacttcaccgcaaactgcgaggtacccaccatcgacttctgcacctaccacctgtatccagaatcctggtccgtcacgcccacccaagcttggggaaaccagtggatcaaggcacacgctcaagcttgcactgctgttggaaagccttgtctgctggaagagttcggtgcatccaataactgtggtattgagagtgattggcaggctactgcgctcaaggctgcgggcactggagcggatcttttctggcagtatggggatacgttgagttatggacagactagtcaggatggcaatacggccttctatggtgatgcgttgtatacttgtttggttaccaatcatatcaaggctattgatagtctttag

SEQ ID NO: 2017 - DNA, 1937 bp, Aureobasidium pullulans
atgcatttcaacagcctcgctttggcgacattggcccttgtgccatcctttatcgaagctcacggtgatgtccctggagctcccagagtttttggcagaagatcagctctgagtggtgccagaagagcccgtaatgtagcaagcagctaccaaccaattgtgcccgaggttcatgaaaagcgtcaagcttctaccaacaccgaaggccagtgtggacaaggcttcggatcttgtgctgatggttactgctgttctgaagccggttggtatcgtacattcgcaattgtagctcgaagctaacatccactaggctggtgtggtcaaggaagcgattattgtgctgcacctggatgtcagttcaactttggaccagcttgcgatgacaacacgattccatctggcagcagcacttctaccgttgctagaactaagctcggtaacgtactctatggtggagctggtatctacgattgcacagtggcaggaaccattgccattacttatgatgacggtccttatatctataccgaacatatcctggatgtgttaaagcagtactcggccaaggccaccttcttcatcaccggcaacaacaatggcaagggagagatcgataacgctgcctatccctgggctgctaccatcaagcgtgcttacgctgaaggccaccagatcgcatctcatacttggactcacccacatctttccaacatcaccagcgcccagagaaaacagaacatgtacagcaacgagatggcattgcgcaacatcttgggtttcttccccacttacatgagacctccttactccgactgcactgcagaatctggatgtcaacaggacatggccgaccttggttaccatattacctactttgacgtagatactggtatgatacccttgctaccgagactgatctgtgtccactaacgtgttacagatgattacaacaacgactctcctgcgcttattcaaaacgcaaagaacaacttcgatgctggaattgctggaggaaagcctgcgaccaatgactaccttgtgattggacacgacatccacaatcagactgcaaacgttctgactgcatacatgcttgacaaaattctggctcttggttacaaagcagtaactgtcggcgaatgtctgggtgatcccgaagagaactggtaccgcaagtcatccggtagtgtcttcacctcttcaacatccgccgtaacttctgctaccaagacctctgccaccattgctcccactgctacatctaatgacggcacttgcggaggtggttcaggattcatgtgtactggctcagagtttggtgactgctgctcgcaggtacgtagtaaatgaatgtcaatcttgcagaacgacactgaccgtatatttatctaggctggttggtgtggatcaggaactctctactgtggcgaaggatgtcaagcaggattcggtcagtgcggtatcaatgttcctcaaagcagcagcacaacctcgactgctcctgctgcaaccgcaactggcgtttcgaccgatgcaacctgtggtggctcaagtggcatgacttgccagggctcggtctttggtaactgctgttcgccagcaggatggtgtggtagtactgctgcctactgcggtgacggatgccagtctggcttcggctcgtgtggtgattctggtgcggcagcaggtgctgttcaagctaccaacaatgccgctgtatcctcgacactcgctacgtcggccaccagcaaggtagttactaccactaccgccgccacagcaaccaaaacgtcgacagctgctaaggctaccgctactaacaagtcaagagtttcggtaagcgtatcccaattgatgtctggatattctcgtactaaccatttcttcagacatgggtcaacagctggcttagcaaactgagatctggatctcactaa

SEQ ID NO: 2018 - DNA, 2170 bp, Aureobasidium pullulans
atgaagtccgtagctaaactttcggccacggctctgtggagttccgcagtcgcccttgcctggaggccgcaatatggtagccctgtcaaagcagagtatggcaacctcgtcaaagctcacgcttctcaagactggaatggttctgcgactcagaatgcaccatggccattctctacctctcacccttggtctcctagtggttcactcccccaaaacatcaccaatggtatgatattctatatagggtttctagtcctagagctcacaacacaacataggcctcagcacttttggcaccatcaatcatccggacctgggaccatggactgatggacctcttccacaaggctgtccttggggtctgcgtcagtcgaacgatactaacccctacaatgagaagaatgtccccaacactggtatgactcgctactacgagtgggaaatctcgaatcgaaccatggctccggatggcgtcgcgctgccgcttcttgttgtcaatggacagttccctggacctctcatcgaggcgaactgggtaagtcgaacctgctcctcaatatgagcaattctaaccttctcagggtgactggatcgaggttagaatcacaaacaatctcaacgagggtaccgccatgcactggcacggtttcctccagaaaggcactccctggtatgatggtactcctggtgtttcgcagtgtccaattgctcccggcaaatcgttcacttaccgcttccgtgccgaactttacggcactagttggtggcattctcactggagtgctcaatacttaaacggcttggctggtcccattgtgattcacggacctgtagccgatgagtacgatgttgaccttggtccagttatgttgaccgactggttccatgcagactactacagcttggtcgagcaagttttcattgccacagaattcggacccatcttccctcccatggcaaacaacatgctcatcaacggaaagaacaactacgattgcaagaacacaaatctcacctgcactcccaatgcaggagtttctcaattccgcttccaaagcggtaagaagcatctcttgcgtctcgtcaaccacgcggctgaggctgtcattttcttctcaattgatggctatcaactcaaggttgtggctaatgactttgtccctgtcgagccttactatactgatctggtgaccctcgctgttggccagcgtactgacatcatcgtcgaagccactggaaacagcactgatgccgtctggatgcgcatgactgaaggcccttccgggcttggacctcctcgtggtcagactggttgcagtttgaacgacggcaacagtgttgaagcacttgcagctatctactacgagaatgccgatatcagcaagcctcccaccacgtcaaacacgattgatgtgtcccgcacatacttccccctgaactgcaacaaccagcctctcaacctcaccgttcccaagtatgccatccctgtcaaggagcccgatgtcgttctcaactttaccatgtctgcggcctacaattcaagcggagccttcaagtggtacatgaacaacgagacatacatggccaactacaacgatcctactttgttcgaggctaagctcggtaaccttgacttccctgaggagtcgcgtgtcttcgacttgggaaccaatggcactgttcgtatcattatgcaaagcgtcggcttccctgcttctcgtaggtcaatctttttcatcacttaggaaataaactaatcgaattatacagatcctatgcacatccacggcttcaacatgcagatcctgagcgagggcattggaacttgggacggcgtctcaatcaccaatcccgaaaatcctcagcgtcgtgatactcaactcgttcagcccaacggttatctcgtcattcagatcgagctggacaaccccggagtttggcctttccactgtacgtgctctgggcttcctctcttgaatgaaacacatactgacttaatataggccacatcgcatggcatatctcggaaggcatgaacatcaacctcctggtaaacacgccatatgtcgtcaacgaaatggagatcccgtacgtgatggcacagacatgccgtgactggtcagactacagcggtaccactgtcgtcaaccagattgattctggtctgtag

SEQ ID NO: 2019 - DNA, 1489 bp, Aureobasidium pullulans
atgatttcaactaatctctggacacttcttgcgttggcgactcccatagtgtcagcaggtggtggtgtgcattactccactcatggaaaacgacctcaatgcacagtactcgccaatggaggctccaccaacgacgttcccaacattctcaaagcatttagcaaatgtggaaacggaggcgacatcatcttcccagaaaaccaaaactactacattgcttcaaagttgaatcctgttgtaaacgatgtcaatattgattggcagggcatttggactgtaggcatggagtgtaacagttgatgatgagagaaggtgctaacagaaaaccagttttctcccgatattgagtattggagacagaatagctctacctatccgatcgctttccagaatcatgctgcctcgttcatcttgacgggcgatcacattcgcattaacggatatggaacaggaggcatcttcggaaatggtgatacctggtgagttctgcatctatccagtcttcgagtacacgaaactcatccctgatgacaggtatactgcggaggctggacataccgtacccggcagaccaatgccaatggtcttctggaacgtctcggatgtgacagtaaagaagttcttcgtcaaggatccacctctgtggagtttcaacatcatgaatggcacagacatgtggattgacgagttatactgcaacgccaccgcaacacaagcaaacgcaagtcagaattgggtgcagaacaccgatggatttggtaagttgctttgaagatcgacaatgtatgatcagttgtactgacttgatgcaagatacgatggactcgaagaacatccgtctcaccaacttcgtataccaaggtggtgacgactgcattgccatcaagcccagatcttacaatatcttcgtccaaaatgcaacctgcagaggaggcaacggcatggccattggcagcgtagggcaatacctcgaggacaacactgtcgagaacgtaatcgtggatgatgtaaaggcaagtctcctctccaatctaccagcgccaccaagcagcgactaacttcgatcccagatcatccgctggaacgaagatatgcacggctccgtcctgattaagacctgggtcggcgccctggtcccacagaacccgtccgcaaacggctactacgaaaatgcaggcctccctcgcggtggcggctggggatccgtccgtaacatccacttctcaaactttgtcgtccaaggcgcagatgcaggtcccaccatcgatcagaactcgggcaacaatggcagttttgcgggtaccagcttgatggatataagcaatattgcttttaccaacttcactggctggttgtctggcaaggagtccaaaaatcggacggcaagtgtgagttgttcgaaggtgcatccgtgcttcaacatcaatttcgacaatgtcacgctgacgacggcgcaaaactcgacgagtacggggacgggtagttgtag

SEQ ID NO: 2020 - DNA, 1878 bp, Aureobasidium pullulans
atgctgagcaaagcattactatcctctgcccttgcggcacttactctgctaccatctgctagtgtagcagcgccattgtatgcatacgaagctaccatgccgtccatgaatcttgctaacaagctcttgcagagaacaattcaagcgcgacctcaaattcaactttggcaatgacaaagtccgtggtgttaaccttggtggctggttcgtgctcgagccttggatcacccctagcatcttcgacgcaacaccagataatgtagtagacggtaagttgcacagataatacagatggagaagcaatcttgccagcacgagactctccggaaaggcctgtcgcaaggcacaatgttttttgaaccagcagagtcctccactgggagcgagtgttacacaggctctcactggccatggctctgggtttgaaaatcattgtgccttttgataagcccgtactagcccctgatgggcgaaggagagtccagtcacagtggcactccgcatcttccctgttgttgatttccagaatgaactcatactgattgacttctatagaatacacctattgcgagaccctcggctccgatgaagcatactcgagactatcaaagcactgggactcctggatcaccgaagatgacctgcaccagatcgctgctgcaggcatgaaccacgtccgtattcctgttggctactggtcggtgatcaaagacgacaacgcaccctacgtccagggcgcatacgaattcctcggtagagcattggactgggctagcggtgcaggactcaaggtcatgattgacctccacggtggtaagtgacacagctcgcctgatcaaagcacgctctgacagaagatctagctccttattcccaaaacggattcgataactctggtaaaagaggaggtactggctggggccaaggcgactcggtcagcagaaccatcactgctctcaacaagatccgcgacgatatggctagccaccctgcggtctcggctatcgagcttctcaatgaacctatgggctcctccgtcggtatggacactgttcgccaattctacatggatggctggggcaacctcaagaacagtgatgttgctatcaccttccacgatgcattcgccggtgttacttcctggaatgactggggcagtggcatgtggaacttgctgctcgacacccacgtaagtctttgaccaattttccgcctaggacatcaactaacacttttttcccgaagcactacgaagtgtttgatgctggcgcactgagcatggatatcggctctcacatcggaactgcttgtggcttcggtggctcaatggctaccaacaacaaatggaccatctcaggagaatggtgagttgacccaacccgccctaacttcccgcaagcatgctgacagttgtattccaggaccggagctcttactgattgcgcacgctggcttaatggtagaggcgttggagcaagatatgatggaacatacaactacaatggtgcctcctcgtactacattggcagttgtgacggaaaatactccggaacagtcagcggactcgacagcacctacagagacaacattggcaagttcatcgaagctcagcttgacgcttacgagaaggctgccggctggatcttctggacatggaagactggtatgttggaaatatctattttcgtcagcagaaccaaactaacgattatgcagagggtgcacccgaatgggacatgcaggcactgctgcagaacggagtcttccccaatcccgtcaccaaccgaaaccgtaagtctattttagatgtactccctccgaggcgaagcaacttggctaaccatagtttctttgacagaccctggccaatgcaactaa

SEQ ID NO: 2021 - DNA, 1581 bp, Aureobasidium pullulans
atgcctggttcgaaatcaacgcgatctgtcctggtgacaggtacgcttctttcgctcgcatcgcaggcgctgggacacatggagatgagctggccttatccccttcacagcaaatacaacccttcaaacagctacactgtcattgattacagtatgacagcaccattgttcagcgatggttccaacttcccttgcaagggctaccaaaacgaccgacccattgttcctgtcattacttactcagctggttcgacttacaacatgactatcgctggtagcgctgtccacggtggtggttcgtgtcaactttctctgtcgtatgataatggtgctactttcagagtcatcaagtcgatgatcggaggatgtcctctgacctcgacctacgactttaccattccttcttatgcacctaacggaaacgctcttttcgcatggacatggcagaacgagcaaggtaaccgcgagtactacatgaactgcgcagaggttgccatctcgggatcttcagcatccaagcgcgacacatccagcttcgaggctctgccgtttatctggaaggccaacgttcccggtgtcaacacttgcacaactactgagggtgaagatcctgtctaccccatgcctggacccgatgtcctgtatggtggcaagatgacttcttcgagcccagcaaactctgcggctggcgtctgtgacgcagccactcctttcggcaaggcctacaagagtctcggcgatactgcagaccctcaaaccgcaactgttggaggcaacactggatcttcgcctaccaccgtcaagtccgccgcttcgtcttctcaagtccctaccactttgaagtcgactaccaagacttccgccgcatcttccgccgcatctagcgtcaagcaatctactgcctccgttcctgtggttcagagcagcagcatcaagagttccgcgtcgaccgtggtgactctctcgaccgtcaatgctggaaagtcaaagacgagttcgactactcctctaccctccgcatcttccaccgacgacgagtgtccttcagatgtcaccctcactgtctacaccaccgccggcgccacagcgaagacctctgtcgtctcttctgccgctacctccgcagcctctcccgccgcatcttccactcccatcgacccagacactgaattcgcaactggcgatttgagcacatacctcccttgcgtcccaggcacctacatctgcacctcagcaaccacatgggtgacctgcgacagcacaatgtactcggacggcagcacctcctgggtctaccgcgacgcccgcgtcctcggcaacggcgcctcctgcgtcccctccttctccccctactcttcctccaccaaagtctacgcacaacaagccgactcacccgccggcttctaccgcgacgaccgcatcgcctacccctctggcgcgggcgcttgcgcggaaaatggagatgtgcaatgtgtgggcaccactgggttcaacatgtgtaatgacttggtttggttcgggatgggtgggactgctagtggaacgagctgtagcaatgggttgttggttgcttcttcgtag

SEQ ID NO: 2022 - DNA, 1873 bp, Aureobasidium pullulans
atgggactctcagtactcgctctttcgctcgcagcgttgcctttcgtagcagctggaggtccgttcttgcaacagacaagcaacaacacttggattatcggcaatgacctctggaatatcactcaaggatccatctatggcaccaagctatactatcaaggcaaagatgctattggcaaagctgctgggcattatgtcggggctggtaaaaaaccaaatcgtattctttcctcgtgcctgagattctgacagactgcagatggagaaaacaaccttgtctgggagtcagcaagtattgtcaatgaaggcaacgactttattgatgtgagctttgtctctgagaaaggcgatctccactgggtgatctacgatggtcttgctggctcgtatcagtatttcgtcaaccgtgctctgggcgacatcagcatcctccgctcgcttttccgccttgaccctgataggttccctaacggacgcacctacctcaaggatgagcctctgccttctttccaatccatccttgatggaaccaaggttcaagatgagacttttgagacgtcggatggaacatacatcacgaagtatgattggtctaactacgtgagggaccgcgacttcaacggcgttcatggcccatctactggatcttggtatatccatcccagcacggactatttcagcggcaatcacctcaagcagaccctgactgtaagttcctcatcgaacctctctaccatacactatctccattgtacatggctgcgactactgtgcgcgagctcacgaacacgtgggcattttgagctctcaactgaccgtaacaggttcatcgcgaaagtagcactggagatgccgtacaactcaatgtagtacaagacacttcacacttccagactcaggtcacgaccactcaaccaagtggtaagatctggggaccatggctatggtatctggtgagtttacgatgaattcgaagaaaaagctcttctaattttaccagaatgatggctctatcaccgatgcgaaacagagattccaaaccgagctagcaaagtggccttattcatgggtcaatgatacagcttaccattctcgcggcgctgtctcaggaactctcaagctctccgatggacgtgttgctgctggtgccgctgttttccttggcgactctgacaataaagctccattggctcaaggtgtgaactactattacacttcgtacgcagatgcatctggaaagttcagcttctcgaatgttcgtacaggtcagtatggcttatatgcttggtccaatggtggcaaaattggcgacgtctacaccaattatacaaaatctggtatcaatgtagagggcaacaccaaactgtcaacactgacctggtccgtcccaagcaacaagcgtatcttccagattggagactttgacaagaagaccactggcttcattcaaagtggaccgtatcaccacggtcttgctgctcagtcacctgccaacttcacttacactgtgggcaaatcaaacagctctgactggtactacgcatcctccaatcttggcacctggaatgtagagtttgacatcgccacacttgaaaagtcgtctgcacgcctgattatctctctggctggctactctcagagcactgctttgacaatctcatcgaacggagctgtcttgggaagcttgagcaaggataatgtcacgactgatgccgcaatttacagatcaggtactgtaagcggagagtggcatcaattcgtgtacactgtcagcaacttgaagcaaggaaagaacgtcatcagcttcaccgtcaatagatatgttctatggagaggcttcttgtgggatgccatcgctcttgagtgggcttga

SEQ ID NO: 2023 - DNA, 731 bp, Aureobasidium pullulans
atgaagtccgcaatcgccgctattcctcttctcctcgtgggctcttccatggctgctcctcttgagaagcgtgcttgccccaacattcacatcttcggtgctcgcgagaccactgcacctgctggttatggatcagccggtactgtcgtcaacctcatcctcaatgcacaccctggctccaccgccgaagtcatcaactaccccgccgctggtggcgatagctatgcctcgtctgtccaagctggtgtcaaggctgtcaccaaccaaatcaacagctttgctgcttcatgccccaacacacagctggtctacgtcggatactcccaaggtgcccagatcggcgatgacgctctctgcggtggcggcgaccccaaccaaggcatttccagcactgctgcaactatttccagctccgtcggaagcaagatcaaggccgtcatcttcatgggcgacccaagacaaatccccggtgcttcctacagtgtcggaacctccaagaatcctggtgtatgtatatttcgatccagacctagtgcgttgctgaccagatcatccagttcgatcccagaccttctggtttcacttgctccgcatatgcaagcagaatccaggcttactgcgatgctgccgacccatactgctctaacggaaacaatgccgccactcaccaaggctatggttccgagtacggtcaagctgctctcaagtttgtcaacagcaagctcacctaa

SEQ ID NO: 2024 - DNA, 1749 bp, Aureobasidium pullulans
atggctattcttcgtgcttgtactactcttgcatgtgttgctgccgttgcttcggctagacaacttcctatcgttgctgctgatgattatccgtccactccttcatatccagtgtatactggaccgtcttacaacaccaccaatggaaccaatggcaccaccatcgacaccaagaaacttcaagcagacattgacatcaccaagttggttgcccgtgcagaagcactagccaaaattgcagacctcagtcttcctgagtacaaccaccctaccagagtcattggtagcaagggttcgtagtgattacctctttgtgttcttacaacatactgaccaccttggtaggtcacgtcggaactgtcgactacatctactcagaaatcgccaagctcggcgattactacaacattaccaatcagacattccctgctgtcactggtaacattttcgaggagcgtttggtcatcggacatgatgtccccaaatcagcgtcagctatgagcctgacacctgctactaaaggccacgaacctgtctacgggcaacttctcttggtaccaaacggaggctgctctgctggtgacttccctgtcaacatgactggtgccattgccttcatcaagcgtggtacctgttctttcggtgacaagtcagccaatgctggcagagctggagcagatgccgccgtcatctataacaacgctgaaggtgatctttcgggaacccttggctcgccttcgcccaaccatgtggctacttttggtatctccgccgaggaggcagctccctatgttgcaagacttcagaacggcaccaagcttgatgcgattgcctacatagatgctactgtcgacgagatcgaaactaccaacgtcattgcccaaaccacagctggtgacccagagaactgtgtcatgcttggtggccatagcgacagcgtggctcccggtcccggcatcaacgatgacggttctggaaccatttctctccttgaggttgccactcaactcacaaagtacgaggtcaacaactgtgtccgcttcgcttggtgggcaggcgaagaagaaggtctgcttggatcaacctattacgccgagaacctcagcgaggaagaaaaccagaaggtccgcctcttcatggactatggtaagtgctataataatgccttttgaggtatttctaaggattcagcgtgctaacagccccacggatatgatggcctcacccaatggggtgtaccagatctataatgccacgaacgcagaaaaccctgtcggctctggtgagctccgtattctttacgaagactggtacaaggagcaaggtttgccttacacttacattgccttcgatggcagaagtgattatgccggcttccttgacaacggtattcccagtggtggtattgctactggtgctgagggtgtcaagactgctgaggaggctgcccttttcggtggcgtggctggagcatggtacgacccttgctaccaccagctttgcgatgatatcaccaacctcaacttgactgcttgggaggtcaacaccaaggtaagtaaagctgtacaactgactgcacaaatgacgagaattaatgcattccagctcatcgctcactctgtcgccacctacgcaaagtcctttgacggcttccctaagcgcacaccggagattgaggagagatcactctcgagctcaaagaagaacaagcctcttttcaagtacaagggcaacgaccttgttatgtga

SEQ ID NO: 2025 - DNA, 1023 bp, Aureobasidium pullulans
atgaagttcactccttccttcgccctggcggcgcttacttccctggctgttgccgctcctcatgacattgtcaacaagagagctgttgcctctggccctgtcggatatgcctctaccaatggaggtaccactggtggccaaggtggagctaccactactgtctcaaccctcgcccaattcaccaaggctgctactgcaaaggagcctaccgtcgtctacatctctggcaagatcactggtaatgacaaggtcagagtttcttccgacacttccatcatcggtctgaacagcgactctgctctcgagaacatcggtctcttcgtcaacaaggtcgagaacgtcattcttcgcaacttcaagagcagcaaggttctggccaaaaacggtgatgctatcggtatccaggcctccaagaatgtttgggccgaccaccttgacctttcttccgaccttgaccacggcaaggactactatgatggtcttcttgatgtcacccacgcttccgagtgggtcaccatctccaacgtcttcttccacgaccactacaagtgtaagtctttgttcattctctgagtcttcaatgatttgctaattttgaccttgataggctcccttgtcggccactctgacaacaacgccgctgaagacactggccacctccacgtcacctacgccaacaactacttctccaacgtctcttcccgtcttccttccatccgcttcggtaccggtcacatcttcaacaactactacgagaacgttctctcttccgctgtcgacactcgtgatggtgctcaggttctcgtcgagtccaatgtcttcgtcaaggccaagaagcctgttgcctctctctactctgatgaccaaggttacgctgttgtcaaggacaatgactttggtggtgagaagaacgaggctcctgctggcactctcactaaggttccttacacctacactgctcttggtagcgccaaggtcaaggctgccgttgttggtactgctggtaacaccctcaagttctaa

SEQ ID NO: 2026 - DNA, 2226 bp, Aureobasidium pullulans
atgcgatcattacatcttttagtgtcctcggctctggcattgctggccactgctgctgagaacaccacttgctcatctgatctagaagccttgactgtagccaatattgatgacgttcgtggcaacttacaccttccgcctacggccaagagcggtctcaatgttacctggagcagtagcaatgagcccgtcgtgtcaaacgatggcattgtcagccgacagaacgccactactcaggttggcctcacagcgaccataaattgcaatggaaagccagccactcgccaattctctgcttcagtgcgtcaagcagcaaagtttggtgcattcgagggctatgcatttgcctacttcaccaacaacaccaaatctggagagaacatttattttgcagccagtaacggcaacaatgctttgtcatggaaagagctcaacggtgcacagcctgttctgaagtcgacctttggtaccactgggctccgcgatccttttatcatccgctctcacgagggtgatactttctaccttatcgcgaccgatctctccatcggttccggaacttcctggggcgactcagtcaagtttggaagtcgctacctggaagtctgggaatctcacgacctcaagacttggtcagagcaacgtcatgtcttggtttcccctgctgaagcgggtaacacctgggcccctgaggcatattatgatgaaggtattggtgcttatgtcgtcttctgggcttcttctctctacaactcaactgatgtggatcgtacgggagcgacttatcaccgcatgctctatgccacaaccagagactttgtgaatttcagcgagccccaaatctggcaagatgccggcatgtcacgtatcgactctacggtcttgaaagagggcgatacctactatcgctttaccaaggatgaaggtgctggtgagactggatgtaccgacatcattcaagagaagtcgacttcgttgagagccacgttaggttcttggactactgtcgctacttgcattggtaagaaggccggcactgcaaatgtcgaaggtcctacagctttcaaatccaatcctggagatgtgaacggtgacaacttctacctgttcgtcgacgaattcaccgggcgtggatacattcctctttcgaccaagaacatcgccagccccaactggacagtacccgcatcttacaagctccctcctagcccgagacatggaactgtcctacctatcactgctgccgagttggctagcctcaacgcaggcactgccaacacttcatcacccacagcacccacagctggaggctcgccagtactcaaaggctacttcgctgaccccaacatcgctgtcttcaaccagacctattacatctacgccaccacagacggcttccctggatggggaggccaagtcttctatgcctggagctcgcctgaccttgtgaactggacacgcagtgcagagcccttcctcaccctaaacggcaccagcggcaacgtaccatgggcaacaggcaacgcatgggctcccaccatcgccgaaaaagacggaaaatactacttctacttcagtggtcagaaccctacatacgacagaaagaccattggtgtggctatcgcagattcccccactggcccattcaccgctgagcctaccgccatgattttgaacaacgagcgcctcacgactggtcaagccatcgatgctgatgccttcctcgaccctgtcagcggaaagtggtatctcctttggggcaacagctaccctcttctcgcagaactagccgacaacatgacctcgataaaatgggacaccgcacaaaacatcaccggcctcgttgacttccgcgaaggtctcttcctcgtataccgcaaaggcctttaccacctcacctactccatcgacgacactggctccgaaaactaccgcgtcggctatgccacttccacttccatcactggaaattggacttatcatggtgttgtgctgcagaaggatgttggtcaggggatcttggctacgggacatgactccatgatcaatgtgcccggaacggacgagtggtatattgcttaccaccgtttcgcgatccctgacggtgatggcacgcatagggagacgactattgataaagtcacattcgacgaggagacgggattgatgaatgtggttgtgcctacattgagtagtgtggagcctttctctgtgcctgcgaattga

SEQ ID NO: 2027 - DNA, 1352 bp, Aureobasidium pullulans
atgtggaagaagagtgttgctattctcagcgccattgccggcctggcaatggctgctcccctacctcaggatgctgctgccgctcctgctaccaccaagtacatcatcaccctcaaggctggcattgacccggaagttggcatctctcacatcaactgggccggtgacctccaccgccgtggtatctacaagcgccaggagaatggcactgttgaggaggatttgaaggtcttcaaggttgccgacttcaacgcctacgctggttcctttgacgaggagaccattgctgagctcaaggctagcaacgaggtgagtcctgatcaactatgatacctagtcatcaattttactgattacaaacaggtcgctgttgttgaggaggatctccccatctacatgactgccattacctcacagactggcagcacctggggtcttggccgcatctcgcaacgcacctacactgccaacacctactactacgacaccactgctggtgccggtacttacggctatgtgatcgactctggtatcaacatcaaccaccaacagttcggtggtcgtgcctctcttggtagcaacttcgttggtggctctcacatcgacgacgctggtcacggtacccacgttgctggcactattgctggttccacgtacggtgttgccaagaaggccaatgtcatctccgtgaaggtcttcggtgcttctggagtaagattcttttctttcattatgtcagccacatactaacaacgccatagtccagtgccacctccaccatcatgcagggctttgaatgggctgtaaacgacatcatcaacaagggtcgtgccggcaaggccgtgatcaacatgtctctcggttctgaggactcagtctccaccgccttcaactccctcgtcaacgccgccacccaacaaggtgtcctctccgtggtcgcagccggcaacggtatcagcaacccccaaacaggtgccttcatcgaagccatcgatgcctcacgcacctcccccgcctccgcatcttcagccctcaccgtcggcgccataggcagcaacaacgcccgcgcctacttctccaacttcggcagcaccgtcgatgtcttcgctcctggccttaacgtcttgtcttcgtggatcggctccaacactgctaccaacactatctccggtacctctatggcttgcccccatgttgttggtcttgctctttacctcaagggtctggagtccggtcttaccacccctgctgccaccaccaacagaatcattgctcttgccactactggccagggcactgatctccgcactggcagccccaaccgcattgtctacaacaacagcggtcgttaa

SEQ ID NO: 2028 - DNA, 1058 bp, Aureobasidium pullulans
atgaagttcaactcgcttctttggctcagcaatctcgcgttggtgcaggcaaaccctttctggaaggatgacttttccctccaaggtttcgcaaaagataaccctctgggcgaaaccaccggtggcaaaggcggccgcacaaccaccgtgtccagcttgcccgctctccgtaccgctcttgctggcaccaatccgttgatcgtagtggccaagggctctttcaacttgaccggcgagacacgccttcggatcggcagcaacaagtccctgctcggtcacaagaacggtgcaaagttcttcggtggtggtatgtctgctgtcaatcagaccaacatcatcatccgcaacattcaaatcagctacgctttcgacaacgactgcatcacccttcaaaacaccactcgcgcatggatcgaccacaacgagttcttctcggacctcgaacacggccccgacttttacgatggccaagtcgatctcgtccgagccacagactgggtgactgtgtcctggaactatttccacgaccactggaaggtgagcacacctgtcccctgcttctccaatagacacactgacgaacatcacagtcctcactcatcggcaacagcgatgtcctccgcgaagtagacgaaggccacctccacataacctaccaccacaactactggcgcaatatcggcacccgcggcccagccggccgcttcggccaccaacacatctacaacaacctctaccgcgaccacctataccaagccatccactcacgcagcgacaaccaaatgctagtcgaaggaaacgtattccgcggaaacacgcgtgaagcggtttcaacctatggtcttgtaatcccagaagattcaccgaatacctgcgtctgtggtgattttgaaattgatggatatgtgaattttggggcgaggaatgattttgggaaggcgggggttaatgttacgcagtggggggatttcaagagggcgccttataggtatgatttgactagattgtcggatgtggagaaagttgttaccaggggtgttggtattggtaagatttga

SEQ ID NO: 2029 - DNA, 1298 bp, Aureobasidium pullulans
atgctttcttctcccatccttgcgcttgctctaagctttgtggtcgggcagtctcttgctcttcccgctgctgttgcaccacccagcaccaactacatcaactggaagaccttcaaagccaacggcgtcaacctcggtggctggcttgtccaagaatcaaccatcgataccgccttctggaatcagtattccggcggtgctcccgatgaatggggtctttgcgtcaacctgggatctcaatgcggtcccgtgctggagaagagatatgcatcttggatcacaacctccgacatcgacaaactcgccgcagcaaacataacccttcttcgcatccccaccacctatgccgcttggatcaaagttcccggcagtcagctgtactctggtaatcaactttcttttctcaaaactatatcaagctatgcaatcaacaagtacaacatgcacatcatcatcgacatccactctcttcccggcggagtaaacggcatgccttttggagaaaaagaaggaaatttcggctggttcaacaacgcgaccgccttgacttattcctatcaagccgtggatgccgccatcaacttcatccaaacctcaaactttccatcgcatttcaccctcgaacccatcaatgaacctgtggataataagaatatccaattcttcggcacacctctcgctctttctgatactggtgcagcgtgggtgacttcttacatcaaaggtgtcatttctcgtgtcgctgccgtcaactccaagattcctgttatgcttcaagatggctttaaaggtgaaacttacttctcgtcttcgtttcctgcaaccgccaatttggtctttgatatacacaattattatttcgcgggtagaggtgccacttcggccaatgaagccgcacttatctgttcggatgccaaggcctccgccggtgatggcaaattccctacttttgtcggtgaatggagtattgtaagtttctcttccccctgcgcctcttctctgatactccttccacaatttcatcctactcttactcaaggatcgagctaacaccttttctcccccgcacacagcaagcagaactcaacaacactttcacactgagagaaaagaacttactcacgggcttatacgcattcaacaaatacacctccggctctgcatattggaccgccaaattcttgggtacggctaaagtggatggtcaaggtactcagcaggattattggaattatggcacttttgttgaccttgggtacacgaagaatgtgggcaggggtgctgtgtattgtgcttga

SEQ ID NO: 2030 - DNA, 1898 bp, Aureobasidium pullulans
atgctcgcacttcttctcccgaatgtcatagctgcacctacgtccaacacggcagcatatgcaatcaaagaaagacacgctgcaccactaggctggacgaggatgtcgtctcctgccgactctcaaatcatcaaccttcaaattgctctgagacaggaaaactccgacgccctcaccaagatcgccatggaagtctctgatccatctcatccacgctacggccaacacctttccgcaaagcaagtccgtgaccttgtcgctccctcgaacgaaaccatcgatgccgtctctagctagctgctgggacaaggtatcgatactgccatactcagccccacccgagactggatcactgtggatctgcctgttcgcaaggtcgagagtctcttgaaaaccacatactctaattatcgtcacacggacagctcgacattgatgcgcacttccgaatggtcgctgcccgaatctctacatgagaatatcgacctgattcaaccgactacctccttctttcgaactgtcaagccatcaatccgtcaggatcttcaccatggtcccatgagatggcatcagggtgccgaagttctggagccgggttggaactatgtaagtttgcacatgttgaacgtttgtcaaggatcctgactgatccgctcatcgcagggctcgaatggctcagcctgcaacatcaccgacctttgcaaccgtcgtgtaacaactcttcattgtctgcgttgcttgtacggcacagcaaactacaaagctcaggcacccgagaagaacatgatcgccgtcacaaactacttgaaccaagtatgcttgtcatacatgccgcagatcacaacattgaagctaagaattatcagactcagaagcggtccgacatcagacgttacctcgagatcttccgcccgaaagcagcaccagtcgccgacaccttccccatcgtccccatcgcaaacgcttcagacaatcaagggcctctggagccaggcgagacaccgagcatcgagggtgacatggatggagagttggtcatcggaatctcttggccaacatccttcatggcattctccaccggcggatcaccacccttcctacctgacctcgccactccgaccaataccaacgagccctatctcgagtggcaaaattaccttctggcgcaagataccttaccgcaagtcatcaccacgtcgtacggcgatttcgaacaaaccataccggtcccatacatgacacgagtatgcgaaggtttcgaaaagctggccgctcgcggagtctcggtcatcttcagcagcggcgacaccggtgttggcccctccgatgcttgcatctcaaacagcaactcctcgcaatccatgttcctcccggcattcccagcgtcttgtccttgggtaacagccgttggcgccacacaggactttgagcctgaggttgctgtgtcagcttttggtagtggtgctggcttttccaatcactttgccatgccagattaccaagtcgatgctgtcaatggttatcttgaaaagataggagacatgcacactggactctacaatcgctctggccgcgcgtacccagatgtcgcagcccaaggagttcggatcgccatcgtcacagagcttcgccaaattgccggcgcaggcacaagtgcatctgcgcccatctttgcagctgtgattgcattggtcaatgatgcacgcctcgcggctggcaaacctgtactcggattcttgaatccatggatctacggtggagcctttgcggcttttactgacgtcaaagatggatcttcggtcggttgcgacacggatggtttcccagctgcagatgggtgggatgctgttaccggattcggtactccagtgagtgcaactaatccagccattgcttag

SEQ ID NO: 2031 - DNA, 1423 bp, Aureobasidium pullulans
atgatgttcagcgccttgtaccgtaagtatatccaaatttatccctgactaagcgcatcatgcaggtacaatcactgacgattttttagaaacgctgcttttcgcattcttctctgtcgcatttgcggctaatggatcctccacatacacataccagaaccaaggatcgcaggcattttctctggctctcggactcaacacaaccggcaatgaccttcattttaatatgacggctccgtcgacttactcatggttcgccttcggagttggtagtcagatgagaaactccatgatgttcattggataccccagtgcgaacggcacaggtacgaccttttacaatgaactgatcgaagctgtaaactgacatttcttccaggtgtgacattgagcccacgtctagctactggacaccaacaaccacaatattcctccgatctgaatgtcgaagtcgtcagcagttccatcaccaatggcgcatatcagctcatggctatctgcaagaactgcacaacctggtcgctcggaaccatggatactacatcaacgaaccagcctttcatctttgctcttggaccaacaggctcggccatctctagcgactctacttccgagagtatccgtcagcactccatgtacaattctttcacactggatatgcaacaagcttctttctctggctcagacacacccgctctgagtcccagcagtggcgccgtatcttccgatagtggtagtggcagtggaagctcttcctcatcttccgataccgccatgtcctccggaggcagcaacacctataacatggtgcacggtatattcatgtccatcgcctttgtgatcctcttccctctcggcgtactcgtcctccgtctcggccacagtgtcattggtcatggtatcatccaagccctagcctactgcttcgtcatcgtcggcctgggaacgggaatctatctctcccaacaagatccttcggtaagttgatcataagtaactctgtccagttttgttcatttccactgacaatgatgggtttctccagacgcgcaattataattcagctcatcagatcatcgggcttgtcctcttctcccttctcgccattcaagcactaggcggtcttctgcatcatcttctcttccgtcgcggcaagaattccatcatcggaaaagtccacatgattctcggaataggtcttcttatcctcggtatcgtcaacgcacctctcggtctcaatctcgcaggcgacagcaagtacaacaaatactacatcatcgtcgtcgctatccttggagcactcttcttggcattgagagcgtgggctgtcgtcagaaacagaaagatctcgaagagagagggcagtgagaagggagtgcttagacgtggttctagcagtgaggagggtgttgcaaatatgtag

SEQ ID NO: 2032 - DNA, 1596 bp, Aureobasidium pullulans
atgaagacaacgcaaacccgtcttgcagccgttgcggctttgacatccggagcagtagctatcacctgcgacaaagattcattgcaatctgcattttcgtcaattgctactgttgactttgcaacatggatgccggccaacagcacattcaacgttcccaaggctgacatagcctatccgactgcaccgacccagttgagagcagcatgcgctgttcaggtttcggtcaagaatggtacctccaattacggcttcggagtcttcttacctgatgagtggaatggtcgtttcctgggagtactgcttgatgtgactcgactcgcacaagctgattgatttaatagtgctgtcggcaatggtggctttgctggtggaatcaattggctggacatggtaagtctgtccgaatcgacaggtgttttgaccctgactaacatcctcgaagggcgccggcttgggttacggattcgctgtcatgtctacggatactggtcacaacagcgtcaacaacaatggcagctgggcttatcacaacgaaggcgtaattctggactggggctatcgtgctatgcacggctccacagtactgggcaagcaattgaccactgcatactactcaaacgacattctctacagttattacagcggatgctccactggcggcagtaagtcttcctgtataaatcaaaggattcacatactcatcaattgtgtttctaggacaaggccttcgtaaccttcaactcttccctgatgactttgatggtgtggttgccggagcgcctgcttggtggactaatcaccttcaaccctggacagccaaagtcggaagctataacctgcccaacacttccgtccatcacatacctcctactctcttcccagcgattggagctgaggtgatgcgccaatgcgacggcgcagacggtgtagtcgacaccatcatctccgatccagaagcatgcgactttaaccccgatctccttctgtgtacacccagcaagaacacctcatgcctgacagtgcctcaactcaacactctgcatcaaatctacagcgactacgtggataccaaccagacttttgtcttccctcacctttggatgggtagtgaagctcaatgggtacctctgctcggtttgaacgcacccaacaatctcggaccccactatgttcaatacttcctccaacgcggccccgaatggcaatggcaagatttcgattacggcgtcatccaacaagccgatgctcaagatcccggaaacgccactgctgatgattttgatctttctcctttcatggaaagaggtggcaaacttctccactaccacggcatgggcgatggcttgatcccaaccggcagctctgtctacttacactcgcaaatcttccgcactctcgctcccaaaggtgtggatctcgattccttctaccgtttcttcctcgtccctggtatgcaacattgcaccaacactgcaaccactgtaaacgcgccttggtatttcgccggcgccaaccaagcagcaaccctctcatcttctgtctcgggcgtacctggtttcagagatgccaaacatgatgttctgcttgccatga

SEQ ID NO: 2033 - DNA, 1266 bp, Aureobasidium pullulans
atgtcgatccgacgaacctctgccctcagccttgtggctatgggtgctgccggtgtatctgccttcactgcctccaacgcaggcgtcaagaatgggtgtttctggaatgttgacggacttggttccttcaacactcagtggtcggttgcagagttcacaaccagcaccctgagcagtgttcaagacgaactatccgcctcgtcatacacagttgaggctggcaattcaccactagcacgaagattcgatatcaccaacattggtatctcctctgacaatgccttgaccttgaccgttcccggaggacagtccaccggtcccatttcatccgctcagatcaccactgccgtaggttttttatcctcgcaccaccatttacacgatattgaccaatatcacagtacagtgacatcctcttcggcagtgtccggacagtggcaatggtcagcggcgcggcaggaacgacccacggatttaccttctacgcaaacgataatcaagaagtcgactttgccttcctcagttccgacccatcggtcgttcatctcacaaacgaacaagtcaacagcacgtcacctttttcgacgtacactgtttcagctccttccgatgcaacaagttcttaccacgaataccgtcttgactggactaccgatgctacgagattctatatcgacggtactttggttcatacgatcactgaaaatgttcccagtcagcaaggcttctggttatggtagattatgagctatgttattgaataagaaaagcatatctaactgaaataacaggaactcatggtcaaacggtaacgcttgggctcaaggacctcccgccacaaactctgtcctcaagatcaaaagcattgatgcatacttcaaccgcacctccgtcatccccagcggatcctgcctctcctcctcttccaacaataatgccgccgctgccgcttcctccacatcaacaaccccttcctacactcccgcccccaccgccaccaacaccaaactctgccccaaatacgacggcacagtctacacagccaccaacggcgatctcttcgaaatcgcctgcggtacagactttgcaggcggcgacttcaaaatggtctgggtgaattccatgggcgcttgtattgaagcttgctcttctactgaggggtgtgtggatgttagtatgagtggaactgcttgttacatgaagaacaagttgaagaatgcgttgaagaattctggtgtcaatggtgcgaagaagatttcagcttga

SEQ ID NO: 2034 - DNA, 1185 bp, Aureobasidium pullulans
atgttcttcaacacaattgccctcaccactgccttgctggccggatctagcatggctgagattatctgggatggtcgtttcaccgagacctctgctgcagagattggaaagtggtcttgggagaatcaagtcggcgcttaccagtactacatccacggatctggtgcaaccaccgactacgtcaacatcagccccgactatgtcaaccctgccgacaagtcctcctcggacggtgctcgtatcactgttgacggcacctcttcatggaacggccaaaccatgatgcgcaccgagctgatcccttccaccaaggccgccatcaacaagggcaagaaattctaccacttcagtcttaagcgtgctgctgagaatgcacccgacgctactgccgagcaccaagtcgccttcttcgaatcccactttaccgagctgaagtacggtgttgacggcagcgatggcaagctccaatggatgaccgatggcaaatctcaattcgacatggactttgacgccgatgtgtggcacaacgtcgcctatggtatcgacttcgacgccaagactgtggaattctaccactccactggcgctgatgagctggtttccaaggcagggcctttgagtgctgctgttgcttctgacggtgctgattggcatgttggcgtgttgaaattttctcagacaaaggaggactggttcttcagcagtgtttacattgaggatggcgagcttactacttctgtctctggacctggtggcgatgccgcaactccttccaaggcgtcttcggctgttgctgagtcgtctgttgctcctgctactacgtcttctgctgctcctgcttcttcgtcgtccgctgctgctatttcttctcaggctgctgttgtggagaccacttcttccgctgcacctgctgagactactccttccgctgctccttcatccgtcgctgcaccttcatctgtcgctgcaccttcatctgtcgctgccgtctccagctcctccagcgctgctcctactactctgcagattatggtccgccccaccagcctcaactcgagcgtcgctgctgccgaggccactgttgtagctagctcttcgacggtcgctgctatttcgacatctgcaagcgaagctgctccttcttccaccgatgatggttgttctgttgaatacgtttacgtttag

SEQ ID NO: 2035 - DNA, 2164 bp, Aureobasidium pullulans
atgttgctcaaaaactctgccttgttgttaggcgcgttgctggcttcgtccgccgtagcccaattcccgccgaagcctgaggacgtcaagactgtgaagtcgaagttccatcaaggtattgagatatcgtacaaggaggttgatgtatgtatgcacccatgtcgaccccaatggattttgtcaattggccacttcgcatattctacaagtacacaaatgctaatacttcctctagcccaccgtttgcgagactaccgaaggtgttcgcagtttttctggatatgttcatctcccaccccacagcatcaacgagacccatgagagacaggattatcctatcaacacgtaagatcgactccggaatgtaacatataccatgtactcacacaacatagcttcttctggttcttcgagtcccgcaaggacccccacaaggcacccctgtcgatttggctcaatggtggacccggaggtagttccatgatgggagcactctcagaaaatggcccctgtttcgtcaacagcgatagcaatagtacccacctcaacccgtggtcgtggaacaacgaggtaagagatacggccggcaggcttaaaagcacactgctaacgacacgaaaaaggtcaacattctgtacatcgaccagcctaaccaggtcggctattcatacgacgtcctcaccaacatcactgtcaatctacttgccgataatgagggccccgatgccatcaaacttggcgatttcagcgaaggtgttcccgaccagaacgctactttcttgattggaacttctagtagccagaacatctcggctactgccaacagcacgcagcacgcggctgtggctttttggcactttgcccagacttggtttgaggagttccctcaatacaaacctcatgatgagaagatttctctattcacagagtcttacggtggaaggtaagctcactcagactcagcctttatacgaaagcctgaagctaacatcctatctaaaggtatggccctacctttgtcaagaaattcatgacccagaacgaattaattgccaacggatcaatctctggccccggcacgcactacctccgtctcgacactttgggtctaatcaacggatgcatcgacgccgaagatgccgcttctgcttatgtcgagttccccatcgccaacacctacggcatccaaggtttcaccgaagaacagtacttcaaagccaaatacgaatacattcgcaaagacggcttgcgcgaccagatccgcgaatgccgcagattgcaactcgaaaccgatcccaacgactacggcgatgtggaaaacacaaacacttactgctacaaagcagccgaaaacctaggaaatctgaccatcgccgcatatgtagaaagtcagaaatgcggctggttcgacataacacaccaaggcaccgatcccttcccttccacctacctcatgggatatttgaaccaacaatgggtgcaacaagccctaggtgtacccgtaaatttcaccgccgtatccccagcggtatacgaagctttcacgcacacgggcgatatttccaaaggcggactcctggatgatctggcttatatcctcgacaacggcgtcaaagttgcaatgatgtacggagaccgcgattacgcctgcaattggctcggcggcgaacaatcatccctgcacatcccatggtccaacgcctcctccttcgcctcggccggctatacccctctagtgctatctcccttttcctcaggcgggctcgtcagacaattcggtaatctcagcttcaccagggtctatcaagctggtcatctggtccctagttatcaaccgcaagccgcatatgagattttcatgcgcagtttgttcaatagggatgtcgctactggcgaaatcgccgtttctgcggattatgggactgaagggagagaggatggttggacgcctagtgatgtgttgcccaagccggagaatgaatgttatgtgctcaaccccggttcttgcagtgaagaggagcaaggatggctcaaagatggtagtgctattgtcaagaattggattctggttggaagggagaagggtgggaagagaggtggacgtggtcatggagaacaaggttcgcaaaccgtgttggcggaggagggtatatatgagctttag

SEQ ID NO: 2036 - DNA, 1827 bp, Aureobasidium pullulans
atgtggtcttatctactgctcactttgtttgccgtccaaattcacgcgatatggccaataccgtcgagctcgtctatgggagaagatgccttgttcttggaccgcaacgtcaagttcatctataatggtgccgcacaggtagcagcgccccagccagagcagataccgttcgaacatgaccctaacaacttctcctcgcagtacggaacctacggccaaaagaacgcttcgtcacagaagataatctcgactgctatcaagacgactacccagacactgttcgaacagaacttcgtcccatggaaattccatcctcgtcactccgatttcgaacctgcgatgaatgcttcatgcacctatatcaaattaatccatctcgaacagactgatagcgatccggcaaacgtaacaaagcctttggccggcgatgtcgacgagtcatactcgctgtccataacaagtgagggccaagccaccatcagcgcggcttcttcggtcggtatcgctcacggtctgacaaccttcacccaattgttctacaaacattccagcggatccgtgtacacaccgtatgctccagtaaatatcacagatgctccaaagttccagcaccgaggccttaatatggatgtctctcgaacatggtacgcgcctgctgatattactcgaatgattgatgccctggcatacaataagttcaaccgtctgcatcttcatgtcacggatgcccagtcttggccacttgagattccagcactgcctcttcttgccgaaaagggctcataccgggaaggattgacatacagtccgtcgacgatggcacacattcaggactatggtgcctctcgaggtgtcgaagtgatcctcgagattgatatgccaggccacacttcatccattgcctactcttatccagaattgattgctgctttcaacgagaaagactggtcgacatacgctgctgagccgccatctggaaccttgaagttgaactcctcagctgtgaccgatttcctggacacacttttcgacgatctgctgcctcgagttctgccatactcttcgtacttccataccggcggtgatgaagtcaatgtcaatgcctataacctagatgatacggtgagatcgaatgacactgcgatcctccagccattgatgcaggcctttgtcgatagagctcacgacaaggtgcgagctgctggactcacacccatcgcgtgggaagaaatgctcttgacctggaacttgacactgggacctgacgttattgttcagacctggcagagcgacgaagctgttgcacagaccgtcagcaaaggtcacaaagcgcttgttggcaactacaattactgggtaagtatctccggcttcaagagacgctaaagcctcaagctaaccgacgattgttagtatctggactgtggtcatggtcagtggcttgacttttacccagaggtcgctcagaactactaccccttctatgactactgcgcgccactacacaattggagaatgatgtatgcgtacgacccgctgagtggcgtgcctgcaaacctgacacacctcgtcctgggtggagaagtgcacatctggagtgagcaaaccgaccctgtgaacgttgatagacaggtgtggccacgtgcctgtgcagccgccgaggttctctggagtggcgccaaagatgagcaaggacagaatcgcagtcagatcacggcaagtccaagattgagcgagatgcgggagcgtttggttgcgagaggtgttggcgccgagcccattcagatgcctttctgtactcagaatggcacccaatgcgctctgtga

SEQ ID NO: 2037 - DNA, 1260 bp, Aureobasidium pullulans
atgtctcctctatcaacatcaaggatcttacttctggcgcaactgcccttcctggtcgaatgtcacctcaagctcaacaaacccgtgccttactccaaaagcactctgcagcttgatcctctcaagaatgctctacctggcaccgagcaatcagactttccttgccaatccaagcgcatcggcggcgctgatccgttcatagtcgaccaagagaatgaactgacagctggcgagcctcaagtcatgaccttcgacggatccgcatctcacggcggaggttcttgtcagctgagcgtcaccctcgacagacgacctaccgccgaaagcacattcaaaacaatcgccagctggattggcggctgtcccatcgacaatgccaacggcggcacagatccctggaactacaccattccaccagaagtccccaacggtcaagccactctagcctggagctgggtgtcgaagctgagcggacaacctgagttctacatgaactgcgcacccatcacagtctccggcggcgcagaagacacaaccgagttcgaccagctcgaagacatgttcagagtcaacttgccaagctcgcaatgcggcagtcaactcagtagcaatcttgagatccccaatcctggcaaatatgtcacaactctcgatagacaagccctcgcacccccgactggaagtggttgtgctgccatgagccaagcaaccgcgactggaagcaatactggaagtgctacaagctcgcaaagctccacagtcacctcggcatccacgatctcaacacctgtgccatcgtccatcaacaccaccaccactacatcctcatcatcagtcgcaactacatccatccctccagcacctacacctacgaccagcacaatcccacccccatacaccaacagcacatcctgcaccacaaacggcctcctcctctgcaacggccccacccaattcggcctctgcaacttcaacaccgtaatctggcaaccagtagcccccggtacaatctgctcctccaatcaaatcatcgcctctacaaactcctccgccaactcctccgatacctcgacctgcagcccagatggctcattggtctgcaatggctccgatgaattcggtatctgcaacttcggacatgttgcgtttggctctgttgcggctggtacgacttgtgtggatggtcaggtgttgaggaagagacatttgggcttgcacaagagaagggagttgggtcatcgtcgcggtgggagatattga

SEQ ID NO: 2038 - DNA, 1767 bp, Aureobasidium pullulans
atggctccttacgctgcaatcctgcagctctccctgctgggtctcgctagccaggtctctgctgctgccattgaacctagagcttctactccctatgctcctgtctccgcaagctgccccagcactcctcttgtccgtactgccaatggtctcggctcgtcggaagctgcatacatcgcagcccgcaaacccaaagctgatgccgctcttgctgcttggttgcagaagaccgactcttctttcgccactactgacctccctactgtcggtttggtcctgagtggaggtggttaccgtgctctgctttctggtgccggtcttatccaaggtctggattctcgtgactcttctctatctaccagtggtctttatcaggccatgacttacgagacgtctctttccggtggtgcatggttcagcacgtcttggactggattgaactggcccaccgtctcttatctgagagacaacctgtggtctgaatcttttgccgattcgcttcttgtgccagcacgtcttctttccgccgttgcatatgctgagattgtatgtcgcaatcatttctttattgagcccttgtcttttgtctaacaatcattctaggtcaaggatatcgtagacaaggccaaggctggcttccagcccactcttatcgacgtttacggcagactgctctcctaccagcttttaagcaccaactctcaggatatcctgaccgatggtgccgtatccaagaccttttctagcgtggcttcatcttccaactttaccaaccacgctgttccttaccccatcatcaccgccagaggtgtgaacacctttgaaggagaatgcattcctcgtgaaaatggaacacaatacgaattcgtaagatttcttctattgtgaattactcaaacaagctcctaactccgtatactacagactccccacgagttcggctcttgggattccgatgtgaacgcattcacccaaaccgcttacctcgggtccaaactcacaaacggagctcccaccgtatcaggcaaatgcatcaaaaactacgacaacatcggttacgtagcaggcacctcctccgccctcttcaacaactactgcaccgccctccccgcaaaaaacaacacacagtcactcgctcaaacccttcaagccatcatcctcaacgcccacagcccggtcaccagagatctctacgctccctaccctaatcctttctacaagtaccctgcctctacgctcacgaatgctcaaacggagatccagatcgtagacggaggagaaggaaattccgcaatgccattctggccactcatccaaccggaaagaaacgtcgatgtcataatcgccgccgacaatggcgcagacaccgccgatgatttcccctccggcaccgccattgtaaccgcataccaacaagcgcaactccaaggactatcccgcatgccttttatcccctctttgaaccaatttgtcgctcaagggttgaacaaacatgccgttttcttcggctgcgacactgcggaaacagcgactattgtgtatctgccgaataacaattacacatatgcttccaacatcgatactgtgattatacagacttctgagcaacagacggctggtattatcgcgaatggaaatgccatcgctacgcagaatggagaggatgggtgggcgacttgtttgggatgtgcggttatgaagaaaactggctctgttttgcctcaggcttgtaccgcttgttttgacaaatactgttataagcaatag

SEQ ID NO: 2039 - DNA, 1465 bp, Aureobasidium pullulans
atgtttgtcaacattcctagtgtgctttcgctcggtcttctctgcggcagtgtagtcgccgcacccaagaaatgtcctaaaggtttcgtgacaactaccggcacgaaattccaacttgatggcaaggacttttacttcgcaggcacgaatgcctactacttcccattcgacaacgtacgtctctggtgtgctgatctctctccatggtacatcgatgactgataccctgcacagaaccagacagatgtcgagcttggtctcacggctggcaaaaaagcaggtcttcctgtcttccgcacttggggcttcaacgacaagaatgcaacatatgttactggcggattgcctcaatatggagccgaaggtgccgggaccactgaagtcgtcttccagagatgggcaaatggtaaatctaccatcgatgtcacacctttcgataaagtcgtcaatgcagcaacgaaggtcggcagcaagttgattgtgcccctgactaacaattgggccgactatggtggtatggatgtgtacaccgtcaatcttggtggcaagtatcacgacgatgtgggtaacgatgtcccaactttgacgacatgtttcgtattgacatactcatagttctaccgcgatcccaagatcaaggcagcattcaaacgctacgtcaaagccatggtcacacggtacaagaactctcccgctatcatggcctgggaactcgccaacgaaccccgctgcgccggcgacgccgtccgcaaccttcccagctccggcaactgtacagccgccctcctcacctcctggaccgacgaaatgagtacatacatcagaagcctagatccctaccacctgatcacctggggcggcgaaggcggcttcaacgaccccagcgatgcagactgggcatacaatggttctgatggtggtgactttgacgccactatcgctttgcagaatatcgattttggagtgttccatacttatcctgattggtggagtaagacggttgagtgggcgaatcagtggatcagggatcatgctgcttcgggtaggaaagctggaaagcctgttgttcatgaggaatatggtaatcttttcctcttcttctgatcctccttctggtgaaccaaaaactgacaaggacacttctaggttggttgaccgccgccgcacgactgcaatatctcaacaaaaccgcagctgccaatgaaaccagagttgccgtcattggtggttggcagaaaatctcgctggaggaaaagatgagtgacatgtactggcaattcggctactcgaactactcttacggtcgcaacaacaatgatggctttacgatttaccttgacgagtgagttcgctgcgaagatcgaaaatgcttgatgcgaatactgattctgatatccgcagtgctgaagccaaacctcttgtttacgaacacgcgaaagctgttgcagctctgaatcgccgatag

SEQ ID NO: 2040 - DNA, 1848 bp, Aureobasidium pullulans
atgaagtattctgcagttactcttggcctgttgctggccggcacgtctcacgcaaagcaatatggctttctcaaggacaatggcaatggctcttggatcattggaaacgatgtctggaacatgactcaagaacgtatctatggttccaagttgtactacaaggatcaagaacttgtcggcgaagctactggtcactacgtcagttacagtgagttgctttcaagctgggctttgatgccttctgactgatatccacattagatggagcagccagcaaccttgcgtggacaagtgcaaagattgtcaagactggaagcaactacatcgatgtccagttcgacgccactgaaggcgagatgcattgggtcatcttcaacggtctcgctggcgcatatcaatactttgtcaaccgtgctctgccagtcctaggagagttccgcacgctctggagactggacaatgaaactttcaccagtgcttacaatgcagacaaggatggggttctgcctccattgtccgaatacgccatctcgaccaagatccaggatgagacttggaaaacaccggaaggtaattatctgaccaagtatgattggtctggtaacgtcagggagcaagagtactggggtgtgtatggtgataactttggcagttggtatctggtaagtacttcttcccctttccttcagcctggtcgaatctgacatgagcagcaccccggcaaggattacttcaatggtgatcatctgaaacaagagttgatggtaagggatacgccgtttctctccatctcaggcatatacttatatcatacagaaccaccgcgaatcagcgaccggagatgcagtccaactcaacatgatccacggcacccacttccaagctctgtccaacgatgtcctccccaatggcaaaatctggggaccctggctctggtacctcaacgatggaacaaaagcagatgtcgaccgccgctacaacaacgagatcaactcttggccctacaaatggctcgacgacgcagcatacaattcccgcgtcgcttccgtgacaggaaaactcctcctctccgatggcagacctgctgcaggcgctgctgtattcctcggcgacaatcaccccaacaagacaactttggatatgggcagtgattactactacaccacctacgccgacaacgacggttctttccgcttcacagacgtccgtactggactttatgcccttcaagcgtggtcaaacggcggcagtattggcgatgtcaccaccacatttctcagaaacgacgtcgatgtttctggctctgcgactagtaaaacccgtctggataaattgacatggtctgttcctacctcaaacacgatcttccaagtcggcgacttcgacagaaaatccactggtttcgctttctctggaggctttggagccggacgcgtggacaagtgtcccgctaatctgacttataccgtcggaagcagtaaaaccgcagattggtgttttgcccaaaacgcaaagggaacttacagtattgcttttcctctgccggtttcgaacaccaccacttctgacgcgcttttgacggtcagtttggctggatattctcaaggcaccactgttaatatctttgctaatgacgtgagaattgggaatctgagcagtagtggtatcttgagtgatcctagtttgtatcgttctggcactgtggctggagagtggcatcagttcgaattccctatcaacgggagtgctttgaaggcgagtaataagattgatttcagggttacgagtttatcgaccagtttgtggaggggaccgatttatgatgctattaagttggagtggatttag

(The sequence listing continues in the following parts.)

1. An isolated polypeptide which is:
(a) a polypeptide comprising the amino acid sequence of any one of SEQ ID NOs: 571-855, 1468-1773, or 2548-2934;
(b) a polypeptide comprising an amino acid sequence having at least 60%, at least 65%, at least 70%, at least 75%, at least 80%, at least 85%, at least 90%, at least 91%, at least 92%, at least 93%, at least 94%, at least 95%, at least 96%, at least 97%, at least 98%, or at least 99% amino acid sequence identity to the polypeptide defined in (a);
(c) a polypeptide comprising an amino acid sequence encoded by the nucleic acid sequence of any one of SEQ ID NOs: 286-570, 1162-1467, or 2161-2547;
(d) a polypeptide comprising an amino acid sequence encoded by any one of the exonic nucleic acid sequences corresponding to the positions as defined in Tables 2A-2C;
(e) a polypeptide comprising an amino acid sequence encoded by a polynucleotide molecule that hybridizes under medium-high stringency conditions, high stringency conditions, or very high stringency conditions with the full-length complement of a polynucleotide molecule comprising the nucleic acid sequence defined in (c) or (d);
(f) a polypeptide comprising an amino acid sequence encoded by a polynucleotide molecule having at least 60%, at least 65%, at least 70%, at least 75%, at least 80%, at least 85%, at least 90%, at least 91%, at least 92%, at least 93%, at least 94%, at least 95%, at least 96%, at least 97%, at least 98%, or at least 99% nucleic acid sequence identity to a polynucleotide comprising the nucleic acid sequence defined in (c) or (d);
(g) a functional variant of the polypeptide defined in (a) comprising a substitution, deletion, and/or insertion at one or more residues; or
(h) a functional fragment of the polypeptide of any one of (a) to (g).

2. The isolated polypeptide of claim 1, wherein said polypeptide has a corresponding function and/or protein activity according to Tables 1A-1C.

3. The isolated polypeptide of claim 1 or 2 comprising or consisting of the amino acid sequence of any one of SEQ ID NOs: 571-855, 1468-1773, or 2548-2934.

4. The isolated polypeptide of any one of claims 1 to 3, wherein said polypeptide is a recombinant polypeptide.

5. The isolated polypeptide of any one of claims 1 to 4 obtainable from a fungus.

6. The isolated polypeptide of any one of claims 1 to 5, wherein said fungus is from the genus Scytalidium, Myriococcum, or Aureobasidium.

7. The isolated polypeptide of any one of claims 1 to 6, wherein said fungus is Scytalidium thermophilum, Myriococcum thermophilum, or Aureobasidium pullulans.

8. An antibody that specifically binds to the isolated polypeptide of any one of claims 1 to 7.

9. An isolated polynucleotide molecule encoding the polypeptide of any one of claims 1 to 7.

10. An isolated polynucleotide molecule which is:
(a) a polynucleotide molecule comprising a nucleic acid sequence encoding the polypeptide of any one of SEQ ID NOs: 571-855, 1468-1773, or 2548-2934;
(b) a polynucleotide molecule comprising the nucleic acid sequence of any one of SEQ ID NOs: 1-285, 856-1161, or 1774-2160;
(c) a polynucleotide molecule comprising the nucleic acid sequence of any one of SEQ ID NOs: 286-570, 1162-1467, or 2161-2547;
(d) a polynucleotide molecule comprising any one of the exonic nucleic acid sequences corresponding to the positions as defined in Tables 2A-2C;
(e) a polynucleotide molecule comprising a nucleic acid sequence having at least 60%, at least 65%, at least 70%, at least 75%, at least 80%, at least 85%, at least 90%, at least 91%, at least 92%, at least 93%, at least 94%, at least 95%, at least 96%, at least 97%, at least 98%, or at least 99% nucleic acid sequence identity to any one of the polynucleotide molecules defined in (a) to (d); or
(f) a polynucleotide molecule that hybridizes under medium-high stringency conditions, high stringency conditions, or very high stringency conditions with the full-length complement of any one of the polynucleotide molecules defined in (a) to (e).

11. The isolated polynucleotide molecule of claim 9 or 10 obtainable from a fungus.

12. The isolated polynucleotide molecule of claim 11, wherein said fungus is from the genus Scytalidium, Myriococcum, or Aureobasidium.

13. The isolated polynucleotide molecule of claim 12, wherein said fungus is Scytalidium thermophilum, Myriococcum thermophilum, or Aureobasidium pullulans.

14. A vector comprising a polynucleotide molecule as defined in any one of claims 9 to 13.

15. The vector of claim 14 further comprising a regulatory sequence operatively linked to said polynucleotide molecule for expression of same in a suitable host cell.

16. The vector of claim 15, wherein said suitable host cell is a bacterial cell.

17. The vector of claim 15, wherein said suitable host cell is a fungal cell.

18. The vector of claim 17, wherein said fungal cell is a filamentous fungal cell.

19. A recombinant host cell comprising the polynucleotide molecule as defined in any one of claims 9 to 13, or a vector as defined in any one of claims 14 to 18.

20. The recombinant host cell of claim 19, wherein said cell is a bacterial cell.

21. The recombinant host cell of claim 19, wherein said cell is a fungal cell.

22. The recombinant host cell of claim 21, wherein said fungal cell is a filamentous fungal cell.

23. A polypeptide obtainable by expressing the polynucleotide molecule of any one of claims 9 to 13, or the vector of any one of claims 14 to 18 in a suitable host cell.

24. A composition comprising the polypeptide of any one of claim 1 to 7 or 23, or the recombinant host cell of any one of claims 19 to 22.

25. The composition of claim 24 further comprising a suitable carrier.

26. The composition of claim 24 or 25 further comprising a substrate of said polypeptide.

27. The composition of claim 26, wherein said substrate is biomass.

28. A method for producing the polypeptide of any one of claim 1 to 7 or 23, said method comprising:
(a) culturing a strain comprising the polynucleotide molecule of any one of claims 9 to 13 or the vector of any one of claims 14 to 18 under conditions conducive for the production of said polypeptide; and
(b) recovering said polypeptide.

29. The method of claim 28, wherein said strain is a bacterial strain.

30. The method of claim 28, wherein said strain is a fungal strain.

31. The method of claim 30, wherein said fungal strain is a filamentous fungal strain.

32. A method for producing the polypeptide of any one of claim 1 to 7 or 23, said method comprising:
(a) culturing the recombinant host cell of any one of claims 19 to 22 under conditions conducive for the production of said polypeptide; and
(b) recovering said polypeptide.

33. A method for preparing a food product, said method comprising incorporating the polypeptide of any one of claim 1 to 7 or 23 during preparation of said food product.

34. The method of claim 33, wherein said food product is a bakery product.

35. Use of the polypeptide of any one of claim 1 to 7 or 23 for the preparation or processing of a food product.

36. The use of claim 33, wherein said food product is a bakery product.

37. The polypeptide of any one of claim 1 to 7 or 23 for use in the preparation or processing of a food product.

38. The polypeptide of claim 37, wherein said food product is a bakery product.

39. Use of the polypeptide of any one of claim 1 to 7 or 23 for the preparation of animal feed.

40. Use of the polypeptide of any one of claim 1 to 7 or 23 for increasing digestion or absorption of animal feed.

41. The use of claim 39 or 40, wherein said animal feed is a cereal-based feed.

42. The polypeptide of any one of claim 1 to 7 or 23 for the preparation of animal feed, or for increasing digestion or absorption of animal feed.

43. The polypeptide of claim 42, wherein said animal feed is a cereal-based feed.

44. Use of the polypeptide of any one of claim 1 to 7 or 23 for the production or processing of kraft pulp or paper.

45. The use of claim 44, wherein said processing comprises prebleaching.

46. The use of claim 44, wherein said processing comprises de-inking.

47. The polypeptide of any one of claim 1 to 7 or 23 for the production or processing of kraft pulp or paper.

48. The polypeptide of claim 47, wherein said processing comprises prebleaching or de-inking.

49. Use of the polypeptide of any one of claim 1 to 7 or 23 for processing lignin.

50. The polypeptide of any one of claim 1 to 7 or 23 for processing lignin.

51. Use of the polypeptide of any one of claim 1 to 7 or 23 for producing ethanol.

52. The polypeptide of any one of claim 1 to 7 or 23 for producing ethanol.

53. The use of any one of claims 35, 36, 40, 41, 44 to 46, 49 and 51 in conjunction with cellulose or a cellulase.

54. Use of the polypeptide of any one of claim 1 to 7 or 23 for treating textiles or dyed textiles.

55. The polypeptide of any one of claim 1 to 7 or 23 for treating textiles or dyed textiles.

56. Use of the polypeptide of any one of claim 1 to 7 or 23 for degrading biomass or pretreated biomass.

57. The polypeptide of any one of claim 1 to 7 or 23 for degrading biomass or pretreated biomass.
